United States Patent Application Publication US 2007/0067865 A1 - sequence listing, part 67

SEQ ID NO: 430539 - DNA, 495 bp, Oryza sativa
ggtgaaaaggagaaaattacttcctcttgggtgatgttttgctctcgaattgttaaatttagatacaacacataattgaccagtaagttgatgtcctgctaaatgaaaggatcaatgctactgtgcaagaaatgcaagatgaattggttggttcacctctagatagtttcaaccaacgagaaaatgaagaattataataacagtttaaagagaaagatatttaggtgccaaacttccagagttaaacagattatttcacctgacaggactcctcctagcatgttgctggcaaaaaattgctcatgtagacttgtgcgagcatttcaccaagctttacttgtgattcagtggtaagatgcagatgatcttcatttaatgacagtccaaatgcgtccacagttacaacattgggcaggttgataccaagctgagctttcctcactttttcaatgttctttttattcccagatgcaagagcaacctggatgaatggca

SEQ ID NO: 430540 - DNA, 327 bp, Oryza sativa
aaagggcaaaaaaagcggatcccctttttgggggggctttttgggggacatttttgggggggcccccccttctaaaaggggtttggttccccccggggaacccggacccaaagggggaaaaaccggggaaaaggaaccaaattttttttggggccaagggcctccctagggggaaacaagggtaggaaaacccccattggtcaagcaaataatttttcccaaactttgggcccaggggcctttaaaaaattgggggggtggcccggaaaaacaattgggcccctaaaaaaaaccaacgggccccttaaggttaagggttaaaagggc

SEQ ID NO: 430541 - DNA, 693 bp, Oryza sativa
ccctatatataatttttatattggaaaaaatatttaattttataaaaaatgaataaaaaaaaataaataaatataaaaatataaattataaaaaaaaatataaaaataaaaaaattataataaaaaaaaaaaaaaaaaaaaaaaaaaaaaaaaaataaaaagagggaaaataaaaaaaaccaaaaaaaaaaaaaaatttagtaaaaaaaaaacaaaaataaaaaaaaaaaaaaatttaaaaaaactaaaaaaaaaaaataaaaaaaaaaaaaaaaaaaaaaaaaaaaatattggatgaaaaaaaaaataaaaaaacatttattttaaaaaaaaaatatattttttcaaaaaaaaaaagagaaaaaaaaactaataaaaaaaaagattttaaaatataaaaaaaaaaatatttatcttaaaaaaaaaactctttaggattactcaaaagaaaaaaaaaaaaaaaaaacccatatattaaaaaaaaaaaaaaataaaaaaaagagggtctatttaaaaaaaaaaaaaaaaatatcaaaaaaaaaaaaataaagtaaggggagggtgtttaaaaaaaaaaaaataagcaggggggagaaaaaaaaaaacactattaataaaaaaaaaataaaaaacaaaaaaaaaaaaatatttaaaaaaaaaaaaaaaaaggttttatttttatttttaggaagg

SEQ ID NO: 430542 - DNA, 131 bp, Oryza sativa
attgattaattacaattttttttttttatttttttccaaacaacagggcccaaacaaagaacggctatggggggcaaaaacccccggcccaaaaaaaaaattttcccccacaaacaaaaacaggagggggg

SEQ ID NO: 430543 - DNA, 343 bp, Oryza sativa
aatggtacaaaaacaaattaggttggccatattcattttttgcaagagaccagtgaattaagaacattgtgattacaacgagatcgagtaacaatttatcaaatcctttattttcgtgttatctagcatgggggaactgacatatatactttgacatgacaaagatgtcctgatggatgcaagcttagtgagactgaaatctttaatgctgaaacttgtcatacagctgctactttggcaatgcatacagccaatggggaaatctggtggattctggtttcagtgacccttaaagaagtcgaccatcggtccgtatatgagttctggagcattgtaagccatg

SEQ ID NO: 430544 - DNA, 257 bp, Oryza sativa
gatctcatgctacagatttcacccacatttattcagttaaaacaaaattagggccacgtctagtaagttcaaaggaaatcctgcacctttgaacacatacaaaatgcatctcttcagacaggagatgagattaattacaacattacactgaagcttccagctcagtcagcaatgtacactactagttacacttacggcttcattcattcagtagttcagtgcttgctagaatatatttgtagcctttgtcctataaa

SEQ ID NO: 430545 - DNA, 469 bp, Oryza sativa
acattacgactgaagtactgaactatcattgcaaacagaggatgagaatgcacaattttgttctatccaacaggagcccagcaaagtgattgcgtcaaaagggcatctaaattaagcactaaccgtttaaccgtccttgaacaaggatacgttacaagtgggattaatgccgatctttactagaatataccaccaggtagctacatcgctgatgcgcgggcttgacatgaaaatacccatcgaattggagtgcatttctgagggagagctcgtcagatccacaatgacattgccgtagtggggaggccagtaggcatctttacatcagaacctctgattgacaggaaagtgagaactgatttcttctgaaactggggtaggaccttccacttttttctgggttggggtggaaccttccacttcttttttagctggggttgaaactttcgctttttttgtagctggggtt

SEQ ID NO: 430546 - DNA, 374 bp, Oryza sativa
aaacctgggggagggggggcacattttgggcattcaaaacatcccaacaaacatgttgactgtattcatgaactctacaatctacagccgtctgaacaaattttttatccacaaatagaatttctcctgtttcgcctgtccaactaggaccaagtgtggaagaagacatcctgactcctgagaaagggaacattctgtaacctctggaaggctttgaagcagcttcatttgggggccttagtctcagaccatccagtttgcaaaactgacatgtaaatacactactgccgcaagcaggttgggaagaaaaaggcatgatgcttaccatataggaactttaacatttgcaaaacgaagattgagggccctcaatt

SEQ ID NO: 430547 - DNA, 407 bp, Oryza sativa
cgggtaaataacagacatgaaatcttcatataatagtatgaatgcaaatgtttgtttaattccagccgtggacatgttatgtacagtcgtagcaaaaataggtgccgaatatgtatgtacaagacgcagagcaaggagccttcagaactagctagctggagtgaactggagcaaaatgccgatgaaaattacaccggtttcagaccatatgtcagtcccttgatcccttctgcaggagcgggatgatcatgcgtccaagtctctgtttgacctccacattgggccctcagtcacaacaccatctgcaactttagctgacccgttctgtactaggagaagagtccctgcttcaccttctttcacctgccaggttgataagcaaggcggattaccgatgggggagaagc

SEQ ID NO: 430548 - DNA, 181 bp, Oryza sativa
aataataaatatacttattttaaattttttaataaattaacaaattaaaaaaaaaaaaaaaaaaaagcttaaacaaaaaaaaaggagatcaaaaaaaaaaaacaaaaaagggggaacaaaaaaaaaaaaggagggaggacaaaaaaaataatcaacacacacggaaaaacaaagaaagggg

SEQ ID NO: 430549 - DNA, 408 bp, Oryza sativa
agcacagctcaaactcaatatatacaatttcgacatcgttcttttggtcctggaaatacataggagaaacacatgtttttgtttcaaacaaagaaaatggtaaaggtaataatgtatttacagcgccaatatagttcacattagcaatccccccaaaaaaatcagaatattgaggtgagtgatggtaaactaatagtagtcagattcactaaatccataaggttgtcagaaaagccggccaaagaaacaaaaatcttccaaccagggcgcctttatttcaactttttccttcgcaagaaacataaatttacagagggcaatctagaatgcacaaataattacatacaaaattgcctatgatgactgaaggttggccatgcaagttttcacaaggtttccatcatcctt

SEQ ID NO: 430550 - DNA, 330 bp, Oryza sativa
ccaacgggagacctttgtaacaaaattgccagatatcccaggaaaagatggacaccaccctattttagctgcaaactgaccagagctttggccaatatttgcagttttccttagggttaaaccactggcccccatttttgggggtgcttggggaacagatgccaaaccaaaaagaagaaatggggagggaaacataagactaacattataccctaggggggggggaaccaaatctttttcctccagcctataaggaactctagggggaagcccaaaaaaagcctcttttttttttccccatataaacccccttggaatctttggctccca

SEQ ID NO: 430551 - DNA, 261 bp, Oryza sativa
aggagcccccttatggggagggatttttagaaggtccattgcatgggttcacaaggtatgcaatgaccatcctacttttttttagcgggaaaatttccaaaactagttacaaaaaaagcgaggaagcccaatgtcaatgaaatgggatggggatgaaaagattcacgaaatatgaatggggagctaaaaaaacttttgccgcttaaaaaggggcaccggccctttaagaaaaaaaatggttataaagaactttaattttta

SEQ ID NO: 430552 - DNA, 260 bp, Oryza sativa
tgcttcttggtgctctcgctgctggctggctgcagctgcggcgccgtggtgaggtgtgaaggagacccatggatgtggtgccaaaaaaacccgaaaaggcccatgcatggtcatggatggtgctagagtagacggactggacggcaagagagagagagagcaagggaacaccaaccaaaccaaaccaaacaatctctcatgtgtttctctctctagacttgtagtagtagcggtggtagcggagagggagggagggtggg

SEQ ID NO: 430553 - DNA, 352 bp, Oryza sativa
ggtgaatgagacagttctgttaacggacgactgatgaagcctataactggtgggaaagaaacacttgggcaacaatatgacaacacaaagctagggaaatagcggagtggcaatagcgacaggggaagaggatcttaaatggagtttaggcaacatggcctacaagcagaccattgggactgaccgcaggcgctggttattgcagcggacgtggtgttccttgccatgcagatgccacacagcttgatggatttatgcaccatgaaaggaaaaggtttggatactgcagatacggtggttgaggaatacacgtggatgagacgtttggagaaccaaccatatgaaaccccca

SEQ ID NO: 430554 - DNA, 422 bp, Oryza sativa
aaataagaaaggaaaatgatctacatactaatcaagacaatgtatagggatactagtcaaatatcacttgttcaaccttcagcatggaggaacatactaaccaatttggcagtggagcaaagaatgacgcattcaagcctatgcttgctgacttttataactggaaggatttcttaaaagcaacaaaagcaaccaagagtatgggggaaacaaggaagagcacgtacggggtgatctgatcgaagcccatctcaggatcgcttagggcagcgtaggagatcaactggcccccaaacttggggacgtacttgttgaagcccgtggcaccgggcaaaggggagctgatgaccttcatgaagaccatcgcctgaaagcagaacatgaacatggttgctttcttactgagaacagaatttgaatga

SEQ ID NO: 430555 - DNA, 384 bp, Oryza sativa
ccatattattttattttattttcctttaaatcttattttcattttctaatggttaacttaaactgaaaagggaagaggctgaaactgccccaagaaaagtacatacataacggggaagtttttgggactcccagaataccaaacccatgaatcacaaaaacacccaaccattaacaagggaaaaataaagcccaacaacaatgggcatgccaacaggcccgcacttggctgaacccaaagggtgataccagctcccagggggaaacaagaaaaaagccatcgaatttcctaacgaacatcaatgtgaaaaaaccaatcggaacttcacgaaaaggacccacagcctttgaatatggagaacagcagcctgcggccccagcttgg

SEQ ID NO: 430556 - DNA, 398 bp, Oryza sativa
ggaaaagacaatccttaaaaacccatttttttttaagccccttgctgtcaaattacaatagggcctaaacccccttttaggatacaggctaagggaaaacttttttgggccaaaaaaattgaatggccttaatagcctagtccaaatatttttattttacgcccacaacaaacacatacttgggctgggcagccccccggctttgggaaggaaatccttacaactggaaccttggaaaaattttactacccatccctcgaatgcttgggcatatgtccttgattcggcaaaggggcttttaatttaaaatagcctttaaacaccctttatccaaacccccttttggagcaagctacatgccctgaaagctttcacctaaattccccaaaagggaaaag

SEQ ID NO: 430557 - DNA, 281 bp, Oryza sativa
aggaacccccccatggggagggatttttaaaaaacccatagcaaggtaaaacaagtattgcaaagaccattctacttttttaaagcagaaaaattttcccaaaccagaaacaaaaaaagcgaggaagcccacaccacaaaaaaaagggaaggggataaaaagattcccccacccagaagggggggaaaaaaaaaattttgccgctgaattacggacccccggacaccaaagaataacctgccccaaaggccgcccaatagggagccaaacgaaccacggga

SEQ ID NO: 430558 - DNA, 443 bp, Oryza sativa
gtttcttttgttgtttttttgtttttttttttttttttttttttttggttttaatgttaccttttttttttttgacaaagggggccctatggcccacgcatggaaatgcccagtgctagagaagaccctcctttccgaaaccgatagcgagagggaagcaccaaaaaccaaacaaaaagaaaaaaaagatccctgtcaagggctgtacacaggttcaccaaacccaaagggcctaaaaggcgggcccctgaaattccacccccccttgggcgcttcgaaggggaagaacttagccccctggtcctaaacttttttaaccagaaattccttggacttgcccacccttgaaccttttgggaactggtcccccgtttttttgtccatgcccctgaaattggaaagggcccccacgggaatttttttaaacccctcaccaacggggg

SEQ ID NO: 430559 - DNA, 61 bp, Oryza sativa
gcacctaatttatcagcaaagctgccggatttaacaaaaggatcaactctcgcggagaaac

SEQ ID NO: 430560 - DNA, 398 bp, Oryza sativa
catgaaagagacagttctgttatgtattgacttatcgagcgataaaaaattgtgaaataaattcaggcacaaagctctgatgacaatattttcagggattaagggttggaaattggaacaggtgaacagtcattagaaaggaataatggcaaatagtcatcagaaatgaatagtggcaaatagagcaagcgctcatcatgacaatggagctatcgttgttagccatgctggtgttacaatggattctgaatttctgatcgtcagaaacttatgatattcctcctccagattctgttctttagggctccaaatggaccacgtgtttgaagaacgcatagaatgggatggccgacgtggacaaacaggacccgagagtcctacccacatttgccacactt

SEQ ID NO: 430561 - DNA, 365 bp, Oryza sativa
acattaaaatgacttggctgtaaataacggctactgtaaaaatttacacttaggattgataattgcttaattggtgaagcagttagctccttatttatcacttgggagaccaacgaatagtatcagcttatcacatatatggccacctaatgtggattatttttaactgaacattttggttgcagatgatgtaaaccagggatgatttgttcatgcaatgcttccctggctagtagttcaactctagctgttcaaccttgttgaacttgaacccgcggattctgatctcttccttgtccgaggtgtccttgtgatcgacgtgctggatagtccagcctttattctttatatgacctgtaacattg

SEQ ID NO: 430562 - DNA, 416 bp, Oryza sativa
cccaataaaacactggcgccagccattatttcatcacaattccttaccactatttgtttacaatacacttgaggggatagcaggtaagggggagtaaaagggcttccaataaaaggaaattctaccatcaagttacatacatttagaggggtaaaaaaaaaggtgaaaagaatccccacccctaaaattgaactttacagggggggctctttgggtcttcctggggtctatctactaaaaactggggccttgctttgtctaaactagaactccacaaatcccatagaagcaacaccccaagaatgtccctgagttccaattagcctactttttttttggcatctttcaggagataacatcctattaagctgccaggatacaaaatctaaagggaaaaaaaaattttccctgaactt

SEQ ID NO: 430563 - DNA, 422 bp, Oryza sativa
aaggaagggaaacccccaatccaaaacaggggggggggaaaaaaaaggtttaacccccaaaattaaacccaacaaaaaaaaaagtttaaaaccacgggcaaagggccaaaaggggggaaaaataaacgggcaaaggcacaaccgaaaaggccggggaaaaaacttaagggggtccaaaagagacttagattccaaaaaaggcaaaatggaaaggcccccctggaacgggggtcatatttttttgggggcagccttggaccccctggccccggggggggccttttttcccccgtttttggaagcccccaccgcccccggttgcccaaaggcccccccgggaaaacccccaaggggggggcccctaaagaagggccccccccccccgggcggggggggaaaaaatttaacccccggggcccccc

SEQ ID NO: 430564 - DNA, 52 bp, Oryza sativa
atatataaaacccggggttgggaaaaacagaactcccaaaggggaaaacggg

SEQ ID NO: 430565 - DNA, 306 bp, Oryza sativa
ggggaaacccccacccattttaccttgggggccccaagggggaagggaaaaaaggccaattttaaaaaatttccaaaacccaaaaaaaaaaaatacccttaaaaaaacccccctgggccccaaaaaaaaacccccttttttttggcacccaaaattttttttaaaaaggttttaaaaaaaaccctttggggcggcggaaaaaaaacccctaaaattccaaagcgccccaaaaaaaaaaaaaaggggggcccttttggggcccccccccggttttctcaaaggcccccctcccggggggggggggtt

SEQ ID NO: 430566 - DNA, 377 bp, Oryza sativa
ttgtccgcgcggcgatgatgtcataggtgcgaatgaggcgggcggcggagggggctagggcagaggcgcaggcggcggcggagtcaagggagagggtgatgcgcgtgtactataggaagggatgtcggcggtggtggaggggggcagagggcggcagcaggagagaggaggcaatgggtgcatgggagtcagtgaggaggccacggtgagggtgatcgagcgcgacggcggagtagctgagggcaagggcgcaggcgactatgctagtgttggtggtggtagatttggagtcgtcggggaggatgctgaggtcgaagaagccagcaagcgccatggcagacagtggtgtagctaggaatttttcccttgtgtagtcc

SEQ ID NO: 430567 - DNA, 185 bp, Oryza sativa
aactgggggcccaaccaaaagcccctatgggacaaaaattggttgccccaatttttttttttagcaacatttgggccagactatggggaaaagcaaactaacccccgggggggggaggactttggggggaacggaaaattggggctgggctttagccaaagggaaatattaccaaaacccgcccc

SEQ ID NO: 430568 - DNA, 487 bp, Oryza sativa
gataaaaatactacatataataataatcaagcggtaccattcatccctagatacaatatttctagagctttgcttaacactaacacacagctatataacctagctagcttcatgatgacttcaatatttctcgaccttacttaatactaacacacagctataacctagctatagcttcatgacttgatctaccaagctaggcatgcatatgcaagaacaagaaacagattagtcacaccataatgactaactaattatagattcatatcagctagtaatatagttcttctaggccctgatcagatcatgcaaaattaaattacttacctagtttggttccatgcatgcatgatacacacaacatatataacactcttctagttctaggattctagattgatttttcttcttcttttccccatgaagccatgcaccatccatgcattgacccattctgcatatgcctcatgacttgagtcatcacagt

SEQ ID NO: 430569 - DNA, 127 bp, Oryza sativa
aaaaacaataaccacgaagcacctagaaaagaaacaaaatgaccacaaaaacaaccaagtcaaacccagcaccccccgggtcatccaagtcctacaaaaaaacatacaaaccccactcagtaggggg

SEQ ID NO: 430570 - DNA, 429 bp, Oryza sativa
cagtcgtaatttgtgtatgtattgatgcctctgttgagattgtcagttccagttcggtttttgtatgttggatgttgtacagtgatcattgagtaatacagtgtatatatttcttgtcattactcgagcatacctgagtacaagaacgccttgcacgctactaaaatgatcatctggattcttgaagcatgattattcttttggatccttgtacactcgaactgttcaacgcacgaatgtcaatgcgaatggttggttttccggtttcaccttttggggaggggctagtaagggaccttttttgcaagggcagtatgcattgcagttccaattgggataacatcttaataaacgaagaatttagggttttgaacagtgtgaactgaaccaacttccccgtttttaataccaaggccaaacataactcca

SEQ ID NO: 430571 - DNA, 176 bp, Oryza sativa
ataggttctgacttgtttaattaattacgccaggaatggagggggcaaaagaaatatttttttttcttagttatagcatattatgtacaaaaaaaaaaaagagccgccatcccaaccaacaaccaatggggggaaaaacataatgcgcacccccacaactagaacaaaacttcagg

SEQ ID NO: 430572 - DNA, 199 bp, Oryza sativa
ccacaaaaaggtacgggccaaaattttttttcgggtccataaacaaggggggaccccttcttgggcatgaacataaaacctttccaggggggcccccaccaggggtggggccgtccaattttttaaaccccccggggattttaaaaccccccgggaaaacagggggggtttacggggccctggaaacctttattttcat

SEQ ID NO: 430573 - DNA, 265 bp, Oryza sativa
gggacaaccggcaaagatcctcaaattgcaccaagatccacaggatcatactagtttaattaattacgacacgaaaggagggggcaaaagaaaaaatgaacacggctccaaacgcaaaagctcacaatacacagggcgcgcgccatcctaaccgacaccatctgcggacacacgtacgcacaccccccaactagatcaacttcaggccagcggcggcgacggagagcacggacacggcgatggccgtgaaaacggagcggccaac

SEQ ID NO: 430574 - DNA, 287 bp, Oryza sativa
accagggcacaaaagcataggatctatttattgatggacaatatatatagcagctgcaggctacagcgtaatgttgtacacagacacacagcaggcaatgagacaatctggatgggccacatggtttagatagatggacacccagattgagactgatcatcaagcactattatcagaacagaaatgacattctttccgctaatcgtcgataaattcatctattctatctaccagggaagcatgaatttgtttgcactcaaacaaacaaggcaaactatcataaacat

SEQ ID NO: 430575 - DNA, 298 bp, Oryza sativa
ttttggttacagtaagtagcttataaggtggctaaaaaaaacctgacttttacaaactgcgggaccaaacaaccaagttacaatatataaaaactctgagatccccgcctcgcactatctatttttttagacaaaaggatcatccaacaaaactgcctatcaagactgtcctgattgaaacgctcattagacaagcaacgatggctttgctttacctttggggacaggaatttatttttttgtacgctaagccgcattttttaccttccagcatcacataagccggtgcactctgagc

SEQ ID NO: 430576 - DNA, 222 bp, Oryza sativa
aaaaaacaacggtcccggccggcccttaaaaagaaatataaaattttcaggggatttcccagaaaaaccgggtttggggcccaaggttttgcccccctcccggggggcgggggcccccacgggaaacccttttttcccgggggggcccttttaaactttggggccctaaaacgggggaaaaacaaacgggattcattttagccccccttaaggggtagaccc

SEQ ID NO: 430577 - DNA, 285 bp, Oryza sativa
ttttttttttttttttttttttttttttttttttttttttttttttttttttttttttttttttttttttttttttttttttttttttttttttttttttttttttttttttaaaaaaacccgggggggggaaaaggttcctttttcacaaattggggtttttttaagaaaaaccatttttttttcggggtttttaaaaaaattggttgggggggaaaaaaagggggttttggccaaaaaaccccttttaggggcccatttttttaaaaaaaccccctttggggg

SEQ ID NO: 430578 - DNA, 210 bp, Oryza sativa
accttcaaatcattattataaatactttccttgaaaagctttcttacacaaaaacctttgcccccccttttgcttgcttaaaaaaaacctaccattttgttcctccctacccttaaaaaccaaaaccagccccacataaaccattgccaaaggaccattttaccaactggtaatccctttaccaccaacaggttcaagaaaaagcaaatt

SEQ ID NO: 430579 - DNA, 245 bp, Oryza sativa
aacgggggggaattaccccatccatttttattggaaaaagcccaatttattcagcgtcacccaagaaaagggacaatttatacccacacctatccaacaagggaataagggctcacaattttttcaacaggtccataaagggtttttcaacccatatgcttggcaaaggtttaactagacgagcacaatgttcgatggcacaaaccaaaatttcctctcaaaaaagcaccggaaacccttaaaac

SEQ ID NO: 430580 - DNA, 245 bp, Oryza sativa
aaaacaaaaaaaattcaaccccccggggggggcctgacactacagggggggagttaacttatgctatatttgatgaaattggccacaaaggggcatttcaatccaatacactgggacaaatgatctcatgggggaaaatagaccaaattcagcattggaaatcgactgccaacattggtgatcattcaggaagggagtagagttacaacccaggtttttcaggggagcatgtgcctttgcaaggg

SEQ ID NO: 430581 - DNA, 261 bp, Oryza sativa
aaatcaaataatcatgaaattgattggaatttggaagagtgtttctctttgcactttgaaagcacaagtttataaccaatgccctatggggcattagatggcaaatgcgcgatgttcaggtaatagaggttgagtccctaaaaaaagttgtatcaagttacatggtttgtttgactgtctattttggtttacaagcagcaacgaataaccaatcaaaactcggggcaagaaaacagctttctttggtttacttttccttac

SEQ ID NO: 430582 - DNA, 280 bp, Oryza sativa
tttttttggtttttttttttttttttttttttttttttttttttttttttttttttttttttttttttttttttttaaaaggcaacaaccccaaataatttaaggggaaatcccgcttcgggtgggtcttgccccaaaaaataggggaaaccccaaaaaaaaattttctttcagggggcccaaaagggaaccccagggggggcttcccccaaatttattttttgaggccagaaaacccaagcgggcggtttacaaagggaaaaaaaaaaaccaatctcct

SEQ ID NO: 430583 - DNA, 303 bp, Oryza sativa
gacgctgtcgcccatggagtagacggtgaagttggcgagcagaagcatcacggagaccatgagggcgggggtgccggagaagatgtgctggaagagccacacgaaggaggcgtgcatctcggcgtggacgcgcgcgagcacgcgctgcaggtcctcgtagaagagcgcctgccgcatctgcagcgtgaagctctgcagctcccggatgatgagcaccatcgacgagaacgcgcgccccaccgcgccgcgcgcggactcgccggcgcagtcgatcagccgctcgtcccaccggccctgctgctg

SEQ ID NO: 430584 - DNA, 174 bp, Oryza sativa
aaacctaaaaagggccattttaaaaggaacaatgggtaaaaaagcaaaaattttttaaaggttttgggaaagggtcaaaaaatagtaaaaaacctttttttttttaaatttaaaaacttttgtaaaagagggaaaaaattttaaaagcccgaaacttaaaaaaaaacctttaaa

SEQ ID NO: 430585 - DNA, 192 bp, Oryza sativa
gacaggggaaccaaattacccccattattttaatggttttgaattcacccccaagttagggcgaccattctgggggttatttttgttcaaaaggataacaaggtggtaacttggcacaaaaattttggtacattttgaacagggttaattgggtttttaagcaagaattcccgggatatgaaagtttttggg

SEQ ID NO: 430586 - DNA, 199 bp, Oryza sativa
gggggaacccaaaggggggggcaaaacccaaagggatttaattccccccgggggctcaggtaaaaaggtttttcccaaccagggggggggggaacaaaagggctttccctccccccaaaaagcaaagaaggcccccctttaaggaaacccttttctaaagggggggggggttaaaacggggaaaaaagaccgggttttc

SEQ ID NO: 430587 - DNA, 169 bp, Oryza sativa
atcaatacaaatctattcttgccaagggatttaataaagccggcgctaggggaagacgcactactggagaaggggggtcttaaagaagcggggcatggacatgggtagctagctccaaagggccatgggaactcaattggctcaggccaaaggtagattgcataccaaa

SEQ ID NO: 430588 - DNA, 91 bp, Oryza sativa
ctccttttttttttttggggggggttttttcaataatccggggtgccaaacccaaccaaaaacagctttgatttgccgtaatgtattttaa

SEQ ID NO: 430589 - DNA, 281 bp, Oryza sativa
ggagtacacttttcaagcaatttattccaaagttaacagccagggttccttttgtttttttataagcacacgtaagggcctgaaaccaacaaaacacaaaaaggggggatcaatggcgggaccgaacgaacccaaaccaaagccggcgagcccccaatggggtcaacgaaattgccaaacttttctgggggggggctcacacagagatgatgagagcccttgacgatgcccgcactggacccgggggcacaagagttatggaacttgggcaaagaccgcag

SEQ ID NO: 430590 - DNA, 269 bp, Oryza sativa
ttttttttttttttttttttttttttttttttttttttttttttttttttttttttttttttttttttttttttaaatttaaaaaattaaaaaaaattttaaaaaaaaaaaaattaaaaaaaaaaataaatttttttttttttttcacaaaaaaaaaaaaaaaaaaaattaaaaaaaaaaaagcccaccaaaaaaaaaaaaacgggggacggttttgtaaaaaaaaaacaaactgggaaaaaaaaaaattttaaaaaaaaggggccccc

SEQ ID NO: 430591 - DNA, 289 bp, Oryza sativa
gaacaatgacatgacaatcataatcatactggtccaaaacactcaccaattacagaaacactatgatgattaggagctgttgagctctcattattctttgcatgtggggactttggtagtagtacaagggaaaatagggccatggcaaagctgctaccacaacacactccacccaaagcctctgagccttttcaagatagctactgatcctagctcttcttttgtcccctgacactgaaaaaagtttgtgttttctccattgttcatcttcgcttttgatgagtaaata

SEQ ID NO: 430592 - DNA, 207 bp, Oryza sativa
gagtaaaaaaaaaattttttcaaagaaaaaaaaaatttaaaaaaaacaaaaaaaacctaaagttgtaaaaaaaaacttaaaaaaaaaaaaaaaaaacttaaaaattcaataataaaataaaataataaaaaaaacactaaaaaaaaaagttttaaaaaaaactacttaatttaaaaggaaatataaaaacttgggcaaaaaaaggaa

SEQ ID NO: 430593 - DNA, 274 bp, Oryza sativa
gggtccaaatcatcacaatcacgttcatttggccaaagaacaaaatcacttcacatttacaatcatttggacacaaaacaaaatcacaaaaatcatcacaatcatattcatcaccgctagatccggcggttggggctcggatccgcccacgagctccagatcccgccggcgcctgcaatctccaaaacggatccggcgaaggctggccctcgagaagaacggctcgcggtggagaagccagtcttcattccttccctcccgccacttgccgggc

SEQ ID NO: 430594 - DNA, 213 bp, Oryza sativa
gggcaaaaaaagggccctctctcaggaaaactttccttttatagaaaggggttttcccagggggccccttaaaaaccccatgggttggaaatggaagagggaatcaacattcccggccccccttttatggggccccccccctaagcccgctggggccgggggcccccccccggggacccctttttggccatcccccctcaaggcccccccccc

SEQ ID NO: 430595 - DNA, 59 bp, Oryza sativa
tattttgccagactttttttttatttttttttaggtttttttttatttttttttatttt

SEQ ID NO: 430596 - DNA, 277 bp, Oryza sativa
atgtgtataaatttactaaaatagtaaagtaatgcggtgcaaaaaaagaaaccaggtagagagagagagggagagggggattgatcgctacccccggtcccgggcgatcgatcgccgattaggattttcgagtccaagttctagtacgtggagtagttacgtggcaggagatggaaacaggtctcatgagaggagaattcttgagcacagagacatttacccccagattacaccacagaagccatcgttacgccattctcccttggctcagttggtc

SEQ ID NO: 430597 - DNA, 304 bp, Oryza sativa
gcactccggcgagagaatgggcagcaggtgggcgggggactccacgatggcggccatatcttcgcttcccttcgcggcactgcgccgggccggcgactgcaggccgtcgacggcggcggcggcggcgggggcgggggcgggggccgtcgtgctcagcgtgaggccccggcgggggtcgcgctcggtggtgcgctgcgtcgccacggcgggcgaagttccacccactgccgcagaaacaaagaggaattctttcaagtcatacaagcgttctatcctaagcatttacagtacagttctacaagaa

SEQ ID NO: 430598 - DNA, 201 bp, Oryza sativa
aaagggggggaaaaaatttttttttttttagcccccctcccgggggccagggccaagttttttaaaccccccttcccccaagggggggggggggcccaaccttaggaagggctttaaaataacccaatcccagcggggggggcatttttttccaaagttcccggggggttaaccggggccagccggtggccagggacggaa

SEQ ID NO: 430599 - DNA, 249 bp, Oryza sativa
ccaaaagccatttggccttttaccaccaacagcagaaaggtccaacaccatttttttcctgcccccacacccggtcacaaatcaaatcaaactgtatgcatcgattggggacccaatttaattaaaatggccctagctacaacattcaccacgcccaatatttaaatgccctgtttcttaattgggtccactatctttatcaacttcctggctaaaaactagctatcactggtccagaaactgatccat

SEQ ID NO: 430600 - DNA, 283 bp, Oryza sativa
gattctaaatataccataacacattggcatagattgaaacatacaggttttttttgaaggccctaatatctaagggcccaaatggtcgtttatcttgcacatctcgagggatggatcatatacatgtattcgacacaaactctaacatgcaacatcccatatacaggtgtaattattctatttgccgtaatcgacatggatggtgtagctataatatgcaggtgggaacaatcttgcaaccatcatgcagagttacaactagtaccaaacagagttacatacc

SEQ ID NO: 430601 - DNA, 289 bp, Oryza sativa
ctaaagaggatgtaaagttgttgccactctccttcattcttaatacaaaagatgtgcaattcttttgcacattctcaaaaaaacttttatttgtgcatcagtacaacagcattgacgatatgaacattgcttaaattttgttgagttaaaacattattttcgtaagtaaaccaaaagaacggtttgtgctttgctaggaggtaatttttcccttcttttcgtgtgtaagaaagaaagataccaaagaaacttttatacccattcccacaaatcccacttcttccacata

SEQ ID NO: 430602 - DNA, 284 bp, Oryza sativa
gccatgcctaaaaccacaatgaccttacttgacattgacacaacaaacaagcctagaaggccaggacaacatccatggtatggcattaacattcctgtaaggaaactggaatacataaaatatcaagagaaacaagaaaaaatgactatgtacaggcaagagttacagtagtagtatttatttgcactgtccattaatctctgatttatttgtactgtattgactctttttcctccctctgttaacgaataacatatgcagtttgatgcggacatcactaactc

SEQ ID NO: 430603 - DNA, 282 bp, Oryza sativa
aacttcaagggcaccagattatggtgccaggaacacttccaaaatgtagcacaatgctttcgtagttacaggatagaaattccactgttcaaaacttcacacatgatctacattttgttacaaaagaaaatatgtaaacagatattcaaaaaggcattcccttgacccctccacctaggcagcgcgctcaaatgaacggcctcctagacaagctcaatgtaagccataggtgcattgtctccccgtcttggaaatgttgggatgatccttgtgtagcccccc

SEQ ID NO: 430604 - DNA, 241 bp, Oryza sativa
aaaacaagctagcatgaggcctcatgatttcaccacaagcaataatgctcgaaattggcaccaattaccccaaaaatttactgggccagtttgatctttttacaggatacatcagccattcaattaaaaattggctactcatcggacaccctacagatcgcgaattttctttactggacagtatttcttacaaaaggggacccaggcacaatatgattttttgccaactcttttaaaatta

SEQ ID NO: 430605 - DNA, 222 bp, Oryza sativa
aaacttaaatcctctagatcatgctcacccttaaataaattttttttgaaaaaatatattttttaaataaaattatttttaaatttattattcttttctttttaagtggaaaaaaaaattaaatctaaaaggtatatcaaaaaactaaaaacaaccaaaaaatgaaactaaatataaaaatttttaaaactaataaaatcgtaaaaaaaaaatggttgcaat

SEQ ID NO: 430606 - DNA, 283 bp, Oryza sativa
acaaatattaatactgcattctactaattaacaatttgtcttttctttaacgaagttcaacccattttatgtacaaaacatacatgcatatgaaaattatacaccttgaaaccgcgaaaacatttatgattcatttattgtgtattcaaatttacaatccacaagtttcatcagacatggagcagacatctgagtgacttcccctcttccagcaactggaaagctttgttgatgtcggcgaagggcatctcttgtgttatgaacccatcaaaatttatgttaa

SEQ ID NO: 430607 - DNA, 232 bp, Oryza sativa
gggggccagtccctttcaaaattttaacttaaaaatgggcccctgtttccccgtttgttccatttgataaagtttcccaaagggaaatagacatcctgaacaaaagcccgggggttaaatttaaatggcccagggacctaactttttaaatcatcatcgccagctgggggggcagcggttgcaaaggggtcagggggggggccggggccagaccctgggtggtcagggaacc

SEQ ID NO: 430608 - DNA, 254 bp, Oryza sativa
tttttggtgttttttttttttttttttttgtccaacccaacctgtttctgttttgattcgccgtattgtctatattgacaatatggatctcttttgtcatctacaaaggtgtgctcaaaaatgtgttctgggaccagacaacacaataaccgcatggctgaaaaaaagggggcggaatgataagcaggtgatactagaattacacgatggaaaacttgatgatcactacccaaccagggtaatgagagcttcca

SEQ ID NO: 430609 - DNA, 215 bp, Oryza sativa
ggtacaacactcattttttttctgcccccacatccgatcacaaatcaaagcaaaaaaaaaacaaccactggggacacaatataattaatatggacctagctacaaaattcaccacgcccaatatttaaatgccctgttttttaattggggccactattttttaataacttcccggctagaaagctaactagcactggtacaaaaactgatctatg

SEQ ID NO: 430610 - DNA, 299 bp, Oryza sativa
ggcagaacaccaaacgtggcaacttgctggtcatcctagacatccaaggatacagaacttatactagcaccatgtagtcacaacacctagtagatgacctccagtcctagtactcgtccactacatatacaatttgtactctttttttaccggcagtcttgacctcttgggaaaaaatgcaggcaaagcattctgtattctctccctttttccgctctcaagaaaggaaaagcatgtgtaactcatgtggctaacgccattctgcttgggattactgagctctgcaagctgttgtctgc

SEQ ID NO: 430611 - DNA, 232 bp, Oryza sativa
ggggtcaatttttgttttttaaataaggtggagtaccctccaccgtttccaaggtttacatacaacaggctttacaaaatgttcggcttccaacatgggggttttcacttcaaaaaaacttaaactttgatcttcctcggggattccaaagacccgcggaaatgatatcttaaaccttagtttttgatcttttttttgggcctcaactggttgctggggccacacttttttt

SEQ ID NO: 430612 - DNA, 290 bp, Oryza sativa
tcctctagtatctaacaaccttaattttttttttttaaaattttttaaatttttatatattttttatatttttttttttttttttttaaaaacaaggaaaaaaacaaaaaaaaattaaataaaaaaaaaaaaaaaaaatcttaaaaactaaaattgaataaaaagaaaaaaaaagggggcctataaaaaaaaactttaagaaaaaaatctaaaataaaccggacgttttaaaaaaaaaaaaaaaaaaaagaaaaaaaaaaagaaaaaaaaaaaaaaaaaaagtccatttt

SEQ ID NO: 430613 - DNA, 164 bp, Oryza sativa
ggaaaaaaaaaccccttttaaaaaaaaaatcaaatttttttttaaacgggggccctttttaggccaagccccaaaaaaaaaggggggggggggtccccccaaaaattactcccaaaaaacccccccccttaaaaaatttccccccccccaaaaaaagagggggg

SEQ ID NO: 430614 - DNA, 207 bp, Oryza sativa
ggcaacggacagcttatgattaccctaaaatctgattatccccaaacaacaaaatttttcataaatatcgggccaaccaaacaaggcatcactttttttttttttgggggggggggggggggataaacattataccctccatgccctttttttcaaatatatcaggctccataatgggacaacccggttttaatccaatagtcaaaa

SEQ ID NO: 430615 - DNA, 182 bp, Oryza sativa
tttttgggggttttttttttttttctcgttttcccctttttttttttttttttttggtaacttgccgggggacaaaaaaaaggggcccaccccacacgccagagaatccttgaccacccccccaaaaaaacgaaaaaaaaccccccccccacaaaacccccgctaaaaaataaaaacaaaaa

SEQ ID NO: 430616 - DNA, 150 bp, Oryza sativa
aatctataatgtctaaaattgataaaaaataataaataatataattgtattattaaataccaaaaaaaaaaaaaaaaaacttttaagggaaaaaaataaaaaaaaaataaaccccaaaaaaatatttctccaaaaagaggggaaaccaaa

SEQ ID NO: 430617 - DNA, 254 bp, Oryza sativa
gggcaaaaaatattttccacaccaggttttaattcaaacagtttgcccctgggactttcaacccccaatttagtttatcgaacaatgttaaattaacccaactaattagacctccaaggtgacaatgttcaaaagttgctggggatacattacataaccctgggaaaatagatatttttgggctaactagagcaaaactggaagacctcttccttggggggggaacacttgcttggcacaaaaacattgttttt

SEQ ID NO: 430618 - DNA, 329 bp, Oryza sativa
tttttgcgcccttctttttctgtgctgcgcgtctaaaaggagatattgttatgcttctgtccattaatccacatagccccctctgtcaccgaattccaatacaaacaccatccttgaaatcgtgctacacaactgaaccagcataagtgccaaaacaaaatgctctttacaatgtgatgcgaaatttgacgcattcatattctacaaaaatactggtcaaagtgcagctattgcctattcccactgcttgccccacatgcatttccaaaagactgcatggagagttcagctcctccaaacaatatggaatttggtcagtatggatactg

SEQ ID NO: 430619 - DNA, 319 bp, Oryza sativa
gcagctccggtgctgcgcctccaccgtcgacgacggcgtcgtctccgccgcggcggcccccaagccccgcctccccaggtaaacccccgcggtgcctctgtgccggtgtgccccacgcgtgggcgcgtggctcgtggtccagtggttaagcactttggctgcgagatgtggctggttgtgtaaaagttaaagagatcctacagttccgttcacctcgcgcagaagggtcgtcggtatgggttcaaaactcattggatgcggatcggccactccatcgcttagcgtttcaaatgatgacctttctaaaatagttgaaaca

SEQ ID NO: 430620 - DNA, 232 bp, Oryza sativa
atgttgcaccaacgtgcactacatttttacaagggttttggcctgaaagcatttccggtataaccccgtatgattcagtgtggattcacgacccatctcatgctcataaaaggtggaaaaggatttgctgcctcggaaatctgaccaaactgtaacatggtaacaccacatcctctccatgattaactagccactagcaagatttgaagtcagggggacctatcattggccc

SEQ ID NO: 430621 - DNA, 97 bp, Oryza sativa
aaaaacatattaaatctaatccttctttttattcagtaagagcttaaaaaacacaaacttaagacaccattataaaaaaaaaaaagggggggttatt

SEQ ID NO: 430622 - DNA, 201 bp, Oryza sativa
gctgcttcgttttaaacaaggaagaggaggggcttgggtgtgttcatgtctgtcttttgggggctaagttagttgcttccgggggaaaacttttggcgtttatttttactattattattaataagaagctcttggatttgcggggggaaaaaaaaaaaaaaaaaggggcggccccgcccttttttttttttttattttttt

SEQ ID NO: 430623 - DNA, 175 bp, Oryza sativa
accccgaccccccccggggggggggggatttttggggggcccccccccccccccctgggttggcaaagggggggggggggccccgggccccccccgggggccccaaattccgggggcccccctggggggcccgggggaaaaccctttcccccggggggggcccttttggggggcc

SEQ ID NO: 430624 - DNA, 214 bp, Oryza sativa
aaaaaaaagggtgggatagcatgacccattggggcactgggggaccctgggaatatccctttaacctccccccacaaaagacccttttcccataatcccagatcttgggctcacatattttaccccctgaacaacaaaggggggaaaaacattttatttaaaagcctttgttcccacttcccaaatgggacatattctgcaggggaaccccgca

SEQ ID NO: 430625 - DNA, 190 bp, Oryza sativa
aaaaaaccccaaacccttaaaaaaaaaagggttcccccctttttcaatttaaaaaaattaattttggggggcccccaaaaaagttttttccaaaaaaaaaatttttaaaaaccggggggaaaaaaaaatggggggggaaaaaattattaaaaaaaaattattaaaacaaaacaaaaaacctagggtccaa

SEQ ID NO: 430626 - DNA, 155 bp, Oryza sativa
tttttttgggggttttttttttttttggggttttttctttttggtttattttaatttagttaattattatttaaaatataaggggggaaaaagggggaaagaagagttggggataatgaagttgggtagaatagaggggaaaggggggggcccac

SEQ ID NO: 430627 - DNA, 262 bp, Oryza sativa
gattggcatacagcattgaaatttgcaggaaaaagcaagactagacatgcaaaagatgtttagggtacagatctgtaagctacagatgagcatccatcaaatgttaccatccacatataaataacatcaggaaagagagccaaaaaaatttaaaataatctacaaagaaatgcctccggctgctaaaatttcttccagtgctctctatagctagttctctctcccttttagatggccaggtaccattggatttataaacatt

SEQ ID NO: 430628 - DNA, 279 bp, Oryza sativa
gaatcacccaaatactacggcaaattctgccagtcatcgcgagggttgatttttgtctataacagaacgcactgtccgtgccacagaatactaacaggtatagtggacaggacatagtgatatacatcaaaccggctgacaatgaacgatgaatcattttgagggcaagtggcaaaatcaaactgcaatccactttggtggagagcataatcttcataggccgtaagggtttctggtacttgaaacaccactgatggaggttcatagtattaagacaca

SEQ ID NO: 430629 - DNA, 212 bp, Oryza sativa
aaaaggggttattttaaagttaataaaattggggaagcccaaatttaattacaccgtttttaaaaatttgtaaggcaaagagagcatacataagcataaaaattatgaccaaaaccctattttgaccaaacccaaaaaaagcaaagttaatggacaaggaaatttaaaaggggtaaataaattgtttaaagccaaggtttttggggttagcc

SEQ ID NO: 430630 - DNA, 274 bp, Oryza sativa
tttttggtggtttttttttttttttttgtttttttttttttttttttttttttttttttttttttttttttttttttttttttttttttaaaaaaaaaaaacccgggggggggggtttccaaagggggggaaaaaaagcccaaaaaaaaaaaaaagccaaaaaagaaagaaaaacaaaaaggggaaacaaggggggacaggggccgcctacggaagaaaaaacccaccccaggggaaaaaatttcaagggctctctgccccttgagaagggcac

SEQ ID NO: 430631 - DNA, 242 bp, Oryza sativa
ggattcaaatgcatcgacatacatattcattcgattaatcaatttgacaacaatttggtttcaaacaatagcaatacaaatatcataaacagctacaactgagatcgaattgaacactacttcctacaagtacaggcttagaaaccaaaagccgttcaaccagacataagtttagatgaacggcatcgcaagcagtccaaaaaaagggacttactaggcaaatttcaatgtatctcttttgc

SEQ ID NO: 430632 - DNA, 267 bp, Oryza sativa
gagggtcaccaagtgaacttattcccaaaatccaataatacatggttcgaacatgggctggctatatatagctcctggagtttagtcgtgacagagaagttgcatgggccatacatgattctgtcacgcgtcgttattactacggcaagcctagttgccatcccagtatctaaacaggagccgtcacgagttacaggcccgaagcctaaacgtgcacggtgatcttgttcgccttctcctcgttgctgtcgagcttgatgcccttgt

SEQ ID NO: 430633 - DNA, 205 bp, Oryza sativa
gtgggtggtggtttttgtgttggggggggaaaaaaaaaaaaagggggccaaaacccccaaaaaagcccccccagggggggggggggggggaaaaggggggggaaaaccccaatttaggggggggggggggggcccgggggaaccccccccggggtggggcccccccaaccccccgggggggggggcccggggaagggggcccccc

SEQ ID NO: 430634 - DNA, 270 bp, Oryza sativa
cccaaattgaagatgaatatatgaacaacaaacaataatccccataaccttatttcaagatatgaacaacacatacaaatccttaagattaaaaaaacatgaataaacatgaacaaatcacatgagtaatttattatcatcgccatcatcactgcttctgcttctggtgtgggaggaagaacaggagggggcggcgtcaccatcgcacctcccagatcggcccatctccgacctccaacactaatggatcagacaagccaccgccaccag

SEQ ID NO: 430635 - DNA, 195 bp, Oryza sativa
ggggggcaccaagatttaaataaaaaaaaaaccccggaaccccccccctggttcccaaagggccaaagggccccggaaaaacaaaaaatggtttaaaggaccccccccccctttaaaaaaaaaaaagggatgggaaaaaaaatctttccccccccccccttaaaaaacaaccccccccgccccattaaacccccc

SEQ ID NO: 430636 - DNA, 207 bp, Oryza sativa
aacccaagggggggaaaacattagcagaaaaaccgggtccaaaacaaggtcaaaaaactgaacccccatgtttgggggcaaaactttgggaaaaactggggatttaagaggaaacccccccagggaaaaaaccccttcaacaggggaaggggggcccccccccaagcagtttgacaaaaaaacaagcttggcaccccaaaacatgga

SEQ ID NO: 430637 - DNA, 276 bp, Oryza sativa
tttttgtggttttttttttttttttttttttttttttttttttttctttttttctcatttttttttttttttttttgggggggaaaccaaaatgcccaaagcaaacgctggggcgggggaaaaacccccacccccttttgagggggagcccttaaacccaagcaaagcccccctggttgggttacaggggaaccctgaaggactagggccgcccaaaattaaagggggggggcccccccgggggcaaaaaaattttacaaaaaggcattgcccccc

SEQ ID NO: 430638 - DNA, 278 bp, Oryza sativa
gagtgctaaaagtggtgaaactccatccaactacccttaagtaaaaagtagaatagccaaaaagggcaaaaaggtgcaaagatcaagttgcagttttctgcgatcaacatggataaacttcacaaaattgtaactacggaagacggttgataatgagtaaacagaaagaaataaatttaccatcatatagttagtgaagggcaggattgggtgtccggaactgataaaaatgtggtgcagcttccgtaagccatgatggttcaatggcaataacatta

SEQ ID NO: 430639 - DNA, 280 bp, Oryza sativa
ggtgtatagtaagttgataaattaaaatgcataatacattctttttcatatcctccacatgtacatttcctcttaaatacacacgcacttgtctaagtgtgcttcaatgccttgacgaggcaaaaaaaaatgtaccatacacaacgagttaacgtaactggtggtacctgaccgtaaaattcctcgcaaactaaacaaatatatactagcaaattaagtgtggagactcgatgtgatgatggcatatgatacgtgatcgatcatttgacgaagcccatga

SEQ ID NO: 430640 - DNA, 145 bp, Oryza sativa
gcatgccgcgtaccttcttgatcctctatttggccgccttattttttttttgacacaaaaaataactcggatatcccaagacttaccaaattcccttcatttcaatccttcttctactcccttaaatctacaagtaaaccctgca

SEQ ID NO: 430641 - DNA, 198 bp, Oryza sativa
gatccccgggccggcaaaacttggggtttccgggaccttttacgtacaagaaaaacccccccctgggccccccaaaaaacaaaaaacccgcgcgcccaaggggattcccatttttcgggaaggggaacatcggcccctgggggccgcaggccccccccaattccaaaacccccaaaaaaaaaattcgggaggggtccc

SEQ ID NO: 430642 - DNA, 243 bp, Oryza sativa
gaaaaaaaaaaaccgaaaaaaaaaggttttttaaaaaaagtgcaaaaaaaaaaaaaaaatgcctgttgaaaaatgcaaaaaaaaaggtaaaataaaaagcaaaaaaaagtttgtttggcagcaaaaaaaaaaactactggaaaaaaggaaatttttaaatcgtaaaccttttcctcgtcataaacatcaacaccaactgaaaaattttaaaaaaataaaattttcaaaaaaaatggccttcct

SEQ ID NO: 430643 - DNA, 271 bp, Oryza sativa
catggtcaataccgctagaaagaaaaattgattgttacagtaaaatagtagcacagatgaattcaatgaaaatgaaccttggctgacacttgcaaccaaaaaaaacaaacttctccctaccttggatcattacaagttgtggagaagctcacactaacagacagaagtaacttctcaaaattctctaattggaactagactctcagcataattaaatagatgcaaatcccttgcttccttctccaaatatggttcatagcaggtgaagtct

SEQ ID NO: 430644 - DNA, 256 bp, Oryza sativa
aacagaatattttacagttcattaatcattgttagcaacaagctatcacattgtttgtacatgtgtataccaggatcccaagaatcatgtatgggtgtactgtaattaaggagcaatacaacagtaacaaagaatcaatagactggatattttttttctgtatctaaatgtatttttcagttcctagaaatactcacagatgggagctagaaatactcgaagtcgccggaggaggaatcgctcgccgccggcttgg

SEQ ID NO: 430645 - DNA, 281 bp, Oryza sativa
ataaacttatgcattctaattaacattataattggagcattgtgtagcattgcactgatctgttttcaaataacagacaactttgactagctcactactactaaaaggatttttttcgtgcggtcaaaaagttttttttccatgcggaggtcttgcccgtctacaccctacaccctggtgtctgtgaaaataaatatttccgcatgcgggcagcctaaccgcacggaaaaaataatcttcacatgcggtcagtttaagtagaccacacgggataatcggat

SEQ ID NO: 430646 - DNA, 282 bp, Oryza sativa
agattgatgtgggtctcttatttatctactatgtataaatacataagtacacatatattgcctttacacgatctcttcatcgatctctgactctctttttacagaactagatcaggctagctgcgtgccatgcatattctcatgtcgtctatgcaactttatctttttctcactacatcaacaaaggaagatttgaagaggagatgggcaagaaaaaagtagtagattacaagcagggactagctagttacagctgctgatgctgctgtcaatgtgcaggga

SEQ ID NO: 430647 - DNA, 280 bp, Oryza sativa
aacacaacttatgattgaatacatagatcgagcataaaaaactgaacgagaataagtcgcatacaaagactatttatgaccaaaccacacaatcacggccatctgattctactactctcaagaacagcacttctctaatctacttccagggttcagaatgcacgcagattagtaaaggtatcagccaccacgtctactgtctagttagtgcatatattgcagcaggatgttagtaaaggacaaaagagaatcgtttggttaatcttcatattctgtttcc

SEQ ID NO: 430648 - DNA, 278 bp, Oryza sativa
ttttttttttttttttttttttttttttttttttttttttttttttttttttttttttttttttttaaaaaaaaactttttttttttttttttggacatttgtttcaaaaaaaattattacaggtttgcgcaaaaacaggaccaacggaccctatttttttcaggggaaaaaaaaaaacaatttcgaacaggaaaacccgtaaaataaatatacaaccatatccaaggttttttggaccaattcgggaaaaggaaccgggcacttttttcccgggttg

SEQ ID NO: 430649 - DNA, 234 bp, Oryza sativa
accaaaaaaatgagtaggatttggccacatataatcgccaagtccatacaataagacagaaaatcgatgagcagctttacaaaaagggtaagtctactttcgactaaataagagttaagactccaaatgcttggtgggtaattggcaactcgtaaccaaatgggagttagggtgaaaaaaaaaaaacaaccctactcatttttagctatcgaaagctggatcaaaacgggagct

SEQ ID NO: 430650 - DNA, 282 bp, Oryza sativa
gcaagttccgcaagggaccgcataactgcaaataagcctggagctcaatgcttacatggcctgaaaaggtggccatactctgaagaatgattataatgtatacatatctatgtgctgagaaatataaaaaactataggacgagaacagctaaaatacaacagaaaaaagaacatcttgaggccaaaggaagcactgagctttacaggaggctcgccaatccttgctaatagttggtcaagattttatctggtgatacaccatctgctacaagggctgatgtg

SEQ ID NO: 430651 - DNA, 212 bp, Oryza sativa
gggaccccccaggcttttattcccaaagggaaccccaaaaaagaaaaccctggggttacatttaaaaaaaaccccaaattcccatcccagggccccccggggaaaaaaaaaattttaacttggccccataaaatggcccaaaaaaggggggtaataaacgggggggaaattggggggaaacgggcccaaaaaaatccccccaaaggattttt

SEQ ID NO: 430652 - DNA, 219 bp, Oryza sativa
ggaaaaacaagggggggcctgcccggcccaaaattccttcacgtttttcccaacaaaattggggggggggtgcaccccaacaaaagggtggggttgattttgattttaaacaggccgcctttacaagggggggctaaaaaaacaaggggggcaagggcctgaattcagcgggaaaaaaaaccccccgaggggtcaaaaatttcaagggcaaacccgtgg

SEQ ID NO: 430653 - DNA, 148 bp, Oryza sativa
gggcatgaattgtttcaaaaccgatttattcaaaaccagtgttactgaacaagggtttttaacaaaaagggggggcaaaaaaaaacaagccaaggaaaaaacaggggttgatgccccccagggggaacccccaccaaaaacaaaaagg

SEQ ID NO: 430654 - DNA, 309 bp, Oryza sativa
tttcggccgcgtcatgccgatcgagagacgtggcaaggatggcgcggaggacgtgcgccgggcggctcgggtgggagtgcggggacgctaggacggcgtcggcgacgatggcttggcacgaggccgggtcaggggagctcgcgcagaggttcgtggccgtcggggagagtaggaggaaggcggcgcccgcgcagaggcagagcacggtggctaaagagagcagcgtgaacgatagaagtttgcatgggtaggcgtttctgtgcgaggggagaagagaggagaggcttcgttctctctgacgcatggtgt

SEQ ID NO: 430655 - DNA, 332 bp, Oryza sativa
atgcacgcgccgcagctcgatcctctattctggcgccctttttttttttttttgatcaacttgacgcttatgattgccttgaaatggcgagctataagttgcagaaaacgaacactatgttcacaggcctgaatgtttttattgaccaacgtaacgattaatctgcactcaaatggacacacaccaaatggccccgctaacatatatcaggtgcagatcccgataactctttttacttgaatgccacatacactgccttacttatttggattatttgcacactattgattaagacggctggtccttgaccttcaatacatcctgtattacta

SEQ ID NO: 430656 - DNA, 230 bp, Oryza sativa
ggatggaaagggcacaaaagggcccaacaagaacaatgatccaaaaaattccctatttattgggggcgatctttttctaacttactacaagatattggaatctttacaatacaatgcgctaaccggaaaaaagggggctacttttgcaccgaacgtgttctaaagagtttctattggggttctacattgatgcagtttcctcacatttttaagggtcagggtcggcccaa

SEQ ID NO: 430657 - DNA, 295 bp, Oryza sativa
  unsure (1)..(295): unsure at all n locations
tttttatggttatggttgatttttattatgtaatttttttttttttttgtttttttgttttttttaaaatttagtaaaggggtaaggagattgaaaaccaaaaaaaaaaaatgtnacacatggaaagaaaaggggcaaaaaaaaaaaaaaaatgtaaaaaaaaagggaaaaaaaaaaaaaaaaaaaaaatccaacacagccttaaaaaaaaaaaaaaacnncgggaaagagaaaaaaaaaaaatttttttcccccccccccttaaaaaaacctgaagggccaaaaaaaaaggcaa

SEQ ID NO: 430658 - DNA, 61 bp, Oryza sativa
ggaaattataattttggaattttttaatatataatttgaaaataaaacgaaaaaacaaaaa

SEQ ID NO: 430659 - DNA, 93 bp, Oryza sativa
cgcttacacatagatagcaagcagtctagtaggggaccaatccggccttttgcacgcatacagtcacttacacgcttactacgctttttttta

SEQ ID NO: 430660 - DNA, 374 bp, Oryza sativa
  unsure (1)..(374): unsure at all n locations
ggatagccatagattaattaagatggtctccgcaaaacaaattaattaatactcatacatatataccggcaaaaaaggaaagaaagcagagatggaatcagttcacattgggagtaggtactgaaagtcgtagtcgtatggaatgacgtcgacgaggtgatggatgttgagacggtgttccggaccactctgaggcaattcaaccatgngatnnttcctgagagaccaggacgtggngcagctggttcgcaaatccagcgaacaangcgagtccaggtcctttgcgaagtcgggcatgttggagtgtatgaggcttgggatcatcagccttctccttggcgatgtcaccaccagcgatgcctgcagatactcca

SEQ ID NO: 430661 - DNA, 158 bp, Oryza sativa
tttttttttttttttttttttttttttttttttttttttttttttttttttttttttttttttttttttttttttaggggaaccgggaaaagggattctgaaaaggcggaaaaaaaaagggggctaaaaatggaaattaaatttggttttttgggttt

SEQ ID NO: 430662 - DNA, 252 bp, Oryza sativa
ggttaccatggcaggaggatgtttattcatgaaatagcaccagacagtgtaccttcaccaacaacagaaactgtttcacttcccagtcatccacatcaaaaagcctgagtacatggagttattaatatttaccactaccaggcctgtccagaggggaaatccccaaaagcaattgtgaggctgaacaggtaacacgaccaaggtccaaaaattttaagcttccacaagcggtgttgtgatgagagaacttac

SEQ ID NO: 430663 - DNA, 108 bp, Oryza sativa
tgagttttgccgaccttattttttttcgggagggctgaatttttgcttgtatatgcatataagacgcaatctactggcacttcgaggcagtaggtagagtgattgaca

SEQ ID NO: 430664 - DNA, 70 bp, Oryza sativa
cattgggctttatttatgagaacccgaaagaaagacccgaaccacaacgtggcatcaacagattacaaaa

SEQ ID NO: 430665 - DNA, 69 bp, Oryza sativa
cccctgggtttttatttaatttcattccgaaggatagcaacaggcaggttcaaaccccataaccaaagg

SEQ ID NO: 430666 - DNA, 66 bp, Oryza sativa
ggcaggaacagcataactttattccatgcattcattgattaactgaaaacccaatagcaatacagg

SEQ ID NO: 430667 - DNA, 116 bp, Oryza sativa
ttttccttggggcaatttatgcatccgttgcggcagactttttatccataaatttatttttgaacgaaatctgatgaagacccgcccaattttaaattgaaataagaggaagtttt

SEQ ID NO: 430668 - DNA, 123 bp, Oryza sativa
cctcagattggtttcctttcttattttaataggcagggttgcattcgatcgagcaaacatggtcttcgtaaaacaaattaattaatactcatacatatataccggcaaaaaaggaaagaaagc

SEQ ID NO: 430669 - DNA, 57 bp, Oryza sativa
gaagggagaacgcttggaagggtaaacgtttcttatttagcagaaaacagggttggg

SEQ ID NO: 430670 - DNA, 189 bp, Oryza sativa
gggggggggggaaaaaaatcctttttgaggaaaaatcaagcgatttgcttttttattgatcttacatatgggggctcaaggtgggtcaacacagatagttaagcaaacaattctgggccattacacgaaaaagcggagggtaacctaagccatattttctggggacttggcaagaaagtacctcaattt

SEQ ID NO: 430671 - DNA, 406 bp, Oryza sativa
  unsure (1)..(406): unsure at all n locations
atgagtacagagtactctacttcatatctgcgccaaaacagaacaaattagagttagagtgactctccgtgtagcaaaatttcactgctgcactacagcaacatacatactnttccacgcgccacaaatcgcatacttttccatgangccatacanaacctctcnnattttgatgagaatanncctatacaccttccaggggtttggtttcaaacttcgccgcgacgaaaaattncagctcggttattgtttgggtgtctcctcccttcttcttttaggggtggctatgttnnctcaccttttnnacatcatcannaactaatgaacgattatttacgttggaagtattgggccaggtcccatcacttncctcttatttgaagctatcgcctttgcttgcttcgca

SEQ ID NO: 430672 - DNA, 325 bp, Oryza sativa
ggaaaaggaaaaaaaaaaactccccttttttttaaaaaaaaaaggttttttaaaaatttttccaaaattttaatattaaaaataaaaaataataaaaagagggtttataacgtaaatgtgaaacaatttataaaaaaaaatatgggagaaagaaaagaaccaccacaaaaaggagggggccttgttggggaaagaggaaaaaaccccccggggggtggcggttttaataagaacccgtgggtcccggaaaaaccgctccccggcccggggttaagggaaaacacttgaaaaaaggtgggttttaaaaaagcccttgggggggggg

SEQ ID NO: 430673 - DNA, 105 bp, Oryza sativa
ttttgcctggtcttttttgtttttttttttttttttttttttttttttttagcttgatagtcaaagcttataaagccagcggggcaaaaaggggggaaattatcc

SEQ ID NO: 430674 - DNA, 126 bp, Oryza sativa
gacccaaaaatgccgttttcatgtctttttacaattacatcgggttaaccacatttcctttttgtacacattgcacacactccttttttccagggtccacatatatacattgcactttataccttg

SEQ ID NO: 430675 - DNA, 142 bp, Oryza sativa
ttttttttttttttttttttttttttttttttttttttttttttttttttttttttttttttttttttttttttttttttttttttttttttttataaattaaattttttttattttttttttttttatattttgggggaag

SEQ ID NO: 430676 - DNA, 429 bp, Oryza sativa
  unsure (1)..(429): unsure at all n locations
ctatgaatcaccagccttttattgcatcttccccttcgtacaacatgtgacaaccgaatggctgcaacaatgaaattatagaaccctctctgtaacgaccaaataatcggagagaaaaaaaaaaggcntcctcatttctactacctacttgacttgatgtacagtgtacaggagcgcaatcgcagtgcccnatcgtcgccacccaccaagttttgaggaccaaccagcaagaaaagccctagctttccattttaccaactctacaaaccaagtgcccactatcaannacaatcgggcaggttcacaaggcngtcgttctgggtgtttttggctctttgtcggctttgctgtgcagttgccggtgccagtgcagttgcagttgcagtggctatttcttgtttgggcccttgtcaaggatcagattttggt

SEQ ID NO: 430677 - DNA, 88 bp, Oryza sativa
ttggcttttcctctctttttttttttacgaaagttatggagtacagagtacctctactttcaatatctggcgccaaaactagaaccaa

SEQ ID NO: 430678 - DNA, 337 bp, Oryza sativa
  unsure (1)..(337): unsure at all n locations
aaaaaaattcacccaaaaaatttttgtttacgagggggataaaaaaggggggccccccctttatttaaggcatataacaggaaaaaaaataagttttaaaaatagggttaaagaggacaaaaggggaagaaaaacaaaaagcccctaaagacatccgcggtaaagagaggggcaccttaaaacaggaaaacatttataaagggacaacaaaaaaantttacccccacccttttcaaagaaaaacctttggaactctgggcggggttaaaacttttgaatatcacggggcagaacaaaaaacccccaaattaaaattgtggggggggaaattttgccc

SEQ ID NO: 430679 - DNA, 126 bp, Oryza sativa
attcatgttatacaatacagagaaccggattacatgcacatttacatgtttgacgctaaaattacacaaaggtttcaaaagggatagaatgcacacaaaacatacacgataaggcatatcattcac

SEQ ID NO: 430680 - DNA, 147 bp, Oryza sativa
ttttttttttttttttttttttttttttttttttttttttttttttttttttttttttttttttttttttttttttttttttttaggaatttttttttttaatttttttttattttaaatttttttaaaaaaatattattttatttt

SEQ ID NO: 430681 - DNA, 291 bp, Oryza sativa
acaaaaaaaaactttttggttgggaaaaaaaactttagatttttttgggaaacaacccccttaaaaaggggacaaaagggagtcagaaaaaaacaccaagaaaaagaaaaaaggtttattatggggtaaccgggcccaaaaaaacaggggaggcaaaaaaattcttgcatggggatggagcaaaaaccttaattgggtaaatttttattccaaaaaacaaaattgaaactccttggcctggaaaaaaaaatggggtccaaaaattggaccagggagaaatttaaaaggggg

SEQ ID NO: 430682 - DNA, 251 bp, Oryza sativa
  unsure (1)..(251): unsure at all n locations
taagagttatgacgatgcctgcacacgcacgcgtgctagaacccgtatacctttggattgcccgcccttttttttttttttttatactaacaaaaaaattattttccaaacaatctttttacatggctgattatcaactgaagataaaagtcctcgagggcaaaaagaaaataataacttatacagcaccttacagcgccttaccaagctgcaacagagcgatcttatttacctaancctggcaaatatta

SEQ ID NO: 430683 - DNA, 93 bp, Oryza sativa
aaagggaaaaggggcgtatttgaatataaattaaggggtgaatgcaaatttatttaaaggcaataacaggctgggcaaacaaaagagagccat

SEQ ID NO: 430684 - DNA, 146 bp, Oryza sativa
tttttttttttttttttttttttttttttttttttttttttttttttttttttttttttaaaccaaaccttttattttttccatctagcatttaaaatgctaaaccataggccatattgccccaaaaagggggggaactatccccc

SEQ ID NO: 430685 - DNA, 333 bp, Oryza sativa
ataagatagagatttaagttaatagggttaaaatctcctacaactactttacaatcttaccgaactaggactacacgtcatttccttgatacacaagtaaacataatacccaagtcttaattctttacatattctatatacataatactatcccttataactagttcggatagtgtagaccgagtaggtacatggtaaccataatcttcacaggtggtactgagggcttcttcagcttgagagatgcgctattgatacagtctcttttccctgtaggacgtggcccatgatcaaacacgtgcccctagatgagcgttacagacagcacacagc

SEQ ID NO: 430686 - DNA, 261 bp, Oryza sativa
aaaaaaaaataaataaagccaaaaaaaaaaaaaacaaaaaaaaaaggactttgttgggtagaaccaaaaaaaaagggggaaaagaggggggaaaaaaaaaaaaaaaaaaaaagggcgaaaaggggtcaaaaaaaaacaacaaaaagcgaaaggaaaaaaaaaggaaaaggaaaaagggaaaaaaaaaagggacacggtaggaggaaaaacccggaactggacccaaacgaaaaaaaaagccgcccaaaaaagagaggtttg

SEQ ID NO: 430687 - DNA, 329 bp, Oryza sativa
gggtaaaaaaaaacattatttaataaaatccgaatgggaacaaaactttttaaaaaaaggccactgggaaacaaatggaaccaaagcattggggaaaaaaaatgcccggttgggggggacccaaaccggggaaaaaggagtccagttcttcaggggaactaaaaaatttaacttggaaagaaaaaaacccccagcaaatttaaattatcacattggattaagggaagttggaaaactttgcaaaacgggccgaattttaaaacccaggggactcaaaaggcctttgaaactccttggccaacttccatccaagaaaaatggccaacgga

SEQ ID NO: 430688 - DNA, 301 bp, Oryza sativa
acaaaaaaaaaatcactaggggaaaaaaaaagggattttttgggagggccagcccaaaaaaaaacccaacaggaataacttttacgggccgggaagttttaaccattaaaggggggggcccaaaaaattatttggggggggcataggggaaaagaaacccctattaaccactcaaaaaacaaaaaaccccaagttttcgaaaaaggaaaaaaggcgcccccaaaaagggcgggaaaaaacgtcaaaaaaaaagggttatgggggggctaaaggctcccttggggacccccgggggggggaa

SEQ ID NO: 430689 - DNA, 58 bp, Oryza sativa
cagtcggactgcccgtccttttttttttttttttggttttttagttgacttatttttt

SEQ ID NO: 430690 - DNA, 207 bp, Oryza sativa
ctgcacgcgcacgcaacctaggaccctatactttggattgccctccctttttttttttttatcaaaacaacagttgactcatatgtgctctccatcacatacactacaccacatatatctggtgtcaattgcaacatcctattaacatccagccataatcttgcgacctggcatgtaaacaaaatggcataaaccaaagaacctaat

SEQ ID NO: 430691 - DNA, 390 bp, Oryza sativa
caggtacaacccaggataagatcataaaataatatagcaaatgttcccaattatgtttctgaattgtccttccaataaaaatttcaagtgttgcagtccttcccaaatcaaataagtttacaagaaccccaatcaggagacgtattttcatatacacctcagtcagtgtttgccacaaaattattttccaccccattgtaactaaacgaggggcatattgagcagaatcattcgagcaccttcttcttacagagcgagcaacctcaatctatttatttgccaagaacaagagccaagtctcataaatccacatccagggtttatcctccagatattcatccgaacattgtgggtgtaaacaattagtgatcctccagataatcatcgaac

SEQ ID NO: 430692 - DNA, 338 bp, Oryza sativa
  unsure (1)..(338): unsure at all n locations
cttcttacaattacatcgtgttaaccacatttcctctttgtacacattgcacacactcctcttctccagggtacacatatatacatgcatttatacttgtaaatgcattttgtacctctttctttcatgggaagtaccgtgagattgtgagaaaaaaagaggaatggcatgtgctaagtgatcactnnggctgctgcacccttgtctcgttgtcatgggatgttgccccgcccgtgtgttgtcaccgataacctttaaatatccctttcaaaattgggggtcnnggcggccggtgaattgcattaagggagtgaactttaagatccgnngcggtagaa

SEQ ID NO: 430693 - DNA, 375 bp, Oryza sativa
cagtctctatatccacaaattcataagtggacacaaccaaaggttacacgagtgttgaatcttgttttcggttcctttctatatatattggggctgaaaacaacaaaaatggactgaatttgcagccagccactagggttagggggaattacagagcccagagtggaacaaccattatttgagtgtgctcaagccctatccagaaaattattattagccaactataattagaaaaccgcagctcatcccaaaatcagagcagaggttcttacaaaacaccggtttatgagccaagcggagcagagtccacttcgccagtgagcagaagccaacaccttgaaccattgtgtaaggctttcagtcttttcctgttcg

SEQ ID NO: 430694 - DNA, 126 bp, Oryza sativa
gtataaaaaaggcaatgctttaataaagaacaagaatgggataaaaaatgggcgtaagaacccaaaaacaaatccaacaccgacagggccaaagaggggggcaggggaagcagacaggaattccca

SEQ ID NO: 430695 - DNA, 368 bp, Oryza sativa
ggggaaaatggttcttttttcctttcaattcaagggcaaaacctgcatacatatttggaggcacaacaaaatttgcaaaaaagtttggggggtggattttttaaggggctgggcctaacgtggggacctgaccacaaacttttccagacctcgattgggttggacatatatgggagattcttatcagggcaaatttcaaaggttaaacacaatattcaccagatttccctcttttggactgaatatcccagttttgaaatagacccaaaatggccccttacctacacctggttttccaaacatggtggggaatttttcaagaagacaaagccaaaaggggaacatttttttgatcatgccaccagggg

SEQ ID NO: 430696 - DNA, 413 bp, Oryza sativa
  unsure (1)..(413): unsure at all n locations
gaaattgaaaaaataacagataaatttatatattgttaattacatagttaggtgtgtaatattacatccaacatattcttttatgggattttcatgtgcaacatgacgtggagcttgttttccagtgccatgctantctcaaaaagngacggtaacantccttttgacgtttaagaaattctagagtacaccattnnaacctgaacattttctgtgcatttagaaatcccnttgcagaggggtaatgtttatgttcatttcgaagaaagtcagatgaatttcccaaacagccatttccatggnttccagtaagctgttatggttctccaaaacccctcgccccttgaatgcttangacagatcacctagggcaatggtggacatctcttacacccaaatcaaagaggaaaatc

SEQ ID NO: 430697 - DNA, 248 bp, Oryza sativa
tttggtttttcacagcggtgaccccatacctcgggaacttcttcgtacggccacaactcggccgatcagacgccgaatcctcgtcaggacgcggggcgccagacgccgtgcgcgccagcctttgccgctttccagggcgcccatcctctccggcctgcagcttcgagcatcaacttgcagagtgccggaatgccgccttcatgctccatacctgcggcggccgtcctggtctaatcggccgaacggag

SEQ ID NO: 430698 - DNA, 375 bp, Oryza sativa
agctccaagcaagagcagctgcaggctgcatctccattattcatataacatattgtactagcaaaggttccattacagtatatgcactctcttagttgaacataaggccaaaccgacccacggttttcgacttaagcccagccaggagaattagttctatagaaaaaaggtgccacaccttgtcaacaaaccatattcaagggtacctcaaacggaatgaggcctaccattaatttccaaccccaaatcattgccaccccaagctaccacacagaagtagttagttaggtgccccacccatctggaccatggaacccgaatcagaataaaaccagcatggttgttccaagccaggcaaccagtaagcattaaggg

SEQ ID NO: 430699 - DNA, 103 bp, Oryza sativa
atctagattcattaacatataaatgaacgggggcaatgctagaaaggtttacattataaaacgggggaaggagaactcatacgcgcacacggtgtttgaaaaa

SEQ ID NO: 430700 - DNA, 337 bp, Oryza sativa
acggggaacatccaaagataagggctttccacgaaacaagggccttacaggcaaggcagccaaatatgaactgggcttaattaatacacccaccctttggatacattgacaggagggcattggaaacgtgcccaatacgaaggggaaaccccattttaatttgaaaaggggggaacatcttctaccaagggctagaaagtgcaaggattagggccccccctaaaaaggggggcaaaggggaggtcattgggctggcaactgggaggcatcatgggtgcaaacaaatggtgacatggctaaacccgattttgaagggcaaaaccagaaatcatgggtg

SEQ ID NO: 430701 - DNA, 233 bp, Oryza sativa
ggggaagggccaacaacctataggacccggaaattttgatgccccgtcacaattaaaaattgtttacccgcaggacccaattttgagcccccaatttttccccggggtactcccgaagggggtaatttttgaaactccttgggggcaacaaggcgaaaaaaaaaaaaaggtcttcccactttagggtcaacaattttttgggtttataaaaggggggggttcgggttaacccc

SEQ ID NO: 430702 - DNA, 209 bp, Oryza sativa
gggggttcgaactgtttacattctgccagacatcaatataaaaccattccgagggaaggaaacaggcagaccaaacaccatacccaaagggaactcaattcatggaaacggcactgacgacgaacacctggggctggatggatggtccgagggcctccacgacttcgagagagacactggccacgagccctaccttgacaagaagataa

SEQ ID NO: 430703 - DNA, 87 bp, Oryza sativa
aattacaatattgaaaaaaatattttcaaatattgataacaatgttacaaatgcagcatgcatgcgatatccatgcgcatcacgcac

SEQ ID NO: 430704 - DNA, 246 bp, Oryza sativa
tttttttttgttttttttttttttttttttttttttttttatatttttttttttttttataaaaatttttttaattttttttttttttaaaaaaaaaaaataaaaatttaaaaaaaaaaaaaaaaaaaattttaaaatggattaaaatttaaaaataaaaaaaaatataggggagaaaaaacaaagaggggcattaaaaaagaggagacaaaaaaaagggccaggagaccaaaaattgggggatgg

SEQ ID NO: 430705 - DNA, 292 bp, Oryza sativa
atctctggaaggataaggataagtccaaatatatcgttaaaagttattacattatagaacagagatagtaagttatataaaatgaacaaacttaagtaacagctgagctatcatacagtcctctggagagacaggccggcatcaacaacaactacttgctactacgaaaacaacgtgtcagcagtcggcaccgtcagaaaacacagctttcgttttaagcattcggtcaccttacagcagcagtagttgaagcatgcatgtgtccttcattgccatcgacaacatatgttca

SEQ ID NO: 430706 - DNA, 250 bp, Oryza sativa
gttcttgttctttttttttttctttttttttccttgtttctcgcaccaaaaaaggcggcccccaccgccaggccataaggggcccggggggatcaaacggggcccttccagcctcccccaaaaaaatcaagccgggggtcccttggcccccccgaaagacgggggggaaaaaaaaaggttccccccccccccctgggccgggttggtttttttcttagggggaaccccctcaacccccggtttggccccc

SEQ ID NO: 430707 - DNA, 296 bp, Oryza sativa
aagaaaaggaacatgcaactatatattattaaccagaagaacagaagcaggttaacccggtcttgagaaatttattatcctaacaaggcacggagaaatcccataattacactgctccacgtcccagtcgtttcccgggtctagcattcggggtattgactacacgctgaatttagtgagcaggtcatcccgtcaagagagccttgcggatgacaaatagcaaaagaacatagattatttcatccataatggtgccccagcagacatcatagctgattcagtgatagagcttgccc

SEQ ID NO: 430708 - DNA, 212 bp, Oryza sativa
atattaaatttttaattattttcaacgatgtaaagtaaatttaaaagttggattatataaaaaaaaaaaaaataataataaaaggggaaaaaaaaaaaaccgggagaatgtaaccaaaaataaaaagggaggcaaaagaaaaaaaaaaaaaaggcagggggccaaaaaaaaaataggggggggggggaagaacaaaaaaaaaaacggggggg

SEQ ID NO: 430709 - DNA, 306 bp, Oryza sativa
tttttttttggtttttttttttttttttttttttttttttttttttttttttttttttttttttttttttttttttttttttttttttttttttttttttttttttttttttttttttttttttttttttttggaaaaaaaacccccccttaggagggggggaaaaggtcccccccccaagggggaaaaaaacccaaaaaaaaagggggggaaaaacccccccctaaaaaaagggggaacaccgtttttataaaaattttaaacaaaaataaattcttttttcataaaaaggggcccttttttaat

SEQ ID NO: 430710 - DNA, 220 bp, Oryza sativa
aggattatccaacatctaaatatccatacaattttattttgattttttataaaaaacaaaaaaagccccagaaaaaaaaaaaaggaggaaaacacaaaaaaaacccgggggggcccaaataaacacccacaaaaaaaagggggggcaaactatttactaccccaaagggaaaaaaaaggaacaaaaaaaaaaaccacccctcgcggctgggaaacaaaaa

SEQ ID NO: 430711 - DNA, 174 bp, Oryza sativa
gggggtattagggtgtacgtacgcgtctaccagatgggcggtgtgcaggtacagaatgcggatggccgcgcgcgaacaaaggcgattggtatcaacagacaaatcgtgaaggaccggaacacagttctcaccacctggaacgctgatacagagaacggagacatacagaaggcg

SEQ ID NO: 430712 - DNA, 162 bp, Oryza sativa
ctataacttaccatttgtagattacgaaataaaccagagtcgacgtgccaaccaagtaaagacggaccgaaagggaaaacaaaaaaaaaaaaaaaaaaacacggaataacgagcacactcaagcaacaacaacatatgaagagtagggaaaacgcgacccgt

SEQ ID NO: 430713 - DNA, 299 bp, Oryza sativa
gcaaaacaaactcaagatattttaattgaaaatgttactggctggccagatagcatgacgaatgccctctgtcagagcaatttggacataagatgtcttcataaagctaacaaaacaatcacacattacctaggactaggtgcaatttcctgtctgaaactctgaaccaagtagataacaccagcagtataaaagatttcgttcatttactcacattatggtcagcaatacctcttttatttccagaatctagaatccagaggctgctactgtccgtattggaatcgccattgccttgt

SEQ ID NO: 430714 - DNA, 234 bp, Oryza sativa
cccggaaagacccaaacccaaggcttggactaaaaaaacgttccttggggggacaaaaacaaaattaaggtggaaaagccggggttccccgcgcgatttaggggagggttacctggcccgtacaaaggggcctcagggggggcatccccatagggggatcggctcggggggctaggttaaggaattggtctaccccgggggcgggcccgggacccccttttttttggggcccgg

SEQ ID NO: 430715 - DNA, 308 bp, Oryza sativa
ggtggccaagaggaaactcttctaatatatgaaaacttcttacagtcaatattctgttcggtagataaggaggatttgcgaagcacggcaaaattcagacaggtccattccatggcgatgcatggaatccctagtgtgattcaaccaatttgaatttagcataaacactacaacaacataggtatttagggagttaaaagtaccctgtctgaaattagatgcaccaggtgtctgatcagtatcttctgatgtcctttggaggcttgaaattgataggatgggtctctggagtggctgacaaatcttcc

SEQ ID NO: 430716 - DNA, 266 bp, Oryza sativa
acaaccaagaaacccgaagcaacgttaacctttagcacagaaacgggttcgttctttttacaagacgtgatgggttttaagaccataaaaaggtccggggcctcactaataaaggggtggagaaaggggctgcaaaaagaagggatccaatccaacatgggggggattcagattcagattccacttaagagcttttttttgggctgagagggggactcattttgccgggtggcctgccattgcttggcgaaaaacgtggtttaatc

SEQ ID NO: 430717 - DNA, 300 bp, Oryza sativa
ttcatttggagcgagattgcaataataataatggtactccattcgtttatattaaaaaaaaaaaaaaaaaaaaaaaaaaaaaaaaaaaaaaaaaaaaaaaaaaaaaaaaaaaaaaaaaaaaaaaaaaaaaaaaaaaaaaaaaaaaaaaaaaaaaaaaaaaaaaaaaaaaagggggggggcccccttttttttttttaaaaaaaaaaaaaggggggggtttttaaaaaaggtagttttaattgatccaaaaagggaaaattttttttttttttcccctccctatttataccttttggggga

SEQ ID NO: 430718 - DNA, 251 bp, Oryza sativa
aaaggaagcggcccaaatttgcatatatttatttttcaaaacccgcattggacaacatgtatatttcatcgcagtttattggtccatctttattcattcacaaaagtttataccgcccgggccttggagagttgggggttcgagcattttggcctacaatgcttttgctaacaattttggggaatgaaaaccaaaaagagctcaagggggaaagttaaaagatacctggcccaatattacagaagttgccg

SEQ ID NO: 430719 - DNA, 235 bp, Oryza sativa
aaagcaaccaaatttatttgggggggtgggaacaaaaaaaaggtcatggccccccctacctggatatcaacaattaatttatcgcccccccaatattcaaaaaaccggggaacatttcatcaagtaatacccctgaaaatgcattacccccccaaaaaaaaaagggtaaccccccacaaaaaaaatttggcctgacaaacaaaaaaatagcttccaaacgggaagcccccccaaa

SEQ ID NO: 430720 - DNA, 107 bp, Oryza sativa
acatacaatattttgttcgattcaaaatgaggatttgaaaagcccggaaaatttcagacaggtccattccatggcgatgcaagggatccctagtgtagattaaacca

SEQ ID NO: 430721 - DNA, 263 bp, Oryza sativa
tttttttttttttttttttttttttttttttttttttttttttttttttaattatttttttttttttttaaaaaaaaaaaaaaaaatttttaataaaaaataaaatgttaaaaaaaaaaaaaaaaaaaaaaaataaaaaaaaaactttaaattttaaaaaaaaaaaaaaaaaaaccaaaaaaaaaatgggaaagggaaaaaaaaccccaaaaagcaacgaagaaaaaggaaaaacaaccaaaaaaaaaaaaaagccgggaccc

SEQ ID NO: 430722 - DNA, 239 bp, Oryza sativa
ctcaccttccatttttttttttatttaaagcaacccaaattgaggggaccatccacggacaaaaaacaccccaccctggagggtgggaaaaagggtcttcacacgacggaaaaccccgggacaccaaaaacccccgggctggaaaaaaaaatgcacccccccgcatagtaaaggaaaactgcccccggagggccccaccaaaaaataccccaacttccctcgggaaaccccccccaacc

SEQ ID NO: 430723 - DNA, 284 bp, Oryza sativa
gtacgcttgtttttatttgggaatttttgtaccgtttcctgcaggcggcccgggattccccaaaaagagcggaacgaaacctgggggaaaccaaggctaaaccaaaaatgcggggagaaaaagttaggcgaaacaatggcacacaagataccagggggaaacataaagggccaaaccgggggagcccaaagagggagcctgcaaaaaaaagaggagccgcggggacggcccgagatccagccagccaacaggactggccaagcgcaaaaaggacggggccaagg

SEQ ID NO: 430724 - DNA, 197 bp, Oryza sativa
aaaacaaaaaaaaaaaaggcttgtaaaaaaaaaaaacccccaaaaattttagaagaaaaaaaaaaacccatgaaaggggggggcccgggaaaaaaaaaaaaaaccggggggtttttaaaaaaaaaaaaacggctggggggggaaaaaaacactttttcaaaaaaaaagaagacccctacaaaaaaaaacccggggcc

SEQ ID NO: 430725 - DNA, 306 bp, Oryza sativa
acgaaacaaatgccaaattgaatatctgtgtgtcaagtggtattcagtactaccagttttctgtattgagtaatgactggcaaagataaaaggttgcctcagatcattacatgtctttgcttgacggaaagacaagcaaaagctaattcaaagcatcacctcttctgtttaagaaaggcagtcacgtcttatgcaagtcattcattcaagcaaatactaatgaatttgttacaccacgctttggggtgttgtacaaagtcgtcacggcagaatatgcagacaaaactgaacattgatacgaactgc

SEQ ID NO: 430726 - DNA, 227 bp, Oryza sativa
aaaaatgaaaaaactaaaaaaaaaggggggcaggggccaacaggaagggggaaaaaaccccaaaaaaaaaaaaaaacaacaaaccccccaaagggggggggggccaaaagagaaaaaaaacccaaaaaaaaagggggagccaaaaggggcaaaaaaaaaaacccgggcaaccaaagagcccctagggaacacccggcccccaaaaaatttgggaaaccccaaggggc

SEQ ID NO: 430727 - DNA, 220 bp, Oryza sativa
aaaaaaaaaacccaacccccccttgggggggcagggaaaaaggacctttttccaaaaaagggccccccccaaaaaaaggttttttccgggaattgggccccaaaaaaaagggggggccgtttttaaaccaaaccaaaaatttgggccccaggggggcccggggacaaacctaagggggggccccccccccccgggggggggggaaaaacccggggcccca

SEQ ID NO: 430728 - DNA, 264 bp, Oryza sativa
ggaaaataaaagttgccggcaaatttttttaccctccaattcaaacccgagataccctactatgcagtttacacatgggttttcaaaaaaaaaaaaaaaaaaaaaccggtttccccattttgttcgaaaaaatgtacggagggctactggctagtggctacaaatcaaatgcaaggcaagaatcccattcgatcagcaaagggcacacgggtgggggttctcctccatgctcagggccctcgggtagtaaaactggggcggccc

SEQ ID NO: 430729 - DNA, 219 bp, Oryza sativa
gggaagaaaaacttatttttttttccaaaaaaggggccccggccccaaaacctgggccgggccacactaattttttggcaaaaataggggcccaatgccccttgggaaaagaaaaaaaaaaactttcccccccccctttaagggccccagctttaagcccaagaaaaggccccccccccgggaaaaggggcgggggggctttaaggggggggacaaaaa

SEQ ID NO: 430730 - DNA, 306 bp, Oryza sativa
gaaaaacaaattagccatatcatgtacagcatagacggtttgaagcatcagagttgttattattggtcgtgaagatgatacatatggattaaaagaaaaataatgaaagaacaatatacagttctactaacctgtaattctgatacatacaacaaatgcatccagattgcctcttgttctgtttatcttaatttagaccccccacccccaccctatgcgaggggtgtaatcagtttaatttatttttctttttatacactcgaattaaagagcaaaactttatcctatcttcctttctcttgtatg

SEQ ID NO: 430731 - DNA, 303 bp, Oryza sativa
ttttttttgtttttttttttttttttttttttttttttttttttttttttttttttttttttttttttttttttttaaaaaaagccggtatgtggggttttattccattcgagtggattcaattgggttatttaaacagggccattggccaagttaactccttaccggaaaactttttttggaagggggaaacccccttggggttccttttgggggcccctaaggcccttgcatacaaaaaaagaaaccgccttttttaaaggggggcggtgccttggtaaaagggggccccaatgccggttt

SEQ ID NO: 430732 - DNA, 292 bp, Oryza sativa
tttttttgtggtttttttttttttttttttttttttttttttattttttttttttttttttttttttttttttttttttttttttttttttttttttttttttttatttttttttttttttttttcaaaaagagaaaaaaaagggggttttttttacaacaactggtgttttggaaaaaaaatttaaaacggggggggaaaaaaaaaaaacccaacatttttgggatttgggggggggaaaaaaatacatacgcgccaatttttgttggggggaaaaaaatcgaccccctag

SEQ ID NO: 430733 - DNA, 243 bp, Oryza sativa
agaaaacacataaattttattaagctagaacaattatagggaaaaaaccccattacatatccaagcaaaagagccatccttaaaaaaggggaggtaattgaactaccaaaggaaccttcctgaaaaaacccaaccttaaaacagaaaaaggaccaggtcaacaggtatctggggtgaacccgtgacaactgttaccctgggcctaaaaaaaggtgtgatccggttgacaaaccgtttaacccc

SEQ ID NO: 430734 - DNA, 232 bp, Oryza sativa
acgaaaaaccccccattttttttatggggggcaaatttaaaaaaaatgccctaaaaacaaaattggggggaaaaaagccggggctttgttttaaaaaatccccccccaaagaaaatggggggcccttaacaaaaaaaccgggcggggggggggggaaaaaattattccctttgggtaaaaagcaggggcccttgggaggggcccaaacccaatgggaaaaaaaaaatttttt

SEQ ID NO: 430735 - DNA, 305 bp, Oryza sativa
cagaactcgttaaaattggttgattttttttccctgaaatatcatcataagatccacatgaacatttcaggcaggcatgttgttacagttatacaagcaaagctttctgctactgagatgctcatgcgccgtgtttcgtcgacatctttcacttcgtaagtcggcacgccctctccaggcctccacatggaccatatctgcttatgtcaacactggatcaaaaagaatgtcaattaaacgggcagcagagatcaatgcttcttcaagtatagctcggtatattcctcccaacctagttcctcgag

SEQ ID NO: 430736 - DNA, 263 bp, Oryza sativa
caccacaaacaaaaatgcacaaatgggcaacgaattccccaaaaaatttattgggccagtttgatctttttacgggatccatcagccattcaataaaaaatgggctactaatggaacaccctacaagcagcttgtaatattctagcattactttggttgacaaagggggacccagccacaaaatgattctctgccaattcttttaaaaatatctttgcaggggggggtgtttgtcccaaaccatagtggccggaaaagtccgt

SEQ ID NO: 430737 - DNA, 269 bp, Oryza sativa
gcatgcccaaaagcggcagagcaaaatgaaccataaactgaagggatgggcttctagatgggctgaattgtttaccactgcaacagctgcagggcgaatatttgccaactttgcatgcggcaagaaaaactttaggcaaagttaggatcgcattacacacacacacacacttagcaggtaatagccctccatacgggaaaaactactggcgtaacttcacgggcatgagtcacaccaccttttcactttgtcttgaccagctttttgat

SEQ ID NO: 430738 - DNA, 231 bp, Oryza sativa
ggggcagggggaaaccaattccaaaacggttaaaaaacaaaacatttgcctttttaaaacaggcaaaccaagggattcccttttatgggggaaaaaaaattccgggaaaaaagaagtcccgctccccctgggggaacgggaaaaaaaaaattttttttacccaccccaaattccaaaacggtgggtggggtttttttgggaaacgggaaaagggttcccccgggggctttg

SEQ ID NO: 430739 - DNA, 321 bp, Oryza sativa
agcactgctgctcgccgcgccgcagctgctgcaccgcccagtgcttctggatgaacgccgactcccagctccgctccctctcgccgccggtcaccgccgacgacgactcgccgccgcggcaaggcctgccggccgcggcggcggcggacatgatctcgccggcaatgcggcgcctcaggccgtggtacattgccgacacggcgcggtgcgcgaacggcgcgcagatgctgctgctgctcatcccggcggcgcgcgccgtggcgtgcgtcagggtgttgaacctcgccgtcgtgctctggatctcgtcgaggcattggttgt

SEQ ID NO: 430740 - DNA, 439 bp, Oryza sativa
  unsure (1)..(439): unsure at all n locations
ttcgcccggatagnattccaaggcgaagaagggcggcggcggcgggctgcagggtctaggcctcggcttgcggccggcgccggcggcgccgaccgccgcgggagctggaggtgctttccggccgccgccgaccaccatgaacttgctgtcggggctcgacgcgccggcggtggaggtggagccaaacacggcggaaacagcggccgacgagctgcctctcatcaaggccccggccgatcagcaaagcgacgaaagtgcaagcgaggcagctggagagaaggctcaacagctgaccatcttctacggtggaaaagtagacgtctatgagaacttcccgtccaccaaggacaaggatctcttacaaatcgtaagcacaggcgatggcgtcgacaagaacaccggcaccgcggcaacgcaaagcctgccccgacccgcacac

SEQ ID NO: 430741 - DNA, 215 bp, Oryza sativa
agcaaagcaaaccatgcgaccatgcttgcaaaacaattggagcacaaatttacatgttactcccacaccgtacacccatgcataataatacatcgtatatactgtacgtgcatacatacccgctttcgatcacatcgcaccattggatcgtacaaagcttgcgttcataacatacgttacacatcaatataccgcatacagcaacgtacataaca

SEQ ID NO: 430742 - DNA, 399 bp, Oryza sativa
gatagaaagggagcgtgcaccaacaccatttttgacctgatacttaaagaaagtgtcggtgtataactgtgcaattcccttctgttcatactttcctgtaatatacagctataacatttgcacaaatgattgcattcaagagggcgggaacctagttagacttctgatgccttctttatttgattacactcattgcagttaattaccaaactatttgctgtatccaaaatgctcattaaatgacactattatatctattggacaactcttaactacttaaaagttttgaaaaaagatggtttggccctttggtttttaagagtttcctttgggcaggaattcttggcacaaactttggaaagagacttacttccccaataaaaatcttttttttttttt

SEQ ID NO: 430743 - DNA, 286 bp, Oryza sativa
gacagcaaattagttcggtaactttgaaacttcacagtacaaaacggcgttttagaggtccagacaaagagcattaaagcaagaatgatgagaaagacatttggaattacataaaaagatggtctaaagcacactaaattttattacaaccgccacgaacctgtttttattcgtactgactttaaggtgcaaaatacaaaatgggcatttaatcttttgcggatattccgctctttaaagggctttttattccttagcaaatcccagtttcaaaaagcttgaggtg

SEQ ID NO: 430744 - DNA, 82 bp, Oryza sativa
ggagctgcaaaaaacccaaagaaaaacccccaccattaacaataaatatcccattagacaaacacccctgccaagtgtaccc

SEQ ID NO: 430745 - DNA, 266 bp, Oryza sativa
  unsure (1)..(266): unsure at all n locations
atcaaatgcaaaaccccaccnngaaacaacgaaaggagcaatagattccggagcaacatccacgcctaacannagcanccanggccnnngaaagacnggacagcgcggggaagccaccgaacggcccaacccaacgagggagagaagaaccaaacgnccnccagangcnganacaaaaacaagcancacgcaaccggaaagcacaaacgggcaagaagaaaagggcaaagcaanccccgaaccgacggccgctgaaggagcgaagc

SEQ ID NO: 430746 - DNA, 89 bp, Oryza sativa
acatcattcagccggttcaattgatagatgaatattccaacaatgatgtcaagcattacaagcttgtgagatgccaatacatagctaac

SEQ ID NO: 430747 - DNA, 381 bp, Oryza sativa
tttttttttttttttttttttttttttttttttttttttttttttttttttttttttttttttttttttttttttttttttttcccaaaaaaaccccaaaccccattttcccccggggggaaaaaaaaattaaacccccccccaggaacggcccaaaaacacaagggggttaaaaaaaaaaaaaaaccccctatggggggggccagacccccaaggggccttccccaattgggggggggcaaaaataaacgcgcaaaaaaggggaatggcccccaggcaaaggtttaagggggtcggggccccttgaaggaaaaccccccctgtccgccaacacctaaaactctgcttgcgcaggggtcccagaaaaaggggggggccccc

SEQ ID NO: 430748 - DNA, 456 bp, Oryza sativa
ttcgtccggattggatgtaactcagaattcttcttctttctgtgatgattttctgagtgtgtatttttctcttgaatcttctcatctttggtagatttctgcagccttcttgttgtaattttaatagattttctaggtgttttcagagtccaggccaaagaaagatttggttcttgagatgttcagttggacaatttgttttgctaagcaaccatagtgaggaaattaaagcttataattacaatgtattatcaaaaaaaaaaaaaaaaaaaaaaaaaaaaaaaaaaaaaaaaaaaaaaacaaaaaaaaaaaaaaaaaaaaaaaaaaaaaaccccccccaaaaaaaaaaaaaaaaaaaaaaaaaaaaaaaaaaacaaaaaccggggggccccctttatggagaccacattttccccccgggggtcggcaagccaaatctttttttttgggcccccc

SEQ ID NO: 430749 - DNA, 93 bp, Oryza sativa
gagcgcgggtcgccggtaagatgactggcgttggcgccggggttgtagaacggaggcgattggacatgcttgtttgtcgttgtgggcgcgttg

SEQ ID NO: 430750 - DNA, 66 bp, Oryza sativa
agagcctaaagacctgtttattttctcacaatcttttctctcctatgataacatgggagggggggg

SEQ ID NO: 430751 - DNA, 438 bp, Oryza sativa
gaactggaaactggactatattatatatatagagagagagagagaggggcaaacaagaagaaaagatgaagaagatggtggtgatggtgaggcagcggcagcaaaggcagccggtgatggtggtggtgatggtgtgctgggcgctgctggcgacggtggcgcgcggaaactgccgcgactagtgcctttcctggtgccaaggttgggccattatctgtcacctgttctggtggagctcctgcctcggctaattctgcatctccaccatgagcacaagcagaccacattccattactgatcatgatcagcactttccatgacattagttatagtaaggtccacattcggtctccgtgcttaaggttctcgactctgccatgacttgatccctattgaccccttgcttccattcatttctaaatcccattatacataccc

SEQ ID NO: 430752 - DNA, 92 bp, Oryza sativa
gtggctaagaaaaccacacgatttcacgattgatttatttcactgagaacagtacgggctcataacattatacaatattattcggtgttaca

SEQ ID NO: 430753 - DNA, 345 bp, Oryza sativa
cctcaagtaagttacatgacaagtcagttaattacatccacaaatcaccatccaaaacatgttcaattacataacaggttcactgaccaggtcaatacatcactagtacaagtcactgaccaccaaatccagccaaatgccaaatagtcgttcacacattgacctgagggttgaggccaatcaaacgacaaaggacatatgcttccttggtgcttccgattcatgatgaatccaagattttccttcagctatcactttttattttgccgctgcaaaattctaaataagttaccgaagctagccatttaataataaaaatccaagctcgttgccccattgggtggg

SEQ ID NO: 430754 - DNA, 468 bp, Oryza sativa
tgtttccctgcttttcccgtccaatcccggcggcggcggtggctcggtgacgagaggagtagcagcggtagtggcggctcaatgacgaggaggggcggcgagagctcggcgacagggaagggcggcgagagctcggttcctccctcccctcttctcctctccaatcccggcggcggctcggcgacaagtaaggacggcgggagctcggctccttccggcaactgatgggagaagacgccccttgtggagagctgctgccggtgctgccgtcgtcgtcagcgccgccgtcgcaaccaaggggacacggcttccttgctggagagctgctgccggtgttgccgtcgtcgtcctcccccgccgattacgagtgctacgtccactacaccgagtgtaagcgacctcgccctcaccaggatgcttcgttttagggttaggtttggggtgcttcagaatgaggaaatctggggc

SEQ ID NO: 430755 - DNA, 307 bp, Oryza sativa
agaatatcatcatcatcatcagtagtagtagtcgtagtaataaaagactgagagaagcagtaataaaagactcagagagaagtcttacaagcaaaattacagactcagacggaaagggaaactacagttccgtagaaacgaaacaaaacaaccgtaaaagagcccttattcttttacactgggcgcccttccttaaatggcaaacaacgaagcaccgttgccacggtcgaacctcaataccaattttattcgtccaggtcacaaacgccagcataccattccattcaacttgggtaagaaccattca

SEQ ID NO: 430756 - DNA, 260 bp, Oryza sativa
cagaaaagcactcgacttagcattaaccagcctaaacacggtgaacgctttacagaatgcaaccctttgcccttttggaattaaaagtttggaattacaggccatgacacgggtcaaacccagactgaacatctattacaggtaacaagcattattttttttgattgcaagactgtatacaggcgtaatcacgttaccagcgaccgttggcgtagcggctgatggtttaagagaggcttcattcaacttactaaccaaat

SEQ ID NO: 430757 - DNA, 119 bp, Oryza sativa
gcagcgccccacgaaaggcagggataaaaaaaaaagaacccgaacccagcacccccccccccaaaacaaaaaaaacaaaaaccccaagacccgggggaaaaaaaaacaacgcccccaaa

SEQ ID NO: 430758 - DNA, 101 bp, Oryza sativa
aaacagtgtcatgcacagtttcagtatttaaggtttcatatacaacatggattcactggttgcacaaaataaaaggaaggttttataacaaaaatttttac

SEQ ID NO: 430759 - DNA, 475 bp, Oryza sativa
tttccacttcgtccggattaaatgcgagaatcggtttgttattagtaagaagaaagaccgctcactgacatcgccacagtacaaaaggcgcagtgtgctcgagcatgctgataattccaatttcatcccatttgtcccattccctcctgattactttgccaagaaaaataagcctgtggagaattcatcagatgcaggaatagtgccagaaggccctccatcagctgaaaaattaccagaaacaaaatattcatctggaaatctgggaaattttcagaacagctcacaggtgatgggcagtcaggcagcaaacaacatgaacaatgagaacaggaacggaaattatccacatcaaaacttgagtacaagtggttatgggtatcggtgaaagcatcacttatcagcatcaaccacaatctcaagggatggtcggtcgttctggtggtgcttttgaaactggcactcggaatgcaaa

SEQ ID NO: 430760 - DNA, 84 bp, Oryza sativa
gttactcggatccaaattgttttcattgtttgatagagatttcatacaagatgccactcgcataaagattgaaaaccaccccaa

SEQ ID NO: 430761 - DNA, 77 bp, Oryza sativa
ggaacagaattggacagcatagatgatgcacacacatatatattattaattataaacactttgaagtataaaagaat

SEQ ID NO: 430762 - DNA, 283 bp, Oryza sativa
ggagcataattacttgatgcaaatgttggcagagccatcatgtttgtaaacagcaagagcaagctacatcagagctcagaataacagtaacaaacagtactggcttcatttggggcatgcacaagttctttattgacagagccatgtcagatatatacaagctggctttgatatgcttgaagataggacgcatgtaaccacttaataagttttacaacaactaccaggaggtttgtgtcttccacaacggtttcaggcattttccaagaagccttgagtttaa

SEQ ID NO: 430763 - DNA, 296 bp, Oryza sativa
ttttgatgcgcacgctcgcgatcgcgaacccccccagcgagggcaaggaagggagaggagacgaggaacccgagcgcgcgcgagcgagcgagcgcaagggcgggcggccccggccgcggcgggggggcagccccggggctggatgagaaggagggcgtcggcgccggcgtcggcggcggcggcggaggcggcggcggcggcggcggcggcggaggaagcgccaggcgaacccggagacggagcccgcggagaaggcccacatccaccacgccgacacccaggccgccaaggccccc

SEQ ID NO: 430764 - DNA, 174 bp, Oryza sativa
  unsure (1)..(174): unsure at all n locations
aataaaaatacaaccccaccanggancaccgccggggccggcaagaaaagaaaacaccgaaccaacccagcggccagacgacgaaaaagagcggaggaggaaggagcccgaagaaaccggcaaggaggacgagaggacggcgacgacaaacaaagccggaagcagaaccgcgga

SEQ ID NO: 430765 - DNA, 453 bp, Oryza sativa
  unsure (1)..(453): unsure at all n locations
ttggatacctaccccccaccgcgcgatccatggcgnacgccggcatccgctccggcgtcctcagatcggcggcgggtgtggacggtctcgccgccgccgccgcggcgcgccccactcctctcctcccgcgcgtccacctcgccggcgacggcacgggtaagtagatccttcctcagttcctctcctccctcgcgtccaccgccgacgagggtagtgggtaggcgaaatgctaaatcaatcgagggttcccacagggcggatggcgaccaccatcgggttctgcccccgtctcagagccgcgccgccgtcctgcaagaaggcggaggcggacccggcgccgtctctccaggatgcggtggtggcggcggatgctgcgctgcgtgccccttcacctccccagagcatggcggcaagatggcggcgattctggagtttctgaagaaacactcgctc

SEQ ID NO: 430766 - DNA, 96 bp, Oryza sativa
catctcgaattggggatctcccaaatctggattgattgagctgaaagcttgaaacggattgtccaagtaagtagtacatgatcataaaccctacca

SEQ ID NO: 430767 - DNA, 76 bp, Oryza sativa
gatcattattcattgtttttgttatttttaaatattttggggaaaagggaatagggaaaaaaagagactactaaaa

SEQ ID NO: 430768 - DNA, 186 bp, Oryza sativa
atttagagcttgacgcgatgctcgccctccgtcagctggtatgcctcctgttgtccgccctcctttttttttttttttttttttttttttttttttatgtctctctaggcccacgtttttgcttcaacacaagttgcgagaacccgcatgaagagtgccaggaacatccagatgattacaaaagcc

SEQ ID NO: 430769 - DNA, 442 bp, Oryza sativa
  unsure (1)..(442): unsure at all n locations
tctgatacgagccgcccgggacgccaaaaacgaggnggagtgcattcagaaccccatacgatccctcccaccaccagangancnggcancagcgccccacccnggaagccaacggngcccccagcacaaaagaaccccacgngccagacccgagccccgaccaccaacccacgcgcccggggaagcgccaccgggcnacccaagncaccccacacaagccccaaccggaggacgccccagacacccaagagaagcngaccagggaaacccagccacaacaacgcgaaccacggagcaaggacgaaacccagagaagccacaccgcagaacccggcaccccagcagaacggaagcaagacgccccggcaccnacaaagaaaaccanggagaccagcaaagcgcaccggagaaacaaaccccgcggggcaaccggaagaaagcc

SEQ ID NO: 430770 - DNA, 340 bp, Oryza sativa
atcgcgtaacattcactcctttgttcagcttgacactccattgcatagggagggtatagctggtgacagagagaaatgggcgaggaggccaattgcaacgtcgcgatggagtccgctgcgcccaaggagaacggccacaccaccggtggcgccgcggcggaggccaaggccgccgccgccgcctgggctgagatcgccgtcaccgacgccgcggcggtgccaaagccgacgccgccgcctgcggccgtggccgtcgacccccggctttaagggaatttccacgccattccgggtggcccccactttcccaaggcagggattatggtcaacgacatcaccc

SEQ ID NO: 430771 - DNA, 184 bp, Oryza sativa
aaaagtaacatgcattaaggacatcaggtattctcattcagcttttacagcgtcatggaggaaagccgatgcaagcaagcaagcagcccttcttaccatatgagacgcgagttctcacagacacaaccgcccactggctaaaactcggcaataagttccaagctaaatgggagatacctaccat

SEQ ID NO: 430772 - DNA, 164 bp, Oryza sativa
gttgtaaatcaggatatttggagacaaaaaactcaaaagcacatgcagttatgcacttaagacaggaagggtttattgccaaaggaaggaacaaaaaaaaagttggagagatttactaccaaaattgggtttcaaactctgacaaaactaatagaagtcagaaa

SEQ ID NO: 430773 - DNA, 325 bp, Oryza sativa
  unsure (1)..(325): unsure at all n locations
cgttaaggtacccaccaccgccgccgccaccgccaccancgccgccgccgacgcgaagcacgccgccacccccgcccccgaccccaaccggagccgccacacgccacgcgggaaccccaccgcgcgccgcagcgacgccgcgaaggccgagaccacccccaggacggccgccgccgccgcgaaccacgagcgccgcgagacggagcgcgcccgccaccacggcaagaaccagggccccgggaacgaccccaacaaggnggacaaaagggacaccggccgggccgaaagagacgccggaggaggcggccaagccgagcgacaggaa

SEQ ID NO: 430774 - DNA, 129 bp, Oryza sativa
aggcacaagttatatcatcagaatacatagcaactgccagtgctcaaaaattgggccataccatcattttgtccacagaaacctgtaccaattaccagttcaaaaactagcagaaccatgtctatccat

SEQ ID NO: 430775 - DNA, 223 bp, Oryza sativa
  unsure (1)..(223): unsure at all n locations
gttatcatagtgatcaaaacatgccgcctcgaacgcnnccctggcaccctatagatcaggacctgttatcccaggacgctgtaaaacctctggacgttgaggcctggagctcgatgcagggagcacaggcagagcacaagcggatcaaaagttacataccagaagggtgccacaggagctcttttcccagtgtgattgagattgatactcagggggtataccg

SEQ ID NO: 430776 - DNA, 157 bp, Oryza sativa
gacctaaaaaaaccaccagtttgatactatttgaaattactgcaatgagggagggacacaagggagcaacaccaagagtgcactggaaagccggaaaagaacctaacaccaaacaaggtgagagggagacacacccggggataatcgggggtacaac

SEQ ID NO: 430777 - DNA, 427 bp, Oryza sativa
  unsure (1)..(427): unsure at all n locations
cgaccggccggaatcccgggcatccactcgccggttagttcaccacccaaaggccgcgcgccgaagacgggtccgggagagaccgagcaaagtgaaccangcaaggcggaaaagcacacgagcgagcaaccagcccaagccgagaacacagcaaggaccgggagggacnacaggggagccaaaagcaacaccaaggacacaccaagacaacgnggagacagcagcagaaggaggggggcacacggacagccggagaggcgaagaggaagcaaggccgacaaaccaggacnggaggaggggcccacggcgnggccaagcccccagaccgaaaggagcaaccaaggaaccgggagaaggcccccngaacagcccaggccccgcaaagcccgcacaggacgcaaaggagaccacgcccgggacgggaccc

SEQ ID NO: 430778 - DNA, 76 bp, Oryza sativa
acaaaaattaacaaacttaaacatagataactaagcatacaaacaaaacataacacctacatattacaaacaaaca

SEQ ID NO: 430779 - DNA, 106 bp, Oryza sativa
aaacgatccaatgagatgtaatccaaaatccaacatttatgttcacatcattttggcaatttaatatatgatggggtaaaatgtcaaaagcttggttactataaaa

SEQ ID NO: 430780 - DNA, 308 bp, Oryza sativa
  unsure (1)..(308): unsure at all n locations
aaataaggtcccagaccccnncnccangggaaacggggaggaggccacaaaaaagaacgaccccgcacgccccccgccaaaaacataccaaggaccacatccgcacccaaagacccaaacaaacccaagaaccacccccctgttacggcctgcacatcactaaacacactctctcgcccaggacaaccaccactgcaggagcagggactgcagcgcacccgggacgacacaccggacggcggcccccacccaaggagacccgacccggggggcccgaggccctgtcccaaagacccgacacagggggg

SEQ ID NO: 430781 - DNA, 132 bp, Oryza sativa
gatctgtggatgagaaaaatattgtacagtgaatgacttattcgaacacaaggcggggaactttcaagagacaaggtgacacaaagctaaggagccaaatacatacctactaaacatgtgaacaagggaaca

SEQ ID NO: 430782 - DNA, 453 bp, Oryza sativa
  unsure (1)..(453): unsure at all n locations
ttccattcgcccgcgtgangtgcttgcctcaaagatggctccaccagagacgaggaggtaagaattcaagagcttgctcatggaagctgccaggccggtcctccttggccaaacggagcggtttgacgctgaggcagagctctcatgggtgtgacatatgaacattgacgcatatagcaggctgcgtgttcagagactgaaggagtgcacttggcatgtggcaagagagcaagatgtgctgccacaggatcggtctctggaggaccactacttgcactttctaggtgatgaaacagattgcactgacaagacagggcgacgtggcaagcaatatcagcgatctcctgtaggcgatggcacagatggtcaagcggagctctggccacggagtacccattgctggatgcgtaggtgaccaggacagattgcacaccaggacggatacatatcata

SEQ ID NO: 430783 - DNA, 101 bp, Oryza sativa
cttattgtgtttttttattttatttagtaaaaacacaaggacgtgaagggcaaaccatacaaacgacacgacccaaaagcgccttaacacacgcagtacac

SEQ ID NO: 430784 - DNA, 71 bp, Oryza sativa
atacagtagctaattatttatcctccaaaatttaaaaacataactttagaatctaaggcactccaaacaaa

SEQ ID NO: 430785 - DNA, 102 bp, Oryza sativa
actattatttttgtttattatttaaagagttttcatttttatttttttataaaacacaataccaaatattacaaccctaaaaaaaaatataacactctatac

SEQ ID NO: 430786 - DNA, 113 bp, Oryza sativa
aatggcactgaatcatttttatttcctcatcctttttattcattcctcccagagagacggttccatggaagttttcttgccctcatcaggcaagcagagtcaaccatacacgg

SEQ ID NO: 430787 - DNA, 168 bp, Oryza sativa
gttatatatatcttgatcatatagcagcagcagcagcagtaacaacaacactgatgatttctctcacacccctaaaattttcagacaagagaagaagcagaaacctagatttttttttcttgagctagttataggagcctgcattttggagatcggatagtgagaatg

SEQ ID NO: 430788 - DNA, 382 bp, Oryza sativa
gactacggtaatggagggggaggaggagggggaggaggcggttagcattgcgaaggaggtggttgtttacgtggagggaggggggctcgggtttcattaattgtggactctagaatccctggaggacgcccttcccataaagcaagccttggttcggatttactgctttgcttaaacattctatgtgattttcgtatgatttgttttttttaggctaccaaaaaatatgtttcgaaatggttaactaccaccattaaggtgctgaaatatcttagacgggtgaaaaagaaatggtttactactattcaaaaaaagaccaaatcattagaacagatcttacatgttacgctagatgaattatttttacataaaacaaagcaat

SEQ ID NO: 430789 - DNA, 335 bp, Oryza sativa
  unsure (1)..(335): unsure at all n locations
ggaacaagtgccaaccgccgnaaccaacaagcanggggagaagcaagtgggagagccgcaccacacgggcccaagcaagacacgncgnaagggngacaagggaccccacaccngaccacagaacagacagcaccgacncaaagacccgacggccgcaccgacaaagaaagggaccagagccacccggccagaacccagcggaaaaggagaaagagaaggagaaaccgagcacggaaaccacaggaaagaggccgacgaagagcaccccgcggcaccagaccccngcaaggaaaagcacgacgcaacagcaaccggcggccacagcaaagggggag

SEQ ID NO: 430790 - DNA, 447 bp, Oryza sativa
gatagggtatcgcctcctccgccaccgccgccgccgccgcatcagttgccggggacgcgacgcgcgatgcagcagcctcccccgccgacgatgaacggcggccaccacgcggcccctgctgcgtcgcaggtctccggggcgcccccgccgccgcatggccactaccagcagcagccgccgcctcagccgtactaccagcagcagcagccgttgccgccgcactactaccaggcggggcccccgcacgcgcctccgccgcagcagccgccgtcgatgtggggccagccggcgccgccgccgccgcagtacgcgccacctccgcccagcagttccagctcccgcaccagcagtacgcgccttcccctcagcattacgcgccgccgccgccgcagcaacagtacggggcgcaaatggctggcgggcccgctccgggaggcgacgagatca

SEQ ID NO: 430791 - DNA, 273 bp, Oryza sativa
aaaaaacaaaatagcttccatcatttcatttatttcgaccaactttatatatattagaaaccatataattcacatgataaagaactacatacaaaaccatacacgggcaatttctcaatcttgtaccattagaagtctttccttgtggaaatccaaaatcttggagattggccttgcggggtgaaattctagctgacaagctgcccttaggttggggaaaccagcaccaggcttcacccacaagtagaaccacacccgaccgcggctggtttc

SEQ ID NO: 430792 - DNA, 263 bp, Oryza sativa
atgaaaaaaccatcactaggttaaagtgcttatgtctgccaaatttagtacgggccaatacaccggtccatccccaggttatggggctcacaaactagacaaacggccgcgactgaaaattgaattactggagccggacaggatgtttaattttcaacgctgaatgtatgtgcaagactaggactggatagtcgggccgtactgatcgtatggggcagtctggtcgaagcatgtgactaagattgcctttgaaaagaaacccg

SEQ ID NO: 430793 - DNA, 244 bp, Oryza sativa
ccaggcaaaagcccaaacaaaccatccataaataacattagcggccttagtaacttttaaggcataaaattggaggatgattccacccgggggggcccaaaaaacgaaacactggctacgggaaaaggggttcgatcagttgttaaacaacggggggtacgcggtgttagaacacgaccttatccacacaaggggcatttacaaataacttagggggggcgcccgtttggggtttccccccaaa

SEQ ID NO: 430794 - DNA, 143 bp, Oryza sativa
aggacgacgatgctcgcacgccgtcaggaagggaggatccagattggttgccctccttttttttttttaactggacatgtttcagattttttgatgtatattcatacggaaaaacccacctaatggtcatgacggtgatgctt

SEQ ID NO: 430795 - DNA, 53 bp, Oryza sativa
gactgctagaataaaaatcacccatcacatgcaaggccaaaacattaaaaagc

SEQ ID NO: 430796 - DNA, 59 bp, Oryza sativa
aaacagccaaagagaacagggaccggggaaacaacccgggagtattcggaccggcaacc

SEQ ID NO: 430797 - DNA, 89 bp, Oryza sativa
gccggtccggaatcgcatttcgagtcccagtgacccgttttagttctcattgaaaaaaaaaaaaaaaaaaaaaaaaaaaaaaaataaaa

SEQ ID NO: 430798 - DNA, 56 bp, Oryza sativa
tttttttttgtttgtttttttcatttttctgtattttttttcactattttttgttt

SEQ ID NO: 430799 - DNA, 77 bp, Oryza sativa
aaacagccaaagagatcattgatattttaataaacatcatgcataaacccccccggtaataaggccagcattaaggt

SEQ ID NO: 430800 - DNA, 330 bp, Oryza sativa
tttagatattctgcggactaggaggacacaggccaggtggaggacttgcaccaaataaggcttaacttgctgcatgtgacacaaaagaaggccagaacagcaaacgcctatgcaggaggcgatgagctattgtgcatgtgtgcttctgtgggagaagcaactgttgattggacaggacggcaacgatacaaggaactggatctgagaccaactccatttgaggcactaccaactctcataggaagtgagagctctgtatgcacgatgagttgcagaacacgcaattgactctacctactgatgaataatggcaaatgtgggaaattgtag

SEQ ID NO: 430801 - DNA, 374 bp, Oryza sativa
ggatgaacataacacgtgcattgactcatccgttttaaacacaaacaggtagaccacacaaccataagaatcacaaaaaatgcaactaaactatgaaaaattaggggcatctttccatgatgagatataaaccacatgccctgtcacactaacaaaagcagatataccaaaaacatttgccgggacacaatgatttctgcaggactacagccgtgaagaacaaaagccattaaaacatttattggtggcttagtacaaggatggcccagggatggatacagggcggtaacaagcctattgactaactggttaataccggtaagatgacccattttcaccgagacctgaagacgaatattcacccccatccatgc

SEQ ID NO: 430802 - DNA, 285 bp, Oryza sativa
tcggatatcaacaaagtctctctctcttctctctctcgcctcgacgccccaaaccctagccatggccgacccagccgctgccgccgccgccgccgagttcggggatcccgattcgccgcccgcgccggccgccgaggaggccgaggcggctgcggcggcgggggaggaggcggtcccggcggcggaggccgcggcggcgaagaggtggcccgggtggcccggggacagcgtgttcaggctcgtggtccccgtgctcaaggtcgggagcatcatcgggaggaaggg

SEQ ID NO: 430803 - DNA, 439 bp, Oryza sativa
gaatatcagccattcttttttgttttgaatctctgtttatgtatgagttctgcatagtttacagattatgtgtttatattttccctaatagagatttaatgaatttttttagttctgcatgagttttgatatatgattttgcatataattttattgttctcgactaatatttctcaaatctgttgaaatatggaatgcaaatttcatatatcatcatgttgttcaacctaagaatacacataacaattgaattctaagataatatgatctgtgatgtttctataaaatctgtgaagatttctgtataaaatgtagacccataactcagaagatatttttttttggagtgatgaagctttgtgaattattttgatggagattcatatgaaaattcgaagctaaacactcaaatatttcaatctgtgaatactctgaattc

SEQ ID NO: 430804 - DNA, 298 bp, Oryza sativa
  unsure (1)..(298): unsure at all n locations
aaataatatacccaacccagccacananggaaancaggcgggttatggtaagagcagcctgacttcaactagggccaacccagccacatattgaggaacaattattcgcacatccaacctactagtggtttggtgtgttctacctgtaccatctcgaggctttccatatgatccggccaatatttttttgccgagatatttgtttcactgctgcaaaccttactttattctcggtataaggcacaatcgccaatcggagtgtcgttctggtcaccccaaccggcaaccccccgtagag

SEQ ID NO: 430805 - DNA, 53 bp, Oryza sativa
tgttttgcgcccttttttttttttttttttgaagtgataatttaaatatctta

SEQ ID NO: 430806 - DNA, 454 bp, Oryza sativa
ctattatatatggcgcgcagctcgaaaaaatctggaaaacgacttacgaatgacttcgacactttccattggcatgcacaaccaagacctatacctgcatcagcattgcaattagctggctcagcttatttgctgagggccactgcttgggaacactacgggagtgctccgatggttcgaatgaattccttggtctatgcaacctgctttgctgatgctgcaagttcagcagagctgacgctagcagatgtcaagctaattcagcatttagcaactttcaaagggtattcagaggcattctctgctctcaagcttgctgaagagaagttcccgctgtcagcaaatccacatatccagcttcttaaaatgcaattattgcacgagcgtgctctgcatcgaggacacctgaaagttgcgcaacagatctgtgaagagtttgctgtgttcgcatctt

SEQ ID NO: 430807 - DNA, 318 bp, Oryza sativa
ggacgggaaaggaacccaaacaaaacgcgggccaaattttttcccttctttacaaaggggacacaaaatttgggttttacccggaactgggaaaaaaacaaaccatcccaaagaatgccgggaaaaaaaaaggccccgaaaaagtggggcgttaagaaagaaccttaagcccaccactaaaaaatcaagggaaatatccccgaaaaacaagggacagggggggaacccctccaaaacttaaaggacccctgtggcctttagcgaaaaaaaacccctaatccgcccccaaaaataggactttcggctaaaggaaaaacc

SEQ ID NO: 430808 - DNA, 356 bp, Oryza sativa
ggggggaggagccccccaaaggagggaaaaaaaaaccagggaacccccggaaaaaatcccggcccaaggataagaaggaggggaaaaggttaaaacggggcctattcaaaagagcgggcccccccccgtaaaaatccccggaaaaaaaaattccctggggggtgcccctgccacgggggggggggttttctcgccggggggggcaaccttttttccccccgcccccaagggggagaaaaaccccgggacagccacctcggtggttttttacggcgggggactcctttttatgtgccccccacgggaaccggaacgggaaaaaaaactctaaaacaacggggggggccaccccccaa

SEQ ID NO: 430809 - DNA, 52 bp, Oryza sativa
aagtggaccccccccaaaaggaattaatttagggacggaccaaaaacaaaac

SEQ ID NO: 430810 - DNA, 394 bp, Oryza sativa
  unsure (1)..(394): unsure at all n locations
gacttcaataacaaggcgngggccgcgngccacagggggggggtgcgcatagacggaggcggcggggttcccgcgaagctccgggcccgggcctcgccggagcggctattccccgacgaccggagttgcgcgtcggcggtcaatggtcgccgactcggaccgaacacaccatgtctctccgaccgccgcctgcggtggagaagaagaccgccaagaagaagaagaagaagcgttacgctcccaaccgcctatataagcagcgccccagccgccgagtacccccctaactcctacaccccgaccaccacctaaaagctctccactcgaaccccacctcaccctgcccctcccaccaccatcactcaacaccggctccgttccgatccccatggcg

SEQ ID NO: 430811 - DNA, 97 bp, Oryza sativa
ggaactattatgatcagaacttgttaagtaaatgtgattgatgagcatagtcacatcatgttggcataagaaaaacaaatatggaaattggcctaca

SEQ ID NO: 430812 - DNA, 532 bp, Oryza sativa
cccttatattctccccacctccgcctccgcctccgatccgccgccgccgttggagaccgccggagtcgcgtgtagcacgccgcctcacccccgcccctccccccccccccaatcgctctccatttccctcccctttcgctcgctgctgctcccgcacgccgccggtgcccggatcccgctggccgacgtcgcccccgccgccgagctgcctcctcctccccttctcttgccgctcgaaatgatgttggagctctggtggtaattaaccatggatgcaatggaggccgaggaaggtccttttctggctaatgatgctaagttgcatgccggaatgtacagagcatttcatcctgcggtctcaaaacttgtagcgaatttccctttcattgaagcatcaagacccagaagcaaatctggcatacaggcgctatgctctctacatgtagctctagataaagccaaaggtcttcttcaacattgtgcagattgcagcaggctctacttggccataactgcagaaactgtgcttttg

SEQ ID NO: 430813 - DNA, 127 bp, Oryza sativa
gggccaaaacgcaactgtttggcttttattaaattcttctcaaaatacacatcacataaatcatatattccctttcttttcttggcaacaattcaattaactccgcaacataagcagaggccctaaa

SEQ ID NO: 430814 - DNA, 246 bp, Oryza sativa
ttgaatattgaacgggggaacgcgtacttacccacaagatatgggcatgccatggcaccatttatggggtgcgcctggccaccggaactcacgctggccgtgctagcgtcgggcggtgcccttctcgacagctgcatgctccgggctcgagcaactgaaggcagctgcttgaacgtaggctacacggtgaggatggacagggaacaagcttggcaggaagctcacatccgaccgtacccgagcgca

SEQ ID NO: 430815 - DNA, 445 bp, Oryza sativa
  unsure (1)..(445): unsure at all n locations
gtccgactgagctgcggttgtgtgcaaaccttgaaataatatatatctactaattgcataaaggtttatggaggattgaatatgaagcaactagtatattcagtgaatatcacttaagttgttcacaaagtagaaacgggcctcttttttgttttgttaatttaatactggcacaacttgaggacaaggttgatggtgcaatactgaaacgcattgtgcttcattttcagttgtgctgagccagcgcctcaaggtatatttgcgaatttttccctgttactgaccgaaggcagagtagaggaacctgatgtggntgatctcggcacgatatttgaagaagaacaaaccaaagctcctgtgctaactggaagccaagaagatggagacgacgaagatatagattgggatgacccgttgcatttcccagctgggaaaaggagattga

SEQ ID NO: 430816 - DNA, 323 bp, Oryza sativa
  unsure (1)..(323): unsure at all n locations
gcgcacccgcncgcgggcaggagtaaaggagaaaacccggcccaacacccccgangangaggangagagacnagaaccagccgcagcaacgcacagacagccaggggcaaccaggagcacccgcanccacgacgcaggcgcagccacagcggccagcaccaacccgcggcggcggcaacgccgcccgccaggaacccaaagggcagcacaagggcagacacaaacgccgaaccacgccaaggcccaaccaagcaacggaagaggaaaacaaaaggcaccacaacaaggacnccaaggaacgaacaggacagagaacaaacaag

SEQ ID NO: 430817 - DNA, 443 bp, Oryza sativa
ggattagattaacggcgaggaacacgccgaacccgagcgcggagccgaacatacgggcgccgcccacgaaggcaggcgacgatctcgacggagtggccagaccacgacaagaccaccgcggggacacgcgaccactggagcaggcagaaccagatggaccaggacacagcagcgggagacgaccaccaccgccaggcgaggaacgacgaccaacgccggcaccagcccgacacggcggcaaccgccacagcagggacaacaccaacgacctcatggacaccaacgacccgagggcccaccacaagcagacgacgacgcccaccctcaacgccgacgagcgcagggcgcgcagcacgaactcgacgaggagggaccacaccgggatggcgaggcacgccaagaagccggaccagcgcgccgtccccaagggcggggcccaccgc

SEQ ID NO: 430818 - DNA, 110 bp, Oryza sativa
cttaaatctcaactatgaattgagattatcaaatttcgtggctattcctgctattgagttacatatcttttacaggcaataccaggccagtgaaataataattagtctat

SEQ ID NO: 430819 - DNA, 437 bp, Oryza sativa
  unsure (1)..(437): unsure at all n locations
cttatcctttgcggcgatgcggagcagcagccatggaggtgcttagctccagccgcttctctagggttttccccagcagcctcctcagccccgtctccaagccgctcaagcccccgcgccaccgccgccgccgcgtccagacgctatcctcctcgtcctccgatgccgcggcggcgccgtccacgccgccgccagtgtggccgcccgcctcgctctcccggctcctcgccgcggcgctgcggggagggcgcgcgggaggggagctcccggacctagccgtgggggcgggggcggcggcgacggcggcggggggaggggcngaggatagggaccgctgctgatgagcacgacggcggcggcggtgaccaaggcgcgggagaacccgtacatcctggcgctcggggcgaacccgacgttcgtgtcggggctcgtggccg

SEQ ID NO: 430820 - DNA, 102 bp, Oryza sativa
atagcaaatagagtatctgctttgctcttcaacagttccaatggaggggaacattcacatctgtgaggtgatatgtatgaatttttcggacagaaactagaa

SEQ ID NO: 430821 - DNA, 384 bp, Oryza sativa
ggctttgaatactggacgaagcccaaacccgcactggtacggcagtacggtggttgtaggatcgcaacataaacggcgaaatgaaattttgtagcgatggatgtaatattgagtaggttggtgcaatcacatgtaatcactagatctctcaaatcaaatgtactactggtctttaccagtggcacttggtatttgtcaccattgaccagtgacttactttatttcagcttaacggctaataacctttaaatatcaaattttgatgaacgaaagtgcactcgatagtatgataaaaaaaaaaaaaaaacctaaaaaaaaaacaaataaaaaaaaaaaaaaaataaaaaataaaattttaaaaaacaaaaatggggcggccgtttt

SEQ ID NO: 430822 - DNA, 132 bp, Oryza sativa
tttttcgccctttttttttttttttatagaacaacaccaatcatgtcttatctgaaaaagagcctggtcatttacaaaattatgcagcatccgttccactgtcaccctcgtacagactcataatccttccca

SEQ ID NO: 430823 - DNA, 485 bp, Oryza sativa
atctgacatcatatccctcccagcttggggttcgaatcccaattccgagcgggaaaaaaagtctgaaagttaacgcgtccttcggccgcggattcagaattctgcgaatataagtacattacggtgggccgtgataccaatttgtaccgagcaattaattgaaggttagagtttgagcttataggagatgaagtgattggagctgaatcctgttgctgaaagcagcgatttcgtgtcaaaatttgatgcctttgcttggttcgagagctgtacatgcttgatactgttgcgatcctgcaatgtcccgaaggaatgccggggcaatgcagcgggaggggtcagtcaaggactgggaggaatttgacccctcgccgtctcccaagctggcgtactcgcagtcctatgttgcaatgagggggcttctgacatcggtggcctcgctggacccttgtctgatgtcgagcagcctcaagtctgcttgggca

SEQ ID NO: 430824 - DNA, 320 bp, Oryza sativa
  unsure (1)..(320): unsure at all n locations
tttcgatttacgtgaccgtattcatagcggccgccctcnngnanagcgactgcaaagagtttgagggnnatgaggaggccagaactcccccangacangannggagcagacccagngaagaagcaaancgccgacacaagggcccagacaaagcaagngcgcaaaccanagcccancaccaagcagggggaagaccngcnnnnggcnngnacagangannanganaangggaaaanagcancnngcaggcgcagnggacaaacngcanaccccgcaaangacccacnccnnnncagacacaacagannggngcacaccaa

SEQ ID NO: 430825 - DNA, 82 bp, Oryza sativa
atcatgtacattttaatatggaagaaccccagattggttactgaacaagcaacagtgttaagttggagttcctgattgaaag

SEQ ID NO: 430826 - DNA, 420 bp, Oryza sativa
cccgtacgttataaaaaaaaagaaaagaaaaacagagcgcgcgtttcgcgcacagcacacaggacgtcggcgcggcggcggcgagcggcgagcggccgatggcggacggcggggagatggacgaggaggccatgcgggccttcttcccgatgtccttcggcaaggcgcccacgcgcgccggcgctgccgcctccgcgcacgcctccaccctccgcaagccgccccaaaaccctagcgccaagccctccacctcctccgctgccgccgccgccgccgcgggcggcgacgacgacgacgacgacgacgacgggcccatggtcgggccccctcggcccccgccccagcccgctggcggcggcgagggggaggaccacgaggagggcggcggggtgatgattgggccaccttggccgccgccgg

SEQ ID NO: 430827 - DNA, 193 bp, Oryza sativa
tcttttcgcccttttttttttttttttatatcaaagagagcatctgcttcgctcttcaacagttccaatggaggggaacattcacatttgtgaggtgaaatgtatgtatataacggacagaaactagaaaacaaatgaaattgtccaatggctatattctagctgtgatgaactatgcgggtaaaaaattgac

SEQ ID NO: 430828 - DNA, 167 bp, Oryza sativa
agcggggaccctagtagtgtgggcgccctttttttttttttatagatgtaccaccaacagctttcaccgatgaatagtaggacattgacaaaacatgcagacatgcaactgcatctggaagacgcgtatatcccattgtactaagcagcggttcaagaccaaaaaca

SEQ ID NO: 430829 - DNA, 60 bp, Oryza sativa
aaatatgtacattcattttacaaacatcttcatcggggaaccaacaatatgttagaaatc

SEQ ID NO: 430830 - DNA, 165 bp, Oryza sativa
atgattggaagaatttttgattgtttactgtcaagtattcatactaagtctggagtactacatttcagtaggtacaaataagtgtccacataagatcgccagccaacgacatgaacagcacaaccggtcgtaaaaaattgagaggctgctgcagcacaacacagg

SEQ ID NO: 430831 - DNA, 510 bp, Oryza sativa
gtattcggtcgctcgccctcccctcaatcaaccggcgtcgcgccgccgtctcgcttccgccgccaccgccactgcctctgccgcttcacttctcgtctggacgacgccggcctcctcccccaatcgcagccgccgccgctcgcttctcctctggagtctggacaaactcctcgttcccacgtgtccccatcgttccccgtccctgctgcctcctctcgtccccgatcccagtccccagaggcgtcaatcggaaggagctcgagggcggcgccgactccgcgtgcaagacctgcacgatccaccagcgcccaagcttcgtcctctcagtctcctgcgccgttcgtccttccgtccccgccatcgctgcctcaggtcatccctgccgtggccgagcggcggtggatgggcaaaatggtggcagatccgcgactagatgccggtgaggaggttgcggatcagccttctttcatcccatcacacaggagaaattagaggcaaaccagatgcaaa

SEQ ID NO: 430832 - DNA, 456 bp, Oryza sativa
acttgagcacaagaacaagaaaattggtagcttttattcagtcgctatatccttggccagaagatcagtaattgctggaacaaagaatcgagtgtgtatatatacgtgaaaaaaacattagcctacaaagtgtggagtgagatgaactatatgctacctacttgttacacataattcacccaaaaaaaagctacacttattaacagttcggatattaggttggacctgcataaaggccagggtgattcccgtggtcatatgaaccaataattttactctaacttacagtgattggtcaaaaatgagttatttcttaaccttgcagtgagaatcttccctgttcaccaaggcctcagccaaatttacaggcctttactttttggggtagaacctttagtaccagccggggacatcatttagttttgcacttgcttgaattattcagctttttgcatt

SEQ ID NO: 430833 - DNA, 76 bp, Oryza sativa
atcttttttagttttttattactttacgtttttttttttctagcttccaacgatttctaacattttcaaatattac

SEQ ID NO: 430834 - DNA, 490 bp, Oryza sativa
  unsure (1)..(490): unsure at all n locations
tgattattttggtccacaaaatagcaggcctccaagatgaagttcttacattacaaagttctcttgatgaagctaagtttgagaaagggaagttggaagggctgattcaatcattgtctgaagaatgtgaagaactaaaggcacaaaaggggatgttaacagacaaggtctcatgtatgcaggacactttgaatgctgccaatgaaggaaaacaaattgaaatctctgcacaaacaaagcttgtgatgctaggagatgaaccaccagttaaggaaacatcagatgtacttgaagctgagctaaaaagtgaactaagtattatcaggggagctaacagtgaataccaacaaaaaatatattctcttcaagaggaaaatgaggatctcacaaggagaaatcagcttatggagaaggagcttgacctgaagacaagccaaaacaaagatgaaaataccaataaacaggtgagcctncaagatgaagttcttat

SEQ ID NO: 430835 - DNA, 410 bp, Oryza sativa
agactgtaaccggggggcgcgcccgcattatttaatttccaaagggcaaaaataattttatttatacatcatgcctataaagggcaagaagttttttttttccttcaataaattgggttacagattgttgcaccaaaaaatttgcctttcgattgattgcttaattaattaattaacagggccttttaattttaactggtcgatcagccaccctgggggaaaatcttttttttttctcctggggtagaggtcattttggtttcatttcacatccgggagaagccatcctactgaaccatgaaagggttgctgaactttttgaagctggtcatgatggcaggcatttcctcctcaaatggaaagatggttatccttagggggaacaccccttttttttttccaaaacctta

SEQ ID NO: 430836 - DNA, 55 bp, Oryza sativa
gattgtagaacttgagattgtatactgaaaaagatacacaaaaaacagaaataac

SEQ ID NO: 430837 - DNA, 70 bp, Oryza sativa
attgaaagataaggctttattaatctgtgagcatccagacaatacaaaatctttcccatcctcttattat

SEQ ID NO: 430838 - DNA, 348 bp, Oryza sativa
  unsure (1)..(348): unsure at all n locations
acccccaacccaacccaagcgggggggggttagatagaaaannccaancctttcctccaccgncgnngncgncgnngncgtcagaactcggaaggaagcagatcgaccgactgcgatccgacctgacgacatctgcggcgacctggacgacgaccccaccccttctgcgccgacgccgctcgccgctccgacacccaacggcctcaacgatcgcctcctccgacttacccgcacgcaccaacggggcccctcccaaaacccaaaccctaaccctaaccctaaccctaaacccccttcgccgccgcctcctcaagggacccttctctctctctctctcggttccgtttc

SEQ ID NO: 430839 - DNA, 57 bp, Oryza sativa
aaatcacaacaccataattaattgaaaagggtcaaaaccggcaaaaaaaaacccact

SEQ ID NO: 430840 - DNA, 356 bp, Oryza sativa
gctacagcaaagttacttttttttaccagtgtaagtcacaactgaacacagaagtccgaataccagcaattgcaattttaacgtaaaggaggcacgaggataggtcacaagaaaggcaaaggataaaagttacaagcgttgtatgaaactatgatcactattttattttccatccggcaacataacacttacgatccacaggatgcagattttttggaaagatgggggcctaaaattaccctttggattggtcgaacttggaacgggcgatacctacgttttggaataaggccctcccaagggtttggttaaaaccccctgcctttgaaaagaaaaacctgttgacatttaaggtt

SEQ ID NO: 430841 - DNA, 202 bp, Oryza sativa
agacgaaaaactggtcaatattcattgaacggagaggaatgaacccaactaaatcatagcactatactaaaaaactgactacaacaaacatgcaagagaactagtcatacataaaaggagaaccgctgagcggtaactgacacgatgagaaccctagcaaaggagtggaacataacaacgcgtatgtggctgacgatttaca

SEQ ID NO: 430842 - DNA, 536 bp, Oryza sativa
ttgatttggtcttctcaagattcagtcatggcgatcgccgcatgcagggccaacgccaacgccaaccgaagccgccaccatcatcaaccgaggcggtgggaaaaaaattcctgccaatgctggcacgcacgcgcactcgctcgagaatccggcgggtgggactgaaaaaacaaaacaaaaaaaagcagatcgattttgtcatctgcggcgcaaagcgggtgtgcatttcttttcttttatccccacatccagtcaccgtgacgtggttcttgattcctcaggccgggcgattattctagctctagttgggatgattggattggatccccagccagcagcagcaagcaattcttggccatcggttgtgggtggctgttgattcatgcatcacgagcactcaataaagtatgcagatctgtgcgcccctctctgatttgttcatccaggcaaaagagtatcttgcttctgtgaggatactaaagcgtgaagtgtttgggttagcttttgattaagccatcgaaattttcagtgaactt

SEQ ID NO: 430843 - DNA, 73 bp, Oryza sativa
cgcccacccaaatagcttattaagatctatttactttgtaagcctgaaacaaccaactattttggggctcaac

SEQ ID NO: 430844 - DNA, 315 bp, Oryza sativa
actggaatcctggacgcgagagtgcattacccgctgcagggtatgaatggggcaaacgggcagcaagagagggggcgggcggcgctacagccgatgcacactgaacggaggttgctaacccgacaccgagaggcgcggcctgtaccagaccgaccaatacacaaccttcttctgacggaaggacaacgccaacggtcgcgactgcaagtccatgcgcgagtatctcgagacgaattgcaagcgagcaccaacggcaaggagaccactaagctggtcatctcgagccgaccttgaggctgaagagagcggagccag

SEQ ID NO: 430845 - DNA, 158 bp, Oryza sativa
tatataagagatatgtcgcggcatgtgcacgctcacgtgagtggggaccctatatttggggcgctttttttttttttttttttttttttggagataatggtattatggatacatttttttaccagtttttgagtttatttacacatgagatgcaccaa

SEQ ID NO: 430846 - DNA, 230 bp, Oryza sativa
caaaaggcgacaggaggtgttactatacggaagatgatgttcatggcaacggactccgaatccaccggctccttctccgcccgcccgtccgccgcgagcgcggtccggccgagcgccgccgcggggagggcgagggcgcgggcggcggcgggggagagcggtaagtggtgggcgccgatgctggggtggacggggaaggccgactacatcgaggccccggcgccggcggt

SEQ ID NO: 430847 - DNA, 64 bp, Oryza sativa
tttttttttgttttttttttttttttttttttttttttttttttttttttctttcttttctttt

SEQ ID NO: 430848 - DNA, 350 bp, Oryza sativa
ataaggatccataacgattccattgctagccacaaattaccataaacaagacatcagacaccggagaagttgtctagttcaagcagatgcataaccaaaaccaagtcaaatttcgcatgaaacaccaaatctaaaattatagctgctaaattactggtgctttcaccaaacttacattcatcataggggacagtttcagttcaaatacagcctagtcttgccactgttcggtcaaaccttcaaatggtcattctgcttccatagttaaagcagcaacaaccggcgaaggatgagccaaatgacgaggctgatcaataagtttgcaaatctgtgtgagctgattggttatg

SEQ ID NO: 430849 - DNA, 202 bp, Oryza sativa
aaggacaaaggggtcgcccccaaggggttggttgaaaacccattccaacgggtcgggccaagacccccacaaacggggactaaaaaaaactttaaccgaaaaaccccgggggggtttgggaaaacctcttacaaaaaaaaaaggggggctttttcccaaacaccaccccgcgtcccaaacccccccttaacccaaaagcggg

SEQ ID NO: 430850 - DNA, 433 bp, Oryza sativa
aaaggcataaactggggtgttgactagatacgatagtagtacggtaatccatgtccacataaacggtacaactacaaactcatagctgacttacgttgttcctacacgcagatcttaacagaatcccacacataaaacacgtaatttcaagtattgggggtgcttccctgatggagcagcccatttttttcccaacccttttattttttgaaagggaagcatatgttaagtgagcttaggaacttcaaaacatcgagaacactttaataaaccacttcacatttgacctcgacaatctcaagatattttaacattgcagttgacacccccgatggatggcggcttcctttcatttccactttatgtttaggtcccatcaaaaaaagttgaagagttgagctttttttaaaacaggtgaatgctgaaaaatgta

SEQ ID NO: 430851 - DNA, 492 bp, Oryza sativa
tgaggtatgcctccaacaaaaagggccaagaaagcggctgcggcgggcggaggcgacctcatcggcgccctcccggacgcgatgctgcaccgcatcctctccctcctcccggcgcaggaggccgtgcggacgtgcgtgctggcccggcggtggcgccacctctggaggtccgccccaggcctgcgcgtcgtccgcgccgccggtcggccgccggcgaccgtcgaggagctccaggggttcgtcgaccacctcctgctcctccgcgggggctcctctctcgacacctgcgagctttccttcgatcagatccgcagacaagacattccccgcgtgaacctctggattcgtcacattgtcatgtgcaaagtccgagtgctcgtgcttcacctcaatccttattgtcatgaattggacgaactgcctctggtgtcgcagcacctgacgagggtggagctttctggtctgatcttaaacgacagcttcctcaatttc

SEQ ID NO: 430852 - DNA, 370 bp, Oryza sativa
tatgttgacgcctagccagaagaagaggaggagcaaggggaaggacggagcggtggcgccggtgggactgaggcttaatcgcctgggacgggcttatgctcgcgaggccgacgggaagccggagtaccttgcggtggagcacgacgatgaccaggaggtgcccgcgcactccatcgaccagctcggcggctgcggaggacaagcccaccttgagcttcacaacgaacgcgggaagtgcttctccaccgtggagtcgcgctacggaccccagagcgtaggcggaaaacaggaggagcactacaccaggagaagacagaaagactctgtctaaacgcgggtgatctagctggtatagcctaaaggcactgcc

SEQ ID NO: 430853 - DNA, 92 bp, Oryza sativa
gggaaaaaaaaaaaccgggggggaaaaaaaaggcccaaagaatcagcaaaagttcggggaaagaacaggcagataaaaaagaacaaccgaac

SEQ ID NO: 430854 - DNA, 455 bp, Oryza sativa
cccctctcggcgaacagccgggggtcctctttctgctcgtcgccggcttcttccccgacgcctccccggcatttggttcgcgcgggtggtgccgtgagatacgtggtggacggggtagggatggagtcggacgcctccacctcgccgcgccggcggagcaccagctgctacagcgacagcggcgattcgtcatgctccgagccgttcagcgagtgcgggagggacgacctctcaatcacgccggctgccgccgcgggaatccaccggctgctgctgtcatgcgcggcggatgcgtccgacggaacaatctcgtcgctcgccgtgccacagaagagcccgagcagcccattggtaccttacggcgcgcctggatggagctcctgctgctggcgaagcacaagcctgacaagcggactctgatcgcggctggcgatgcggtaaggacatgtctatgg

SEQ ID NO: 430855 - DNA, 254 bp, Oryza sativa
atcaagcggatctacaagcaaaatgcgagaaactagcacacgttatacaacacaccaccggttggctctgcggcgacataagggcagcagcaatcaaagaccgggggcggctgggcagaaccaggcacgaggccggcaacacaaagggggcaaacggacaccaccatcaattgggggcttcctaaaaacctaggggcaatcaaaacaggcaggtaccccaagaccgagaaggggaaacaataaatggggaagaa

SEQ ID NO: 430856 - DNA, 71 bp, Oryza sativa
aggaaaaacaatccttgcatgcaggggaaaccgccggatccccccctctccttaacttggtcctaaatcct

SEQ ID NO: 430857 - DNA, 66 bp, Oryza sativa
tttttttttttttttttttttttttttttttttttttttttttttatttttttttttttttttatt

SEQ ID NO: 430858 - DNA, 491 bp, Oryza sativa
tttttgtttttttttttttttttttttttttttttttttttttattgtttctcttttttttttttttttttttttttttttttttcaggaaaaaccaaacccccaaccgttccattttgggagggagccccccccacggccaaaccaggggcccaaggggcccaaagagggggggacctcccccccccacaaaagggccccgggcaaagggggggataggggcccaggggggggggggcccttaaagaaccacgaaaggggggcgggaacaaagggggcccgggggggggggtgcccaaagaggggtggggcccaggccccccgggcaattggccacaggcaaaggggggggcccccaacacccccaggggaaaccccccccgccccttccccagggggggcgggggaaacccccccccgggggggaaatacctccccccccccctgggagggggggaccccacggcccccaggggggggacgattccccc

SEQ ID NO: 430859 - DNA, 68 bp, Oryza sativa
aaaaaccggggcaaggaacaatcacacgcaacaacaaaagaaacccacaaataacacaacaaggaaac

SEQ ID NO: 430860 - DNA, 68 bp, Oryza sativa
tttttgatggtttttatttttttttttcttttaatttttatatgataaagatacatttctataaataa

SEQ ID NO: 430861 - DNA, 61 bp, Oryza sativa
aaaaaaaaaaaaaaaaaaaggggggatttataaaaggaattttgcccgttttctcccccac

SEQ ID NO: 430862 - DNA, 394 bp, Oryza sativa
tttttttttttttttttttttttttttttttttttttttttttttttttttattatttaattaataaaaaaaaataaaaaataaaaaaaaataaaaaaaaaaaaaaaaaaaaaaaaaaaaaaaaaaaaaaaaaaaaaaaaaaaaaaaaaaaaaaaaaaataaaaaaaaaaaaaaaaaaaacaacaaataaaaaaaaatgaaaaaaaacataaataaaaataaaaaaaaaaaaaaaaaaaaaaaaaaaaagaaaaaaaaaataaaaaaattaaaaaatataaaaaaaaaaaacaaaacaaaaaaaaaaaaaaaaaaaaaaaaaaaaaaaaaaaaaaaaaaaaaaacaaaaaaataaaaaaacacaaaaaaaaataaacaaaaaaaaacaacacct

SEQ ID NO: 430863 - DNA, 526 bp, Oryza sativa
  unsure (1)..(526): unsure at all n locations
ccttcctatggtatattgctcacctttttgtcttgacattatgttgctttaatacacgcagtagatgcaccattggcatcaaatggctcagtgtactttgctcttctattcaaggagctagccaaaggtatatgtttttatatgaagatttccacagccatctctctgctcatcgtttggaaattttggcttctaatggatgaatttccagataggaattgagatacttaatgctctatgcctatatatatataagtttagatatattcgcttgacatatgttacacaccttgtgtgaatattaactggctaacatttgtattattaaatatgttttttttctattcttcctagctaattgtgctttgggctagtgcttgttttgattcagaggaggcatactgagcaagtaaaagtcacacttcctgctggcctttcgagtatgaatgctgttataccagaatgtgacgaggaaacatgaaagatcatcngtgatatgaacaatgcagcacttagaattggcaat

SEQ ID NO: 430864 - DNA, 357 bp, Oryza sativa
agttgacatgcaaaaaacgaggggatgtctacacgggggattacaatccctttttgttttgccaggcttgctgattttgtcagcaaaattaaaaaagggggggttcatactaaaatcaaattgggggtacatcctaaagttcaaaaaaagcccttacttttaaaaaaaaagaggtggcataaattttaagacattacatcattcccagtcccaattatacccccctgaaacttgggttttaaaacatagccagatcaaaggggggcaatgagaatggaaggagtaagaactgatttttttgcccagaattgggtaactccccttgtaactgggacaacctgtgtttggttcactaaa

SEQ ID NO: 430865 - DNA, 146 bp, Oryza sativa
ggtgggccaatggatagcataacaaatgaaagcaagctgatgaacacatttattttttcatccatccatatttactttgttttcccaattggcaacctaggattacatttatttcgcaatactatttagtctgctggcgattgaca

SEQ ID NO: 430866 - DNA, 360 bp, Oryza sativa
ctcgtctcgcctctcgatccttgcacccctttccgacctctgccatcatcttccccatcccatccggattgccacccaaccaatcgccatttgcttttcgcttccctctcctccccccaaccactccatcatcattcgcaatccaatctcgctcttggttggcgtcgattttgacgcggtctggttcgtgaatccgacggagccgggtgatctgcggcgggacttgcagatccgagcgggcggggcggggcgggctcgctcgtcggatgtgcggatcctggtgaggcgaggcgatgcccggcgtccgcgtgaagatctaccgcgtcttcttcaagcttcttctccgccacaagctccagt

SEQ ID NO: 430867 - DNA, 71 bp, Oryza sativa
aggccttccctgaaatccttggcagggtccatgcaaaaaaacccccaccccccatgccaaggccctccggc

SEQ ID NO: 430868 - DNA, 532 bp, Oryza sativa
tatgacaacaggagatgcatcaactaggatagttgaaatatggtgttgaactgtaagatttccatcttactgtggataccgcggatcaagattttgatctaaaacaatccatggaaaatcttgattcatttagtgaggcatattcctacaacattgtcaagcagatgtttattgagaatgatctgggtggccaaggccgaaaaaaacttgagagttttatgtgtggatcatattgcatcttcagctgccatgtgcaatttacagcgaatttctgcatatatagattccatttttgttttcttaaaccggatgtttgtagatcttcatgctttgcttcaaagcaacattgaaattgatttattaagggatttcaaacaatcagagaacactggagtgtccgatgcccatcctgctacccaaggagacatgaaatttgccctatgaaagcttgggcttggagaccatgctctagacttgcttgaacaagtacaagctgctgttactagaataggtagcgtactaggtctcatga

SEQ ID NO: 430869 - DNA, 298 bp, Oryza sativa
ttctcgcgagcgagaagcattctagccgcgtgtggcgacgtgtgcccccggattccgaggcagacctcgccgccaacgccgacatgaccaccaccatcactacaatctcctcatcctcatactactacccttactcctaccctcccccgcctcgccctcgccatcggcaccaccgccgcgccgaccgcaggacccacccggtggaggccgaggcggccgaggagagccggcgcggcgcgcagggggaggctgcttggccgcggcggacgaacccggtggtggaggccgaggacgagcc

SEQ ID NO: 430870 - DNA, 61 bp, Oryza sativa
tttcgggggtgttttttgttttttatttgttttacttccttacccttttatttttcactta

SEQ ID NO: 430871 - DNA, 399 bp, Oryza sativa
gaaaaaaaagtagattcattgataaagtaaaaaaactatctacaataaccttcccaatgtacatactttacatattagtgtgcaaggcatacttacagaaaggggaagaatgcacactccaatctgcttcaacaaactaatggtacaacaatatggcaagtagctgattctctgcaaaaaaaactgccatggcctccaagatgttgctctaaggggaaaatccccccaaaaaatgctatttacattgtattcctgcgcctctccatctactatgtgttaaattaacacaggttaaactgttttccgtccaattgattttccagtgccatcagcactcatgacactggtctattttgcaatgtaagatcagaaacagatgaaaggtcctcctccaaaagt

SEQ ID NO: 430872 - DNA, 164 bp, Oryza sativa
ataaaaactaaaatcagattggcatagcattcttcatttactcgccctatttgcaactttcgactctgaagaaaaacactgaaaatgcaggttgcttagcctgctacattttggatctctttttcataacccggctgtttatgcgaccaccaaaaggttcatgg

SEQ ID NO: 430873 - DNA, 107 bp, Oryza sativa
gatgcaccgacgaagctggaccttagattttcgccttttttttttttgaaaagggcaacagaacatattatattcttctaaactacttcatgaggtaagaggaacac

SEQ ID NO: 430874 - DNA, 393 bp, Oryza sativa
cgacaaacgattttaaattaccgacagatcggcaaaccacataaattccacgaaatctaagctcttgatgatagctatgtaccactaacaaaatctgtaaaacatttaaagcaagtgcagtgggtggtgtaaacatcatctctgaggccaaaattagagaacacggcacatgtacatccacggaggcgcctaattatgaccaccaaaccaaacactgggttctgtccattttcaacttataaaatataaactttgcagtgaatacctgcatgggtcaaaccaccttgcctatgcaatcacctttatttttggatcaccttttttgccatgattgcttaagactggttcccggattgagatgcccgacttgtatcccttggcaaacttgttgga

SEQ ID NO: 430875 - DNA, 273 bp, Oryza sativa
caacccttgcccaaccccccaggaggagatctttaaaaaggactccccaacttctcacgacgcggcatacccggacacggatgaagggaagaccaagcagcttgaaaggatcgtgacgcatcaggaggacacctcctgctccctggacgtcggcggaaggaccctgcatgacgatgcacaagccaggggcgacggttgcctgatcaagccatgacctgtggagccgcacgtggacacctacggaggagcagtcctcctcatgaactacgaacg

SEQ ID NO: 430876 - DNA, 359 bp, Oryza sativa
taatgacagaaaaccttgtggggaattttcaacagccaactcagtgtttcacaccacaaccacctgtacagatgatgtttctgcgaacagatcagcagaaaattcttcacagaagaacattccattggatggagtatctgcacagtccattaagacatctgcaagtagtgggtctgaaccagtacgtcttggtggaggtttgcagcctaagaggcggagcataacagccaagccacctgggagcggaatatgattctgtaatcagcaaatgaaacagggcagagctttcccaatttggtaaccacaaaacctccaagcataatacccgcaaattttagaccattttcctaagggtgatc

SEQ ID NO: 430877 - DNA, 71 bp, Oryza sativa
ttttttttttttttttttttttttttttttttttttttttatttttttattttattatttatatttataat

SEQ ID NO: 430878 - DNA, 482 bp, Oryza sativa
tgcccatcaggtgtcagctgtaattactggagaattctacactagagatcaatcccctggatttggaaggccctttgtgttcaacgcagagatattaaaaaggtatcggactaatggtgtacatggaacagtataattctgtgtttttctcatctagcaatagcatcttttagctgaatgattgtatttttctgtcaataggctatcactatgtagttatgctacatatgaacatgtattttatactgcttatcagttgcaaaatatgaggaatttgttctcaggcaattctacattgtctggccattccactgcgagcacctgctgtaaacctggtcttgcatgtctttagttatggctgcttagactgacaagtctttgcgcaaaatgtcgatgcacaccatgtaattctgatgagatttctctattgagcaatctttatgtatggcgtcaaaatcagaaagtcggaaagttttctaaca

SEQ ID NO: 430879 - DNA, 71 bp, Oryza sativa
aacggacaaaaagcaattcataaaacgcataggaatacaccctagttcacacagtacggctcccatccctg

SEQ ID NO: 430880 - DNA, 458 bp, Oryza sativa
ccccccaatcccttgcgaggcgtctatagagcgttttgcattccttttctcccctgcgcctgccccgggagctcctccggcgagatccggcccttgacagccaccctcccacggctgctcgtcgtcctcacctccggcgaccggctcaggaagaaagtaacttgagccatgggaaagaggaagtcagcggctaagccaccacctaagaagaggatggacaagcttgatactgtattttcctgcccattctgcaatcatggcagctatgttgcatgccggattgattcgcgaggcacagggaggtgaggggtgatgcactcgcggggggcgatgctgggagcgctgtgctgatgcttccggagatcctgtccaagacgtggtgatgttcgggaggggcgtgggtcaaggccgggcgcagatcttctccagggggggctcgatacctggggaccccacct

SEQ ID NO: 430881 - DNA, 325 bp, Oryza sativa
ttttactctacccctttctctgttaaaagttctattttgtggatagtgtaatagccaatctaaataaccttttaactttgtgccaatcacattgtcattttgcttattctttcttttctttcttgcagatcaaatcgtgagctgcgtgagcaagattttacctctagaaagcttaggttgttcattattgttgcagagtttgtgtttccgtttgttttatggtaccagtgacatttggtatataatcaagaagaattagtggaggacttgttgtatgaattgccttgggttctttttaatatgagaattccataattgttctgtg

SEQ ID NO: 430882 - DNA, 328 bp, Oryza sativa
ccttttcaaatacaatagatgttcaaatgttcctaagagacgtagaggccggacatcaccataataattacactggtggatcacatagctgggaactgccttttctccagggttggttgatggcacaaaaccgtacaggattgcgtgcaacacttcctaacaacgaggttataggagacttacctatcggtggcactgctgggactgataatgtgatgaatgaatcatcaaacatgtacagttttgaacgtgtagggccttcatcatcaattccaattactacggacagtttgagagggctaagtaaacatcgtcatatgctggcctc

SEQ ID NO: 430883 - DNA, 147 bp, Oryza sativa
ccctgcttctggcttggcatcaggtctaaattcactggagttctgcctaaacccttgcggctctgaagctagcatactatatgtattatcaaaggctattaattcggcgcacacgctgagatacatggctgagaatgaccttgtttt

SEQ ID NO: 430884 - DNA, 83 bp, Oryza sativa
  unsure (1)..(83): unsure at all n locations
ccggcccgcaacgaacgggccgacccacgcaaaaaagaacttcctcaccaaaccngaaaaagaaccagcaaggggggggaagg

SEQ ID NO: 430885 - DNA, 387 bp, Oryza sativa
gggtgtaatatatgccatcatcattaaataaaagttctaacaccagctgcataaaacaattacaagatactatgaagttaaatagacagttccattaaagaagaaagccttgagttaattggggcaacggtagcatttgagaaagttatggtaaaatctatcataccaacctgttttccatgggtaaatacagatacatcatagtacttccaactggaatgtggttttcaactactgggacatgaacttctgcaatttgtaacaataagctgacttttgcttacataaacccacccaagaaaggaacaccctaccttgtttcatatggacctatttagaaatgaactttcagatggaaaaccaaacatttcttaactcacataaaat

SEQ ID NO: 430886 - DNA, 316 bp, Oryza sativa
aaatgtgcattcctaacaaacagaaattcaatagaaacacccgccaataaaatcaccaccttgtgtatgtataggtttctaacaattaataacaaatgagctttatccatcaattagaattgtatatacgtattaaccgagtacttttgaattcttattctgatcttttacccgaagttgtgacatctccaaggactcaactaaaaccccactagtattctttctagaacaattccgacagaatttcattgacattgtttacacctggttattgaaatcaccaccaaaaacttctttgcttaaccttattttcggt

SEQ ID NO: 430887 - DNA, 224 bp, Oryza sativa
cccaacggatgagaaacctagcgaaaatctcgtccttgcggcagtacctctcccctcctctgatccctgctggtcttgatcttgtgatccaattccccaccaacatcacggctaccgattaaggactgcaaagagtacgtcctacggcacggagaaggggcataccctgaaggaggccgcccagcacatcttctgggaccatgtgctggccacatcatgggcag

SEQ ID NO: 430888 - DNA, 56 bp, Oryza sativa
aaaaaaaaaaaaggaaacccgctcccaaaaatagagggggggagaaaaaagttttt

SEQ ID NO: 430889 - DNA, 431 bp, Oryza sativa
ctcgtcgaggagagagaaggagggggtttttgaggaggaggtggggatgcccccccgacgccgattcgggcgtgggggggggcgcgcgaccaggggaaccgccgcctcggctggacgcagccttggaagccgcacgtcggtagaacccccttgccagtggccggccatggcaccgaccggcggctgttcgggggcgccggatctggcgatgcaccgcgccgggcccggggatcggacagtaccagacgtggccagccgccgaccggaacgagctcgtgcgcgaacatccggtcgacgaccacatggtgctcatcggcgactggcgaccgaaggaccacggagccatggccaagatgctcgacgccggcaagagcttcggccgcccgacggggtccggcataaacgacaagtccggcaaggccgacgccgac

SEQ ID NO: 430890 - DNA, 289 bp, Oryza sativa
agaccgagcctcaatattacagcgtttttataccgaaggtaaagcatggtgggaaagtcgactgacataaccaagacgggccgattccaattacacttagccatctggggggaaactgaaagggacaaacgcccataactattacaatcacagcagataaactcttacgccagataacaagtgaatgatggtgacattaccctacaggacatataattgtagagagaggtaaaaacggaaacagtaccaggcccggaaggggccggacaagaaataagcactaggaaga

SEQ ID NO: 430891 - DNA, 217 bp, Oryza sativa
tctctgtacctgttgcgccgacgggcggggcgttggaaggagaaagctcgccatctgcccccgcctacgtctcagaagggacatcgttgacagatggttgaggatgagctggctaatcaaccgcactgtacttaaacagcatcggtggcagatccaccttgactacagctatttctgaaagtgatgccgactagcatcaatggtgaccacaatgagt

SEQ ID NO: 430892 - DNA, 52 bp, Oryza sativa
atattattaattttttattttttttattaatttaaaaatataattctaacaa

SEQ ID NO: 430893 - DNA, 242 bp, Oryza sativa
gagagagagagagagagagaagggggggggttaatggagcagaccgcggaacccccccccacggagaaccagggacagagcgagcctctgacacaggcgggacgccggcgagaagagggggcgaagaggagaacgcaaggcgaggcaacgccagacacagagacagcggacacaaccagcaacgataacaccgctgaggagacaaaggaagggcaagaggaaaacagagagcgggcaaaggc

SEQ ID NO: 430894 - DNA, 107 bp, Oryza sativa
tttttttttgggtttttttttttttttttttttttttttaattttttttcttttgttgagtgggaccccgaggacacgacgggacaaccacgatgaaagaacacacc

SEQ ID NO: 430895 - DNA, 492 bp, Oryza sativa
acgacgccggcgcccggctggcgcgccgcctcatccactagctagcgcgccgccgtcttcccccacgtcggccgccgctcttcttccccacctcgccggcgcagcttctcccaccgcgccgcctctcctctccaccacccagtgaactccgccgccatgtgctggagcagctctccatgcaggaatcgtgaactgctggtctgttttgctggaccgagacgattgctttgcttcatgattcttgccgatgctgaccgtgttgcattgattggaccggggcatgggaatctctgaatctgaatgagtgccttccattagagtgaacatggactcaagagttggaagtggtcctattcttcctgctctttgtccttgccgccgatgtctcagcggtcgctgagacagagttggccgttgtgcgcgtcgtgcaggaagcgcctgataggaaagctgagggcgcatgcgggcaggatgggttcaagagcgggaagg

SEQ ID NO: 430896 - DNA, 366 bp, Oryza sativa
cccaaaaaggggaacactgggccccaaaaaggggaaaagggaaccgggaaaaagaaaacaaaaatttggtaaccaggaaaaagggggggaaaatgggacaaaccccccccaaagggggaaaaatgggccccccaattgggaccaaaacccaacccccggaaaaaacaaaaatttcccccccaatttggtaaaaaaaaaagggggtaactttaaccaagcaacaggggaaaaggaaaaaaaggggaggaaaaaaggccaaaaaagggggcccgaccgggggggccccccccgggggccaggggttaacaccaaaggggggccccttgtccccggaaaaaaaaaaatggggggcccccgaccccccca

SEQ ID NO: 430897 - DNA, 332 bp, Oryza sativa
ttaatgaggttcaacgtttcaatccagttgatgctttccctggtgatgcaattatattcatgagggtcccgaatcttcttagagggctatcagcatcactaaatgttaggatagcttatctagacatcatgaggccatttgctgaatcaactttgctagggagtatgacacgtgggcccacagctaacagtcagtggatttatgactcacctgttaactcagaggtggagtctaaactgcggaaccttctgcttgagttgggaagcaacaaaattttaggaatacaagtttgtgcttataaagatggaaaggtcataatagataccgctgct

SEQ ID NO: 430898 - DNA, 89 bp, Oryza sativa
tttttattgtttttttttctatttttccatttctcccaggctcccacccaacaatttatcaatctaaaaccatctctttatctctacat

SEQ ID NO: 430899 - DNA, 520 bp, Oryza sativa
actgctccacatcccaaagtaaatccaacaatacaggatccgattcagagaaggatggatctgaaacacaggctgagccaggtagcttagcttctaacactgttttacgccttctgttgaaggttttcacactaatatgcaaggtgttgcaatgccagaaacagagacagcggtttcatcccatactgaaatttctgctgagcagacaaagtcagggcaagaggaaaacagtgatcgggcaatggcctctgctgagtggaaccgccagaaggaagctgagcttaatcagatgttaatgaaaatgatgcaagtcatgcctggaaagttttcgagtgctaatgtcaccactactggcatcacttccacaaatgagaagaaaggtggactgcaaggtcagcataaagagaagcgagactcgaaagctcgaaccgattaaggtggaaggcggccagcaaaggaggcaagcactaggccctttgaggaaacagctgggcagaagaggcagcattacccccaaact

SEQ ID NO: 430900 - DNA, 354 bp, Oryza sativa
catgttcataagcttatattattgttgagaaaggatccaattctatacacatgcataaagcaaaatattttaaatcaaagatgtgtagggaaattttatagactccaatgctaccagaagtaccttaaatcacggatgcattagtgagtctttttgcaataatctccacattcttcagcagagcactatcacgaaccttagcacactgataatttagatgtatagcccttggttccaatattgctatactgtcccgtggccactctagatccgctccaccgctgatgtgggcagctcgctgttgaggttgcctcccccttttttcaatttgccaccccacctcattgacggttc

SEQ ID NO: 430901 - DNA, 202 bp, Oryza sativa
tttctggtgcttggcgaacaggggggtcctcatgaaggctttttcggttcttcccccgagggggcagaggaggagcatgctgtccatctccaccggatctggctggtcccctctctccggtgacctctctccccaggcggtatgagttcagatcagcccctcagcagtcctttggcgcgagccatcggcggaggcctccatg

SEQ ID NO: 430902 - DNA, 299 bp, Oryza sativa
acttatgttcatgaataaaaagtagcatttctatccttattatatctcttcctgctcgctaattggtttatccatttttctggaaggcttcccaggtactccctccgtcccataaaaaaccaacctagatgtgacacatcctagtactacaaatctggacattctagattcattatactagaatatgtcaaatccagtactagattcgttttttttttggacggagggagtattccttatatgctggtagattcatagttcatatcctgtagcaaacatggagtttcagtttacaaaac

SEQ ID NO: 430903 - DNA, 84 bp, Oryza sativa
gaagtagcatagcctggaggaatcaaagcatacagagatgggtgacttttaaaaggaccaccgtggacaaagccactcaagatt

SEQ ID NO: 430904 - DNA, 254 bp, Oryza sativa
gcggggagtacgtgcaccacctcaccaccaacggtggcttcgtgtccttcggtacgtagcagtagcacatatcgcacgcggcatccgcgtccgctcgctcgcttgccccgcaccgcaccaaccacgcatattctccgtttcgcccccacgcggccacgccacggcaccgtgccgacgcgcgcgttttgtgtgcgcccgcaccgcgcgatcgcgagaggccggtctccgttccgcggtgacagtggccactaccg

SEQ ID NO: 430905 - DNA, 477 bp, Oryza sativa
gatgaatccatgaacgaaccattagcagctagctaggtcgcgggctgagggctgactaatcatggagcaagcagcgaaggccaccatctcactgtcgccgccgagttacgctggatgttgcatggcagcatgtccctaccgatcaacgcggcacctgcgcagaggaggcggctgctctgctcgctccatctcctccctccggcatgccccttctgctcgtgtttacgccgcagccgcagccgcagccgcagccacgccggagcccaagtcgacgaaagagaatgacctcgtcttcatcgcgggagccaccggaaaggtgggatcccgagctgtaagggagttcatcaagcttggcttccgggtccgcgccggcgttagaagtgcacagagagcatcgtcccttgtgcagagtgttgagcaactgaaagtcgatgacgatgcaacttcgcccgcagaaaggctcgagatcgtagaatg

SEQ ID NO: 430906 - DNA, 407 bp, Oryza sativa
  unsure (1)..(407): unsure at all n locations
tgctcaagagcaaaaggcaaaaacatagggcagtgataaaactatttttgggcacagttagtctgtgaccatgtcttcataggcataaatgaaagggaaactcattgttaagaaactgaaatggaaacaacttttccatggtgatccaattgaccatgctaggatcttggatatcaatactgtaattcataaagtgcagaatacatgattcagttggagaaaggcaatacatgaggaagatgttttgaacaatatattatcttaggttaaactattttttttctcatctggtgttttgtacccttacaatcgtctagctgtctagctgttgtaattcatcaagtgttaccaatgttgaattggttgtactctatagcaacctagcaggactttatattttgntcttt

SEQ ID NO: 430907 - DNA, 466 bp, Oryza sativa
ggtggcatttcccacgctcctcgaccgcctcgcccccccctctcgccgccgtcgtccctccccttcgccggctgcgatggggtgcgccgcgtcggcgacggacatcgctgagcggcggaggccggggcggtcgccgggccacgacggcgagcagcagcagcagcaggatgggaggaggcgcgggtgcaaggtggcgccggagcccaaggaggaggacggggcggcggcggcggcgttcttggcgtcgatgcccggatcccccagcttccgatactactgccagaagtccgccaccgtcgacgccatcgtcgccgatgccgacggcgacggcgacagcgacggcgacgaatgcgtcagaatcaccgagacgcctcagccgatcaagaacaatggccatggctccagcgagctcttcaaatcggcaccggaggcgagcaggtgggtcagggtcagaggcctcgcgctc

SEQ ID NO: 430908 - DNA, 248 bp, Oryza sativa
cgttgagtttgatgaagcctgcaaatggttcactgcgaactttgggggtctagcagctcatcgtccggcttgattcgaagaatcgagctgtcccaataatacccggggctgtctcaatcaaaaactgagaggtaactgcttgaatgaattgctactaacttcggtgccttgggtataccggcctcgtggtagcctgctgtgctacattgccctcattgcctcacggaatcttaactagaacttttatt

SEQ ID NO: 430909 - DNA, 195 bp, Oryza sativa
gttcttcctcctcctccctcgccgtcctcacaatttgtctcttcccctaatttctccccccaatttcgtcccttctcgggtctcgaatttgtcgcccttcttcctcgcgatctgtcgcgcttcatcgccatcggcgacctcgcgcgcgcgccgccggcgctgggggggcgccggaagcctttctctcgtcgagag

SEQ ID NO: 430910 - DNA, 224 bp, Oryza sativa
ctgctcttcccccccgcgcgccggccatggccaccgcgacgctgcccctccgcctgctcgcctccaaaaccctagccttcccctccgccccgtccctcccggcctcgcgatgctccctccccgtcgccgcgtccgcgccccgccgctgctggcggctcctcgcttccgccgaggagccggcgcccgcacccgtggaggccgaggccgaggcggaggtggtagag

SEQ ID NO: 430911 - DNA, 502 bp, Oryza sativa
gttttaacttcctccctctcgcccggttttccctcaaccccacagatcaccagccgccgccgccgcatcagggcatcgtcgccatttttgctgtgccctacgcccacgaggccacgagtggagttcgtcgccgacgccacaaccgaccgctcgcggcatccacgccgcacctccctgatcgtcaccaccgttgctccattgatctggtcggtaacgatggaggaggcagccttgagtgggaagcggtgaggttttaccatttttgcgcacgcggctagattgaaaggatgcaattaatgtgtcctggcaatcaggcaaatcatccatctccaagtccgaccgctgacgctcgatctgaatcctctgcctgaaaatgggctgctggccggtaaattaggcagttccagagcatagagcaggaagagagtcgggaccatgactcgcaaggattttcatatcatgggggtacacagtcaagttatgctgaggatggtgagcacct

SEQ ID NO: 430912 - DNA, 335 bp, Oryza sativa
atccatctttatctcatctcgccacccaaaaccctaaacctgcctcccatttccgccgccgccgccatgcagtcgcttgccctcacctccccctcccttccggcgccggagaccgaatccggccgccgacgacgtcgcctggagcgcatccgcgccaccgaggtgttcgacgagccgaagctgaacaagtacagtgcgcgcatcacggagcccaagtcgcacggggctgtcataggcggggctctacggcgtggggctcaccgacgccgaccttcgcaagctgcaggtgggcgcttcctccgtctgggacgagggcaacacctgtaacaagcacc

SEQ ID NO: 430913 - DNA, 453 bp, Oryza sativa
gtgagttttatggaaccaatccaactgcatttccatatttggaggaccttgaatttgatgatatgccaaaatgggttgagtggaccaaagaagaagagaagtatgacagcgtgttccccagactccgtaaactgaagcttttgagctgtcccgatttgattaaagtgcctcccttcccgcagtccgtgagaaaggtcagtattgagaatacagggtttgtgtcacacctgaaactatcttcttcttcatcatcaaaagccaacaaagttaaattggaaacatgttctgccgctgtccttaccaatggtttgttccaccagcaacaagtgcaggaaattgttgatttgaccttgaggcactgccaagatgtaaagtttgaagagcttcatgcacttacttccctcaagaggctgcaaatatcttatttagagatgactgacgaggagttgggta

SEQ ID NO: 430914 - DNA, 331 bp, Oryza sativa
  unsure (1)..(331): unsure at all n locations
tctcacgcnnngtccggctgtagacttgttatggctgcgcgccacccggcaacgcgccgccgacgcgccttgcgctgaggcacgtgcatatgcaccgtcgggctgactactagggctgctgctgcccgccacgaacgccaccgtcggcgtggtctactactgcgttacgattgccatctagcaagcagagcaaggatgggaggggcgccgtggctctactgcatccctggagagcatacacatcatacatctctctatgtcccacccattgtttggctggaattttattgcgttaaccatagcttctattagagatctggatgatgctctt

SEQ ID NO: 430915 - DNA, 103 bp, Oryza sativa
gggtcgtggatgggaggtgcggcgggggtggacggtgtggaggcggcaggtgggccttcgccagatccgatggcgtggaggcagttgtggcccggcgggggtg

SEQ ID NO: 430916 - DNA, 435 bp, Oryza sativa
tgattgggtactacctcttcatctacttccagcccaccgacgtcaaggtacgattcgccacccttcttttcgttggatgcctcgttgtggtttggcatcggggtgaattagtggagctggaagcgagaaacgggatggttttcgaggcttctctgtacgagatgatacagtgatatgcattcctgaaaactcatcgtttagttctttcctttggtttgggcttgctgtatagggtagctggagttagcttgctttcatcgtataacagtaggattgtgttctaatgggatccttcgaattagccctgcatctctactgtggatgtgaagaataatcatctgattggatgtgatttatgagaagacgaatttgcaatttacgaatttttcggtatgcatgaggtcttttgaaatggaggtggggggtttgttttcc

SEQ ID NO: 430917 - DNA, 159 bp, Oryza sativa
agtacaactttgtatagtctgcatgtctaatatcagaatcaacgcaaacattctgttgggatgcagcaacccactaattttgttgggatagacgtgaaggaattctgggcctgtccaaaaaaaaaaaaaaaaaaaaaaaaaaaaaaaaaaaagggacaa

SEQ ID NO: 430918 - DNA, 131 bp, Oryza sativa
ctcgactcctcgcgagccgaggcctcgaaccctaacccccattcgatttccggcgagatgcccacccgcgtctgagccttgctcgtcggcggcgaggtggggtggggcggggggcggtggcagctagggat

SEQ ID NO: 430919 - DNA, 380 bp, Oryza sativa
  unsure (1)..(380): unsure at all n locations
cccacgcgttcgcaaatattcagaactagctagttcaatcttgcacttatctctgacttccttctcatttttgtttcattccatagctgaagcaaaatggtatgtgctgntcttgaatatttgttgctgcactcggttggctttctggttcaaatcaacatttttttgtgatgtatatatacttggtagggtgacaagaaacaagtgaagctaaaggttcggggtgcaagcgagactgaggtcaagaatgtacttcgccaagaattcaaaggtttaattaccatcttgttttttctgttgccaaaaaggaacgagcaaaactcaaaggtgtagagagggatagctaaaatttaagcggcatacaaggaaatttctttact

SEQ ID NO: 430920 - DNA, 351 bp, Oryza sativa
atctcttccattctctgcctctcgattcgattcgagtttcttcgtttttttcccctcttaataatcttcgtgttgatttggattgtcgtcgtgttcttcgccttttctgtccgcagatctccgtgcgacgctgcccgggagcctcctctatctggattcgttcgacttgattgattgattgttcggtttgcttgcgacgtgtttgatttttttcctccccggtgattcgattcgatccgatcctatccgaccccttctctggtctcgatttctgttttgtgttgctccccgtgttcgtcctctcggcgtgttcggttgttgcaggagcggatttgatccgggattttggag

SEQ ID NO: 430921 - DNA, 554 bp, Oryza sativa
catttatatttatgcaatattgtacagtactctacgagtagcagcctgatagtatgtgatatcgtgatccatataaataaaatactctgatatgtcatttatttttcataaattagcacgtgatacaaatggtttctcacattattcatcattttgtaaacatgtctgttgttcataattgtagctaatgcataactaaccattgtttctaataacacttattagctttatttagctctacctctggtagcaagttacccttttcatcattatttctttgtcttctaggcaatctatagatcattctaggacattgtttcctttcaatgaaaaatgcagggatcattgctccagttaaaggtggagtaggacttaaaactaccataactttcaaagagaaccctatctaaacacacccctaacatctgagtcagtcagctttctgggaccagtcctatcttgtaatgtggttgccagcttcctgacctattgctactttcattttgccaggccctgcttcgtacaacctgtaaatggcaaactaattagtaatg

SEQ ID NO: 430922 - DNA, 392 bp, Oryza sativa
cccacggcatgcgaattactaaaccgaggagagaaaaaaaaagggttcgcagcacaaagcaaagagctgatcggcgaagcgggtaaaggaggacactatatggttaaagagcgccagcgattgagccgactagctcacggttttacacagggatgattgggatcgaaccctggtaacctacatgtctggggcgccacgctccaaccttggacttgttcccagggatatgcatggtagtatccctattagcactacaaattaatctgggccaagcattggtgttagctctttggtgacggatgctaactcatcgctctccggaggtgcccagttgcagccaagtacgagcatgaatgctgattcattcatgcgccttcctgctttcccaatgt

SEQ ID NO: 430923 - DNA, 557 bp, Oryza sativa
gatttaccctcttgttcttacccactcttctgttatcatttacttcgaggattgattggccggttggtacacctatcttttccttgttagtggcaatgatttcttccttgttgccttctggatttagactacatgctacagaaggattaaggatagttagttcttgatttgcaatagaacaaaaccgttgacttgctacggtcttgtaccattctgtgtttgatcgatcccgttgtagtagtactatagtatttctcaaggtaggtttcctggaaatctcatttgggagtttgattttgttgcatcagttgtgcgaacaagcatactgtgaagctggcacgccaagcattgcatgccaaatcctggctgaagttactgaaaataaaattgtagtatcctgagtatttcaattcataacaacgacccaaaaaaaaactctagttctttttttctttttaacttgcgtgcagtaattaccaagtgtatgattacgaaatggcactataatgtccaaacgagatatttgagtagctttaatggaactcattaaataaaaa

SEQ ID NO: 430924 - DNA, 334 bp, Oryza sativa
cgtttggtttagctgaacgccgccgcgctcccgctgctcgacctgccggagcttgcgctggagcgcgtcctcgaggagctggagccgccgtcgctcgcggcgatggcgtgcgtgtgcgtcgcgctcagggaccgatgctctgcggacaccctgtgggggcgccacgtcaaccggaagtgggggcgcgtgctcggcgccgccgtgcgcaaggagtgggaggcggagctggccgcacggcggagctccggcgcgctgccgcggccggccaggcggaggagcttggcggactcgctggcctgcgcgtggcccttttcttggatcacctggcgctggg

SEQ ID NO: 430925 - DNA, 390 bp, Oryza sativa
ttgtaacatgagacattacaccaaaaaactaggtgggtcatctttggcctgcacgctcgggacacaacttgccgaggtgaagggtgcactatcgggcattggctcacatgccacataactcaaccagaaggctgctgaagactctagcgccacttgtctagagctcgtaaccaacgtatccatctctgaggtggaggtcaaggaaaaaggcggctaggactggccggcgtttaaggagacggtctctaacacctggacactaaaaagtgatgcaccactcaagggccctttttccgtttgcttgctttgtaataacggaggctaccgtgtcgcacaatgatggccatccctaaagctttactgccggatctgaatataagagtggcatcc

SEQ ID NO: 430926 - DNA, 445 bp, Oryza sativa
gcttatctttgtaaaggttagcaaatcatatccaaatctctgtcagatgctattgtggcaatatttccatgtattacatgcccatacatgtcaactcacaagacatacaaggcaatattgatatgtctttccatagatatcatgatagcaacaatggtaacattatcctccttagcctatatatatgtgggtgaaggagtgtgatccaaaaaaaaattactgatcctccttagccggctgcatacgactgctcaactttaactcatcatcttggtatcgttctccaagctatctcttatgtgttggaaattattatatactttagtttgcacctatagatctaccatttcttatgtattggaataaggcatggcatccatggatgatgtggatttttcaccacattaagccacacccaagggggcaatgaactccaaggatgatg

SEQ ID NO: 430927 - DNA, 230 bp, Oryza sativa
gccgcgccagaatctgctggacgaacgcgtccgcgcatctttcaatctcctaatatccacgccaatatttctatgaagacggacgagcaggggctaaacccaacgaccagcatcgggaaacggccacggaccgcgcagatctaagcggggtaggtcgccttggcgtcagacacaccgacgcgacagatggggctgaccttggtttaccttagccggacccgggggggggg

SEQ ID NO: 430928 - DNA, 390 bp, Oryza sativa
acttaagatttaactgctttatttgagccactaaaatgctgtcagagtaacaaagcagtcagtgaaaaggcgaaaaaatgacacgcttatcataattgccttttccccaaaccttttacagtatgagtcaatttaattgcttgagacatttaaagcgtcaggaataggcattgctttccataaagattaatatgtcctacttgcacatgccagtatatggggttagcttctgacaccttaactaactaatgacacgtccatccattttcaccagaaaaatcttcatccttgtcggtactctaggaattcacattgattaaccaatcttccttgcatttataacaggacaggtgcattccacaagtgcgaacaatttttgttcttgaaacg

SEQ ID NO: 430929 - DNA, 379 bp, Oryza sativa
gttttactctatcgccgcaggtgatctttcccgggggagaactcgcgattcgtgggcggatgcggaggaaggaaatctgtggtggaatggggtcgtgctcttggttgtctaggtctgtgcataaattgcgagcaggtatggcggaaccagagcatcctctgtgaatgtgtccattagcgccggcgacaaggtgaggtgaggtggtggcggaggcgaccgaaacggcgtccgtgctgtgctgtttggccgacgacggtcgccccgtctgctgattacgcctcccatggtcgatcttcaacggcgatcacaaccacaaccacaacttgggttccattgctcgtccaagagcggatacaccagttgcgcctgatcaaggaag

SEQ ID NO: 430930 - DNA, 306 bp, Oryza sativa
tgatcacatacgctgtaaagctgatggaatccacatcaccggatgggttcgtttaacgtgggcgtattcttgatacactcatcaagtctaatagagatgatgcatggtggagcgaatttcatgggcagagtatgcagatatacaatatgattggatctgtatcctacagtgccatactccacaacttaattcagacgctggatttgaaaagtgcatatgatggagagatcaggtcgggagccgcaaggattgttgagcactttgctggtgaggtccgtttagacaaaatcctgcaagggattcgat

SEQ ID NO: 430931 - DNA, 109 bp, Oryza sativa
gctttgcttttgatggcggaatatatggcggcgagcgcgcagacgtgggtggaggtggcggcgctgactcatgcgaagctgccgcagctgccagcgatggagggggcgg

SEQ ID NO: 430932 - DNA, 77 bp, Oryza sativa
ccggggggcccggcctgactttccgggtcgacgacccacgcgttctgtgttttagatcgcggctatcgcgactaggg

SEQ ID NO: 430933 - DNA, 473 bp, Oryza sativa
tcgcctccattcccaaagctttgatccggcagcagcggcagtagcggcggcaccaacgggacgaagaggttgcggtggcagcaactcccacggcaggaggaggtgtcggcaaccacccgtgcgaggaggcccacaacaggaggcggcggtgaatcacgagcaaaagaaggcggtggtggcggcaacctacgtgaggagggtgcggctgtggcggcagcttcggtgacttgcgcgaggaggcccacgggaggaggcggttgagcccatggcggtgacttgcaggctgaaggaggcaacagcgactgcagactgtggtgcctttctcaagcggtcctccgatggctagggagatgacactcataggtggaactctaatatcttcgtccgcgggtgccctcctcctatgtgtctttttggtgttttagaccaaagtgtttcaacggggtttccgatggagtttcattcttttcttt

SEQ ID NO: 430934 - DNA, 514 bp, Oryza sativa
aatatatctctatctctctctctcctcactaaagcacaaatcctactcttatcatcctgtcttcttgcctcccttctgcctcctgctcaccaagcttcccacacaaacccaacaagagagtgagagaggagcaaaagctttggctggccgtcccccctgttaaaatgtgatgtccaatccatgggattgcgtctagtttagtcccccactcctctcctgggtcagtccctccctggccaccacctcttcttcttgcagcctcctcctcctccggggccttcttcttgttgattcttttgatggcttttgtgcttcttgtcgacctagttatgggatccggcgaggtggatggacgcgcattggagcagcaacagtagcggcggtgaagaaggcggcggtggatctggatccgaggcaccaccaccaccgggtcacccacggcggcgacggcggcggcccaagaagaggaaggcgcggtggacaagatgaggcatatgagcagcagcagcagcag

SEQ ID NO: 430935 - DNA, 283 bp, Oryza sativa
gtgtaaaccctaacccggtcgacttggacgctgtgggacacaagatcagctctactcatcgggtgtctcggccttttgagcgcggagatggctgaggagaccccagttgagactccagctgccctggttcttggggagcccatggatctgctgacggatctggaggtggaggagctgaagtgaggccctcatcatgcgcttgggacgggtctccgtgaggctgccaaggccatggagaagcatgctggtgccattctaccgtttgatgaaggctgcgacccac

SEQ ID NO: 430936 - DNA, 436 bp, Oryza sativa
acatcgtctgcctccccgccccgctgctcgtcgagcaaaacgtctcgccctctccacaaaatccccaaatcgccaagcacaaccccctccccaatggcgccgtctctccctcccaccgcccccaaaaccatcgccgactacctcatccgcccctccaagcgccttcggcccacctgtcccgctcccgccgccgctgcgtcggcccccctctcctcctccagcctctggccggagcagcgccgccgcgccgacaccaacctcgcgctcgcccgggcgcgccgtcacctccgcctcgccgagtccaaagcgtcgggcggcaccgcgaagctggaggagctgctcgtcgaggagacgtggctggaggcgcttcccggggagctgcacaaaccctacgcgctcgagctctgccgcttcgtcgcccacgagaggttgcata

SEQ ID NO: 430937 - DNA, 213 bp, Oryza sativa
gtttcattctaaaggaacaggacttaccattgtcggggctggtggccgcgtgttgtaattgatgcacaacaaacctgctcctaagaaaaatgcttagcgaccaccattatatatagccatgccggacacgacgacacggggttcacagaagctaggtatatatcgtatgcatgtcggacgctcactacacaaacctgtacaagaacgtggcta

SEQ ID NO: 430938 - DNA, 404 bp, Oryza sativa
ggtttatttttcggcgaagctgaagcagagcaagcgggaggtgcggctggagcagtggctttcgcacgatcaagatcggacagaggtgaaagctgtggtatcccctggagcagcggtaggagccaactccgggtcgccgatcctcgcatccccgcaccctccactccctcgccggcgggtgtagattaggcccagggaaggccatccagaggatttcaaggaggattcatttggcgctagccaggatgttggtagcagtgatcatgagtctccgttgcacagtcctgttttctacaaccctgctattggctgcttgcagcagaagcactggtcgggcaatggtggtggccgtagcttcagcgcgggagcagtgcttggtccagctctcggagtgtgactgattc

SEQ ID NO: 430939 - DNA, 440 bp, Oryza sativa
tggctcggcccgcctgcacgggccggtccttactggctggacccacccacgcgaagatatatcggttttcttcaaactctatgatcctgaaaaggaacaactgcggtatgttggtaggctctttgttaaggcttcgggaaaacctcaggacattctgccaaaactgaggaaaatggctggtttttcacaggatgaggaaattgaactttatgaggaaatcaagtttgagcccaatgcaatgtgtgaatatattgacaataggcttctatttcgagcttgccagcttgaagatggtgacatcgtttgttttcaaaaatctccaaagccagatactgctgaccaatatagataccctgatgtcccatcctttctggtgtatatacggaaccggcagggagtccattttcgttcattggagaagcccaaaaaagatgattttt

SEQ ID NO: 430940 - DNA, 324 bp, Oryza sativa
gttattttgttatatgtttaatttgttacataatgcgagtgcgagtgtgatgcggagcaagggcaagccatggacgcacttagaggcgtgaggccaaatgtgtattgaatgatcgatgccaataagcaactaatgatggctaaagatgccagtggacattgtatgtgagctgttgagcgacaatatgataaagacagcattctatatcatctaagaataccgggtgcatgtttcactcatccagtgattacactgggtgctctgacagagcctcaagtgcaagataaggatgctatagtacgaccggtgattagtggggctaag

SEQ ID NO: 430941 - DNA, 261 bp, Oryza sativa
tttcttgacatgatcggggaggtcctaaacagctggggattgtttaataatcataagggtgccaaggacctgaccagatctggtcaaggcccactccctggatgagaagcccacggtccaaaattgctcatccaccatgatggtcttactgacttggatgatgatgacaataacctgtgggctccctctaacccataccggcacctagtggagcatcctccttatagacccaaggcacacgtgaaaaatcaattgttgcac

SEQ ID NO: 430942 - DNA, 459 bp, Oryza sativa
  unsure (1)..(459): unsure at all n locations
ggatggtgtgatcctctttaatcatactgcttccttcagaggtcagatacaagggcctaaccatggtaactaatgatgcacagctgctttgctccagggtgaaccctcactctgctggttggatttcagccgtggattagcaactggttcatgttctgaaatttttatactaaccatcctcactctgtagtatttgaaatcaacctttcagtttgttctgaatttttatgcagaatataaccatgccagtattttggaatgagtgcagaatttgatccgtcggttctgaagaaacccggttacttattagaagaagcagagaccacaacctggcagtggctggtcacttcagtggtctccaattgcctttgaatacgacaatgaataagtgtaattaactggnggagtgcttcttgaagtagatagaaagctttgctacttttgaagaaaacaagttga

SEQ ID NO: 430943 - DNA, 123 bp, Oryza sativa
cagtgctccggctcgcaacttggaagaggaaagaggttgatgatgaacacctacgtagagtaaaagttcctcttcctaataaaagagtcttagtgctgatctaccggtaaggtggaggcttcc

SEQ ID NO: 430944 - DNA, 278 bp, Oryza sativa
tagttttttatttctgaccgcagagcacaggtacttgtgaggacatgggaaggattctgcattttaccggtagcaagtgcttgatcgttgcttatgacagtccaccagtagtatgacccatgcatggaaaaactactcctaatgagttcatttcatgaagtatactgtcatgctggacatattgactggcacctggaagttaagtcacatttgcatactgacacaacttaatgaagtggacccattcctttattaagtactgcagaaccacatgtatg

SEQ ID NO: 430945 - DNA, 342 bp, Oryza sativa
gatttctccactgactcatccccatcatctcctcttctgttcagaatctcctcctgctaaagcatttcgttgctgattttttttttttgctggaattcttgttgtggggtaaggcgcaaagcgctgcgaggcaaggcataacagctgaaagttgcaatctttatcggttttggattcctcctcctcctgctgctgctctctctcctccaaggctccaacacatcctggtcccgagagaaaaaggggagatatttttttgggggcgcatgattcgatcccttgctgtttgctgttgctgccttgctgcgcacagatttggtcctttctcggtctgcttcttgg

SEQ ID NO: 430946 - DNA, 447 bp, Oryza sativa
acggcactttcgaaagaggaggaacgacaaaggaaactcgccgaggaaagagagaaaagagcagccgcagccgaaagaagatttgcggctctggcggcacaatcaagtagcacatcagggacagcagcagcagaacatcccccacagagagcagccgcggcagacgatacttcttgttcgtgctgtttttcttccttggtcggcaaagtaccattccacaggtacaattacaagtactgcagcaccacatgtatgcatcttcattcagaaatgctggaagatgattgaggaaatcaggaaattgtatgacgagagacatgagatttaattatacctttcacctgtttttcttatgcatgagattcaataacaggtctatctaccagtcttgcttaatctttagctaatccgaatcttgttacaaatttccaaattccgagggatatt

SEQ ID NO: 430947 - DNA, 275 bp, Oryza sativa
  unsure (1)..(275): unsure at all n locations
ctcttcttcttcttcaattttcctcgcaccgtcggcgaaggcgaagcggaagaggcggcggagcagtagctagtctactagctagtagtagtagctcgccggcgagcggagaggaggagccgaggaggaggaggagcttcgtggccggccgggccgccatggagagccgcaaggaggaggagcagcatgggggaggaggggcggtggggtggatnactgtgccggcgttcggtgtgtgggacatgaagaacggcgcggtgccggacttctccatg

SEQ ID NO: 430948 - DNA, 335 bp, Oryza sativa
tggcaataaataaacgatggatcgtcccaacctcgccgtggccgtggtggggctactggcggtggtggcggctacgctgccggcgccgtcatggcagttcttcgacctattcctccccgccggtcccagccaccgtttcttcggcggagggtttggcatgcgggtgctgatcaaccacgaggagtccgttccgaagaagtcgctgtacgctatgatggccgccggccacaatctgtgggaagaccatttactcgagccttttcgttggttggaggaggcctaatgcgacctgggttggttgactccaagggtaccccgggcgacatcacctttac

SEQ ID NO: 430949 - DNA, 526 bp, Oryza sativa
gagccttagcacctgtactactggtaatccatatgttcggataccagtctctccctgcttaatgtacatgtttcttgactgaaaagatggtgttacaatgctgggctatgtttagcctccgttttgctcagaagaattctacagaatgaataatgaattgccccataaatggggctttgattttggaaaaaaatagcccaaatttgctggagtatggattaggcccgtttgagctccggggtggtgatccccgcaaggatcaaagtgcagctgcaagaagaaaaggaatggaggggaaactgtaccaaacagaattctggcacagctcacatgtctcatgatatgcctatgcaaattccagttgtgtacagttttgagcacacgtcattggagccaaaggttcttcactccttcactgtcttgtcgcatctacactgaaggaagctgtttgcgtaacgctgtattctgagattcgaaattgtttctcaacaagtcaagcagagctgtgtgcctgtgacaattgtgt

SEQ ID NO: 430950 - DNA, 469 bp, Oryza sativa
cagtcgccaggctgaggcgtcagccgcccgactgcccggaggagacgacgcgccggcgcgccgccactcgctggtccgcgctccgccgccggcccgcccgaggagacgacgtgccggctgcctctgccctccagcctccagcagtccagccgtcggccgccgcgtaggcgcgcacggcgccgtcggcgccttggcggctcgggcgctcggcgcatccggcatccccctgcggtgcccgtctccatgctccagccgccgccgcccgccggtgcggcgccgcggcgacgagttgccgcctggcgcctgcctgcctgcctacgctccaccgaggcaccgaccacggcagcctgccagcccgcaatcgcaggggcgcagggcgcccggccgcgttgtcgtcaccggtcaccgacctgccgttgccgttgacgaccaggcggctagactggtctcttactgagacaatgaccta

SEQ ID NO: 430951 - DNA, 204 bp, Oryza sativa
gcgttctcttccgtcagacttctggccattcgactccccatttcaccgtaccctaattccttactccttattatattcacgctcataagctctgaaaaacacctgaactactgcatctccaggacgtggaattatggcgatggacaagttgaacgccactagctgaaatctagtggaccatgcatgcttaataacctacctact

SEQ ID NO: 430952 - DNA, 113 bp, Oryza sativa
tttactttttgctcgctcgctcgttaacggaggaggcgtactttctccacagacttacttgctgctatatctgcatgatccttatcgcacgataccgtactactaccggaggg

SEQ ID NO: 430953 - DNA, 265 bp, Oryza sativa
tttctttgatccggtgtggttcgtggacatcaccgatggtggctggtacggcggcgcccacaattagctgagctaataaaaccttttttaaactgttttccatacagtctaacttgtattttattagccatgctgatggttactgcatcttcttaactggtttgccccaaacacaagttgatcccaaaactaatgacgagcccaaaatagacacaagtttggggtcgcaacccttggacacgcaaaacttcaaattatttggtgc

SEQ ID NO: 430954 - DNA, 52 bp, Oryza sativa
aaaaaaaaataaaaaaaaaaaaaaaaaaaaaaaaaaaaaaaaaaaaaaaaaa

SEQ ID NO: 430955 - DNA, 262 bp, Oryza sativa
gttttaacatatttcagtactccattttcaccagcagcaactgctgatcaacaatctgcacagctacagttctcaacacaaaatcactattatacttccaacccattttggcctgccccaataggattggtgcgaccatgttcatcaacaggactgcaatcttccacgccaggtctaaactgtaccggcatcacatcatttccattcctgcccacaaagcaaccgtctgtgggaaccccatcattaactttattttctacca

SEQ ID NO: 430956 - DNA, 443 bp, Oryza sativa
atcccttctcttcctttcccttgcccttgcgccgccgccgctttgccttctcctcgccggcgacgacggcttgcccctcgagcttttttgccgtccatcacgcgagggtggacgggggagttaacttttggctgccctctactgccatccaaaaaccctagccgcaccgaagtcgccgcctcctcacaaactcctctgcgcgttctccttcgtccaggcgctgctgtggtcgttggtgaatcgtcgacgccgtggtgaacctgcggagggaccagaccacgtggggctcggggcgaggtttggccgtgacgcctgtcgtcgcttcgtcgccctccccctgcccaatctctccatctcttttcccaggtaagcaggaggagtggtcataatgcaaaacgagggcgagagggttcgatctgctggccctgccactcgatccgttc

SEQ ID NO: 430957 - DNA, 426 bp, Oryza sativa
atgattcctaccaggtatgttatgtaacatggtatattggtgctacgtcaaattggcaggtgggagtctggtttttctgtttggtgcatgcagcatgtagtaaaatacataatcccagtcaaataaatgcgatttgcctgttgtctacttcatattaatgatgtgtgtacatgatttattataaaccgatgtttgtgataatgtgttagtgttttcttgaagccctttgcatatgcgcattaaatatttgtctgtttctctgggaccaattttttcatgctataactacgctcagcaacatgttgtttggtgtggggacttggtgttaagtttgcatttatttatttctggtccattgatgtgctggggtcttcgttcatttttagtttggggttttgcttttgcagaaaacgaactagaagaaag

SEQ ID NO: 430958 - DNA, 387 bp, Oryza sativa
  unsure (1)..(387): unsure at all n locations
tcggcaatttgtttcactgccacaggtagtgttgatgatcatacttggatagcaaatttgtgagagccttctgtggcgcttgacgacaccattcggattgttccatcacttccatacttagtgctggttgtgagattagcattagactacaatgtccaatccttcagtcttctgcacgtgtaccctaagttatatgggttctgttaaatgngcacagcttaccaangttgagggaacatccatagctatgaatttttgcacaacatgtgtagggttctgacggaactaagcatatacaagattgcgaaaactttcgaaaattttctcaactttaaatcttttgataaagtaaaaaaaaaaagaaagaaggctatagtcacacgagac

SEQ ID NO: 430959 - DNA, 248 bp, Oryza sativa
ccctcgcgcgcgctcttgctcgccttgtcaacgagtgcgtcgccggtcccgacgctacgagagagttagcctcgccgttggtggaggatgccgtggcactctttgttcattctgtcgcgctcctagcagccaccggctttgtttccgacggctgcgacctcagctacaaggtcaacgagctcgctccggtctacgctaacaagggtcgtcccttgcacaatccaagagagacatatcggtactttgac

SEQ ID NO: 430960 - DNA, 375 bp, Oryza sativa
attatgagttcagatcgagccgagctcctctggccctgtcgggcggcggttatacgctgcaggctgctgccaccccggcacgcgcggtaggtcgttgcccgtacaaccaccaccactccgtcaccgtcagccatcgtgcgtgcagacacctcctctcgcgcgcgccgtcgatgtacctcccactccgatgacgcgccgtccgttcagccaccgtgtgcgccgtcgatgtacctccccctccgccaccgacagtcaccgtgcgcgccggcgatgtgccttcccctacgtggacgcgccgtgaggagcagccggcgtccggagctggacacgcgggcgccagaagtctgtagtcgttgacgcgcctccgggagctgc

SEQ ID NO: 430961 - DNA, 470 bp, Oryza sativa
  unsure (1)..(470): unsure at all n locations
gtgctcagtgaccctcgagtcacccacgcgcacggcggctcaggggcgaaccctagccgccgccgccgccacccaccctcctcctctctttgcctcgccaccgccggagttcgccgccggtcaaccgggcggggagccgagatggcggcggcggggccataccgcggcgacgcgccgtctccggcgcgagggaggcggggcagagcgcggcgaggaaggcggggcagagccgggcggagtgtggcgcgccggtgggcgagggaggccggggatccggcaccgcggtggccggatctggccgcacggcgcagggctgcggcggcagtggcgcgagggctgcgcggcggtggacggngtcggtggcgcgagggccgcgcggcggcggaggaggcggcgttgcgagggccacgctgcggcacgagggccacgcggcaatcggagcggcgtcagcgccagggccacgccgcggc

SEQ ID NO: 430962 - DNA, 337 bp, Oryza sativa
  unsure (1)..(337): unsure at all n locations
gcccaaacttcacttattcataatttgtaagtatgaaaccacatgcaaattgatacacagctggagggtaaaggaaatcatagccagccccatagcactccatttttgtgaacaaagntctctacttccagttttgccagttggccacaaattacacatattttccacgattaaaagatccgggttagcaacttctaacttgccttcaaggcttttgcaaggattattattttgcgccattaccagggttcccattgggagtacttgaaatggccgttcaccgaggcaagtgtttggtcagggcaaagaattgcatttaaccagccaacccttcctt

SEQ ID NO: 430963 - DNA, 290 bp, Oryza sativa
  unsure (1)..(290): unsure at all n locations
tttgtttcgcccttttttttttttttttacataatagcctgtgtgaatgcacgtgttggcaaatattgcaaacaaaactcatggaaggactacccaggaaaactgagatgtgtccttgtaacaacccaaaccactgccaataaatcaaacgaaaatatacactttctgtaagtatatgacannccacacaacttgaacaaagagaaccctttgacaagattgaacctgcaacaattgaagaattgaaaaaatataaaaacgttacctggcactgtggacttttcaacgaa

SEQ ID NO: 430964 - DNA, 90 bp, Oryza sativa
tttttttctttttttttttttttttttttttttttttttttttttttttttttttttttttttttttttttttttttttttttttatttt

SEQ ID NO: 430965 - DNA, 113 bp, Oryza sativa
tttttttttttttttttttttttttttttttttttttttttttttttttttttttttttttttttttttttgtttttttttttttttttccaaaaataaaataagggaagatt

SEQ ID NO: 430966 - DNA, 130 bp, Oryza sativa
gtgaaaaggaagggaaaatttaaaacctaaatagaaaaaggcgatttgatggggtatcacaacaagcaatagtggcattaatagcgccagaacattagattaagaacacacatgttgcaggcgtccattt

SEQ ID NO: 430967 - DNA, 137 bp, Oryza sativa
  unsure (1)..(137): unsure at all n locations
tttnttttttttgttttgtttatttttatttttttgtttgttttttatttttgttgtttttatttttattttgttntattttttatttatttgttttctattatttcttgtttatgttatttatttatatgtctttt

SEQ ID NO: 430968 - DNA, 102 bp, Oryza sativa
  unsure (1)..(102): unsure at all n locations
tttaatttggggggggtgatagattattggggggttttcttnatatgtaaatacaaaaagagaaataatgtttatggatttttgagggaacacaccccgcgc

SEQ ID NO: 430969 - DNA, 116 bp, Oryza sativa
aagaaaaaaactcagcatagtactttccctcgacagaagcaaaatctgatgacaagggatggtttttaccaacacaattttaagttaacaatttagggggggcacttttaaacata

SEQ ID NO: 430970 - DNA, 363 bp, Oryza sativa
aacgcaacatattgattaattaaaaaatcgatggaacatccaaacaatgattgaatccatgttactacaaagatttcatacatgatgtatttacaagagattcacatcaaaacttgaggcctagccaaatctggacatgtatcctggcataaaacaatgatgctgaatctttaagttttttatcagagagcatttgggagtcactagcagcaatattgtccatttccaacatcaagaaaaaaacggagggaaagctaagcaaactagaggacatactgatagcttcatagctaacgaacttaaatcgcctcaggcactgtggaagcatcatcggcgacagaataacacacattcctagagata

SEQ ID NO: 430971 - DNA, 80 bp, Oryza sativa
agggaaacgggggggacacagagtcaaaaaaggggccagggggggaaccaccctaaaaaggcaaacaaaatttcattaaa

SEQ ID NO: 430972 - DNA, 56 bp, Oryza sativa
ggaaaccgaatatattatttcgatattcagtcgtaatcacagtatacagattagaa

SEQ ID NO: 430973 - DNA, 372 bp, Oryza sativa
atagcaaactatctcatattcatttttataactttatggtatttaaattgttcatctatatgctcgaataattattacaaatcatctcactattcaaccattccggtgaaaaagctagtactactatgcattatttcattgcatctatatgtgctcttctatttacatttcatgacaagtcatatactactacaaagcatttcattcttcccaattctgcatgaacaaaataccatgcaattaattaataactaatcacccaaattaacacttgacaccaaccaacccaaccaatctagcatcatcaccatcatcatctttgcaattcaatttgcaaagaagaaaaatgaagttaatgtggtgaaggcaatg

SEQ ID NO: 430974 - DNA, 191 bp, Oryza sativa
ggaagtaaaatatgtaatcgttcgaccagaccagaaagaaagtgccatcacaaattacagagataaataatagcacatcagggatcaacacttccaagtgagccaggtttgaagtaacaagaagtcctgcttgattactaattacgaaggaaatttcaagggttttgccaaagcatttatttttggaaggg

SEQ ID NO: 430975 - DNA, 427 bp, Oryza sativa
  unsure (1)..(427): unsure at all n locations
agtacccatttcctacctgacaccaggatttattcagaatgtattactgcttgttccgaagcaagaaacagaagggtaggatgcacatgatttataactacaactgttctacatgacaatttctgaggagatgcaacttcgctacaattgcaccnnaagttcagaaaccatgcnnatatgtgatatggaatgttcttactgagggaacttacccaaccaaaaggggtaggataaccaaacagatgtaaaccttgagaaacggaatcttacctgggcctctctctttgatttggtgacccttagtattcagttcaagcctggtcattcattgcccttgtcacctatcccctttgccgttggtgccctgttcatcaaccgccttctcgtttgccctgacgaattgcccgaatcaaaactgccggatcag

SEQ ID NO: 430976 - DNA, 391 bp, Oryza sativa
accacaactccacatgcatatatgcatgacacagcaaaatatatgttacacaaatattattatacatcaattaaatgcacaatccaaggctccatgcatgcctccacatctccatgacacaaggtcagagctcatgtatatatgcttaccatatgtccactatattatattttatgatgctatataagcattagcccagggtgattaaaacctattaactttatttaaattattgccagggttaataatgtaaatttttgaataggctttaatttaaattaattccattgcattgcattgcaagagattcaagattgccagtagggtgaattatttaatttaatttagttgatcattaccataattgagggtgaatttatggatgggccac

SEQ ID NO: 430977 - DNA, 92 bp, Oryza sativa
aaaaaggaaggctttttaaaattacagaggaatatgcaaacccccaggtggggggtaaaaaaaataaccgggatcaggggagaaaaattaac

SEQ ID NO: 430978 - DNA, 55 bp, Oryza sativa
tttttttttttttttttttttttttttttattatttatttttttttttatttaat

SEQ ID NO: 430979 - DNA, 51 bp, Oryza sativa
ccccggggggaaaaataattaaaacggttcccctgaaaaacaaaaaaacaa

SEQ ID NO: 430980 - DNA, 95 bp, Oryza sativa
aaaggaaacccaactcattttttattgatatatgggggatgaatccaaaaaaaccgatacaagtcacgaaaaatcaaactagaatgaaatccttc

SEQ ID NO: 430981 - DNA, 156 bp, Oryza sativa
aaaaataatataaaaaaatatttaaaaaattaaaaaaatataaaaaaataagaaataaacaaagataaataactcttataaaaaaaaaaaaactatactaaataagaaaaaaaataattttaataaaaaaaaaacaataaaaaaaaaaaaataaat

SEQ ID NO: 430982 - DNA, 70 bp, Oryza sativa
acggaaaaccatccattttttttatgggcgacgaatttataagatatgctctaaaaacaaattctggggg

SEQ ID NO: 430983 - DNA, 334 bp, Oryza sativa
agggaaaagggttaattaacaaaggggtcccgcagaaaataacaataaaaagataggatggaaataaagccggtggtccaatttaccatacccagcattttggttaccggaataccaaaaaactatctaccggtggacagggatttaattttttaaaaaaggcccagggttcagaattatgtgggaaaaaaggtttttggaacccgaaagattgggcccctttggatagccaaaccacacttaaaaccctaaaaatgcatacgggggggggccaatcggatttttagcccccaccagagggagatcaatacttggagtccttgaccggaaggct

SEQ ID NO: 430984 - DNA, 168 bp, Oryza sativa
attagggggaatggatcagctgcctatattatacacataattatttgtcccaatttatacaaatttacatgatatgttaataggatagggtgcacagaacctgagaaaggcgtttaacaattcaatcacttggtccctgaaggttttccaagacatgccccaacaaaa

SEQ ID NO: 430985 - DNA, 133 bp, Oryza sativa
agggatgcctccagtttgtccgcccgtccttttttttttttttttggtttttgaattgatcatgggtttttttttttgttcttgcttttttttatgtgttcatgtaagtggtagaacaatcacacattgttta

SEQ ID NO: 430986 - DNA, 424 bp, Oryza sativa
tttgtttcgcccttttttttttttttttcaattcaatctacagcggcggcaattctccttggattcagattattgttgttcttacattacagcttgaaaatgagggtaagggggaagacatgccagtgcattattgtgacggacggattgcaaatacaacactttctgtcaagttcctgaaagtacacttacaatgaactggggcaacgccattgtgcgggcctaaaatctagaatcacacccgcagcgcttggcctgtccacgggcgaatccacatccttaaagtgtccggccacaaccataactttccaacagaagtgcctgggttggcctgcaattgtttcatcaggcccatccgttttccttctgcgaaggcccgcaacttgctgctggtgaaaccatcaagcaacaagcttattgacag

SEQ ID NO: 430987 - DNA, 354 bp, Oryza sativa
catgtaaatttgatttattccaacctgatttggtctacaagatgacagtcaccaccagttcaccacggcagctaatcccgtgcgtaagactgaaatctggtgaagattcaccggttctgggtgaatgcatgatcgctgttttgaattatttttttgcaccgctaagaaaccagcgtttattaactggttcttctgaagtagaggtttttctggacaagaccgaggggatttatttactcctgttacattcccaccaaagaaacacccattcacccattcattcattcattcgccttgccagccatttattcatccgttcatccgttcgttcttcgtggcagtttgcaaagaatg

SEQ ID NO: 430988 - DNA, 421 bp, Oryza sativa
  unsure (1)..(421): unsure at all n locations
gatcagatcagcacttgcacagtgatttacggatagacaaaattcaaagttgaccgcaaacataacttgatactgcaggcagtacatgcatttcacttccgaccaagagtggggaattgggattggtctttngatttctggaggctggttggtagctgtccagagcgattggctccttcaaccattatccncaccccttgannaaccgcccaccgattccccccgccggccctcttgccaccggaccaacgtgccgcccattagtaacccttctcttcctttcaagctggttttttagggaaactccgtttggatgcttcacaagaccttctttagcaacgcttcattcacgtttcaagcattttttcttttcttctttcaaaggcatccctttgtcaggatcccagttttgatgaaaaac

SEQ ID NO: 430989 - DNA, 181 bp, Oryza sativa
gcagaaagagctgtgattaataagtgaagcatatggcatgacccaactccccctggaaattggatgctaaagcctttacacttttacagttaccacccatgcatttccattttccaccatcatgcacgttcatccatttctacgtggcctcgttttcctaattcattctgaaaccaattcg

SEQ ID NO: 430990 - DNA, 107 bp, Oryza sativa
aagcctattaccggcaatgtaatcgaggggacctttaaaaaactggagtcataggagagacatcaaaaaccaatcatttcaataacataaatttaccagggagcaaa

SEQ ID NO: 430991 - DNA, 60 bp, Oryza sativa
cttctaaattttaaaaggagaaaaaaaggaaaaagaaagaaaaaaaaaaaaaaagttaaa

SEQ ID NO: 430992 - DNA, 74 bp, Oryza sativa
cgaacaccgggggcccgacccgcgaaaacaccggaaccggaaacccgagaggggaacaaaccttcgcccaaaaa

SEQ ID NO: 430993 - DNA, 152 bp, Oryza sativa
aagcaaaccaccaccagggattacactcatgatgctgaaacaatgactgatcagctttgcttagataagaaaggctcggcatatacaaggattagataaaagcagggatcaacttactgggatcacctttatttaagccccttattgcaact

SEQ ID NO: 430994 - DNA, 152 bp, Oryza sativa
accatcaggtgagaaaatacactcaatttgggcgagatacaacacaagtgtgggaaaactgccaatcaattacctccacttaagagggggatgcaatacattttgggcatgtggaacatacttgtgtttaaaaaacaagggatatccctata

SEQ ID NO: 430995 - DNA, 89 bp, Oryza sativa
aaccggagatcatagcatttcgctaaatatcaatacaaagacaaatatagtagtagggacgcgttatagtacaggaggatatcgccatt

SEQ ID NO: 430996 - DNA, 131 bp, Oryza sativa
atatagggggatataaaaaaatttgaggggaaataacaaaaaaaaaaatataaataatttaaataaaaaaaaaaaaaacaaaaaaaaaacaaaaacaaaaaaaaacagaaaaaaaaaacaaaaacaaaaac

SEQ ID NO: 430997 - DNA, 69 bp, Oryza sativa
ttaaattaggggggaaaaaaaagataaggggggaaaaaaaaaaaaacacaaaaacaaaacaacaacaac

SEQ ID NO: 430998 - DNA, 183 bp, Oryza sativa
tttttcgcggtggaggtggtgacagtggaggtgccggaggtgcccgtgcgcgagctgaacgagatcaccaactccttctcgaacgagaacctcatcgggcagggctcctacgcgaaggtgtacagggttcctcatgccgcggcgacgagggccctgcctgtcgtcaaagaagcttcgagtaag

SEQ ID NO: 430999 - DNA, 118 bp, Oryza sativa
gaagaaaaatatgttcagatttagcacaaactgtatgtgtcaacattttgtttgattgatacaagcacactagagctaggggcgcgccgttgtcgcgccgcctggactcaagcagggg

SEQ ID NO: 431000 - DNA, 79 bp, Oryza sativa
aatattaatcttttatatttaaatttatttataatttactagttttaatgttatttcattaacatattttaatagcaaa

SEQ ID NO: 431001 - DNA, 428 bp, Oryza sativa
gaggaatatttatatttcttctatagtttaatcttcagcaaaatacaagatgttacattcactagtgtagtgtagttgctaagcttcctaggggaaacatgtattgccaagcatattcagcttgtactactaaatgacagcttgcctctttaggttccacttgtccacctttgcatcttttccctgtggccctcattcccaataatgaccctcgtcaaatttgaggttcctttgtaagaattaatttttttcgatccttccaaaaacccggtgctttgggcgaattcacttattcgaagcttccaatcctttctatttccatttcaagtgggatccttaaaccaaatagcatttcttttcatcccccattccttcttcaaaagcatttttatcgcttgaacctcttaaaattgaaaggcctgttcaac

SEQ ID NO: 431002 - DNA, 127 bp, Oryza sativa
aatcgggaattactacaacctaaggtgattagttgctgcctgctgtaggaacatacatatcaatataaaataaggaaaggcatcttctttccaaacagaaaagattacattagagggttctctagac

SEQ ID NO: 431003 - DNA, 402 bp, Oryza sativa
aaactgacaaatctattagatggaaagagcagcaatattagaaagctaagagtctatagaatatttgttatacaaaaggatttgcatgaaacagctgcatggtggatactggacacaaatactgaaccataaagcctaacaaacacccttaacaggttagtttcttgtagggaaccacttccttaacgaggtagttcctcttaagggaacattatacgcttattggcccgtttcaagaattggttgagccatcttgaccgattctttgaccgttgaaaaaccgaggcacctttcggaagatacccaagtgtagacatgttaaattccggcctttgtttttctgaaaacctaaacaagggcaaattaagagtttttgggattcagaaaatttgggcagaaagt

SEQ ID NO: 431004 - DNA, 98 bp, Oryza sativa
ttttttttttttttttttttttttttttttttttttttttttttttttttttttttttttttttttttttttttttttttttttatttttttttttat

SEQ ID NO: 431005 - DNA, 215 bp, Oryza sativa
gggtaaaatatgtactgggtattatatggtatgaaacggtcattacaacgcaacgacacttttaggtagcatctaagatcccactaagacggttttaacaattttatgaaaaaacattcttgttacaggtgcatatgcttacatgacttttagccagtacagcatttcaccgacaataaccatttttcttctataagcctccaggttcttttaaa

SEQ ID NO: 431006 - DNA, 402 bp, Oryza sativa
  unsure (1)..(402): unsure at all n locations
ggaaggaaaccgacatcacatacacatcagaagagatgcacattcatcaacatgattgttcacgcagataatatggcattattgcctacagacttgtgctttgttcttgccagtttcgtcaaattcatctagtctatggaaaggtcactgttagccaccagataangtaactatttacccaaacattcagttggntgttcaaaaatcttgttctaaggtttacccccacaatcnnatacgttggttctacccacaaaatactattattatatatannnaatcattannaaattgttttggatttcaatctgttgtattaatcccccgtcgttggatcaaacccaatttttgcaaagnngagggtcaaagcctttgagctgcttccactgactcgtccaactt

SEQ ID NO: 431007 - DNA, 68 bp, Oryza sativa
aacagaaactctcacatcatattaaaaacaacacaaactcttcaatgcacaaatctctccggagctaa

SEQ ID NO: 431008 - DNA, 96 bp, Oryza sativa
tttatattgggtttttgaacaaacagggtacattctttaatactgaattagagggcaaacgtatgagccaacgtatgtaaattataattatgcata

SEQ ID NO: 431009 - DNA, 164 bp, Oryza sativa
gagaatataaaccaaggttagttaatgcactgggacatcaaagttacactttaataagatggaacagtgttattaccctcaaatacaagtctataggaagcagataagcgcgtatggtatataatggccagggcttttcatgtatgaagattggctgctgtaaa

SEQ ID NO: 431010 - DNA, 108 bp, Oryza sativa
tttttggggtttttttttttttttggttttttaatttttttttttttttttttttttttttttttttttctttttttttcttttttttccattaaaagaaagggcaaa

SEQ ID NO: 431011 - DNA, 288 bp, Oryza sativa
cctatctttaatctcgcccttcctcctcctccgagcgatggagtcctagacctgtcccggccgtagacgcgcgcgcgaaggagagagagagagggagagagggagggagatcgcctagccgcctcggcgtagggacccggatgtgtgagaacgaggatgttcttctgaattttgtatagcgggcgtgcgcgcttgtgcagatctcgtcctacaactcgtacgccatcggcatagccgccttcatcggtgcattcgtcctctgcgccgactgggggatctttatcaagg

SEQ ID NO: 431012 - DNA, 281 bp, Oryza sativa
tttttgtggagtctataacgtccgggggtagcatttgcatgagctgatcagaagtcctcaagcatgtatcaagggtaacaacagcctcgaggcaaacaaaaatcaagggaaatggagaaaaaatgaaacaaaaacttaaccatgtataacactacttattccttacaatccagtaaacatcctggtaaaatatatccatagccgaagtcttaagagagacttagaaagaattttaaggggagcttatttaccgaccgcttatttcgactgggtaggggagc

SEQ ID NO: 431013 - DNA, 53 bp, Oryza sativa
gaaaattgggggggttcttaaatttttttttttttttttttccctttttttac

SEQ ID NO: 431014 - DNA, 421 bp, Oryza sativa
tataattttttaaaaaaaaaaaaaaaaaaaaaaaaagaaaaaattaaaaaaaaaataaaaaaaatataataaaaaaaaaaaaaaataaaaaaaaaaataaaaataaattgggggggccttttttaggggttctagtttttcattggggcggctgcctttttgttattttttttttggggccccttatattaatttttttggccttttttttttcccccccttgtttgaaaaaccctgggggtttcccaatttattctttttgaaaaatccccctttttccccgtttttgtttttttcaaagggccccttccttttgccttttccaaaattttgcaaaccttaattgggaattggtccccccctttggggggccttttaggggggtgggtttgtgggtttttcccgttgtttacctttcctt

SEQ ID NO: 431015 - DNA, 92 bp, Oryza sativa
tttttggttttttaaaatttttttgtttttaaatttttttttttttttaatttttttttaatttaattaatattataaaatatatatataac

SEQ ID NO: 431016 - DNA, 489 bp, Oryza sativa
gatatcctcacccctctctttttctttctcttcctctctcactctctttctcttcctctctctctttctctcctttgcgtgtggccaacgaggaggcgccgagcagcgggcggtaggcggcgtcgagcagcgggcggcgggcggcggcggctcggcttcctcggctcggcgaccgacaacgacgacggccgcggtgggagcggcgacggcgggcagcgggagcggctacggcggctcggcggccgacaacgacgacggccgcggcgggggcgacggatccggcaccggtgacgacgatgggtggcgggggcgatggatccgccgccggcgaggacgctgggcggcgggggcgacggatccgtcgccgacgacgacggccgcggtgggagcagcgacggcgggcggcgggagcggctactgcggcggcgggctcgtagcggggtcacgacggcggcttggaacctcggctcggcggccgacaacgacgac

SEQ ID NO: 431017 - DNA, 263 bp, Oryza sativa
tttttggttttttttattttttttgtttttttttttttttttttttttttttttttttttttttttttttttttttgaaaaaaattttttttcccccttttttttttttttttaaaaaggcattaaaaggtttggcaaaaaatttactggggacggttttttaaagccaaaatatccccccttttttttaacctttaaaggggccctagggaaaaaaaaagtcccagggggggggtttaaaagtgaaaaaaggggggcccccg

SEQ ID NO: 431018 - DNA, 358 bp, Oryza sativa
ttttgggttttttataaattttttgggttttaaaatttttttttttaatatataatataatttttttttaaaattcaatataataaataaattaacaccacaaaaaattcatacaaaaacccaaaaacaacaaaacaaaaaacaacaaatacaaaaacaaaaaaaaaaaaaaacaaccacaaacaacacaaaaaaaaaaaaaaacaaaaaaacaaacaataaacaaaaaaacaaaacaaacaaaaaaacccaaaaaaaaaaaacacaaaaaaaaaaaaacacaacaaacaacacacaaaaacaaaacataaaaaaacacaaaaaaaacacaaaatccaaagcaaaaaaaaacaaacaa

SEQ ID NO: 431019 - DNA, 116 bp, Oryza sativa
ctttgtgtttttttgaaagggggggggttccaattctactaacagtgccaaattttggtcatacttaacgagtagcttttcagtgtgcaatggaacaactgcaacaacgaaattac

SEQ ID NO: 431020 - DNA, 172 bp, Oryza sativa
aaccaaacagggggtgttacattgggacacataaatttaattggtttacaggtttgagcctgatgcaactggtcaaaatggttgggttacgggaggaaaatatttccacgggttttcagggggcccacaaataaacttaaccgggggacattttttccggccccggggtttc

SEQ ID NO: 431021 - DNA, 393 bp, Oryza sativa
atataaatgtagttatctgatgtttatatttacaaaggcctaagcccaacaaacagcaccgatcagtgataacactttggtgtctaaaatttaattgaaaaagaacttccacagtggccacgcgcacttacaagttacaaccttgaattgtcaatgacactatggtgtgtattgctgtctggcaatacacctgaatttgtcgtcagagaaactggaggttctcatctgaacttctggacaccaatggcgttggggcttcttatctggctgataatctgtgacgactcatcaaacttgcatgctctctcgtacacgccggcagccacaaggtaaagctcccttttgtcgatgctcgggtcatcgctaagctcaccgagcagtgccttcagcgcg

SEQ ID NO: 431022 - DNA, 518 bp, Oryza sativa
  unsure (1)..(518): unsure at all n locations
ccggtcacgaccaatgccgccgaccgccgccgtcgccgtcgccgtggccgcggccaccgcgctcccttctccctcctcctcctcctcccaccgccgcctccccgccaccgcaaaatccgtctgggtaaaccccagcctcccgagctcccagcccttccatcgccggaaacccgccgagccccagcaccagcgccaggaccacgtgcccgacctccccgcgctcctcgcggccctctccgccgcgcgcacggcctccgacctggccgccgcggtctccccgcaccgccccgtctccccgcgcctcctcggcacgctcctctcccgcctccccgacgcgcgccgcggcgtcgcgctcctcgacctcctcgcgccagacctccccgcctccgcgctcctcatcccgtacaacctcctgctccgctccgcgtgccgcgccgggatgctccgnctcgcctncggcctnctcctggagatgcgggacagaggggtcgcccccgacgcgttctcgtactccacgc

SEQ ID NO: 431023 - DNA, 116 bp, Oryza sativa
aaataattaggggtatcagaggtaaggtatatacaacaaacacaaaatgctgggaagtcattaaaacgatttccagcatctttataaaacattggtcttttacattttagagtggt

SEQ ID NO: 431024 - DNA, 325 bp, Oryza sativa
tttttgggtttttctgatagaaatgagtatagtcagtcactgtttttttcatgcaaattatgtgtaaaaggattgagaacaaacagtatcaagacctaaaaaggtttaaatggatacaaaattcaagaaataagaaaaacttttttgcatcttggaatatactgcttttgttattgatccagccactgatcttttcatttgtccatcagaatccagttactaacatgagccactgatccacctgattgagtaaaggatatatatgcttcctctctacaaaatgatgggcaaatctcctacgtaatcgagaacaaaaaagggattt

SEQ ID NO: 431025 - DNA, 345 bp, Oryza sativa
tttttggtttttttttttttttttgttttttttttttttttttttttttttttttttttttttttttttttttttttttttttttttttttttttttttttttttggcaaaattttgggccccccaaaaaaagaaaaaatttcaacccccccccaaaaaaaacaaaaaaaaaaggggggggccccccaaaaaaaaaaaggaacaaaaaaggaaaggggccccccaaaaaccccaaaagattaaaggaaaagggcccacaaagggaatccaaaaggggaaaagggggcaggggaaaggttttaaaaaaaaaaccccccaagggggaaaccaaggaaaacccccccc

SEQ ID NO: 431026 - DNA, 113 bp, Oryza sativa
tttttggttttttaatttttttgcggttttaacttattacttttttttttttttttttttttttttttttgaaaattgggcatggaccccaagaaccccaaaaactcgggaaa

SEQ ID NO: 431027 - DNA, 514 bp, Oryza sativa
tttttggttttttataaattttttgttttttatatttttttattatatttttttttattaattataaatatatataaaaaaaaaaaaaaaaaaataaaaaaaaaaaaatactaaaaaaataaaaaaaaaaaaaaataaacttaaattaaaaaacaaaaaaatataataaaaataaaaataaaaacataaatataaataaaaaaaaaaaaaaaaaaataaaaaaaaaattataaaaaaaacattaacataaaaaaaaaaaaaaaaataaacaaaattaaaaataaaaaataaaaaaattaaaataataaaaaaaataaaaaaaaaaaaataaaaaatcaaaaaaaaaaaataaaacataaaaaaaaaaaaaaatattatatataaaaaaaatataaaaaataaaataacaaaataaaaaataacaaaaaaaaaaaaaaaaacaatttaaaaaaaaaaaaaaaaaaaaaaaaatataaattaaaaaaaaaataaacaaaattaaaaaaaaaaacaa

SEQ ID NO: 431028 - DNA, 286 bp, Oryza sativa
ttttttttgtttttttttttttttttttttttttttttttttttttattttttttttttttaaataaaaaaaaaaaaaaaaaaaaaaaaaaaaaaaaaaaaaaaaaaaaaaaaaaaaaaaaaaaaaaaaaaaaaaaaaaaaaaaaaaaaaaaaaaaaaaaaaaaacaaaaaaaaaaaaaaagacaaatacaaaaaaaaacaaaaaaaaaaaaaaaaacaaaaggggaaaaaaaaaaaaaaaaaaaaggaaaaaaaaaggccaaaaaaaaaaaaaaaacaacacaag

SEQ ID NO: 431029 - DNA, 410 bp, Oryza sativa
atttggcgatcaaataccactactattaccgctggttttggtgcacgttctgtcagtcgtccgctaaatcgaccgacaaagcatacatcgtggaatgacatgctacgaaccattgtacgagcctttgaagtcttcgtttgagtttatggtagaacatgaagcttaacatgatgcaaaagaatactcgagcgagtactagggcaacgtaaatggaagagagactgcaagagaggctgcactgcacgttgatcaaatcatgtgtcatataaacgaacagtaatacgaagagggatatgttggctgtattttgaggcttacgctgccgcatacgtctttatgtattttttatggcggcagttatggttatagttggctatattcccggttagtttgcatgtatatcagaaggg

SEQ ID NO: 431030 - DNA, 113 bp, Oryza sativa
agcaccgggggtttttgatccacgatggaacaataaagtaacaaaatacaggggggtattacagtttatggggggaaaatttggcaccatggcaaaaggcctctcagccaggg

SEQ ID NO: 431031 - DNA, 101 bp, Oryza sativa
aaaaaaaaaaggggggtacagcctcaaattaaaaatttattaaacaaggggggaggacaacaaggttttaaagggggaacccctgaacaagagggccaaaa

SEQ ID NO: 431032 - DNA, 525 bp, Oryza sativa
tcgtttctttccggccccttcccttccatccccggcggcttcccagccgtcggcaagggggtagggggggggtaataataaactatattataaataaaataaaatataaaaaaataaaaaaaaattaagatatttataatattaaataaaataaaaattattttaaaataaaaaaaaaaatttttttaaaaatattattaaatatatacaaatatgataactaaaattttttaataaaataatattttaataaataattttatttaaataataacataaaatatttcatatataaaataaatttaaattataaaaatactttaattaaaaatttatatatttaaataaaaaataaaaaattttaaatacataaactattaatataaaaatattaaaaaattatttataatataacaatttatttatccttaataaaatttataataaaaattataaaatattctatacatttaaaatattttaaatactttaataaaataattaattataaaatttttaataaaa

SEQ ID NO: 431033 - DNA, 478 bp, Oryza sativa
aattattaaaaaatataaaaaaaaaaatacaatataaaagaacaaaaaaaaaaagaaaagaaaaaaaacaaaaaaaaaaagaacaaagaaacaaagaaaaaaaaaaaaataaaaaaaacacaaaagaagaaaaaaaacaaacgagaacaaaaaaaaaagaatgaaaaaaaagaaaaaaaacataaagaaaaatcaagacaaaaaacaataaccaaaaaacaaaaaggaacacacgggaaaaccaagaaacaaaaaaaaaaaaaacaaaacaataaaaaaagcacaaaaataaaaaaacttcaacaaaacaagaaagaggaaaaaaaacaaattataaaaaacaaaaaaaacacacaaaaaaaaaacaaaaaaacacaccaaaaaaaaaaacaaaaaacaaaaaaacaaccacaaagacagaaaaaaaaaaaaaaaaaaataaagacaaaagagagcacacaaaaaccaataaaacaaa

SEQ ID NO: 431034 - DNA, 109 bp, Oryza sativa
tctattttatcgatcatccgacgatcaaatcagtgatcttgtatatggcggctttgaacggtaaggtggtggtggcggtgatggtggtggtgatggtataatcttttct

SEQ ID NO: 431035 - DNA, 72 bp, Oryza sativa
ggaagggaattatgccatatatttttgatcaccctgtcgattgaactcaatgtacacttttcccattataac

SEQ ID NO: 431036 - DNA, 476 bp, Oryza sativa
gttaactcgataaacattaaacaagctgtgtgaacttcttttttcgtgacaagtttaattctttctcgatcgatcgtcgtgatggctgacgagagcggcggctacaacaggtccagctccggcggcgccgacgagtacggccgccggccgggaggcggtgccggtggctacaacaagcccggtggcaccgacgactacgacagcggctacaacaagtccgccggcggcgacgacgacgactacggccgcaccggcggcggcgggtacaacaagtccggcaccgacgacgactacgacagcggctacaacaacaggtcaggggctaacgagaagtacggccgcaacaagtccggcgacgacgagtacagcggcggcggcggcgccgaagccgacgaggagtacgtcgacgggttgtcgtcccgggacgaccccgagaagtacaggaaggaggagaaggagcacatgaacaaggagcg

SEQ ID NO: 431037 - DNA, 441 bp, Oryza sativa
tatacattcatgagcaggagtgttgttttcaatgaatctgttatgtttaatgatagcttgcccacaaatgtcataccaggtggttctgatgaggagcagcaatatgttagcgtgcaggtggagcacgtggatgatcagaaaactgaaattgttggtaatgatgctaatgatactgatcaacactcacctgctgttttgcagccacaagatgaacctattgcaaacagtagaacaaagaggagttgaggagctacagtccgccttattgaggaatgtgatatggattattatgcttttagttgtgctgcacaggtggagaatactcttgagccagccacatacactgaagctgttgtttctggagaccgtgagaagcgaatgtcacctatgcccgaggagatgcagtttcttgagaagaatggaacatgggagctagtgcac

SEQ ID NO: 431038 - DNA, 215 bp, Oryza sativa
ggaaagcagggccaactgcccatgcatatataatactaggagaaaacaggaataatttaaaacaggctgggtttatgcatggtttgaggggccgaacatcaaggaagccccatggaaaaaggagaattaatatgggggaggaaatatagggggggggggaaaagccagggccggccctgaaagaagtaagaaagaaatcccacagggaagggcaa

SEQ ID NO: 431039 - DNA, 292 bp, Oryza sativa
ctattctttctttgtttcttcttccccctttcgccttccccctctttcctgattccccacctcctccctcgccgccgccgccgccgctgactcccaccgcgaccgcctcccccgccggcgcggtttcggaggaggcccggcgcctgcaggaggaggagggagggagggaaggagggcctggcccgcctccgtcgccgctgcctagtgcggctcccgacgccggccgtactgcgcagcgttcgcccacgccgcgcgcgccgaggtggggcatgggggtgaggtgggaggaagt

SEQ ID NO: 431040 - DNA, 131 bp, Oryza sativa
gtgacgaccagaatgacttggggcaagataaagaatccacgtgtctatctacagaaaggtcctgaacctcttataacatgaatttcgttacatcttaatggactgtaaaacattgttatgacccacctatc

SEQ ID NO: 431041 - DNA, 95 bp, Oryza sativa
gagtggttaacacggaagcgggacaacaaaacggaggagacgtcgggaagtttagcgcgggggagagcgctaaaacaaaggaaggcacaatctca

SEQ ID NO: 431042 - DNA, 143 bp, Oryza sativa
tttttgtggtgttggtcataaacaggacggggaacaccttgagtaatattacagtacctattgtggttttttccacttagatcttttattttgtttagttttagactggtaaacaaattcactattcacaataatcaaagctc

SEQ ID NO: 431043 - DNA, 86 bp, Oryza sativa
ttttttgtttttttttttttttttttttttttttttttttttttttttttttttttttttttttttttttaattttttttatattt

SEQ ID NO: 431044 - DNA, 414 bp, Oryza sativa
tttttttttttttttttttttttttttttttttttttttttttttttttttttttttttttttttattataaaataaaaaaaaaaaaaaaaaaaaaaaaaaaaaaaaaaaaaaaaaaaaaaacgaaaacaaaaaaccaaaaaaaaaagaaaaaaaaaaaaaaagaaaaaaaaaaaaaaaaagagaaacaaaaagaaaaaaaaaaaaaaacccaaaaagaaaaaaaaaacaaaaaggcagcaaaaaacaaaaaaaaaaaaacaaaagaagacaacaaaaaaaaaaaaaacaaaaaaaaaacaaaaaaaaaacaaaaaaagaacaaaaaataaaaaaaaaaaaaaaaaaaaaaaaaaaaaaaaaaaaaaaaacacaaaaaaaaaaacatcaaaaaaaaaccaaaaaaagagacaac

SEQ ID NO: 431045 - DNA, 487 bp, Oryza sativa
  unsure (1)..(487): unsure at all n locations
taatcctacagttttaccaagtgttgctgttacagctgatgcacaaatatgtgcaaaggaagaagcaaatgctgatagtagtgatgatgaacaagctgtacactacaagcgtggctctagtgcaaataacagaaagagaagagcagtctttgatctttcagatgatgatgaagatgacaatgttgtagccattgcatctcctgagccaccggaacagtgcattacaaatcctattgatgaggttgctcaagaaagtaaccccaaacaagaaaacttggaaaataaacaagaggttgagaaggatgtgaaatgttgcataggaaggacagagtctcctgagtgtaaaaccaaaagtagcaacactgtcagccattctgggatcaccttaaaagaaaagaacaatggtccaccacctaatgacaatangcaggatcatgctgctgagactgctttcaactcacctaaaaagaggaaagttttgaagaca

SEQ ID NO: 431046 - DNA, 165 bp, Oryza sativa
ttttcgggtttttttttttttttttttttttctttttttttttttttttttttttttttttttttggggggaacttaaaagtcttttttattaaaaaacccgggggggggcactttgctcactatattgtcccttcggggttttggctaagtcttaagatggggg

SEQ ID NO: 431047 - DNA, 255 bp, Oryza sativa
tctttctttgtttcttcttccccctttcgccttccccctctttcctgattccccacctcctccctcgccgccgccgccgccgctgactcccaccgcgaccgcctcccccgccggcgcggtttcggaggaggcccggcgcctgcaggaggaggagggagggagggaaggagggtcttgcccgtctcctccgccgctgcctcgagcggatcccgacgccggccgtactgttcatagctcgcccacgccttgcagcgc

SEQ ID NO: 431048 - DNA, 451 bp, Oryza sativa
ttttttttttttttttttttttttttttttttttttttttttttttttttttttttttttttttttatttttaaaaaaaaaaaaaaaaaaaaaaaaaaaaaaaaaataaaaaaaaaaaaaaaaaaaaaaaaaaaaaaaaaaaaaaaaaaaaaaaaaaaaaaaaaaaaaaaaaaaacaaaaaaggaaaagagaaaaaaaaaaaaaatgaaaaaaaaaaacaacggaattaaaaaaaaaaaacgaaatataaaaaaccaaaaagaacagtactccattaacaaaaaaaacaaacaaaaaaaaagaaaaaaaaagaaaggaaaaaaaaacacaaaaaacagcaaaaaaaaaaaggaaaaacaacaccccataaaaaagtaaaaaagaaaacatcttaaaaaaaaaaaaagcaagaaaaaaaaaaaaaaaactgtaaaaaatagaaagacaacac

SEQ ID NO: 431049 - DNA, 443 bp, Oryza sativa
aaaaaaaaaaaaaaaaaaaaaaaaaaaaaaaaaaaaaaaaaaaaaaaaaaaataaaaaaaaaaaacaaaaatcaaaaacaaaaaaaaacaaaaataaaaaaaaacaaaaaacaacaaaaaaaacaaaaaaaaaaaaatcaacaacacacaaaaacaaaaaaaaaaaaaaaaccccaaaaaaaaaaaaaaaaaaaaaaacaaaaaaaaagaaacaaaaagaacaacaaaaaaaacagagaaaaaaaaaacaaataaaaaaaaaaaaaaaaaaaactaaaataaaaaaaaacaaaaaaaaccaaaaaaaaaaaaaaaaaaaaaaacaaaaaaaaaataaaaaaaaaaacaatacaataaacccacaacaaaaaaaaaaataaaaaaaaaaccaacatcaaaaccaaacacaaacaaaaaaaaaaaaaaaaaacaataataaacaa

SEQ ID NO: 431050 - DNA, 450 bp, Oryza sativa
cgttaacccttgtactgcgccgccgcctgctgcactgacctccccgccgtcgtcgcgagccccgcggcttccggctgccgtcgccgcgagccccgtggcttccggctgccgcctcccccagcagtaacctccccgagcgccgaggcttgcggtgctcgcggcgccgccgtcgccccgagcgacagccccccgcgcgcctggtctgctcgcggtcacttagtcgtggaggagcgcgatgcgagggcaaacaggccgtggatactcgcgtcgccgccgtcgacgccgtggccggccccgcgcgcggcaaggagcggtgcatcgctgctgccgggcctatcggcggttggtagagcgctggtggtgggctatcggtgctgccaaatcgccgccgtcgacgccgtcgccggccccgcgcggcaaggagcggtgcatcactgctagcggatctat

SEQ ID NO: 431051 - DNA, 117 bp, Oryza sativa
tttttatttaaaaaaaaaaaaaaaaaaaaaaaaaaaaaaagaaaaaaaaaaaaaaaaaaaaaaaaagggcggcccttttaaaggaatccacgccttcgaccccctgcatgccccccc

SEQ ID NO: 431052 - DNA, 404 bp, Oryza sativa
gcacaagccaagggtttctacagtaaatatcttttgcagatatacagtttccagtcaaagctacagcctctttctacagtacctttttggcatgggttccaccctctgatgagcatatcagttggggtggttgaatggagaaataggtaacaaatgtaaggtaagcgcagcttaataatacatagaccttgaaccacacagacgaaaaaagagataggtacaagaagaagcctgtcgagctgactattgcaatgaaattagcaaggcactccggtgtggatacatccccttcagttccttcatcggggaagtggccttgcatgaaaaaatctgacagaagctggtccttttgcctgaacctttttttcatccaatcggttacttcatcttctgacgttggaatg

SEQ ID NO: 431053 - DNA, 195 bp, Oryza sativa
cggggaattatttgacttattaaacggggcatttcagtttactacatggaggatcttaacatattttcccaaaagggggctacttttacaaggttacaatctaaactttttagggcccaggattcacacaacctaaactttacaggtgggattaaacaggctttccccctccccaggaaggcctttttatagcat

SEQ ID NO: 431054 - DNA, 418 bp, Oryza sativa
aagaaggggtaaatcttaaaaatttacgaagaatcaaacgatccacaaataaaaccttgtggtcgtgactaaaaacagagaaggaataacaagagccagccaatcacttgggcaacagccattctgtgtagaacagttctgcagttctgtaatgaggcaaaaataccacaatcgttacatcttttaatcacacgtattgtctatataataaaaaaaatatagttacagaattacaaatcgtagaggaccttgtattcaacagaagaactgagctcagtaatttgcgggcacgaattagtggtggtagcaaatgaaggttgtgtatatgaaccttgtagcagtccaattgcaatggccttgtatgcagcttctgatggatggaagccatcccatgacccaaacttttgggggtcatcgc

SEQ ID NO: 431055 - DNA, 440 bp, Oryza sativa
tctgctaggcgggcggaatcgcggaagcagggggatcccgcagccgaatcgggccggatctcgccggcgatgatgccgtcggcgtcggacgccgcggcggttttttattttttttgttctttttatttttgctttttaatttctattattatcttattctttttctttttttttttttattcatttttctttttcttattttttttttttttttctattttttcatacttatattttttttttatataaatattttttgtttcttttttattctctttctttatatttatatatttctcctattcttttctaatttgtttttttgttatttttttcattttcttttcttatattcagtttttttatacttattatctcttctaattattctttttatcgtactatttttttttattttttttcctctacttctctttttt

SEQ ID NO: 431056 - DNA, 348 bp, Oryza sativa
ggggaattgtgatggtgtatttgaaaactaaagacaatttgtgtacaaaacactacaattctggtgacgtatattacagctacacgctgaatactctgttactatcagatacatttccaaactgatcaaaaatttgcattacaacttcccttgctggcattgatccattgctgcatagaactgaaatacccttttgaaaaggtcatttcgggaaggaaaactaccacactggtacggaaaattgccccttcccaccaggatttagaatcaaacgattacttcttcattgggactttcggaacattccaactgtcttcttcaattggtttcgtgatcacagaaactggg

SEQ ID NO: 431057 - DNA, 248 bp, Oryza sativa
ttttgggttttttttttttttttggttttttttttttttttttttttttttttttttttttttttttttttttttaaaacaaatttaccccaaaaaaaaaaaaaaaccaggggcccccaatgtcacctaaaaaaaaaaaataaaaaggggggggcccttttgggcccacccgggaagcctcccccctttttccccctttataccacaaaaaggggagcgggggcaacaaaaagggggggccggggggg

SEQ ID NO: 431058 - DNA, 366 bp, Oryza sativa
  unsure (1)..(366): unsure at all n locations
ggccggaattcccgttcgtttacgtgnccggctttcgatacccagccanccggngcangaancgccagaacggattgtttgagccaaactttccgttctctccaccagccagcagttcaagaagctcagggcctgacgttattgatgtggagtttgaggagaagtaagaacatgttgttacaacgtgcaccagcaccttagggaggggaagaatgagaagataggctggaagttagcgatatgcgggagtgcacgaagttattcgggcaattgtgcgttgtacataatgcgttccctgaaatttgaataaaacgaagcttcgccaaattaaagcactgcgcattacttgatatttagcattcgaac

SEQ ID NO: 431059 - DNA, 60 bp, Oryza sativa
ttttttgtttttttaaatttttcgggttttttattttttttttttttttttttttttttt

SEQ ID NO: 431060 - DNA, 146 bp, Oryza sativa
gtctaaaagggttgtttaacaatccgggaggggccccaaggaggtagggaaaagggaaagaaggggaaaaaaaaaaaagaaacaaaaaaaaggaacatccaccaccacggggaaaaaaaaaaaaaggaataaaaaaaactaagggg

SEQ ID NO: 431061 - DNA, 373 bp, Oryza sativa
acacacccacaattgcactgttttattccacttggatacagtgaacacgttgtggaactaaagtccatgagctcatagcgagctttaatttgaatatatgaatgtttgcaatgaactaaaatgagaacatagaatacaagccaacggggttaagaatagaaacaagccaggttaaccgtggaaagcattctcagatactggttggctatcaacaggaatatccaagctgttatcttcaggttcagtggttacttctcttacatcagatacttcagaagaatgaggattattccactccgtgaccccaattgtagggatatcgacttcatcattatccaaatcaactatgttctcagtaatgggtattggatct

SEQ ID NO: 431062 - DNA, 329 bp, Oryza sativa
ttcactgtccggagatacgtcactgcacgaagctacctagcttaattacctggttactttatcgatcatcagcctagatatggcggctttgaacggtaaggtggtggtggcggtgatggtggtggcgatggtggcccattctctcccatctcatccctccgcaggattctcggccttcccctcctttgaggctcccacccccgaagccagggttgcagtagctgccgaatcttctactgcctcacccgaccatcccccgcactgcgggacttccccagcttggttcgttaccaaggcccatgctattacatctagccccgtgttgggga

SEQ ID NO: 431063 - DNA, 503 bp, Oryza sativa
tcactcccaccctacctctcctccgccacccggcgcgggtcggttataagctcggagccagtgcgccccggcggccggagcccggagggacaacgcaacgatctctctctagctagatcgagctagagctatagcttagctcagctaattataatatatagctaggaattgattaacaattaatggggaagcgcagcgcgccccggtaccccgacgacggcggcggcggcggcggcgggatttgctgcgtgctgtgctggtgctgctgcttcctgttcctgatcgtcgcggcgctcgccggcgcggcggcgtacgccctgttcctgtacaagcccaaggcgccgtcctactcggtgagcaacatgtcggtgtcgcagttcgacttcaactccaacgacctgacgctctacaccaagctggtggccaccgtgcgggccgagaaccccaacgagatgaacggcatcatctacggcgacggcttccggacggttcgctcctaccgc

SEQ ID NO: 431064 - DNA, 425 bp, Oryza sativa
tttttggggaaacaaacatgggaggacacgatagaattatttgggcacatacacaccagttagaaccaaatttggcaaatattcagatcatcaagcatttccattccatgttgggtccaaacaattacgcccaaacaagacattgcagatcccaatgagtatcttgacaattcgtcggaagtattcggtcttttgtttttgcgaggaagaaattcattctggcgtcatgcatgcatggatcgatgagaggtgatgcactttgcagcatctggtgtttgatcaataatcacaaaataggaacccgcaaccacgaatctgcatgattaaataaggccctgtgattttgtttatgcttaggtgttactatctttcaaaaattaccttcgacgaggaggataggggaggcgaggcgcgtatgcgttggc

SEQ ID NO: 431065 - DNA, 274 bp, Oryza sativa
catacatcttttttttttttttttttttttccttttgtttaatttctagtttttttacccggctcgaactgaaaatgggggggttccaaaattcaaaaggtgggggtagataaagaatccatttcccagctgcataggggggattaattacccctaaaattcagaacagccaacctggttccgaggtggaacactggaaccaccgggattccgacggacttccttccacgcgttggcggccttgcggttggggggagccgcacatctgcatact

SEQ ID NO: 431066 - DNA, 270 bp, Oryza sativa
  unsure (1)..(270): unsure at all n locations
ttaaatccgtatgcgtgcgctaagcctgtaacacaacagcatacgattcttttgtcgcagcatacgtgccccgnaacagccactgatgtatattgacacctcccatttcatttgatcctctagactgcaagtaggaaacggcaggttgcatgctattagctgaagtagtagcggttttgtttcttggtgagctttggatgtgtgtttgtgggaaaacccagaatgataaaagaatataggagtaaggatgcagacatttgtatgcactgt

SEQ ID NO: 431067 - DNA, 324 bp, Oryza sativa
tccgcgccgagcaactcactctgcctgaagccacggagaaaaagcttgggtgttttcttggaagccaagagtgaggcgcgcagaagaagaagaagaagaagaagaggggggaggaggaggagcccctcggctgaccccaccgagcgccacgccccccacggccaccctctccccgaagctgcccggccactcctccagggcctccaccgcctcccacgacgccccgaacggctcccgctcttctcccccgcccgcacccaccaccgccaagacctcccgccttccccgccccgacaggccccgcccactccttccctcgcccgc

SEQ ID NO: 431068 - DNA, 148 bp, Oryza sativa
tttttgggtttttttttttttttggtttttttttttttttttttttttttttttttttttttttctttttttactataacaaaaaaaaagggaagggcctcataaaaactccgcaacacataacaaatatcccggccataaaaggggg

SEQ ID NO: 431069 - DNA, 566 bp, Oryza sativa
  unsure (1)..(566): unsure at all n locations
attttaaataggagagagnacatgagataggggngganctgtcatagtcttcgagaggagtcaatttgcaaccagacaaaaaatctaaccaatatatagtgttgcaggcttgcagcaaaccaagaaatggcctactccactaatcaggtgttttcgtttatttagttcttcaaaacctacttgcatccctaaataagggcagtttcagacttcaacttgcattttgttttctatagataattagcatccctaaaataagagcagtttcagacttcaacatgcattttcctgatagataatgagcatccctaaattagagcagttttattcttcaacatgcatgtttttttatagataatgatactccaacatgcatggtattaattgtgaaagtcttagctacaattttcatagaaacatgttcataacggtcgcactacgaaaatataataatattaattaaagcattcttgatggaaaattggaaatgcacattgaaaatggatcttccaccaccgtatacaacttggtgaagaatctaaaatcaagtgtcataatttttttag

SEQ ID NO: 431070 - DNA, 308 bp, Oryza sativa
  unsure (1)..(308): unsure at all n locations
taaataactagggttggagggagtccagnccaccaccaccaggctcgcctccagtgctccctgctgtccacgccggcgccgngcctccccaccgtccccgccgccgtccgctccgtccccaccgtccaagccgccaagccgggggccgcgacggagcgactcctcgggtcgccgcctcgccggttgcgggttgccggcttggtggcttggcgcggcgccttctccagatctcttgcttggcaactgatccggcgctccaccattcaaccgacccctgttgaggtaaggtgaggtgaggtgaggcgagg

SEQ ID NO: 431071 - DNA, 364 bp, Oryza sativa
ggcctgaaaatacaataaatacacaaccatagagtcatttaactcgaattacagatcacatagttatttcctcgtgcatcaacctattcatactaacaaggaatacatatgacttatcttggaccgtttcaaaaaatatgacttatcttggttcaggctctgttattgtcacctcatttagtgacattgccgtcgagtgcttggccatggagtcggttacggggtatggttgggaatacgtgcttgaaccaatattaatattgcccatgatttctgtgaaaaatgctggtctcgatggagctttagctgaaattgtattggccgcaagcataacattgatcattgacatagttggcctatccat

SEQ ID NO: 431072 - DNA, 86 bp, Oryza sativa
catgactagaccgtgagcggcgcatggcatgcggcggcctgtttaggagggaggctgctcttctcagctgggcgaggagggagacg

SEQ ID NO: 431073 - DNA, 275 bp, Oryza sativa
cccctaccttagcttggatccttttttgcggcccgccttttttttttttttggttttttagcgcaacagggcatcatttttaccacttggacactgtgtacaaatatttccggctctccatacgatctgacactttcacctaaaaatttctgagagttgatttgagattctttacaaggtctacagtggtacaagatccattatcaatctgtgctgacatggtgaggtttaggggtgaatactttctttggccactgctttgggtatcaacagga

SEQ ID NO: 431074 - DNA, 485 bp, Oryza sativa
ttccctactacccacaccctgcaatccaaacgcaggcaaatctagcacaaaattcatcccaggactcccagtctcctgtactccccttgcccaagatgtgcagcgagctttacttcttgattccgaacaggagagaagcattacgacttgcatgctccttgcccaagttctagtcatcatttccaagagcaaaaccatcttgttggctttaatactgatgcagtaactatggtgacaaattctgtgaccagattctgaaggaaaccttacctgcatggaagagggagacccccagcccagcatctccttggcacgcactcccgcggaaggcgcggcggcggcagtcgactcggatctccttgagcagcctctctcagccgacaccgcctggcttgaagtggcagcaaacacttcacgctcacccaactactatgcaaccccctccaactgcctgacagatggttttgtcgccaccccacacctgc

SEQ ID NO: 431075 - DNA, 72 bp, Oryza sativa
ttttttggggtttttttttttttttgtgtttttttttatattgtttttttttttttttacttttactgattt

SEQ ID NO: 431076 - DNA, 528 bp, Oryza sativa
  unsure (1)..(528): unsure at all n locations
tccgtcttctcgccttcgncttcttccccgacacgtcacctcgtcgccgatggagtcccactactgccgcggcggcggcggcggcgatggggactcgctcttcgaggggatggtcctcttcaccccgtccctctccgtcgatcccgatcccgcgccgcccgtcgccgaggcccccgaccccaagccgcccacccctcgcgacgatgccgccgtcgccggagctgacggggcggcctcccagcagcagccgccgccgcctctggatgaggacctgttctccgatctcaccctcctgtccccgcagtcccccgtcgacctgagcggcgcccaccaaggtcaagatcaggaccactccgccgncgcgcccccctcgccggtgccggctccggctgcacccgtcgccgttctggcccggcaggcgtcctcctcggcctcctcgtcgctccgcaagaagaagagggccgtgccgcatcggtatggccgctcgtcttaacccgcgccttctttcccttctgcccgtgcaattgc

SEQ ID NO: 431077 - DNA, 241 bp, Oryza sativa
atcgggtaaatgctagaatttattcctttttttctcacctttacaaacctgcaaactcatttctgcaaagaaaaaaaatgaaaatatgttgcagagtattcctaatttcctactactcccaccgtccaaaaaaatgaatctagtactagatgtgacgtattctagtacaatgaatctatacagagatattccagattcgttttactataatgggtcatatccaaatatgtttagtttcgtt

SEQ ID NO: 431078 - DNA, 96 bp, Oryza sativa
ctgggaattgtcactcatgaggcattaacatcgatcaccaaagcaaaacgaatcttcgcttatttaatgccacacattgacacccacatggaagac

SEQ ID NO: 431079 - DNA, 57 bp, Oryza sativa
tttttggttttttttttctttttttttttttcttttttttttttttttttttttttt

SEQ ID NO: 431080 - DNA, 238 bp, Oryza sativa
actaattagacatatatacaagcttggtaaagagctaagggatataagcgggcctgaagaacaaaaaaagaagaagaaagagaaaaacaacaagaagaggggaaagaacgaaaaacgacgacagaagaaaaattcaggactagctagaaagaggaggcattgctgcatacgggtagagaaaaggataggatcggatcggaaccggggaggccagcaaaggggccggacggcccagggg

SEQ ID NO: 431081 - DNA, 349 bp, Oryza sativa
  unsure (1)..(349): unsure at all n locations
aaccccacaaaggaggacccgaaggaggggttgatttaagagaacctgccgctacaccccccggaaacagnnntggacttactgcagcgagcaccgtgagcataagcgacgagaaggccaagaagcaaagggcacaaaggacgacaacgcagcaagctatacgcgggccaagaaggggaaaatggacgcgcaaaacctgagaaagcaagatacgcgcctctggaaagacggcaccaacgggaagaaacactgccagaagcagccagcactcagagactagaaatcgcaaaagagctggagaaagaagaaggtacctcggaacccgaggaaaagcaagctggcgaggatg

SEQ ID NO: 431082 - DNA, 91 bp, Oryza sativa
tttgtgggcgtattgaaaacgtttcgtctcttttttagatatttctgttatgcctatatatgtatcttttatcgaaaggaatgaaaggtcc

SEQ ID NO: 431083 - DNA, 290 bp, Oryza sativa
ggcttgcaaaagccacggaaaaagaattgcaagggggggaggctttacattggttggaaccccggcgggacaacctagatacaacaagctcaaaagggcgtttctgaaagaaacaaactagccataggttatccttagtttgtggacaaattcataccatgaaataccacaaccttttttaaaccaacttgaacttcgggggaagcacaaccgggggtgccatttcttttatatacccaccggatgatcttttggggagcccagaaggggctaattcacattggcccgga

SEQ ID NO: 431084 - DNA, 71 bp, Oryza sativa
aaagccaaaaccctttttaataaatttgccttaacccagggtaaaaaaggacaaaaagacagggcaatgcc

SEQ ID NO: 431085 - DNA, 149 bp, Oryza sativa
ggccgcccttttttttttttttggatctttatataattttttgtatacgcacataaaaaagcccaactggctgagtatttgattacaaagagtgtttgctcagggtctaaataggaaaacaccactgtggggactagtattataaggga

SEQ ID NO: 431086 - DNA, 93 bp, Oryza sativa
tttttgggtttttttttttttttttcttttttttttttttttttttttattattttcttttttttattaactccttccagacgggcaccccaa

SEQ ID NO: 431087 - DNA, 238 bp, Oryza sativa
gaaggcaataaagtaagcacaactagttaacatattaagaaacaaaggcttccaacctggaacaatcttaaaggccaacgggttcaggtttaccaccgaaagggtaactgtaaacacaggccaagattacctgctcatggaaccccaaatatggatattcaggatccagcctaatgataaaaggaaccgtgtcgcatacctagataaggggacattctccccaaggacagaagaaaag

SEQ ID NO: 431088 - DNA, 123 bp, Oryza sativa
aatactaatttttttgttcttttaattttttttaaaaccctttttttgactggtcttaaggggaggcaaactttttacccaacatctactcttcccccttaagggcaaggcctccaccgggga

SEQ ID NO: 431089 - DNA, 62 bp, Oryza sativa
ctctaaaaaaagcaagaaggccgggaaacaaaaaaaaaaaaaccccacgggaaacaacgacc

SEQ ID NO: 431090 - DNA, 339 bp, Oryza sativa
  unsure (1)..(339): unsure at all n locations
cggaattttcggtttgactcacgcgncataggtacgtaccccgccccaagcccgcgccggcggcgggttgattaaaaccctgcgcgctgtcgccacgcgccgngctagcgctgnggaggcggctttctcccgaggccggcgcggtgtcgtcggaggaggaggaggaggagggaggcgcggagcccgagggggaagacgacgaggacctcaaggagtacgtaggaaaccctcacgcaagcgacgacagcgcgcaaaatcgcgaggatcatcgagcaagacgaaaccgctgagaaggacgaggctgtatatgacagacagaccggaagaagccagggataa

SEQ ID NO: 431091 - DNA, 53 bp, Oryza sativa
ggggactaatgcatgatccattaagcaccataatacataggatttcataacac

SEQ ID NO: 431092 - DNA, 336 bp, Oryza sativa
tttttgggttttttttttttttttggtttttttttttttttttttttttttttttttttttttttttttttttttctttctttctttttttttcttttgttctatcaccaccaaaaaccggggttaatataacacccccgggggggggccaaaaaaaaccccccggcccgggggggaaaaaaaaggggcgggccaccccgggggggggaaagaaaaaaaaggaaccccccccggggaaggggaatttcacccggggggcctttaaaaaaaaaaacacgcccaagggaaccggggaaaggggaaccccccggggggggacccccccgaggggggggg

SEQ ID NO: 431093 - DNA, 77 bp, Oryza sativa
  unsure (1)..(77): unsure at all n locations
gcggtacgatcccgccgcgnnnaagcaaaaaaaaaaaagagggggataaaaaaaaaaaaaccaaccgagaccggccc

SEQ ID NO: 431094 - DNA, 209 bp, Oryza sativa
  unsure (1)..(209): unsure at all n locations
gaccggaccggaattttcgttttgactcacgcgcccgtcaatacctaccaccccaagacgcnagcggcatgggagctttttttgagaggtttccatggttctttcccccctgccgaaggtggtgatggggtcgctgtcgttcgaggtgctctggatgctgcccagagatcccctcgatgccgaagctgccgatcgggcggacgagcccg

SEQ ID NO: 431095 - DNA, 429 bp, Oryza sativa
ttcagtcttcgcgcacagacgcgtaacaagcaagggcaggggggctatgaactgagacgacggtatcgcaccagccaaaaggcaccaactagcgccctagctgaagaagctcgatagccctgcataccaaagaacgagagatcacttacccacgaaacacaggaaggaatccaaggagctcttggacatgaacgtcgagcaggagggatgggcatgggccataacgaagcggctcataacgttggttgggggacaagaacggacgaactccatgatgcaagctatgtcaacagagtgaagaggctgacccgatcagagaaaagactgaagctgaagcagcgacattgaagcgcaacacgcagcactgcacgccacagaactgaccgaactgtgctccagaggccagggacaacacaccaacacactggc

SEQ ID NO: 431096 - DNA, 264 bp, Oryza sativa
cgggggtaaaccctacctttcaggaaaaatcgaggattgatttcccacttattatatcgtatgcaaatactaacacatgcgaaaattattaagctgaaaagtttccatacaaattcattcagacaaacaagggtgaaaaaccttttttttcccatttcccccttgaactttccgtaaataccaccattccaccaaactcccttttggtttttacgacgaataatttttttcaacccaggtagcttattaattaattcccggggg

SEQ ID NO: 431097 - DNA, 112 bp, Oryza sativa
gcgttggatcctcctatgttcggggcgccctttttttttttttttgtttttttgaactcttgttttttttccttgttttctattttattttatttcttgtacgatagaaaac

SEQ ID NO: 431098 - DNA, 134 bp, Oryza sativa
tttttgggttttttttttttttggggtgtttttttttttttttttttttttttttttttgtttgattgctagccattataatggaaaaaaacaaaaacagaaaccgaaataaccatacagggaaagcccacacc

SEQ ID NO: 431099 - DNA, 91 bp, Oryza sativa
aacttgtacaaagcccagatagaataatagtatttatacagaaactgaaaacaacagatagccaattatttgaacaaacaccagggcaatg

SEQ ID NO: 431100 - DNA, 244 bp, Oryza sativa
aacaagccctaaataccatttaaattctaatttaaaaaccaataatgggggggggttaaaacccaaaattatacgagttttttagggaaaaaaaaacagggggggggaataaaccctaaaaggattcggggggggggaccaaaatcggggggaaagggggcacaaaatggggccgttttgggtgaattggggccaccccttgaatttgggggggggggggggggccccgggggcaaccattttg

SEQ ID NO: 431101 - DNA, 121 bp, Oryza sativa
gacacaagttcgagatgaatggattcctgaatcgaatgtttgtgttcagatagaattcttgccacgcaaaatacaaacatgaaagaaaccagttggttttggggtggatagttggttgtgt

SEQ ID NO: 431102 - DNA, 538 bp, Oryza sativa
  unsure (1)..(538): unsure at all n locations
ttgcttantcagtactagagtcactaacagcaaagcctgatgtgttggctaaggactcatttgttagcagtaaaaaatcatgtcgattgggttttggtcttggcacaattccggagtatggatctgttggagtatgccaaccttggtccacaagatcagcagaggttaaacaagtgcatcgggcgagaccaacagcaatcagaagtcaagaagatagtgatgctgcagctctatgtgctttggtcgagaccatggatttggacaccaaacctcttgctgaggctagctctggtagtaactcaggagtgcacatctgcggccctgacagggggcataactcccatccctcgtgtttggctaaagtgcagcatgctgcagacagagatgatgacgaaaattcttctgggtgtgtacatccaagcacctcaggaaataaccgtggttatattccacattatataggtgaccgcaggataaggagattgtttgccttcaggttaaggaaggcagctcgcaacaggatatgtggagagatgtc

SEQ ID NO: 431103 - DNA, 123 bp, Oryza sativa
agaagcatcgggtttccaactcaactaaaaatggcaaaatatccatagtttgggggggttgtataagtaatgcatatgtaaaatggtatgatttgatcattcatggccaaataggggctaaca

SEQ ID NO: 431104 - DNA, 563 bp, Oryza sativa
  unsure (1)..(563): unsure at all n locations
ctcctccatcccctccccgcgccaccatgcgccccttccaccctcctcgccccaacgccggccaaccccaccgcccgcgccccggcgaccccgccccgcctcccctccccatgcacccgggcttcaaccctccgcccgtccccaacctcgccgccgccaaccccatggccgccgcggcggcggccaaccctttcctcgcgatgcagctcttcggccaggcgcagcagctccagagcctcggcttcctcgccgccgccgcgctccagcagcaccatcaccagccgcagccgcaggcccccttcttccccgggggaggtttcccgccgaaccccaaccagttcggggccttccctgtccagcacgccgggttcaacggcggcggggcgtttcgacctggtggcgtgggcgtgggcgtggccggcccccgtactccccgcccgatgatgggcgcccctggtaatggttacaacagcggtggccgcagcggccatggtaccggagcttgtgcgccgagacccatgctgaatggtggngggaacgatcggaatagcagtgctgggaag

SEQ ID NO: 431105 - DNA, 202 bp, Oryza sativa
ggggggtgacaacacaagacagagagaaccaccactttctggaggcttttgttattcaggacggcaccaatcattttctgtaaaggttactacagttcctgaacaaattggaaccacgttggaaggctgggagaggggtgatttagaagcatggtggtcaatatatgagccttaatgacatttgggggttggacgcatatac

SEQ ID NO: 431106 - DNA, 380 bp, Oryza sativa
gataaagccactaggtgaggagtactagtactccaaagtctccaatagtccaattacatttgtagtgtaatttacatcctgaactaagtaaacatactagtggaaaatgcactgatcctccattaggattcatacatactcctcggatataatgtgcagaaaaggaaatgacacgatgcattcaggggctaaagagaagttacatcatcaggtcatcagcttcaattcaacctttttttcttggggggaggcaaaactatgaccgttccaaagttgcttattaggttgcagggttttaggaacagcaccgaaggctcgacgggtgactttaagtcctgagagtgcttgatgcaggtaaactgatgcatcctccaagcttt

SEQ ID NO: 431107 - DNA, 110 bp, Oryza sativa
tttttggttttttttttttttgtgggttttttttttttttttttttttttttttttattatttatttaaaataatataatataaatatataaaaagggggaaggagggat

SEQ ID NO: 431108 - DNA, 349 bp, Oryza sativa
gggggggaaacccccaaattaaacccccaaaaaaaatgggggtttaaaacccgggcggggggccaaagggggggaaagtttaacgggcaagggaacaacgggaggggccgggaaaaaaactgagggggggctaaaggggggggacctaaagaacggcgacagggggggggccatgtgagaaggggtttttttttttgggggggggcggggggaaacatgggcccggggggggcccttttttcaaggggttggggggccccaccagccccgggggggttaagggcccgggggggaaaacccccaagggggggggccccaaggggggggcccacaaccggggggtgggggg

SEQ ID NO: 431109 - DNA, 430 bp, Oryza sativa
gaaaaagaaaaaaaaaaggggggggataaaaaaaagagaaacccccaaaaccccccggacaaaaaaagaaaagaagaaggaccccccccaagaaaaaaacgaaaaaaaagacggaaaaagaaaaaagaacaaaggagaagcaaaacggaaaaaaggaaaccaaggaaaaggagaaaaacgaagaaagaaaagcaagaaagcaaacaaaaaaaagcaagaaaggggggcaaacaaaaaaggggagacaagaagaaagacacggacaaaaaaagagaaagaaaaaaaaaaaacgaaaagaaaccagaaaaaaagggcgaaaaaaaaaaggaaaaggaagcaaaaaagagaacgaaagaaacaacgcggaacaacgagaggaaaaaaaaatagggaggagagaaacaaaaaaagaagcaaaaaagacaggaaa

SEQ ID NO: 431110 - DNA, 445 bp, Oryza sativa
ccgggccggaagacccggggcgacccacgcggccgcccctacaaatagcaatgacatggaaaccaaacggggggagtggtaaaaaccaaccgaccggggcaccccccaagggaaagcgatgggccaacgctacagcaaccacaaggcaaagggccagcacaagacaaggagatgccacaagtggcggacccggacaaagggcgaggaggccacaaaccagcacaagaacgggaggcccatggaaccccgagacaggggcaagaagccgagcacgagggaacccgccgacaagcagcggaggggcagggacaaccacgagcgccgcaagggctggagaacccagcagcggggcgagatgaaggaccgcaccggaagctccccacgctggtgtccaacacccgacagaagctcggcggcggcaactacaccaaggccagcgacgggc

SEQ ID NO: 431111 - DNA, 123 bp, Oryza sativa
cttccttgttttttattttatttcattcccaaaaaaaaagccacacaaattaaacaccataacgggggggaaaaaaataaatggaaaaaaaagggacaaagaactccctaatctctgggaggg

SEQ ID NO: 431112 - DNA, 545 bp, Oryza sativa
ttcttctctattcgtccgctgcatcacagctatggaagctatgatgtcaacagtgtgaacttgtataattcaccactaggcccttctggattcaatttacattcacaagccggaggaacatttttgggatctagtccagatattagacgacgatcttatctctatcatggtggtggcattcgattaagccctgggtgtccagggcctatgtctcttggggcaagtccatcacaatttactccaccaaattctcagatgcaaatcccaagtactgctacaggaaagtatggatccacttctcctgcaaggagcagccatggctcattgggaaaagctgctgctgtaggccaatacaatagaagaagaaatcttggtcacccacctatatcaatgccgcctcatgaatacacatctcagctgatccagggacaccatggggatggcaccattagtaatcactatgatggctatgctcgtggacattctggttacccacacagtgcactccctaatcctggtcatttcagttggagaccacatacatg

SEQ ID NO: 431113 - DNA, 51 bp, Oryza sativa
acccattcttttaaaaaacttccaagtaatcccaataaactggctcaaaac

SEQ ID NO: 431114 - DNA, 335 bp, Oryza sativa
tttttgtttttttttttttttttttttttttttttttttttttttttggggggccaaccaaggggcacattggattattttggtggaactacatcataaccattattgggcattttatacaaagacaaatgctaatcaattgtcaagaccgggagcaggataccatcgtactacaatggaatcaatgatatatggccggcgcagggggggccctttcatgcccgtacgggtgcattggatatgccccggaacttttgggcccaaaccacgggtggttttacttgaggggaacgggggggctgagcgaaaagaacatggccccgtaaagggggaac

SEQ ID NO: 431115 - DNA, 377 bp, Oryza sativa
ggggggggacgggacaaaaaacaaaagggcccaaaaaaggcgaaaggggaagaccccaaaaacaaccttggaaaaaggcccatttaacgggggggcccttgaagcccaaaaaaaatccaaaagggggcccggtacccccacttgaaaacttgacccaaaacttacaaccccagggaaccgcccccccctagacgcagtctaggccgaaaaaaccttacgcaaaaaaacacggggcggcctgtacagaccccacgaccctaccggacaaatcccaaaaatctgggacaaggcccccccccccctgattagggaagtccgtaccttaaaaaaggggggccaagggccccccggggacaaccccggggggggacttaaag

SEQ ID NO: 431116 - DNA, 344 bp, Oryza sativa
ggctcataatccccaaagcctcctgttgtcgccgccgccggcgcgctgggggactaccgccacgccgcagcgccggctggctcccgagacagcccggacggcgccgacgtcgaaccacggcacccggacggggacgaatgaagcagcagctctgctcttgaacctgaacattctgggctgcatcagacgctacatgcaaaccgataagcttgattggctcctaacgtgacaggaaaggcaatctttctgtcagcaggcatggtgttgaaacatcagaatcattagatcgccgtgcatgactctggaagggttctagacgatgcttgtagatagtggtggcaact

SEQ ID NO: 431117 - DNA, 323 bp, Oryza sativa
tttttggtttttttttttttttttgtttttttttttttttttttttttttttttttttttttttttttttttttttttttttttttttatttctaaatttatcggggggggggaacggcaaaacccccccaaaaaaaaaacgggggggggcaaaacccgggcccccccaacaacccccagggggggggcccccccaaaaaaaaccccaaaccaaaaagggggaaaaaaaggggaaaaaaacagggcccccccccacagaaaaaaaaaatcccggaaaagggggccggggccccacattgggcccccccaggaaagggggcccc

SEQ ID NO: 431118 - DNA, 523 bp, Oryza sativa
ccctcactccagcattatgggcttgtggtcctacaacagttgctcaagggatccattacaaatagaagctcttgtttcaaagcaggatttcttagttttcttcttgattggttctcagtagaggaaactgatgatactgtcataaaaattgccgagttgattcagattattggtgggcacagtatttgcgggaaagatatacgaaaaatgtttgccctcctgcgtgatgagaagattggtgtcaagcagaagcgtaattcattgcttttgacaagtcttagtcacatgctcaaggaaaagggacctgaagctttctttgaatttagtggtcatgactctggcattgaaataaaatcacctgttcaatggccttacaataagggcttatccttttgctgctggttaaaggtggaaagtttccttgagaatagcatgatggggcttttctcctttttcaccgaaagtggaaaaggatgtttggctatgcttgggaaagatgctctaatctttgagtctatcagtc

SEQ ID NO: 431119 - DNA, 53 bp, Oryza sativa
agcaatgaacactgtacttgcatgatgatgatatactacagtgttacatagat

SEQ ID NO: 431120 - DNA, 66 bp, Oryza sativa
ttttttttttttttttttttttttttttttttttttttttttttttttttttttttatcttttttt

SEQ ID NO: 431121 - DNA, 408 bp, Oryza sativa
ccgggccggaattgctgtgttgattcacgcggccgctcagagcccgctggcaacagcggcggaggacatggcgtgtgtagacgagctggctgcttggtgcccgaggatgacggcgcagcggttagcggaggcggaggctgagcgccggcggcagcggcgacggcggccgaggctgaggacagtggcgacgtaggcggatgcgggtcgctagcgaggaggctgggcgctcggcagcagcggctgcggtggcggtggcggcgaccgtgtctgcgatcaccggaggcatggcggactcggatggctagccgagggcgaggcagacggttgcttttggccggcacgacatcgatagtggaggggacggagaccggatcggcacaaagaggcgcagccgacggcaacggaggc

SEQ ID NO: 431122 - DNA, 274 bp, Oryza sativa
aaaaagcccaaacccctcgggttttattaaatcatcaattgaaaatttattccatttgccccccgaaatatggggaagaacgccatcccaaatcaattcctgggaggttttaacctttaacaaagggaaacatcttaaaggggaaaggggaaaaacatgacaatttaatgccgggtttgcccttgggtgaaaaccataaaaaagggcccccctcggccatgaaaaaggaacaaagggggggggcccacaaaaaaaaaacatgcttggttcgggg

SEQ ID NO: 431123 - DNA, 65 bp, Oryza sativa
acattactcaacagcaaagggatacatggatcacgggtggaccgacacttgaacatacagataca

SEQ ID NO: 431124 - DNA, 379 bp, Oryza sativa
  unsure (1)..(379): unsure at all n locations
cggggcggaatagttgggatgacccacgcggggactcaaagaacgcgagcggccaccctaganaggggggggtttttgaaagggtatcctccgttgtccccccnggaaaaagattgagtgggaagaaaaaaaaaaaaaaagggggctaatgggggtattctccaaggaggggaaacctatttaaaaggaaagacggaaagtgggacctaaagaaagaaaaaggggggggaaaaaaactaaaggggaaaaaaggggacacttccaggtgaaaagacagggtagggacaaaaaaagcaacagacatatgaagggcagagggggcccctttttgcgaggcactaaggaagggcaccaccagggaaaaaaaagaagcgcaaaa

SEQ ID NO: 431125 - DNA, 410 bp, Oryza sativa
ttttctccatcgcgccgggctacttaaatgcaaggctgctgctgctgcatataacttcacgcatgtagagttttgcctagaccgccacacagaacaaggatcaatatcgccaagaagcttgaactttgggcatctcaacattgcaagaatgatacttgcggagctgcgaatcctattgaattgcacacaccatggtgggtggcaatcgggagactagaaccatgaatcgatgatacgaaggatggctaggagctgtatcacccatagcaggggaggagatgtttgatcacacgattttgattgagatgtgcctcgcacacttgccagtgatggtgctgagaagagcaatggactggatcgactgtgaaatgcttactgcggcttgtggcctttgtctgcaacaagagcct

SEQ ID NO: 431126 - DNA, 115 bp, Oryza sativa
acataagctggtttataaacaaccgccaagaaaaaggaagctatgttccattaaaaaacaggataatgaggggtttcgcttcatatactaaaccacggacggcatttaaagtaag

SEQ ID NO: 431127 - DNA, 525 bp, Oryza sativa
tccttttgattccacgcgtgcgcgtccaacctcatgcttcttcatttttgtcacaatgcttaccttggggagaagttagtattcaaaacaggagcattcccaaatcttagaacacttgtgactttcaatttgggatcagcaaagagatattagatttgaggatggcagctcaccccaattggaaaagatagaaataggcaggtgcagattggaatcagggattattggtatcattcaccttccaaggctcaaggagatttcagttcaatacaaaggtaaagtggcgatgcttgctcagctggagggagaagtgaacgcacacctaaatcgtcccgtgctgcgaatggcaatggaccgaagtgatcacgaccttgctggcgacgcaaaaggatctcctccctaagcaggagggagacagctcgcaagtaatcatgttgacaacaaacgacagagaacagatatgcatagctcaaggtggtttgatcaagtgatcatctcctccattggcattctccgtcgtccctg

SEQ ID NO: 431128 - DNA, 308 bp, Oryza sativa
catagggattaacgtttggtgtatatacgtcaattgattttagtaatcacagctgtcctgtaataatagaactactaaagttgatgaaatacggattatcgtgcgctaaaaaaaaaaaaaaaaaaaaaaaaaaaaaaaaaaaaaaaaaaaaaaaaaaaaaaaaaaaaaaaaaaaaaaaaaaaaaaaaaaaaaaaaaaaaaaaaaaaaaaaaaaaaaaaaaaaaaaaaaaaaaaaaaaaaaaaaaaaaaaaaaaaacgggggggggggtgggaaaaatggggcgggacaaaccctggggggacggaagg

SEQ ID NO: 431129 - DNA, 342 bp, Oryza sativa
atctgagagcttcttgtactgtacagatgtgagctcctcaacacaagctctctctctctctctctcaaatcaaagcatttggcgcaaatccgccattgattctgtatcaatctctactggaagtttactacgggaccacggcgacctccttgggatcattggcagggaacacgtgctcctccgactgctcgtcgacgtcgtcgccgtcgtttccaagggcggcggcttcttgctgctgctgccgccgcacgacgtggctccacctgacctggaagaggtagacgaactccatggccgacacctccacggcgaggagccccgtacaccaggttacgctcctcc

SEQ ID NO: 431130 - DNA, 321 bp, Oryza sativa
atatagttatggaccaaaaaccacggactcttattaggacctgatcactaactttacaagcttgttggtccggaccgaaaatattaacttttcaaggatgtgtacattgggccgggaaactttacttggaggaaaggttgggccgtaaggcgcgggagggcccacaagtatttaaaggagcaagtagaggaaggcatgatcagggggtcttcaattgacgccgtcgttgacgttgggcgaacgcgccgtctggtgcccctgctggcggagcggtttcgggaggtaggactccaacccccggaggaggttcttcccacccag

SEQ ID NO: 431131 - DNA, 132 bp, Oryza sativa
tttttgggtttttttttttttttttttttttttttttttttttttttttttttttttagaataaaactaatttgaaaggggaaaaaaacaaaagggaaaaagggccaaagacaaccccaaaaaagcaccacc

SEQ ID NO: 431132 - DNA, 501 bp, Oryza sativa
  unsure (1)..(501): unsure at all n locations
ggcggtcncttgctagggatcaatagncggattattcctgtgccgttgcaacagaaatagaattggcaaagagattgaaggagttctttctgaaggaaacagggtaagtatatttgttacaccaaataattttcatgcgtggaacatgatgacaaaggctccattcgaagtagatagtagcttatagattatagattattctgattttgtttatagcttttcgagggcacaaataaattttaaaaaatatttaaaaagttgaaaaatgaacttttaaatgtatcataagcaattttttctatgtagatttttttccaaaaatataacgtttaggagtaactagtagctgaaaagaacagggccaaaaaagatgttccatttccagtccactgtcaataaatattagctatgttgctaacattttcctgtactattggaatgaaactgtctgaagtccaagtatagcttaattgtgtattaaggtgtccatactgtcttacc

SEQ ID NO: 431133 - DNA, 310 bp, Oryza sativa
gcaactagtaacaataaccaaatactatttcaacgagtccagacaatcaggattccacaatcaactcatactgagaaaaaaaagggacagctttatccctgtcgtcatttgcacggggaatcagggattgcctccagaaatatgaggggaacagaagatgaataaccgaacaaggagtaatttacatcgtaaaatggggaatgccccaaagatacatgtagagtagtataaaataaaataattaaatttatgaatatgggggcaaaggaaaaggtacacaacctgtgcgctaaccctttgggttcctaaa

SEQ ID NO: 431134 - DNA, 211 bp, Oryza sativa
ttttttggttttttttttttttttttttttttttttttttttttttttttttttttttttttttttttttttaaataataaaaaaaaaaaaaaaacaaaaaaaaaaaaaaaaaacaaaacaaaaaaacaggggcagagccccaaaaccccccacaaaaaaacaaaaaacacaggcgccggggtgagaaacaggaccgcaccaacccgccac

SEQ ID NO: 431135 - DNA, 88 bp, Oryza sativa
atacattatttaaaaaaagggcccttctcagaacctttaaaaaaaaaagcctaaccgcccaaacgggccgccacccccaacactaaaa

SEQ ID NO: 431136 - DNA, 346 bp, Oryza sativa
attaaattggtcggttaggataaaccgccaataattcaataaaccatttaattagggacaggggatcaataactcggcaattaacaaaagtacatggcgcagcattatccaaaattttagaactttggattttccaatcttttttttgggaggtactaccttttttttaattcccgggcgaacattccttgggcggaaaaaggtgttgggggggccggccggggatcgatcgacggggacaaggtccccgctgttgttgtttacaagcgaaacgggatgacccccagcttggcggccttggtgaaaacatggttgcgggtgatgtccgcgagggaggggcaccccc

SEQ ID NO: 431137 - DNA, 349 bp, Oryza sativa
gggaaaccaacgagggttacaatttcccacagaagtccataacagattcagggaatacaacagcagcaatttttttaacaatttagaaaacccaaccttgaaattttttaatagcaccagggttgataccccttatcaagcaagggaccacaggggccaagagtttggttttgcaaccaaatgcacgttgttttgcggcagaacacattgccgaatcaaaagcctttaggttatccttttttcctggtgcctataacgcaatggaacatcagatacagggggggcgtcttttccagcccaagttgttgaaagcctgaaactgaaagcaattttattcagtttttaggcc

SEQ ID NO: 431138 - DNA, 101 bp, Oryza sativa
  unsure (1)..(101): unsure at all n locations
gagatgatgatgctttggcaacaccaactcgatcatgaggtcgttgaacaaaatcgaggcgtttctacccaaagacaacgagntgggggggcggataccca

SEQ ID NO: 431139 - DNA, 350 bp, Oryza sativa
aagagcagacataccgaaatatcttatggttcaagtagctctaagtacaagcataactacatggtataacagcataaactaaactaataaactatcaccatcgcacgttacaacaacgattgtaaactcacccagccaacaatttttacaagaatcacaagatgcacttcgattgatacaaacctgaaaaatattaatgaacattcaacaattgaaaaaagctttttacagtttaggaggacagtatatcatgttgggtacacgctctgaagaattgatttgtgggtggatgattgcagctaaacactttcacatgttaaatcccaacagtagaatcatccgattgacac

SEQ ID NO: 431140 - DNA, 385 bp, Oryza sativa
tttgtttgttttttgtgggcggtttttttttttttttttcattaagtttttttttgtttttattaccaatttttttgttttttttagcacccccgcaattttattaaatgcttggggagcccaaacaaatggccccccccccccaaattaacttggggggtaaaagtttatgcttaaaaaaaaaccttttttttggaaacaaactggcatggcggggaattttttggaaaaaccccaaaggtttttaccaaacaaaccttggggggggggaaattttctttggttaattcgccgggggggtggggggggggaattttgggccaggttggggtttgggctagggcttaagcttaagtttggggggcccgggctttttggggaaggg

SEQ ID NO: 431141 - DNA, 281 bp, Oryza sativa
gtatgtatattattttgcttttatttttttttttcttttttttttatttcattttgtatttgcctggtctaacatcatttatttattttatagggggaaacaactccattttcaataacttttgtaagggcacccaacccccactttttacaaattttgttagattttaatccattcgaggcgaccatacccagtaaacaagcttggctaacaaacattacaaaagctttttacagtttatgaagcccaaaggccctagccaggtacacgctttgaaaaat

SEQ ID NO: 431142 - DNA, 368 bp, Oryza sativa
ggccgggatgtaagcttttatataaaccaaaccgccccgttttaaaaacaaaggaccatcccccccacatagcgctgctatttggatcttagcccgcccactaagctctcgacttacgaaaaacacaaccccccttattccattctaaggcccccctaacaatggaccacgttctaacagctcccatttgaaggtgggggccgcaaaaacctttggacagggggggagaaacaggcccacccaaacccaaatgacggggatgcccatcacgggcagaatcgttggcctgtacaggaaggcccccgccgccaagttggggaacataaaggcctgacggctgcaggcgtttaaccttggggctggggggg

SEQ ID NO: 431143 - DNA, 322 bp, Oryza sativa
cgagtcatgcttcgatttgatccgcgcgcggagaagacgaagcgtgagagagagggcgcggatttgcgccggttgaagatggtggatctagcaacggccccctcccttacaaagcgctgagcaggacacatgctctcaggtctgcgagctggagagcatatttcagtcctccagccatgaacaggcagatgatgacaatgccaggaaccaagccctagagtttctaaatgagctgggctgacttctacatagagcaaacataatatctaaacacgataaggctcctctagcatcctttaacatatggcgatccacaaatctt

SEQ ID NO: 431144 - DNA, 315 bp, Oryza sativa
ggacagtaaaatatgtggtgtggtatctacatataaaagaaaggagacaggtttcattcattaaaccttacataagcttgagtatgaccagataagaacaactcctgctgctgtaggataaatctgcaaacacacgacctgattccgacctattatgatggaaagcaggaagcacgggcagaaaaggacgaggggggcacactttgaacgacattaacaatcaccgaggaaccacaataacctactgggtcaacaccatggcccacgcaagggagcacatagggggagggctgaagccagtggagggggttgacc

SEQ ID NO: 431145 - DNA, 503 bp, Oryza sativa
  unsure (1)..(503): unsure at all n locations
cagaatcctcctcgtgtcggngggaccccgagccgagcgatcgatctaatcgaatcccccgccgtcgccgcctcctcgccgtcgagctcgaccgcgccgccgcgttgcccccctctcctcctcctcccccggcgacgcgtcggtcgctgagggagcttgtcttggtgctcgccgcgttaaaccccgcgaggcggcgagcaggggctgtgatggtggtgatcgagcaggagccggaggtcgaggagacgccggcggcggcagaggagccggctgccgaggagcaagcggcgggtggtgcggccggaggggaggcggcgagggcggatggggaagacgaggaggaggccttcgaggacgcgctgaccgacgagcagctccgggagaaagctagaagccaagcaaatgatgcaaaggcagaagggaacaagttttttggtgctggagaatatgagagggcattgtcgcaatatgagacagctttgcaaatggctgctgagctggaa

SEQ ID NO: 431146 - DNA, 385 bp, Oryza sativa
tgtctccacgccgccttgctagatcaccggagaatctgaagggtataggaacggggggtttcttaaactgtgtgcgtttaaaattggcacctttaggtcatgaaaaaaatgcaaaactgaaggaggcgtccatttctggtatcacatctgtttattctcatattgattcaacagcagtgctaaattttattctaaacttatctgttgaggagcaaaacctcttgaggcgtgcactgaagcaatacacacctcgcattgaagttgatttagtgaactacttacagagcaagaaagatcgttcccgtcccaaatcttatgatcaagcagattatggaacttcttccgaagatggttacgcgcttgcatcaaagaaaagctatccatt

SEQ ID NO: 431147 - DNA, 174 bp, Oryza sativa
tgtttttttttttttttttttttttttttttttttttttttttttttttttattaaataaattaaaaataaaaaaaaaaaaaaaaaaaaaaaaaaaaaaaaaaaaaaaaaaaaagagggggggaggagggggggggggggagggccggggggagggcccccaacgaaaccaaaa

SEQ ID NO: 431148 - DNA, 437 bp, Oryza sativa
cacttttggttttgtttttttttttttttttgttttttttttttttttttttttttttttttttatatcatgagagggggaattacaagaaaagggcccaaagaaccaagggacgggggggggaacagcgaagacaagggcaaccaaaccaacagaccggcaccccaacacaaaaaatgggcagagcgggcccaaggcaagggaggggcccacaaagggaaaccccctcgagccggcagggaaacaaaccccggaccagaccccccccctggccccccaggggcccccagccgcccaccaaactgaaaccaacggagccctatggaagcccaacaccgggcccacaagggagaaaaaggaccggaaacccaagaacccggggcccggcccaaaaagggcagcgggccccagcaccgccggggaagcaaagcccccaa

SEQ ID NO: 431149 - DNA, 63 bp, Oryza sativa
aaaaacccggagaagaaaagaagaacgggccggcgaggaagaagcccggcgcggaggaacggc

SEQ ID NO: 431150 - DNA, 438 bp, Oryza sativa
agcgattggacacccaacaccaggcagacatgcgagcaggcgtgcttgaagacacaccaggtctggctaccaccgcacaagagacgcatcaacagatggtcagagcgacctaaagaaaggatggaaggactccgcagcaaaaaacattggcatacacctacacgcaacgagcatgtctcttttctacaaagcaacccacgttgcactgacagttgatgttcggcgaaaaacagctgttcaccttgtcccacagatatcattctgctatcgctgcactataggcgtgcgatattatccatgtgaaactccggcctaacctgccactatatccatactgatagccactctatcattgacacttaatgcggctcgaatgagtcatgtaaatggaagctagcgtctatatgcatgtctgctgctaaaaaaaaactaaacaga

SEQ ID NO: 431151 - DNA, 85 bp, Oryza sativa
cctacacacctccccgcgggggtcaccgacgagggcggcccctgggggcgcgcgttccccaaggcgaatgtcgctggggttggtg

SEQ ID NO: 431152 - DNA, 399 bp, Oryza sativa
agaacccggaggggaaaagggggaaaacaccaagcattttcattaaaaaattggtacaaaaaaccacgcccaaaaaaggcctcaaaaaacccatggggggtcccgacgattgcctgaaagaaaccccccctttgttcaagagaggaacaaaaaaaatttggttttccgcccgccaaaacggggggggggcgtttcaaaaagaaaaatattggggggtgaaaaatttcaagggaaccgaacccaggaccacgcatgcctttgattaaaagggggccggcgtttttattttcagagcccgttgtgattctttgggaaatgaccttctaccaggcggggaggggggcctttgtgccaaggaatcggacatggaagggctcctttgggggggcccaacttttg

SEQ ID NO: 431153 - DNA, 349 bp, Oryza sativa
  unsure (1)..(349): unsure at all n locations
nctctatacatacgacacagggaacatcacaccaacatatgaactaggtcgcccgcgactgttcttcccctttcctggctggccgaggcgagcgaacgactgacgcgcgcgggcgcaagcgccactgatcataacatgcaccggcggtgctgccttctgcgcgcgcgcggctagagcgcggcatcgacatggcgcccatgacaagtgcagaccactgcacgggcaccccggcaccggcgggcgcgcacaggcgctgcatctaacacgtgcacgatcacaacatatgcggcgctgactggcccgtcgactgggcgctcacgcggcaagaagggcgggtaccctacaaggc

SEQ ID NO: 431154 - DNA, 404 bp, Oryza sativa
tttttttttttttttttttttttttttttttttttttttttttttttttttttttttttttttttaaaaaaaatttaaatttaaccccaaaattaaaaaaaaatttaaaaacggttaaaggggtaacccataccattctcaacccttgccagggattgaaagcgggggggagctggggggttgggggagcactgaaagtggaaaaaaaagggaaacgcccccaaaggggaaccaaaacgtaaaggaatccgaaaggggggaaaaattggcgggggcaccaaaagggaaggggaacccgaacctaacacgcgaaaaaggcaaaaatgccaaaaaggaattggcggccccggggctttgaagggaaaggggcccccgcggctgccgggggaaagacactgacgccc

SEQ ID NO: 431155 - DNA, 464 bp, Oryza sativa
cagagaacgaattcttgcgagaatgtatggggcaattttctggggtttttctcattcaactgaatgtaaaccttacaactgaaataaagagctaagacaactacttatactcaacaaacaaatttggaatccgaggctaaaatcgcgccatcccacgatccgctttttctgaactccacgcacacacgcacgccactcccagcgctcgactcggtcacgatcaactgattcgcgacttatttgcatctctaacaaactcctgctagactaattcgtcctcccgatcagctccgagagaatcggcttgcattgggccacagctgaaataaatcaacaccgccggcagagtgctagcacctcatcctgtcctccctttcgcctcagcatcccccgccgtcaccagcagtgtcatcggcgtcgggcatcctccttcctcttctgttgccccgtcgccacccgcgtag

SEQ ID NO: 431156 - DNA, 345 bp, Oryza sativa
gggggcaaaaaaacaaccaaggggacccactggcggccctggccttttggggatccaaaacaaaacaaaacaagggttaatttaaggaaccccctggggtaggttcaagttaaaaactttaaaaaacccccaggcccccccacctgggcaggagcccccaggggggaaattattccaaaaaaccaaaacgggccccctttttaaaggttgacaggaaccaaaaaccggggggggaaacaccaaaaaaaaccggccaagctggcttgaaaatgggaacaaacttcctcaggccccttttggaagcccccaccaccctctttgaattaaccccaaagggggaaccaa

SEQ ID NO: 431157 - DNA, 506 bp, Oryza sativa
  unsure (1)..(506): unsure at all n locations
gagctgcaaagctcttcctgaataaaggagacacggnaattttttacttgcttccatattttgtcaacttctagcacaatatctgttacctgaaaaatctgtccatagaagttaacccaaccttttttttctacataacttcttttaaaatccatcaacctttttgtgcccacctcagctaaaagttactgttcatggatactacatcaaaatgaaggtacttcctggctaaaatggttctagtttaggtttgaacttggaaaaatcaagccatgctagttttttttatgttttctcgaaaacagttattttttatgttagacatgggtttggaattataaattaagagcttgtagttacaattcttgatatgcatttggatagaatcttcgttgaaattcatatacttgtcctgtgcatattaaaaagtttgagggctttcagccaggcatatgattgactaaactgttgttaattatcctttatatcgtgaactgaacttttga

SEQ ID NO: 431158 - DNA, 169 bp, Oryza sativa
atgcgggaagaaccgataatttcatatgtatgtacatcaacccaaatagtcaaatacaacacggtaaaaacaaaggcatgacgaccatgtatggagaagttaatggggggggggggaatacttttcttctttactccttattctgcactccttatcttcccctttctac

SEQ ID NO: 431159 - DNA, 476 bp, Oryza sativa
aatccactccaacctaatgtttgcatttctttggttggcttgctcaacaacataggaaaaattcctgtgtttttcaatccataggtttgcacatgtattcctatagtattcctacgttttttctattcctacgttttgaaaatcctgtgaaccgaatgagccgaaatttaaaaattagattcgaccaaagtatatggtgatttcgtggtccattccacggaactaaattaagcaccacaatagcattccacaaagctagcatctatgcatttccacaacaaaaactgtgcgtatttgacgccttgacgggaaacatttcaatggtcttcagtgctggaaatatttttgtcaatgatctttgctgaacatgtcttccaaagttttcagccagttcatgtatttgcaccgttccttctcaaccaaatggtggctgaacatgtcttccaaagttttcagccagttcatatattgccacc

SEQ ID NO: 431160 - DNA, 517 bp, Oryza sativa
  unsure (1)..(517): unsure at all n locations
gtgngtcgcgtgatatagnttagcatgagcctttggccgtttgtctttgtcatgttactgtatggagctccacttgctgatgtttagaatttaagaagatcggttaatcgatgatgataagatgattccattcccaaaaattgttttttgctaaatttattggcatgattaattttgttactagttgctcttcacctaaaagaatgttccagttatcctgaggtgttgaacttagttatttacctgtttggcaaactagcatactagtgatagaattacctgaacctagtggtagttagcctattttcctatgcgcatttgcattgatagtctattttagtgtgatagttacaactgcatttgcatgtttattttcgttggtatagtcagctccttctgcataggttgcttttagcgaattactggtatttgatttatgaagatagttgtttccttaacgttttgctttccttgatgtgttagatgcttagatgggctttggatagctaactcgatc

SEQ ID NO: 431161 - DNA, 55 bp, Oryza sativa
ttttttgtttttttttttttttttttttttttttttttttttttttttttttttt

SEQ ID NO: 431162 - DNA, 357 bp, Oryza sativa
atagaaccaacagaaacaaaaaaaaaaaaaaaaagagggaaaaataaaaaaaaaaccccagcgaatcccccccaaaaaaaaaaagagatggaagcccgcgcgagcggaccaccgctaccgccgggggggccgctcagggggacccaggataggggcccacgcacccgcaaagaaacaggccctccagggcacccgccaaaccaaaaaaacgggcgggggaacccaaccaagcgggcgggaaaaacccccccgatcgcccaaccaggcggcctagcgaaaaagcccccttggcccggcgggccaaaaaccaaacagccccgcgcggtaggcgggcccgcccaagggggggcccaaaag

SEQ ID NO: 431163 - DNA, 507 bp, Oryza sativa
ggcggcgctgctcatctgcgggaacgtccaaatggactccccgctgcctcctccgccgccaccgccaccaccggacggcccacctccttgcgtgctgttgctcggcaccatccacacggtgcccggcatttggctctgcgtgtacccggccatctgctgctggtactgttgctgctgctgctgctgctgctgctgttgttgctgttgctgctgctgcatttcctgctcccagcgccgcttcctggagaggtcggcggcggcggcagcggcggaaggcgaaggttgcacatcgagaccgacgctgcccgagtggaagttcaacagaagcggggacggcgacgaggacgacgaggcggggccctcggacgggaacccgaggctgacaacccggtcccacgcgtccgcacgggatccgaaccgggcggcggcggcggggctaggtaacgcgcggaggtgcgccggggcggacagcgacgatcccgaggagcggagggagatattgagcga

SEQ ID NO: 431164 - DNA, 504 bp, Oryza sativa
  unsure (1)..(504): unsure at all n locations
ngagctactcgccaagcggagaaagaaaaggagaggagaggaacagtgcaaacgttccccccgtccccccaacctcgggcgttgcccaatggcgaatgattcctcctccttccctcgcagcctccttatcccgctcgccgccggcggctgctccgacgatgacgacggctacgacgagggcccgtcggacaccgtctccttcccctccttctggccgccgttcccggccatcttgtctgattccgactccgacgtcgccttgttccctcttcctcctccccacgtggaccactgccctgcgccgcagggcgccgcgtcggcgttcttcgggctcggtttccgtgaggaggatgaccacgatggcggcgagtgggcgccgccgggcgaggtggagttgcctctctgttgggattgcctgcagctggaggagcccgaccaccagaggtgggacatcggcgtgaacggcggcggcggctacgagtgggagcaggtcggcatcagggt

SEQ ID NO: 431165 - DNA, 298 bp, Oryza sativa
ttatgctgtgtcggcttttttttttttttgggtttgtttttgaaaagaggattccttttctctacacagacttgcaaagaaatgatgcttcaaccacaagtacaacaaattgcatttctgcagtccaagaagttatcatatactagcagagaggagtttatgaaaatgtatcagaagggaagggctttgaaaaatgttacagacagacatattgcataacaaacaatgacccagaaaattagattgccttggaagaactttttgcttaaattctgcaccaagctggaccaataagtct

SEQ ID NO: 431166 - DNA, 108 bp, Oryza sativa
ggttatcacaacgcccgccggcagcgaggcacaagcgggggcctttagaacagcgcacctccgttccgcccgccggagccggagacgcggaagcgggaggggcggagg

SEQ ID NO: 431167 - DNA, 58 bp, Oryza sativa
gtttttgtttttttattttgtttccacttactttcttactttttcttttttactcttt

SEQ ID NO: 431168 - DNA, 329 bp, Oryza sativa
  unsure (1)..(329): unsure at all n locations
ctcnggacttccagctcgcgccgtcgccgtcggcggccgtcctgcggctgcgccgcgtctacttcgccgtcgtggacgccggcgtggagcgctgcggcgaggtgctcggggccgtggacgtggaccccatgggtgccatcgtcgtggtcaccaacgtcttccaagaagagaggacgagctggagctcgaggtctggccatggcgatggcagtagggtttgcagctatgggcaggtggtagggaagggcaggtcgatggtgttgccgatcggccatggcggcatggaggtgacgaagctagggctaggccgtagggtaggaggagggggg

SEQ ID NO: 431169 - DNA, 500 bp, Oryza sativa
gaaatgtgatgagatcttacaaatgaaagcatcagtaatgtgattcattcagccaacagtgactggttacaagaagtaactaacattgtaatcaattcatgctggtcaaacttaatcaagcctaatcatacagcctggcttaaaacaattggtcaaccccagccctgtactgttttatccgttggttttgcaaactctacctgtaacttgaacatgtacagtgacagatgatcatctctcgtgacagtttggccaattgcaagatacaaacaatatccaacaaactacgcgttcttacgactttgacaatgtagcatccagtttatctgctatcattgcaatccatgcctgcaaggaaaatcaacaggataatggttgcctctctactgtcatactgattctttttttacagtaaccgtcatactgaatttaaaacagtgcaagtgtgcaacctacaaccaacaggcttttcattacattcggtcttttgtgctctcaaa

SEQ ID NO: 431170 - DNA, 377 bp, Oryza sativa
tttttgttttttttttttttttttttttttttttttttttttttttttttttttttttttttttttttttttttttttaatttaaaaaactatttaaaaacaccaacacaaggggcccccccccaaagccccaaaagaaaaaaacacacaaaaaggggggggggaaaacccctagacccaagaaaccaaaagaaaaaccccccgaagggggaagagcagagatccccaacaaaaaacaaaactgcaaccccaaaaggagggcggagcccccacggcactacaaaaaaacaaggcactaaccgcccaccaaaaaaggccgggaccccgccccccggcgggggaggcccacccaaaaggggggcccccacaggggggga

SEQ ID NO: 431171 - DNA, 74 bp, Oryza sativa
ttttttttttttttttttttttttttttttttttttttttttttttttttattttttttttaaattttaacaac

SEQ ID NO: 431172 - DNA, 277 bp, Oryza sativa
  unsure (1)..(277): unsure at all n locations
gtcgagcctccgttcttggaagcgagagagagggagggaggagggaggcaattgccgaggcttccgccggaggaaagggacagctccggccccagcaccctgctgctcctgtngctcactcaccacgctatcctctcaccaaactctctcttatccccctccaagatcccaacccccaagcttcactagcttgttcgggctgaggaggaccatgctctggatctttcaagcccagctccagcactcccccacgctcgatggcagctccagcacagat

SEQ ID NO: 431173 - DNA, 203 bp, Oryza sativa
  unsure (1)..(203): unsure at all n locations
ctcncactgaccgaagctacctagctnaattgcctagcttctttaccgatcatcattctatatctggcggctttgaacggtaaggcggtggcggccgtgatggaggtggcgccggagatggaggcagcggttgctccggagacacgctcacccagtgaatccacagcgcccacagattacacctcggagcacccaaaggggct

SEQ ID NO: 431174 - DNA, 353 bp, Oryza sativa
gggcgatacgtcattagctttgtggtatacaacaaaaatcgaacatcatacaatatcaccaaatgtgaaacatgtgcatggcaaaatcagttgccaataatcaatctactcgcctacaagaatgaaggggttgtactacatgcagaatgttacaacatgttgtgttcacagatgcacatacattatacatagtggccataatcatatgctgctgtgcgtacaaagaacctgctaattaattttagttagtttttcatgatctaacagcttccaggtgtggatcgactagatttccaccagtgactcctgccctttcttgagctcagtccgaactacccgagccttcttttggc

SEQ ID NO: 431175 - DNA, 359 bp, Oryza sativa
tgaagtagattaaacctcctctatattttgaccgagaagcggaaaattgctggtgtcgatctatcatcctttgagaagatactggagaatcttgtaatcaaagtggtgcccatggaaaatttaaatggtcgaaaacgtgttgaagaaggggagctttgtgataggagaaatggaagaggagttgatcttaatagaaattggagtgttgattggggaaagaaggaaaaggactacgacccatatgaggaaaatcctggcactgctccttttagcgaacctgaggctcagatcatgcgagagctatccaagtcatttaaaccacatatgtgggtgaatgtgcattccggaatggaggcctt

SEQ ID NO: 431176 - DNA, 326 bp, Oryza sativa
ccaaaaaaccccaaaaaaaatgggggaaaaattaaaaaggcccccccccttgggaaaggggggaaaaccctaaaaccccccatccggggggcacccaggaccggaacccacccgccctaattaatccctaactggaacccaaacccccaggaaaatttttaattttttttgggccggggggggggcaaaggcaaagcaacccgaagggggggggggggggtttttaacctggggggaggggcccccccctttgggaaaggccccgggggggggtccctcctccgccgaagttggggggggggtttcctaagcgggggggggggccc

SEQ ID NO: 431177 - DNA, 535 bp, Oryza sativa
  unsure (1)..(535): unsure at all n locations
gccgcctgcacgcgctcgcggaattcctcgggtgcgactccatcgcggcccgagcgtcngctccgatcgactacaccccgccgcgccgagcgcacgcataaaaccatcaccacctgtccctccacctacactccacctgaacttccacactcgagtagcgagcgagaggagcactgacgacgtcgtctcgtcgccgccatggagatggcgctggactggcgctcggtgggctcgctcctcgccaccatcatggagatgcggaccgccatgcgcgacttcctcccgcccgaggccgagatcttacttcggcgcctactnagccgactcgccgccgccttccgtccccacgtcggcaccatcctcatcgacgaggccgacagcgccagctgaggagccaacgacctctacgacgcctcccagctctacctcggcgcccggtgcctcgacaccaggcccaccgtactgctcacaagccccaccaagctcccacgcccgtcgcctncctacccgacgcccacaccacccacgacgtctt

SEQ ID NO: 431178 - DNA, 83 bp, Oryza sativa
tttttgttttttttttttttttttttttttttttttttttttttttttttttttttctatctcatggggaacatccaggccca

SEQ ID NO: 431179 - DNA, 543 bp, Oryza sativa
tggctgccgtgctatccgctttcctctcctccggctcctatccctcctctcctcctgctcctcgtcctcctcccctagatgccagccgcggcctgaccctcaccgctggggagcccccctcccattcttcgcttcccccgcggttgcgctcccggagcggcgttccagcggccacagctttccctcattgtacacatgatgggttgcttcactgtcctgagatccaagaagaagaagcctcttgctctcaccaagaaatcggttgatgcaagggaaagcacgtcctcaagactcccagagccagaagcgcatgtgccatcgttacaatctgctcctcctagttttaggaacaaggctaaaatccaccaatcggaaaagaaagcttcttacagcagagcgcgcgtgctgtctgctccttccagcctaattgtggctgatcaggatggtcttccatatgccgaattcgatgatcaagatgactccaggggcaagggaggctctataaagggccaccgtttctctaatccactgccccttcctctc

SEQ ID NO: 431180 - DNA, 369 bp, Oryza sativa
ttcgaccggatgactggacatcctactcgctgaccttgctgatatgcctcgcgtgcacgctgatgctgcgcgcccgagcgacggcggcggaggaggaggtggcgccgatgccgacggggccgaggacggtgccggtgctgggcccgctgctgttcctcgcgcggagggatatcgacgtcgagccgacgctgcggcggatcgcggcggagcacgggccggtgttcacgttcgcgccgctggggccgtcccggccgacgatcttcgtggcggcgcgtggcccggcgcaccgcgcgctggtgcagcgcggggcaagtgttcgcgtcgcgcccgcgcggcgtcagcaccggcgtcgtgctgctcaccagcggc

SEQ ID NO: 431181 - DNA, 226 bp, Oryza sativa
ggttttgacccataaaagaactgacagacacacctttattattgcataatggagtttacaaggcgcactcaacacgctgcttccatccaactagaaaactaaaatgtctctacaacctggctctatttacagaacacccttccctttttagtcctactgaagggagtctataaggccatttgtcttgcaatatatgagattccccctatcaccactaggctcgcta

SEQ ID NO: 431182 - DNA, 487 bp, Oryza sativa
  unsure (1)..(487): unsure at all n locations
cncgctcgatcttccaagaaaccggccggactcgagcgctcgttatgtccgggttccagatcgtgtttgtagagccatggcggcggcggcgcgcgcgatcatatgcgagatggcgccgcagaggggggcggcggcggctccntttgttccttctcaccagaagcccagacgagttcgggccgcagcgcccggagcgcaccctcttcggctccaaggggaaccccgccgccgacgaggaagccgaggccccggccccctctgcgggagaagaggatgcccccgccgacgccgctcgcgttccgatccgaacagggactaggtgccagggacctggtcccacggattaacctccgatatccgtatttgatgcaaaacctggtgaccctgctgccgcaccccaagaaggacaccaaggggcccatggatagcgatgcctggcaatgcgctcaaccagctggcttgagctcaggaactggttcacatggct

SEQ ID NO: 431183 - DNA, 112 bp, Oryza sativa
atgacgcacgacctctcggccaaaatcccacgggaaatcacatgaagtatgtatgcttacataaatagaacaccctatgtacattctcgcatatctccccacttcttagttc

SEQ ID NO: 431184 - DNA, 272 bp, Oryza sativa
gaacagaagggagccggcggcatcaatattcttggtgaaaatgtcgatggaggaaaccaaaggcttcacctttgcatggtgcgatttgcagcttgcacaaaccttgttgggacacaaaaaggacatggatgtataccaaggaatggcctgcacatttaaccaacagctaatatgtgcaccgtaaaattgccgggggaaaaaaactgatgacaggaaaaattttctctccctagcgttatattacaaaggctgagggcatctacgagaaccac

SEQ ID NO: 431185 - DNA, 273 bp, Oryza sativa
atacttgattaccgaattacatttccttttctctctcctgcggaaagatccgcgtgaactaacatgcgtaatcgggtaaggagaacctggagcagggggagggcacaccagcggctgcaacaggcggaccgagaggcgctgcataacaccccctgcaacccgggagccaagaccgcggacctctggctcttgaagcacccgcacaatatggctgcaagatggtgggaccaaagccatctgaggatctcagaaggccccatattctgaaaaccc

SEQ ID NO: 431186 - DNA, 211 bp, Oryza sativa
tgttttgttttttgttagggtaggggcactcaagaaagaagcttgcttcagttgcacttgaagagaatgaatggcaccatgattccgaataccagaagatgtcttagctcaccaggttttcaggactgagcacaggcccagcaggagattacaccttacgacccagggagtattcagccgcttacccagttaatgtgccaccggccttttt

SEQ ID NO: 431187 - DNA, 376 bp, Oryza sativa
aactaatgtactacacgaattagctgacaaacatggctagagcttgcctgactacaggacaacttcagatggaacagagcagggacctatgtgcaaatcaactggggtatgccatgatggaagccatcacggagaaccagcaactactaacaagcaagcagagatgaatgctgctagggcagcttatgaacattccgaagacagaagaaaaaatgctcttgctttcactggtctaagaggaccgcattggggacaaggaacagacgcacatatctgctggacaagacaagatcgcagaacctgctctttcagttgcccagagaattaacagttgcaagcgccagtgcaactgatcgtgaatgcactcacttgggtg

SEQ ID NO: 431188 - DNA, 308 bp, Oryza sativa
tgttttgtgttgttgaggaatacattacacatgaatcgtcgcatggacacgatcagccacacacgaacagggcgtgcagtggcttactacgaagcagagatcaaaaccgacttctacccaccacagctccattacactgtcatctcaccacactcagagccaatgtttaattatgtacacagacgccagacagcgaccttactcatcttgggccatcttgcaccccggggcatcgacggcgacgacgaccactaccatgggactgtgccactattacatggacctctcggggaacacccactggtgga

SEQ ID NO: 431189 - DNA, 412 bp, Oryza sativa
acacacaaagggggtggttttttatttttccccccacaaaattaacaacaggggtgggggacatttacaaaacattatacagatcattagttaattaacagggaaattaaaggagggccccaatccagagacaaggatgcatgcagttttttatccagccaaaggggtttcctacttaaagaaaccctgggccattttgaacagcccaccgggggggccgccgttgccggggtttttctccccggcgccctttttttccataagggactgggcccccttaatgacgttggggagaccgaacccttccgaagacgagggggggttgccttccttcttttaaggcggggcaggctccttggggggctcccccgccgctggttttggcgctggggcgtttccggctgccgggggg

SEQ ID NO: 431190 - DNA, 447 bp, Oryza sativa
  unsure (1)..(447): unsure at all n locations
aagcagcaatgcaaatattatacttgggataaattttatgtatactatagagggcaattatctctacttggaaattttaaaatggggaatgctctccacctcagcgggcacctattggagggcatccaacaggaagcggaagatccaagttatcaacaattctgaatgtcctagggaccactcggtcaacatacaatgtaccttaaagatgatcaccattngggctgaaagatacgtgcctgccatcctgaagcttttaccttgatggggcgtccattcctgtccaaccctgaaacctcaacatccaggtgtttttcgacaagggccctgtatccatctaaaacccccttgaaagaacaaggcagtttttttactgggggcttaggtttgggttggtggataccaaaaaaaccgaagggccgggaaccctggccttaatgccttttt

SEQ ID NO: 431191 - DNA, 353 bp, Oryza sativa
  unsure (1)..(353): unsure at all n locations
gaaggagaagagggggggtttactttgacggggcctgtcgttactctacgcaccgaaactcgtcgttcttgctgcgggccgccggctgcctgctgcggcccttcttctacttcgccgccggcgaccaaacgccggggctccctccttttttgcggcgcccgcccctcttgttcccggaggggtgcccccaccggcgcgccttctcgacggcgggcttcggcaagggatgtcgacgaggtgaaccgcaagttctcggaggcgcgggaggagatctaggccgccatggacagcaaggagaccgtcttactttaccaggaggccgnctgcgcgcgcgacgcccgcggggaggccct

SEQ ID NO: 431192 - DNA, 482 bp, Oryza sativa
  unsure (1)..(482): unsure at all n locations
tcgccgagtatttacattcccacccccgggaagctgatgatggtactctcctgaagaagttcaaggaagataatacagntgttcctgatcagcagcctgtcattaagaagaatgtggcattaatagagaaaatagagagtctgaataacacagctagaaatgttgatgcacgtaatattacagaaccattcccatccaaacaagccaaggagatgcaaaaaagtacaagttcaaaggaagatcagaaactaccaaatgaacctgttcttgaaccttcacagtctgaattaactgaaatcatcacagctggaaagcttggcgaatcaactcgtgatcgaacacataggagaggtgattcttcaagaagcagtcaccatggttcttctaaagacaggttagttaataattttgcaggagaggggctgagagaaaattctgcagctgattcttcaccaattgttggtcgaggaatagccaacatg

SEQ ID NO: 431193 - DNA, 316 bp, Oryza sativa
aaaaaaaaacgggcaaatttttggcacccttttggcccataatacattggccatacagaataaaaccaacccctttttacattaaaacggctttaaagtggcctagagggcaaagggttttcctggggggaccacaagggggggggctaagggggaaaaacaaatttcctggttgttaacagcaccccgtttttaatcaaaggccccaccagaccggggccttggcaaatcacagggcccaaactaaaccggggccttgccggggctgccaaagagggggggtcccatagcacccttggttgaaacccaatttgct

SEQ ID NO: 431194 - DNA, 383 bp, Oryza sativa
ctataggtaaagggggcacccccggggggcccggcccggaattccggggggggcccaacgcgcccgttgtactgcgtgccgtacctctcgcgggatcccagggacccccgacgcgagagtgtccccaatgccgcgccctgcaccgccgcgcgcgggcactggactgccgtacgctgcactcccgcacccgcggcggcaccgacggaggcgcctgcggaatccgagaggtcaatcccgccgccacaggtggagcggcgacagcagctggaccaggaggcggcggacggaaaccaacactgatatgacaggaagcccctagaacagatcttttacaagcggtaccgatgactcccgctccgagagcaacggcgatgaaaccgtta

SEQ ID NO: 431195 - DNA, 293 bp, Oryza sativa
tttttattctcctgaaaaaaaaaaacagattaataaagagggggattttttaaaactgttgttttatttttagaaccacaaagtttaatgaacaaaacgccctcctgggtgtggggtgccttcttgtcttctttcctctctcttgtcctggggggttcccccttcgtgcttttttttcttgcccccttatctgttgcggagcgtcttcctttttgggcccgggctgttgtccttactcttctcgttttgtagctgttttggtgggctactccctgccctttcgcgatttttcc

SEQ ID NO: 431196 - DNA, 454 bp, Oryza sativa
gtattatcgcggcttcgcttccggggagaggagagggggaaaattaaaaccctcatgcacattcttccctccccctagctcctaggcagggtctcggctcgactcccaatcttaaggattcttctccacgctccccgccgcgggcgccatggaggcggcggtcgccgacgcggggcggaagctgctcaaggccgggatcgccttgcccgaccagcccccatcgctggtgatgccgcccaagatgaagttggaggtagaggacggccagatgggcgacggcgccgtggcggaggaggtggcgcagccggtggtgcgtggcttcatgaaggactgggacgccatggaggacctgctcaactacgtcctgtacagcaacattgggtgggagtttggggatgagggccagatcctcttcacagagccgctcttacacccaaggcacttttggagcaac

SEQ ID NO: 431197 - DNA, 162 bp, Oryza sativa
cacgtacgcgcgccgccatccgccatgggtctccacgacgcgcctagccgcggcggcgccgggggcgggaagctgtcgctgctcgccagcgtcggcctcgccggcgccgggggcggggggagcggcggcgtgggaggaggaggcggaggaggaggaggagga

SEQ ID NO: 431198 - DNA, 536 bp, Oryza sativa
gccggtcctctctcgccggcgccgccgccgccgccgtagggaggaatctccggcgaggacaccactctcgcggatgcagctcgtgacagcgatggcgacgcacaatcgatccgagacgacggcagcgacgcggatttggcctgcggtggtggcggtggctaggatgcgaacctgcggcggcgacaggggctcggatgcaagctgtggcggcggcggcgactcggtttcggtcagctgcggcggcggcctcacggatgcggctcgcggaggcggcggccacgcggatgcggcccgcggcggcggcggccatgccgatgctgccctcggcggcgacggcagcgcggatgtggcccccggcggcgaaagctgcaccgatgcaccccgcggcggcgacaggtgcgccgttgcagtccgcgacggcgtccgtggtgcggatgtgtcctgcaatggcggctgggatgcgactcggatgaactccttttattgaaccttctccattgagttaccaagacagcatggttttcgccaccatcttt

SEQ ID NO: 431199 - DNA, 494 bp, Oryza sativa
gtgatcacaaaaatattattggtaagcaaacttcaataagtgagctcctagaatctgaagacagcgctgaaaatggcgctgaaatgttctctaaaactgacatgactggaaggaataacatgaatcaggcgtctgcatcaagcttttcaagcattgcacaaagatttcttgctaatacacttgagcgaagaactcccaaatacactgatcttcctatgtcatctgatatagttaacactgatgcaaacgggactgatgaatctacccaaatatcttctctagcccccaatgaaacaacattcgaggcatctcaatttgagaagaaaacagaaaatgacacaaatggactgcccaaatcgtcactcttctctagtagccattactctgagaaatcatctccgccgcttgagtacatgaaaatatctttccaccctatgagtgcatttgaaatgccaaaattggacctagagttctctgatgaaaatcttcatgag

SEQ ID NO: 431200 - DNA, 63 bp, Oryza sativa
ccgttttgtccccgaagaaggagcggcggcgatggcggcgcctgtgacggtgtacggtccgat

SEQ ID NO: 431201 - DNA, 121 bp, Oryza sativa
gcggttgtagggggacggggagcggcagtggcggcggcggcggaggggaagctggacgagctgcggcggaggatggggaaggcggacggcgacctgctgaggatcgtcggggtggggggcg

SEQ ID NO: 431202 - DNA, 381 bp, Oryza sativa
tagtacatggacgggcgcgccgaaccgcgtaggggggactcgtttaacaccctacaccggatgtttatctggaccagatcaggccccctggagggagatcggccagaaaaaacatgcgcatgccgagggttgcgcaacagggatgcgaacacgcattactctgcacaggagagatacgagatcacggggacatagccctgatgagaccatactcatgtgaacagatcccccatagacagaccctagcatggggggagaaccaacactgagggtgacaaacggagcagccacatgagaagacacctgcgggagcctgactaccggcggacctcaagaagctgctaaatggaggacgactagggtggcgaaggcgccatgcct

SEQ ID NO: 431203 - DNA, 489 bp, Oryza sativa
aacctgccggatcgatccgatccgatcacgacgggagaatcaaccgggatcgcaatggcgtcgaggagagccgcggcggcggcggcgctgctgctggtcgcggcggtggtggcggcagcggcggtgggcgctggcgcggagggggaggagacgaccggcgacgccggcgagctggactgcttctgcgactgcatgaagaaccagtgcatgacgctgggcgcggcgcccaacaagttcgactgcgcagacgcctgcacccagggctgcacgcagatcggcaagccgggccagcccagcgacaaggacttctgcggcttctgatccgaccgatcgagccccgcctcctcgccccagcccacggtgccgagaaggccggacggtctcggtggtccggcccatctgccgcatcagttttctgttcttctgttttttttttttttttgaacatgttaaaaattgtttacgagatctgagggtttaaaccacaca

SEQ ID NO: 431204 - DNA, 547 bp, Oryza sativa
gtcttatttacatgcaatgttcaatcaatctccacctggaatgatgaaagttagccaaagcatattgtggtgtgctcctctagacatcatatatattggttgccctggtgcaaatttcctttttggccaagcacaagatgagatgactagagttgaagcttgcatcaatggtgataaaatttgagattggtaacttgctgaccagaaattccgtggagcctaagatgaattgctgccatactttcttcttgtctttataattaatctatacatacaagcatgtttgatttatgaggcatgggggatcaaatgtgcactacgcattttttattgagatcatgcttgctgctgctccaaatgactgcagctcagttctagctcatgctcttggaactttcttgttcctgatgagggctaagtgatcttctagccacttgaattggtttttattctgaagttatctgaaggcattcacccttctgactcagagcgggttggcttgatacgacgatgaggctggactgcttgatattctcctgaacttcca

SEQ ID NO: 431205 - DNA, 571 bp, Oryza sativa
ggagttttcgagtcccttccaagatggtgcagcaagccagacaccatctgttgaaagtgccgatgtggatgcatctgcagctactgcagggagacaggtagctactccaccaaggcctgctcaagctaaagtggtggaggagagagcagtttctactttgcccaaaccaagcactgaagtacgtagaccaggaggaaggagaccacttgttcgaccttcacttgaacgagttgaagaaccccaagctgatattgatacaacagtagttgaaggttccacagagaaaggcggcttgttgatggagcgtgaaactcctggtggtgtatctgcgttacagccatcaagtcgtaaacgtctaattccatcaccacaaacgagagatgatgcttcacaaggagagacaacggatgccaatccaccactgaagaaacccaaagaaggatctttacaatgtactagtgagctaaaaactgaacagtcacctcatgaagatgtcatggcacctgttcctgtgctaccatctacagagttagatgagcaacagcctggagaagagatggacaccgatcag

SEQ ID NO: 431206 - DNA, 535 bp, Oryza sativa
  unsure (1)..(535): unsure at all n locations
ccattttccctagagaaaccccaactgagagagagatggcgccgccgccgccgccgccgcccaccgtcttctcccgcctccgccgcctcttctccaccgccgccgacaccgccaccgccccgaccccggaatccgacctctactccctccgcaccctctccaaggacccctccgtcgcgctcgccttcttccgccgctcccaggccggcggccacccgctgggatccgccgcctacaacctcatgctccgcaccctcgcctcccaccccacctccgcgcactcccacttctggcccttcctccgcgacatgaacgacgccggccactccatcgaccagggcacctacctcgccgccctcgcctccttcaagaaggccagcctcaccgccgactacgcctacctcaccgnccactacgccaaggcccaggaggacgccaagggtgggacccccacctccgccgccgacgacgccgtccgtgccctcgaggatggctcggattcggatgctagcgcggagctcgacgagaagctgga

SEQ ID NO: 431207 - DNA, 554 bp, Oryza sativa
aggaaccttcggaaggtaactaattccatggctgaagcatcaaagatatctagctccagggcagatgcctcaaaggtatctagctccatggctgatgcctcaaaggtgtctagctccacggctgatgcctcaaaggtatctgattccgtggctcaaatcccacctagtctcgtgaatgggatctctgatcatcaagacaaccaatgtgaggaagcacaacagaatgcatgcgtgtcatttcctcctgaaactcaggagttgcacagtggcattctgttggaggacaattcacatatgaatctgttggaacctgatttaatatctaacccggaaactcctttcacttcgattttaacctgggaaaaatttaatgattctactgctgatgctcaagaagttgaagttctgccactgcagaacattgataatgaagataatttcccagaaaatggtgtcttaggaaagaaagagaagccaaggtccaaggaagaacctctgtctaatggaaaccttaaaactagcaagaggaggtcttcgttctccaccaaatcaga

SEQ ID NO: 431208 - DNA, 436 bp, Oryza sativa
ccatcgaggggctattttaagggccctgtggaatcacataaacgaaaaaaaacgaagaaagaaaaaaaacacatgattctcttaagagattaagtgcaaaacagagaattacaaaacacaaaaaaaacacacacgaataaccgtttgattgaactgcatgaaaacgcaagaatcgcataaaagagatagactcaaaaaagaaaattttcaagaggttaaagctcttataaattttctccaaaacctttataagattgtctatttcataggaatcctaaacgattgaagaggattcaatcctttggtataaagacttccataggaaatatttctgtgcagattgaaatcccacaaaatatttttttccaacaaatcggggcctttattaagctatgaattgctagatatggtaaaaactaagaactgggttcaaacg

SEQ ID NO: 431209 - DNA, 414 bp, Oryza sativa
cttatgctcacaggtcagtcctaccacgtccaacaggagaagtgatagagggagaagacgacactggaagaggaggagctgactagccgccatggcaggcgtctccttgctgccgggacatgctcctgcttggggcgtaggcggtggcgagcgcctacattgatgaagcgtccgctgctgggcgggcactcgcacatggcgcccgcttcatgagcaagcatggccgggtgacatacgagacgctgacggagccggagccgaagccaacgccagcgcctcatccttaacccacgcctaatcctgagcctacgccagagccgtagccaaacccagcacctgagcctgcgtctaagccgtaaccaaagccagaaccaagacctgagcctaaggctgaacctaaaccatacccagagc

SEQ ID NO: 431210 - DNA, 573 bp, Oryza sativa
cgtttaacgaaaggaagcgggcggccggcgctcggcggcgctcggcaggcatggcgatcggatgggatgggatcggatcggcgcagggccaaggcccgagggtcgcatcctgcgactcctgtgagttcgtgggctatgctcgctcgctcttctccttaggataccagcttatattggcaaaccatgctcagtagcctgccagtttctgacagaaatactgaccaagaagccaaatcacatccttcatgcaaacaaagccagcagttttcgcatgaatttctttcaccttgcgcttgtgctactgccgctgagcttcatctgtcctcccatcggttcatgcattgagcaggagaggctaaccctcctccggttcctcgcggagctgtcaccgccacatgataatggcctcgctgcgtcatggaggaataggaccgactgctgtacctgggaagggatcatctgtgatgtggatggtgcagtaaccgagatcttgctggcctcaagaggcccttgagggcgcatctcgtcatccctgagcgagctctgggaccttgccactgaaacttgtccccc

SEQ ID NO: 431211 - DNA, 471 bp, Oryza sativa
ttttttggtgttttttttatttttgttggttttttttttttttttttttttttttttttttttttttttttttttttttttttttttttttttttttaaaaaaaaaaacaaaaattttttttataaaaaaaaaaaaaaaaaaaccccaaattaaaaaaaaaacccccaaaaaaaaaaaaacccaaaagggaaaaaaaaaacccccttcccaagggggaaaaaccccagaaaaaaattaaaaaaaacgggacgctaaaaatcaaaaaaaaactttggaaaacccgtaaaaaacttccctttaaaaaaaaacccccaaaaaaacaaaaattttgggggaaatttccaaaattgcccgatactcccaaaaaaagtgaaaaaaaaaaaaaatccccgtggcggacaaaccttgaagaaaaagaagcccaactggaaaccaaaaaaaaaaaaggggggaaaaaaaaagaccccccc

SEQ ID NO: 431212 - DNA, 337 bp, Oryza sativa
acccgaccgttttttttgtcagctctcacagctcactgcatgggtggctctttacaccatgggggggtgctccccagtgatggcccgcacggcgccatggatctccttcgtgcttttccgagaagcgcggatcaccatacccaagaccggcgaaaaccctaccccagggtgacctatcaaaagcctgccaccttactttctatcgatggctacaaccgctggaatgacacacattgtgcgtgagggctaccatacctggctacaagctccacaagaacgaaaggtacaccgctgggatcatcaatcgacaccgatacgtttgtcattaaccgactcg

SEQ ID NO: 431213 - DNA, 379 bp, Oryza sativa
aactttatttttataaccaacaacaacaaaaaaaaaaagggagggttttctaaaaggagggaggggtaaaacaaggggtgtccctctgcggggcccggctttccgcacccgtgcccgtggaagcgctcctcctttttcgggagacctgatttccccttaggggcgcgtgttttccatccgatcctctcggttactttctgaggctgccattttgatgatgtgccacaccgtctgccttcactctcagaggctgtctgcaaggagcgccctcattgacatcagtaacgcttgttccctctaccatttacagcgttgagaacagtcttgtgctgtgcactttcaagattcctgcagaggttgtcacttctattgagacagc

SEQ ID NO: 431214 - DNA, 506 bp, Oryza sativa
  unsure (1)..(506): unsure at all n locations
tttgttgtttttttaaattttttgggtttttattttttttttttttaatttttattttttttttttttaaaaaaaataaaatttattatttcaaaaaacaaataaactccctttaaataaaaaaaaaaaaaaattaaaaaaaacaaaaaaaaaaaaaacaaaaacttacacaataaacaaaaaaaatccaaaatagaaaaaaatagttacaaacactaattaataaaaaaacaaaaaaaaaaatattctaataaaaaaaaaaaaggcaaaaaaaaaaatataaaaaaaaaaaaaaatgtcacatcaaaataaaaaaaaaaagaataaaacacaaaaatgtaaaaattaaataaacaacctaaaaaacatattaacaaaaaaaaataaaaaaagagtaaaaaaaaactacaaacaaatctttaaaaaaaaataaaactttaacccccccccccccccccccnnncagcccccnccccncagtccatcccccccccccccctcccagt

SEQ ID NO: 431215 - DNA, 539 bp, Oryza sativa
gtattttcaaaacagagacggaaagggagaaactattggacggttcaagcgatgttgggggaccaagaatgaaaagcacccaagagatcctcaccaaatacaaatttggcggggatgctgctgcagctgcagctcatgcaaaagataagctcaaggaacggggcgagaaacttgctagaataagccaagaatccgccgaacttcagaacgagtcagagaattttgcctcccttgctcatcagatcgcaaaatccatggagaacaagaaatggtggaagccatgatccctggttgggctttctgccatcttttcatacgatcgccttccctatgctccttaccattttggcctacatggtttctgtggccataacttgtattacgttgagaccttgatggcctaaaccaccttgattaccaaccaaccgatgacagtaatgtgtagtaccacctttgagcttatcattttctttgaactactttgtactaccagctaacgcatagttaatgaaagcaaagcagagcaacgtgctttcact

SEQ ID NO: 431216 - DNA, 401 bp, Oryza sativa
tttgttgtttttttaattttgggggggccccccctttcttttttttttttttttttttttttttttttttttttttttttttttttttttaaaggggccccccccctttttttggggggaattttaaaatgtttaaaacttttggccccccccaaaaaaaagggggggccccggccccccaggcgttctggttttaaaaaaaattggggggggtttggggcgggcaactaatctttcccccttcaaagggccctttcttttttcgaaacattgggggaaaaaggcttggggccttggtccttttaaatcttaacggggaaccggggctggttttccaaatttttttaaaaaagcctgggaacaggggggccctttgggttcacccttttaaaaagggcccc

SEQ ID NO: 431217 - DNA, 333 bp, Oryza sativa
tttgttgttttttttattttttttgttttttttttttttttttttttttttttttttttttttttttttattatttaattaaaaaataaaaaaaaaaaaaaaaaaaaaaaaaaaaaaaaaaaaaaaaaaaaaaaaaaaaaaaaaaaaaaaaaaaaaaaaaaaaaaaaaaaaaaaaaaaaaacaaccgcgccaaaaaataaaaaaaaaaagaaaaaaaacaaaaaaaaaaagtccaaaaaaaaacaaaagaggagctcaaaaaaaaaaaagggaaaagaaaaaaaaaaaaaagattaaaaaaaaaagcgggggttaaaatccccgatcgaactc

SEQ ID NO: 431218 - DNA, 451 bp, Oryza sativa
ggctttgttttgttttgctctcggctttatatatggcatgggtactgatgatataatggggaggaacattaactgacttctgataacttcattgaaacatgtttaactcatacatttattccgcctagctgaataaaggctccatgtcataatgaaagttgacggcaaccatgcatgcagttatgtagacaagtaattcgtcctgtgaaattttaatcaagtattcatttgcttggatgaatattgttgaggaatattgctatatattccacatatttgatttactccagctgcttgctggctatttcttagagaaggggattattttacctccactgtacatacaactgaatatatgctacattgttaacttagcccttaaataatataatctgaacatgggggatatggagatctagacttgaggacctaacatactacttaggacact

SEQ ID NO: 431219 - DNA, 417 bp, Oryza sativa
tttgttgtttttttttttttttttttttttttttttttttttttttttttttttttttttttttttaaaaaagggaggggggatgcactggaccggcaaaaaccgagcaaggggccccagttctaacttggaagcaaaaaaaagggcaaggtcatttggggcccatgaccaacaaattaaatctgcccttttcctactggaaagacaccaaacgttccagggggcttccgtttcgattagaaggttaaaacccttgacaccatgggtacgggtagccggcccaaagcaggcatgcccacccccaaccctggtaccacggttctcttttgggggggaaatgaaccggaggaggcccccgggggcccccccttgcccctgaagaaacccacgttgacgaacctggcggcccccccccgg

SEQ ID NO: 431220 - DNA, 123 bp, Oryza sativa
tttgttggttttattattttttttttttttttttttttttttttattttttttttttttatttatattataacataaaaaaaaaacaataaatacgggggaaaaaaaaaggggaacttaaaaa

SEQ ID NO: 431221 - DNA, 506 bp, Oryza sativa
tttgttgtttttttttttttttttgttttttttttttttttttttttttttttttttttttttttttttttttttttttttttttttttttttttttttttttttttttttttttttttttttttttccccccaaaaaaagggggggcaaaaaaaaaaaaaattgtggaaaaaaaaattttgaaatttaaaaaaggaaaaacccgggggtttttttaaaaaaaaccgggggaagaaaaaaaaaattttttcccggcctttaaaaaaaaggggggtttaaaaagaaaggaaaggttaaaaaaaaccccaacgaaaaaaccatagaggggggggggtttttaaaaaaaaaaaaaaatttttttggaaaaaaaaaaaacacggggggccccaaaaaaaaaaggggggaaaaattttttttgggggcccccccccccccaaaaaaaaaattgccccccaaggaaaaaaaattatcccccccgccccccaaaaaaaagggtttttttttaa

SEQ ID NO: 431222 - DNA, 552 bp, Oryza sativa
aaattaaataaaaaaaaaaaaaaaaaaaaaaacaaaaaggaaaaaaaaaacaaaaaaacaaaaaaaaaaagaaaaaaaaaaaaaaaagtcaaaaacaacaaaaaccaaaacgaaggaacaaaaaacaaacaacagaaaaggaaaaaaaaaaaacaaaccaacagaagccgtaagcacaaaaaaaacaacaaaaaaaaaaaaaacccacgaaaacaaaaaaaaagagaacaaaaaaaaagagaaacaaccaaagaaaaaaagggagagaaaaaaatcaaaaaaaaaaaacaaagaaactaaaaagaacaaaccacaagacacaaaaaacaaacgaccaaaataaaagaaaaaaaaaacaataaaaaaaaacaaaaaaacaacacaagcagccaaaaaaacaaaaaaaagaaaaagaacgaaccaccaaaaaaagaaaaacaaaaaaagaaaacacacaaaacccaaaaaaaacaaaaaaaaatcaaatcaacgccaggcaaaacacgaccaaaaaaaaacaaaagaaaaccccacaaaaaacaaaaaaaccaa

SEQ ID NO: 431223 - DNA, 92 bp, Oryza sativa
tttttgtggtttttttaatttttttgggtttttttttttaaaacaccatatttttcttcaccaaattaccacacacaaccacaccaacaaac

SEQ ID NO: 431224 - DNA, 88 bp, Oryza sativa
ttgggggtttttattattttttttttttctttctttttattttttttttttttttaattatttaaaataacttccagttaaaccgaac

SEQ ID NO: 431225 - DNA, 110 bp, Oryza sativa
aaaatatattttaataaaaataaaaaaaaaaaaaaaatagatttgaaataaataaaactaatataaaaaaaaaaattaaaaagaaaacaaaaaaacaattaaaaacaaac

SEQ ID NO: 431226 - DNA, 170 bp, Oryza sativa
agggtattaaaaaaaaaaaaaaaaaaaaaaaaaaaaaaaaaaaaaaaaaaacaaaaaaaaaaaaaaaaacataaaaaataaacagaaaaagaaaagaaatgcatggagctaagtaaacaaaaaaaaaacataacaaattaactaggggaaggattaaattaaacagaaaa

SEQ ID NO: 431227 - DNA, 95 bp, Oryza sativa
atcttattcatcttatttttatttttttttttatccaaccaactccatccattataacttcttcaaacacacaccaaataatcccttaactaaaa

SEQ ID NO: 431228 - DNA, 393 bp, Oryza sativa
gaatgtgttcctgcttatgctccttggaggagcagagcggggagtccccatttctaatggcctacagtacgcaagagctctgagagaaagaggcggcgagatcaggatcatgatgttcccagaccacatacatgaaatcaacataccacaatcggattttgagagcttcctcaacattggtgtctggttcaagaagcatcttagcatatcagcatcagatgcatctgcatgaagtcaacttgaagaaggggaggaagaaattacgtggtttaatctagtccaacaggtagatgccattgtaagccttgttcatggagctcgtccgtagacgagtgctccaaaatattagagacttccctattgaaaaaagtaaatggagactttaattggttt

SEQ ID NO: 431229 - DNA, 478 bp, Oryza sativa
aaaaaggggaaaggcccaaccccacaccttgcccccaattgcccaaaaaaaccggccttttcttaacaaaaccccttacacccttcttcaccctgggggaccaaagttcacgcccccacacccatggccccaaacgggcccgaccaggggcgccccaacctcccccgtggacggccccacccccacacccagcaaacccccaaaagggccgccccggcccaaaccccgcgccccacgcgcccacggggccgcccccccacccgcgggcccccgcccccacagggacccccccgcccgaccccacaccccccccgccaagagcccccccccgagccccccgaccccacacaccccacaaccaacccccccccccccccggacccccctcggccccccccccctcctccgctcgccccccacccccccccccccccccccacatccccccaccccccccccctcccacgcccccccccca

SEQ ID NO: 431230 - DNA, 484 bp, Oryza sativa
tttgtggttttttttttttttgggccccaaagagatcgcattcagcagcacggggagatttcgcaaaccaaccaacccatccattgcagtgcagcaacacacacatatattcccttactaataacacatcttaattagacgaacctgccaatccgttttccaaaacaagtgagacttctgcatgataccaaatgcaacatgcattaggccaccaccaccacacaggttccatggatcgacctaccaaacctaaaccttagccaccaccgccaccgacatcgccgtcaccgtcaccgccattgccgccgtctcctagctactactgctactaccacggtgctaccctcctcatgggctacctagctgcctagcttagctatagctaagttaaaccacctagctgccttcctcctcggtgcccttgaggtacttcccggcgccgctttgggcgcccgagttggcccccggacgttgacggacagcg

SEQ ID NO: 431231 - DNA, 317 bp, Oryza sativa
ttttttttttataaattttttttttttttttttttttttttttttttttttttttatttttttttttttttatatatttttttttaaaaaaattttaaaaaaaaaatataaaaaaaaaaaaaaaaaaaagaaaaaaaaaatcccccctaaaaaaaacaacacctcaaaaaagaaaaaaaaaaaaaaaggaacaaaaaatccaaaataaaaaaatgaaaaaaacttttaaaaaaaaaaaaaaaaatggtgataagaccactaccaaaaaaacaaaaaaaaaaaaaaacaatctcaaaaccaaaaacactagacacggc

SEQ ID NO: 431232 - DNA, 383 bp, Oryza sativa
ggactgcaaataccccatcatcagattacaggttggtcttgggtaacttcaatcttcagggacaaataacacattacacatcacaaggggaactgatggaactttggatagctcatttctgaattatgttacaaaagacattctgtcagagggggggagaaacttctcatatgaatggaagcatatggacaaaagcagcttcacaatctgcaatggaagcttccttttttccctaggggctagaacggcgaagtgattaaatgaaagaatacatcaaggccttgttttggcgagacgccacaggtaaacttaatatacataaaaccttggggctccccgtacacagttaggagcaaaaaatggctgaatatttgggggtttca

SEQ ID NO: 431233 - DNA, 371 bp, Oryza sativa
ttactgtgggtgatgctgcgcctgctggggccgccgcggcgttactggcgggacccacgcgtccgcacattgttttaccagctgcatatgattaacgggacgggggatacacacacactatttctggggacattgatccgatccgaatctcaggcatgagagcctttacggccgttactcctatggtgcttttgctcgatccacttgctgtcaatagggctgctgtcacggagacgccgcaagatcggcaggaggcggccgcggatgcagaggtgcattggtcaggatctgcaacgaacgcttagcgaccgtgcgccgatagcgtcggggctcgcaactcgcggctggtggatttgcggggggcagggggg

SEQ ID NO: 431234 - DNA, 361 bp, Oryza sativa
ggtagtgaatactccacaaagtagcagtgatgtgaaaaatcaaatatggtcaaacaccaatttggtttagagggagcaggatcaaacattgatgatccatatcactggactggtgctacactaacgtggtagaacatagcaagtggtgcactttacattcaaaccattgaaaacaagcaactctagttcagaacagtttaactttcatatacagtttcctggccataaatgcagttcatgaacttcaggtcaggctgcagtgcgaactgtgcaatgttgtcgcgtgcggtatggctttggttgaatgtggttacacaatttcttgcaacatgtagcccgagcgaatgattaattttgcctt

SEQ ID NO: 431235 - DNA, 493 bp, Oryza sativa
actcctattgggagtgctgctgcgcctgccggcacgcgctcgcggacggtattggccgggacccacccacgccggccgttttttggaaccatgaccctgtgcattcatctcgcctcgaggaaatgactggggggtaggaggtcaacttgagcgccgaaggctatgatcacaactgctcaagatgttgtgtctttgtttgatcgcaggatacattatacgcaggcctctacagcaaacatatgtgatggttgcgttattaaaatgacggacctcaagcctttagtgtcgaagacacttagattgaacaaaatagagacgcagctgcgtatttaacatggtttatgtgagtcatatctgtattctcataccttcggacagaacactgaggccagctacactaatgggcactaaggacattgtgcagttggaccatgggcagccatgcatttctgatcctgctggaacgaagcgcagataccaaggcaggctatag

SEQ ID NO: 431236 - DNA, 473 bp, Oryza sativa
ttttttttttttttcttttttttttttttttttttttttttttttttttttttttttttttttttttttttttttttttttttttttttttttttttttttttttttttttttttacggggaaaaccaaacaaaaccccgatggataaattccacggaaaaaagccggggtccttaaaataaaaaaaatttaaccggggaaacaccaaaaggccccaaaacacccaggtgttaaaaaaaaggaaaaccaccgggtttaattaagaaataatgaggacaaaaaaaaacccaatttattgggggggtttttttgggggccaaaaaaaggggggggcccccccggggggaagggttcggttttttaaaaacttaatttgcccaacttgaaattgggcaaaaaaaaattgtgccccaaattgaagcccccttttttcttgcgggggggaactctctaaaagggggttttttgggttt

SEQ ID NO: 431237 - DNA, 516 bp, Oryza sativa
agcaacaaatgtagcctctgatatctgttgacagcgaatctcatgcctgtaagtagcacaatttggtgacacatgattttcagagtccatgttacacaacgctaagtggtgaacaactccacagatgatcaggtctacagttacactagctcataggatgccagtaatcatgccaagcagatgctgctaaactctgcacaatattcggttctatgtgatgactgattcgtctgattaccttgctttatgcaccatgacaaggactggaaccaacgagtgacatttaggaatcatttggagtcgattggtatggcatcagcttcatcaatcagggccctgttgaggcggatacaaccagatcatgtcaatggttggggcttaaatacctaacagagaaaaaagaagacgctaggaatgcatccccagtgaagctgaaaggcaccacatgggatctgcttgcagttgcaggcgttatgtcactggagcttaacagcaaacaacactgcagaaagattt

SEQ ID NO: 431238 - DNA, 541 bp, Oryza sativa
gttcattatcaaatgctactcagttttggtgcaataatgatcatcagctttcttcaatagttcaggtagaaaataaaataagtatcatattcattagtttgaatactttaaatgaaaagaagtcgcattcattaggccatgtatatcttgctgtcatattgaaaatcctttaattgaacaatgcttgtatcagcaatttatcttcgtaaggttggtgctgagtacatatcaggcttttactagacccaagcaggatttcttgctggaattgttagtatgttttatttcatgatattgtttccagttcctgtgtaaaattatttatgaaaatagtttttcttttggtccatttgtgttttcttattgccctttgtgtatagatttgtcaagcttgcattatgagaagaaatggtgcagcatacagagatccatgtaccactatttattgtgatcgcagcatctggatatattaaagatctgtccacattacaacagtacacgtttacatcaatttcggatgctggtagcaacatgagctgta

SEQ ID NO: 431239 - DNA, 53 bp, Oryza sativa
tttttgggtggttttttttttttttgggggttttttctttaattttttgttat

SEQ ID NO: 431240 - DNA, 351 bp, Oryza sativa
ggagaagcgggcgggtggcacccaaacccagatatggaaaaataatttcgtggtacaaaaaccataaactgggagctctttctcatcttcagagggcccttaccttatccctaacaactgggagtaatttagtaggagtataaataaaagaggggggaaaaccacactaggcctagcttatctgcttatcacttggccaggttcctacaaactggactagtttaaaaaaggcagagaaatgacaattatccggggggtttgggcatgtacaggaccatccattccattcttctcgaaatcctattctttgggggcattttaaatttgcagcccaccaaaaccaaacattga

SEQ ID NO: 431241 - DNA, 362 bp, Oryza sativa
gccattgttagccatggcgccactccccgccgccgtcggggggccggccttcctgtacctgtgccctaccggcaaactgcccggcggcaaacccaggctgaaaccctactgtgccgcctccaccatgtccttgagggcgtcgtcaccctcgctcgccgagcagctggagcccctgtcccgcaggctcctgcacgggaagcccacgcgcacccagcacgcgccggagccaacctgggtgaacccgtccaagcacacgcgcacggtcacggtgctccgctggcaccgcagacgatgaatgcctcccacgcctgctgggtccctctggaggcgttcaacgcgctcgacatgaagctcacggacga

SEQ ID NO: 431242 - DNA, 455 bp, Oryza sativa
gtactagacaggaacattagttccctcttactgtatcccatcaatcagtttgttcaaatgatcagttgtgaaatgaattagtagctgcctccggtaatcccagttcccaaacaaaacactttctgccaccccaaaaccatatattacaccaaggcagacaagcagggccccaatctaacaaaacaatggaactcatcagagacaagagacacacaagacaacacaggcatagggcatagctaaaattgaatataatcatacatccactaacacctacaagctctaagtaggaaaaagaaaagaaaaaaacatttcttcttctttatcttcctttctctctggatctacatgatgaagtatgctcggatcacctcaattatgggtgcacggcacagcgggcatttcccttcgctttgaacccactcattcgcgcattttgaacatgtgcacatgtg

SEQ ID NO: 431243 - DNA, 508 bp, Oryza sativa
ctgatgatgataatgtgtacagtacagaactaagggaactcctaagcaggtttttttatttctttcatgaagaaagtctctgcaacatatttctttagttctcagcgtaaatactgaattagtgttcattctgcagaaggagtgtttctaatcttcttcatagtgcttttcgtgaaaatttggaccgacttatccggtcatatgttgaaaggcaaggtcgtgctcctctctcttgggatttggaaggagcacctcctgcgcctgactcacccgagcaaagccaggagcagcatagagatgaagaggaacaggagcttcatgataatgttgttaggcctcccttagtgattccacctccgcctatacctcctcgccagccactttggcattcggagttgcatcgtaataactggatcagacaaaacatacatcgctctgatattgaatgggaggctattaatgacttacgggctgatatggctaggcttcagcagggcatgagtcatat

SEQ ID NO: 431244 - DNA, 461 bp, Oryza sativa
tttctaccgcccttccttttttttttgttggtttgaggcaaaagcacagcttcacttcatgcttggaatatcgtctacaaactcttcaataaaagagctcttttgtatgatgtgagggcaaaagaatacggaactcgatttctcggcccatgcagaaaggcacaagcggaaaccaaatctgaaggggtgggtgagaaaacgcccccagaatttcgccgtcagtcagtatagtcgaacttttggtctatgaatgaggcatagcgtgcacatatataatagcatgccatgcgctaccctagctttccgaggcgtgcagcttactcttcactgcatgagccgccgcacggtaccatgctggtgcagcaactgctcctggatccggaactgatgcccaccaggtcgggagccatgtatgacgaccggcctgccttggcttgcatctggttagtggattcagcacc

SEQ ID NO: 431245 - DNA, 114 bp, Oryza sativa
ctgggggagtacagaatttattatatgagcactgctatgcaaactagctcacttgtatcattcaaaaacaacaaaatagatcacagttctatgcagatcttattttccgaccaa

SEQ ID NO: 431246 - DNA, 361 bp, Oryza sativa
cctcaaaatatgattactgaacggactatgatatttgtcagtgccattacagctatagctaatattgcagcaaagagattagactcaaacaaaaagaatacactttgtactgatacaaaagttcacctatgatttctatataacccaaactctaaatactcaagcttttattttagcgacttccatacttattttataatacatggcacagtgaataaaacatgccttcacataaatggtcaatacaattatcgtttcatactgaacaccatataatgacaaattcaactgacaaatcctttctagaaaagtccattatttgatctactaattgcatattactaaatatcccacccccccc

SEQ ID NO: 431247 - DNA, 499 bp, Oryza sativa
gctcttgtttggcttcctccgtctcactcctactcctgggctgcccccattcttctctggatatttttctttttcatcttctttgagttggagggcttgattttaggggggactgctcgatcggcagggttaattccgatctctatatccttcccggacagagccgggatcaggtaccgattctgccactcacatccgagttcttcttcgttttgatctgtttcttttttactcgtatgtgcacccaaaagatagaagatttactaccctaggaagaactgtggtttagtgagcagttaattaggaatctaatccttggtcatgatgtagaacacggttacacgggtgtgctctgctactctgtagtagcagttctttcttagacttattaaaaggttcagtggcatgggttcgtcagcaacctttctttagagggttattaaacatgtattttgcttgtccttgggcatatgatttgaggacttttgtgatttctatc

SEQ ID NO: 431248 - DNA, 167 bp, Oryza sativa
ggcgcacaaggccgaggcgaagaaggccgccgccgccgcggcggcgcccgctgggaaggcggcccaggccgtgtcggccgtcgccaagttccccaccaagcccgctccccccacccaggctgtgctggaggcacggtgtggtggtgcaccctcacgtttctgttttt

SEQ ID NO: 431249 - DNA, 146 bp, Oryza sativa
ttgtttgttttttttattttttttttttttttttttttttttttttttttttttttcaatctagggggaaaacaaaaaggagacaaaaaaacaaaaaaaaaaaaaaaggaaaaaacaaaagaaaaaagggaggaaagaaagaaaca

SEQ ID NO: 431250 - DNA, 141 bp, Oryza sativa
  unsure (1)..(141): unsure at all n locations
gtggtgtgctaattcatccttcactccattaatttgttataaatatatatccttgtactagtgtaaatgtaataaagatcttaagttatgggtggatcatcatatactccccccgtcccnnnnnnnnnnnnntnnnannaa

SEQ ID NO: 431251 - DNA, 85 bp, Oryza sativa
tttgttggtataacaattgctagggatataaaaaaacaatagagcacagtacaaatctcgccctcccccagggcggcaaggggtc

SEQ ID NO: 431252 - DNA, 52 bp, Oryza sativa
cccattgatagcggccgcgaacctcgtgggggggttctttaaagaggggggg

SEQ ID NO: 431253 - DNA, 334 bp, Oryza sativa
ccgtttatattcaggaggtgaagggttatgcaacagagggatcataataacaagagacgggggaaaatctacaacatgatcagaccaataaccctgtactgccatcttttgttgctgtgcaacatgatcagaccaataacccagatttgtcatcttctagtgctgtgcaacatgaccacaccaatttgccagacctgccatttcttgtcgttgttcaacatgatcagaccaatacgtcacaattgccatcttctgatgctgtgcaacatgatcagaccactaagccataattgccatcttctgttgctgcacatgatgacctaaccagtgagcc

SEQ ID NO: 431254 - DNA, 377 bp, Oryza sativa
aataaaaaactattgaaataattcattaacagaaaagtcagatgctacaaagccacaaatattatgccagttcaactacacgttgtttctaaatatctcccatagtaattgaatctatcacctgctctgctgagaagtaaaaaaaaaaaaaagctgaccatctaatgtacatatcacttggagtagttgacagccctgatcctaaccctcattgacgagatgcaaatttgtgagccacgatgacttcatatgaggcattggcaggtgatgattgtgctattgatgtagcaacatgctcaaaactgtttcttcgcatcttaaaggcactgcaaacaattttgctaatagaaaattggaaagggttagggaatcatttt

SEQ ID NO: 431255 - DNA, 431 bp, Oryza sativa
cccagtgtttgctgttagcatgcaccaagaccttactgggggtcatcgttgccaaggcgagggcaagctgctccactggcttgcaagactatgcgtgtgcttgatctgctaggggcgtcagcaccatcataccctgtgtaactaccacaggcatcatcttcccttactccaatgctacatattatgaggttatttttacctggaactatttttatacaaggttcaagccaggggctatgcactctgtctgtgataaggtctgcacaaatgcacgctctacatacagaggtgctgggatatatggtctggtctctgtcatcagctgcagatataggtttgtgttttgaaatacctcgactgattgctgagcacgacaccctaatgtagcagactcttacacaggaggaggtgttatgtgaactctacatgac

SEQ ID NO: 431256 - DNA, 285 bp, Oryza sativa
ggcccaaaacccataaatttattggggaacccaataattcaactggccaaaccctggtttttaaaaaaaaggggaaaaaattttcaaacataaaactgggggctgcctaaaccggttgggaaaaaacatttaaaggggccttaaaacccccgggttttgcaacacaaaaaccccctcccccggccgggcccccggctccttggggggcccttaaccccaaaaaccccaggggggaacctcaccccaaaagaacactgatcaaaacaggggcttctaaaaagcccc

SEQ ID NO: 431257 - DNA, 341 bp, Oryza sativa
ttggttgttttttatattttttttttatttttttttttttttttttttttttttttttttttttttatttttttttttaatttttctcattgcattttttttaatacgaggaaagggaaaaaaaaaaaagaaaaagaaaaaaacccaaaatactaaaaaggggggaaaaaaaaaccccaggtaaaaaaacagaacggggtgttctttaaccaaaccaaaagcgaaacaaaaaaggaaagcaccccccaaaaaactgggggaaaacccccccacaaaaaaaacggaaaaaaggagccaaacccaaaaaagccaaagaaacccggaaaactcaaaaacaaaaa

SEQ ID NO: 431258 - DNA, 293 bp, Oryza sativa
gggggggaaaaaggtgaaaacccccaaaaaaaaaaaagcctttccccaaagaatttttattctttggccagttacaggaacgggcttccccagcccccagccctttttaggcaaaaagggaaccccccccaacaggtaagggaaaaaaaaacccctggggcccccaaaaggggggggcggcttaaaggggaaaatccaggtttgggatcttttggaacacaacgggaagcttaagggccaaaaaattggggtccccaaatgctgaaaaggcggaggggtttccctttgaaaaa

SEQ ID NO: 431259 - DNA, 80 bp, Oryza sativa
cgggggccgccgcgccggaactgccgggacgaaccacgccgccgtatgttatcgcccaccccgacccttctactaagggg

SEQ ID NO: 431260 - DNA, 370 bp, Oryza sativa
tttgtttttttaaattttttggttttttttttttttttttttttttttttttttttttttttttttttttttttttttttaaaaaaaaccccaaaaccccaaaaaatccccctttttttaaagtaaaaaaaaaatttaaaggaaaaaagagtttttttttttgggaaaaccctaaaaaaaaaaaacccctcaaaaaacccatttttcccaacccaaccccaaaaaaaaaattcccctttggaaacccacccctttaaaaaattcccccttttaaaaaaacaaaatttaagggtaaaaaaaaacccttattttggcaccccccccaaaaaaaacattttaaacaacaaacatttccaaaaaacccgagccc

SEQ ID NO: 431261 - DNA, 456 bp, Oryza sativa
ttttgtttttttaaatttgggggtttttttttttttttttttttttttttttttttttttggggaaaaaaagttaaaagtttttttttaaaaaaatcttttggaaaagggttaaaaaaaaatttggcccttttggggggggaaaaatgggaaataaaaatttgaaaaaaaaaaaccttaaaaaaaaaaaaaaaacccgttcctggggcaaaaaaaaatttggggaaaccccggggcctgggttaaacctatggggaaaaaaggggggggttccaaaaaaaggtggcccctttggaaaaacctggggggggggaaacccccctgggtttgggctcaacaaaacccttgggggctttaacccgggcccccccccccccgaaaaaattttttgttaaaaaaattttttcaacatggggggaaacaaaagggttcctttttttgaagggggggaaatttt

SEQ ID NO: 431262 - DNA, 356 bp, Oryza sativa
ttgtttttttaattttttgggttttttttttttttttttttttttttttttttttttttttttttttttttttttttttttttttttttttttttttttttttttaaaaaggggaaaaaaaaaacttaaaaaaaaaaattaaaaaaaaaaaaaatcttcccacttaaatttaaaaaaaaaaaaagataaaaaaaaaaatggaaaaaaaaaaaatacctttttttttttgggggggggttttaaaaaaaaattcaaaaaaccctttggaaaccaaaaaaaaagtttttttccctaaaaaaaaaagaatattccccccctttttgggtgttcaaaaaaaaaaaaaccctttttttttt

SEQ ID NO: 431263 - DNA, 336 bp, Oryza sativa
gtgtttttttaatttttgggggtttttctttttttttttttttttttttttttttattttatcccccctataacaaaaaaaaataaacaaaacaaaaaaaagaagaaaaagaaaaataaaaaaaaaaaaaagaaaaaaaagaaaaaaaaaacccccaaaaaaaaaaaatttctgcatactaaaaaaaaaaacaagggggggggctgctaaaaaaaaaaaaccccgaactaccggggggcaaaacccccccacttttgagaaaaaaaaaacccccgggggcggatataaaaaaagaaattggggcgacggaaaccgtggggggggggaccgaccaaa

SEQ ID NO: 431264 - DNA, 329 bp, Oryza sativa
acaaaaaagggccgaaaggagattaaaaaaaaaaatccgggggggggggattatacaatgggaagcacaggtttttttttacccacaaaaggtccatctaaattaaaacccaaggggataaggacccccacggggaaggggggaaaaagcttatcatacccatggtaaaataacggggggaaggggggggaaaaaatccgggggggggggggaactattttcggggggcgggtttcagaaaaaacccccgaagggttccacgggggcccaagcgggaaccactgcggggccggagggggaagactccgacccaggccttgggggggggg

SEQ ID NO: 431265 - DNA, 73 bp, Oryza sativa
ttgtttttttaaaaaatcggcttttaaactttttttattttcattatatataattttcttccacccaaaaaca

SEQ ID NO: 431266 - DNA, 586 bp, Oryza sativa
cttttcgaattctgctggtctccattgcggctactgttcttggggttgccctctctctctccttcctttggttttgggcggttttcttttgctgaaaaaaactagttcttgattggttcttgtcatctttgggaggacattgctctgggtgtgtgtcaagattgtgctgggagcataaagctgggatctttggccagattgtagagggcttctggttcttgtcactgggggtgctttagagcatttcttggtgtccattactgttctgggtcatagagtttccaatctttggcaattactcggaggaattcttgagctgtgtgctactgtttcctttccctgataaatcaaccaagggaagggaaggctgcatattttccctttcttgatcttgatccttgcaataattttgatcatcttgaagaaaagaagtgtaaagtgtttggctgtgaaatggctgatgtgaagcctgaggacatggtccatcatccacccatggaccagctccagggatttgagtactgcatagactccaatccatccttggggtgaagcaattgctattggctttcagcattacattctt

SEQ ID NO: 431267 - DNA, 323 bp, Oryza sativa
aaaaaaaaaaaaaaaaaaaaaaattcaaaacctacattccccccaaaaaaaaaaattgaaaacaaaccttaaaaccccaaaaaacctgaataaaaaaacaacaatccttgcttacctaaaaaaaaaacaatgccaaaattaaaccccttaccatgtccaaacagggcccaaaaaacccccctttttcttttgccaagaaaaaaaaaaacggtaaaaattgtgttaaatgcacaaaccccaaaaaccctttttttccacaaaaattttaacgaagtttaaaaaattaacccaaactttggcgccttaaaaaaaaacacccccct

SEQ ID NO: 431268 - DNA, 175 bp, Oryza sativa
ttttgttttttttttttaaggggttattattttttttttttttttttttaaaatttattttttttttattatttcataataccaaattaaagttttctcataaattctaattctacaagaaaactttccttgtaaaattttcttgatcaacaaaaaaaagaaaactttcataaac

SEQ ID NO: 431269 - DNA, 133 bp, Oryza sativa
ccccccccccttttttttttttttttttaaaccttcgcgtttcaacccctcattccctatttacacattacaatacacaaccttatttaacacacctacaaacataactaacattacattacccctaatacaa

SEQ ID NO: 431270 - DNA, 392 bp, Oryza sativa
tttatactgaacccaacccaacaaaccaccaccacgctgaccgccctcaccggcgagccagcgagcgacggaaggaggccgcatgcttccacaactacaacctcctcctcctcctcctcccgtctccaatgccctccgcctccactagatggccgccctcttcctcctcctcctcctccacgtatcagacgccgccatcaacccgggcgacctgtccgtgctccacgacctgcgccgctcgctgaccaacgccgacgccgtcctcggctggggcgaccccaacgccgccgacccgtgcgccgcatggccgcacatattctgcgaccgcgccggccgggtcaacaacatcgaccttaagaacgccggcctcgtcgggacgctccccttcacct

SEQ ID NO: 431271 - DNA, 473 bp, Oryza sativa
ttgtgtgttttttttttttttgggttttttttttagagcaacaacaacatttggataacaacagcatacgagtacaaagcaaataaaatgggtggacgtccggaccaaacaggtgcttagtgcttgctagctagcacaatcagactaccatgcatagggcacaatgggttcctcaacaaactgaaaacaacaacgggggttatcacagggctacaatgatgatgatgatgatacagggctacaagctccatcatatgcgggataaccactagacgagatgagatatggccttttacttctttcccttttggatgactttgactgcattggtcacaccggccattttctcatttgggatcggcccttcttttggaagatcgaacttcctgcgggtcaacgacctttgcttccctggtggctgagggtccacaatctccagcataccttcaagttcatcaagcatagactttttt

SEQ ID NO: 431272 - DNA, 439 bp, Oryza sativa
accagcaatgaatttggcacacgatttcattctcatttctcaacaatctcgagtgctagactaagtggatacattggacagaataattgggttatagcatgatgcgataatataagttatctatcaaaatttcatagggccaagggtcttttgagactccatgtattgaacatctttagaatcttgcaaactgccttttgtcatcaccgccttttcttccgtagggatttgcagcgctgatgccatgccttcttccaccggacactttcctcatcttcctccgatgtttggatgcagagctctccaaatcgatgtttacctttggggggttcttaaaacagaaagacgctgccacatcctgccagatagaaaggatttagacccatctgtctgaatcaagatttattaatggtgggtttgtcaaacaggaaggtaaaat

SEQ ID NO: 431273 - DNA, 343 bp, Oryza sativa
tttgttttttatatatttttggggtttttattttttttttttttttttttttttttttttttttttttttttttttttttttttttttttttttttttttattttttataataatttttttttattttaatattttattaatatatatttacaaacaacaaaaaaggaaaaaaaagaggaaaaataatttaaaaaaaattattataaaaaaaaaaaaatatcttaaaaaaaaaaaaacattataaaaaaaaaaacatttcttttaaaaaagtgaaaaaaaaaaaaaaaaaacaagcagggaaggtaaaacctttccttaaaaaaaaaaacaaaatttttgggg

SEQ ID NO: 431274 - DNA, 459 bp, Oryza sativa
  unsure (1)..(459): unsure at all n locations
actgtttgacatgcaaaggttcaggggtggtagatggcatgaaatatgtaaatgtgaccattccagcaggtgctgtgcagctaaccttaaattatggttgatagccagctcctttccatgaaacggctacaattgtcaaaatgatttacattttttctattccacttaaaaaaacttcaaataaatttcacaaaaccccaggtttgcgggtatgcataacacgacttttaccagtcattgtagctatattacagacacatgtcaggctaacacatgccaaaacctagctctattactgcgccttatccacatatattgcacatgcattctcgtgaaaaatgtaaaatctaagttagcttgcatatatattgctccatctctttgccgtgacaggttcattcaaggaacatctggcatctggggctgctatgtgncattctagnttctagtttttctttt

SEQ ID NO: 431275 - DNA, 157 bp, Oryza sativa
ttgttttttattaacaacccgggctatatcaatacagtatcaccttcatatatctacaaccactcccgtttccaccaaaagatgaactttcagtaaccaaaccaaccactcctcccaagttgcaagtgcattcactgtcacgctgccctttcctaac

SEQ ID NO: 431276 - DNA, 446 bp, Oryza sativa
ttgtgtttttttaaattttttgggttttatatttttttttttttattaaaatttaaattaaaaaaaaaaaaaaaaaaaaaaaaaaaaaaaaaaaaaaaaaaaaaaaaaaaaaaaaaaaaaaaaaaaaaaaaaataaaaaaaaaaaaaaaaaaaaaaaaatattaaaaaaaaaaaacaaaaaaaaataaaaaaaaaaaaagttgataaaaaaaaaaaaaatttattaaaataaataaaaaaaaaaaaactaatgcttgtgtaaaataaaaattgaaaagaaaaaaaaaggtaaaaaaaaattaaaaccgaaagaaaataaaaaaaaaaaacaaaaaaaaattatgaaacaaaaaaaaaaaaattattcaactaaaaaaaaaaaaaacctaaaaaaaaaaaaaaccaaaaattaaataaaataaaaaataaaaaaaatcaaataaaaa

SEQ ID NO: 431277 - DNA, 221 bp, Oryza sativa
atattaatccaaaaagagcagggtagacagtgagtgttcttgtatgttacttagacgcagttgcgatcactcttaggaaccttctgtgctagttttagttacaatacttgacaacacctccaggctaccacattctgagcaggattactcatggaggattttatttcatgaaactattacggctcctctttatcaagtttgaccaggaactattaactgtt

SEQ ID NO: 431278 - DNA, 363 bp, Oryza sativa
ttgttttttttattttttgtgttttattttttttttttttttttttttttttttttttttttttttttttttaaaaaaaaaaattttttaaaaattccctttaaaaaaaccaaaaaaaacagggagttaaaattttaaaaaatacctttacaccttgctaaagcacaataccctaaacaatatatttttgccctgaaacaaaaaaaaaaaattgaaaaaaaaactttaaattttggcaaagcccaataaaaaaaccctttacaaaaggattccactaaccggccaagaaccaataaacaccccattattgttttaagattaaaccccaattaatattttggccaaaaaaaaaaaaaatggggg

SEQ ID NO: 431279 - DNA, 446 bp, Oryza sativa
ttgtttttttttttttttgggtttttcatccaatggcaacatattctgtcactataaataagtaattaacgaacatgatacatgatacaaacatgctacaattgatgaaaggatcaacgtttaacatatcaacactaggaatttaaggtgaagaggaggctccaaattggggtttcaattacattgcaagcctttgtacacctgaacttgggcttttgggaatagaatcacttgctacacaagaagcataatggcatggaagaagaagaagaaaaaaaacagaatagacatgccaaatctaagattgcaaggtcccaaacaggggggcatgatcatctttaaatgatctgtcagctgaacctgcaagaactgcataccattcactgtgaagaacaattagctccccattttgatgctgttaaatgttggctcaccttgaacctcct

SEQ ID NO: 431280 - DNA, 520 bp, Oryza sativa
  unsure (1)..(520): unsure at all n locations
gtttcgtttccccagagaaaccctaatcctccccgtcctctctcctctcgcatcgaagccgccacggcggcgatgacgcctcccttccgcccgtcgccctccgccggctccatccctcgtggctgcggcggcgaccggtgcgcatccggccgcgacgcctggcccctccaccacgtccgccacgacggcgtcttctgccgcctctgctcctcctgtgtcctgctctatcaccccgccgccttctgctccgcctgcctcctcctcttccctcccgcctccgcctccgcctccgcctccgccgccaccgccgtccaggagccccgcctcgatcccatcctctccccgccgggacctaccgccgcttgctccagctgcggcctcttcgtcgcgcaccactcctgtgtcccagactctgcctccttcgtctgcccctcgtgcgccgncgccgccgagggcaagcccttctcctacacgccccggggggggcggccggcgcgcgctggacgagcgcgccccgcga

SEQ ID NO: 431281 - DNA, 551 bp, Oryza sativa
  unsure (1)..(551): unsure at all n locations
agtcaatcaggtggaacgacgctcctcctgcaggattcaaccaaagcaacccacaagaaaagacacttaaagacattcttgaccttaatcctcataaacataaggaagcacgcttcatagtaaatgtggttgttaaaagaatatgcaacgaaaactcctagtggtacaattcatgtcacctatgctacaaaacctcaaaaccatatggctcagcctacaagtgcaccagttgttcctatataggaataccagatcaaagatgcaacatttattctttttggaaaaactgcgcaacgcatcatacgaaggccagtggaatctctgatcgaagaaaatccaccggacagtgaattcattccaagggaaatcttagcacttgttgacaatggttttctatggaatgtcagcttcacaaaggatattaacagaagcgaagaaactctccaggttaatagtgttatatcctctggtccagcanatcaaccaccgctgcttatgtcgccagtactttacagccagcatcagcaatggtatcggcaagctcaagcagt

SEQ ID NO: 431282 - DNA, 184 bp, Oryza sativa
cttaataggaatttgagcagaaaattgttccagtggcatcacagtaccctggaattcagaaggttactaaggttagaggggcgcgtatgggtaaaaaggttgttgagattgaaggggctgatgatgtgcgctttagccccagtggaactgatagtggtcgaagtgattgtgatggtgatggtga

SEQ ID NO: 431283 - DNA, 363 bp, Oryza sativa
ttgtgtttttttattttttggggtttttttttttttttttctttttttttttttttttttttttttttttttttttttttttttttttgggtaaaaacaaaaccctaaaaaaaatccaaaggtaaaaaaaacaaggggaacaaaggaaatcccgaaaaaaaaaacccaggggaaaggccaaaattttttttgggccccaacgcctccggggaaccaccacgtttgggggaattttttttaccctggttaatttgctaagggggccacaaacccgccggggacctctgaccccaggaacaggtccgggggccccccccaccacacgtctttttgaaccggcccgcaaaggggtttggccggcca

SEQ ID NO: 431284 - DNA, 387 bp, Oryza sativa
cgcccatgtctatggcgggggagaacgcggtggaaagatccaacgcttagcaggaaccaatccgaggtgctggcgatagtgccagacctagcgggggactacaaccggccgggggacttactgccaagaatgtacgtcgactcaagctgattacagcaagcactgcctcctcagctggcgtgtaagggggatagccagtccaagatccgccagtgggctgaggcctgccccagcggaggtcaagataaccccattgtttttataatagagaccaatggattcagaggctctggagggctaggctgcgagatgggcttactaaaggtccaggaaattctcaattactgtcatgagccttgctagactagcgatatgcataaatgtctc

SEQ ID NO: 431285 - DNA, 458 bp, Oryza sativa
ggtgtttttttatttttttgtgttttttttttttttttttttttttttttttttttttttttttttttttttttttttttttttttttaaaaaaaataacccaaaaaaatttttttaaaaaaggggaaaaaaaaaaagggccaccacttaatttaaagcaaaaaaataaaaaaaaaaaatttaaaaaaggttaaaaaaaaaaaagggaaaaaaaaaaaagccctaaaaacaccgttaaaaaaggccattaaaaaaaaaaaactataaaaaggaaaaaaaaaaattacccccccttttaaaaaaaaaccttgaaccttgccggggtaaaaactttaaaatcaccgccaaaaaaaaaaaccccaatataaaaatttgggggaaaaaattaaccccaaaatccttttttaaaaaaaaaaatggccatttggaaggaaaaaaaaaacccaaaggtttttggg

SEQ ID NO: 431286 - DNA, 309 bp, Oryza sativa
gtgttttgtacctaatgtgtgtgtaggggagcccctcatctcagtggctagcttttgaggtgggaaagacccttgatgatgatctacacggtgttcattaactcagacatgcagagcatataggcagatagccttttgtgattaaaagtgctaattcttcgcggcaaattgatctcccagatttcattattcagaaaacgtggaagattgattggacaacaaaaataaatatacaggtgaagaacaagaccaagtacatactttttacgccgcccatttggagatgaaagtaagtgaccatgcacttgg

SEQ ID NO: 431287 - DNA, 564 bp, Oryza sativa
gtatgtgtcagcttattagctgcttcaataatccaaagtttttgtagcatgaatccaaagtgcttgtgattggtttcttttaatcctgggagagattaacgcatggtttgctactttgcaaaaggttcctttctagatacagaatttctcgaacagttcctcatcacctgacatctatttgtgtttttttttaaagccctcgtatttgaactgtagcttagtcttgttgagctaaagatgagaacattttttttaaaaaaaagaacaattttgacacaaactagggagttctttttcttgatatggacttacaaaagttcatgacaattttttatatatgtcatgtgcatggtgtgtatagtgatatgcatttatgtctctttttgcatagtacagtacttgcataatttcagtttgaaaaaaagtatagcaacattaaacacaacaataatttacaaaaaggaaaaatgtaaacacgatatatagttgtgtatagctcctacttttctacaaagagcacaatcttgtcaagatattatgatacaacatttggtataaaaggat

SEQ ID NO: 431288 - DNA, 195 bp, Oryza sativa
ttgttgttttttaattttttgtgtttaaaattttttttttttttttttttggataatcaacaattctaccctaacatcaaaaaaaaaccccaacaccacaaaaatccttgcccacaaaaaaaatccaaaaacaccacaaataccaacaaatttttcaccaataatatgacaacccacttacaatacaaaaaatac

SEQ ID NO: 431289 - DNA, 171 bp, Oryza sativa
ttttgttttttttaattttttggttttttatttttttttttttttttttttttttttttttttttttttttggggggcagcaataaaaccaggaaacatgatccatcccgttaagggaaacactagtactaggggctagaacaaaaataaatggccaagtagggggaggaa

SEQ ID NO: 431290 - DNA, 331 bp, Oryza sativa
catttttactggtactactccacatgagttgattagctgcagctgtctgcaggaactaggagcaacacataatggggggcatggaaaaaggagtctgtgaggtgtaagctagaggcatcaaccaccgcatatccatacccattcatattcgcaagcgcgcttaccctatcatgatgatgaagagatggagcagggaggaagactaagacaagtcggggacaggcaccaacaccatcaccacgccacgtttttcgaacgtctactgtcgcgcccgccccggctagctccttgacatcgtgggccccaaaggagccagcgagtacaccctcct

SEQ ID NO: 431291 - DNA, 183 bp, Oryza sativa
catctttgtctcgcctccaccggccgtgatctcgccgccggcgccgtcccgccgcccctgaggcctactagtagcgacctacaagtaccttgttttgtaccatcctaggagcgaatcctccccctgcggcagcggtagcagatcgcgatggccgcctcggcgccttctccggccgagccgccg

SEQ ID NO: 431292 - DNA, 156 bp, Oryza sativa
ccccgccctttttttttttggttttttaatagatgcgggcggcaacaccaaaagtcccttcaaatcaccaggcaaaaaaacaggagcctagtacaaactcctcaatatcacacttgtatctaaaaccacgtaacgagtattctgcccctcctacat

SEQ ID NO: 431293 - DNA, 321 bp, Oryza sativa
agcgcgccgccctttttttttgttttttttgaacttgggggtggttaattcgcaaaaatgctcatcaagataggctcctacgacgagacctgcagcaaggaacgccatgtacacactaatctgcatcaagcaaaaaaaaaccaaaaggagaagatcggatttgtatcaaagctgagaaatcgaagaaggagaaggagacgtgtagctgttcgtggttgtcgcgcgagaaggagacctcgcgggaggcggcggtggcggcggccttagtgtcgctgtaccggcctcgtggccgtgcgcggagtagacagcggtgtcagcacc

SEQ ID NO: 431294 - DNA, 65 bp, Oryza sativa
tctgctgcggcgggcggcgcaaatgggtggcgacggagctgataggtggcaggcggcggttggag

SEQ ID NO: 431295 - DNA, 436 bp, Oryza sativa
ttttatcgagagagtgtctcaagtgatgagccttctgataattcgaaaaggagaaaacttcattcatgtaaaagcagcatgtccccctcacccccaaaatctaggaacaggtaactatatgtttacagcatatttataatgtagattaatgctgttaaaaatgtgcgaattagcagttagcttcaacatgtttgtagatggtattgttttatggctggcatcattagttaatcctaaaagttgtttttatgtttggcatcaataatgtggctgacatacttactctgttctggttatctggaagccacaaattgcttagcatttgatgttttttaaatcatgaatacggctagtcatgccatggtttttctatgatttccatcctttctccccatgcgaggataagagatttttgtttttgtgtgtgtgttggggt

SEQ ID NO: 431296 - DNA, 224 bp, Oryza sativa
ttgttgttttttaattttttgtgtttttaaaattttttttttttttttttatattttttaattaaataaaaataaaaaaaaaaaaaaaaaataaaaaaaaaaaaaaaaaaaaaaaaaaaaaaaaaaaaaaaaaattaaaaaaaaaaaaaacaaacaataaaaaatcaattaaaaaacaaaaaaaacaaaaaaatcaacaaacaaaaaaaaaaaacataacaatc

SEQ ID NO: 431297 - DNA, 541 bp, Oryza sativa
ttttgtttttttaaaattttttgcgtttaaaattttttttttttttttttattttttttataataaattaaaaaaaatataaaaaattaattaaaacaaaaaaaaaaaaacaaaccaataacaaaaacaaaacaaaacccaaaaaaaaaaaaaacacaaaaaaaaaataaaaaaaaaataaaaaaaataaaaaaaaacaaaatacaaaaaacaaaaaaaaacaacacaaaaaacaacaaaaaaaaaataaaaaacaataacaaaaaaaaaaacacacaataaaaaacaaaaaaccaactaaaaatacacaaacaaaacaaaaaaaaaaaaacaaacaataaaaacaaaaacaaaaaaaaaaactaaaaaaaaaaaaaaaaacaataaaacaaaacattacaataaaaaaaaaaaaaataaaaaaaaaaaaaaaaacaaaaaaaacaaaaaaaccaacaaactaaaaaaacaaaaaaaaatcacaaacaaacatcaaaacattaaaaaaaaaaaaaaaaaaaaaacacaaaaaaaaacaaaa

SEQ ID NO: 431298 - DNA, 322 bp, Oryza sativa
cgggccgggactgaatggctggaccgacgcacgcgcgcgcttgtaccatgcggacgactgcgacggccgagcggcggcgtcgagaacacccggcgcttgatataggtgcaagaggcctacgagacgctcttcgaccccaggcgacgggccatctaccaacgcgccctcgcgcgcggcgtttgacggcttgacttctactacttccggcgcgtggtcctctactactaccaggatcaggaagacaagtctggctggcggagaacttgcggagaccaaatggaggagttgaagaagaggagcatgcctaacgatttagaggaga

SEQ ID NO: 431299 - DNA, 318 bp, Oryza sativa
  unsure (1)..(318): unsure at all n locations
cttcgagctctcttggaagctatagcccccccgatccgcgggggagagggcccgatcggatccttgggaatggcgacgtcggcggcggaggaggaggcggtgcctgtggcggaggcgcgggcgcaggccgagaagcgcgctgcggcggaagatggcgagggggcggaggcggaggaagaggggaacgagatgcccgagccgaagcggcggcgcgcgtgcgtggcggcgctcgagggcgtgcgacgcgccgcggcggacgcggccgaagagaacggcgacgcgtgcggcnttttcattttctattctccttattcacct

SEQ ID NO: 431300 - DNA, 101 bp, Oryza sativa
gtgtttttttatattttctgctttacacctcggaaatgagggactacaacccttaaataaaaacccaatacccatatccacaatacaccatctccaaccat

SEQ ID NO: 431301 - DNA, 203 bp, Oryza sativa
catgattcttgctgcttcttgcttcttgttgctgttgttcttggttggatctttgatgaaggtggggaggggatcgaggggggcaggtgttttaattattatcatttcctctttccccaaatttcaactcataaacctctctactaatttattacactaactattctccatttcctctcaactttctccattcatatctcttc

SEQ ID NO: 431302 - DNA, 322 bp, Oryza sativa
gtgttttttttatttttgggggttattttttttttttttttttttttttttttgaccacacaaatgctccaaattttgaaagtaagtgtgggtagtataggctaaaaaaagagaaagattaaacatgataaaagataagtagaaaaattataaagggggtaaaatttcccataaacggacatttatacccacggggaagaattagtttagcaaagtaattaaaagtttcccggccggaaaggtccatttgttgagcatgttggggcacttcttgggggggaactccgggggggtggggccaccctcctttaacgattccaaa

SEQ ID NO: 431303 - DNA, 454 bp, Oryza sativa
ttgttttttagaaagccgaggcaaccactaaattgcttatcctccaaacgacaacaatacacatcagtaactctatcttcacaagatgatgatcatcatctagctcatgtggcagacaacacgtacaaatacaactcatacatcaccacaattcacgaagaacaagttacaagggaggggatagaaaggtacatgagcagttctgcactacagattgtccatcttttttttcctgttgaaaaatcctatactgtactgagaacacaaacaccgtaggacacaagtcttattcacactttgtaaacactacaaggctcaagctgatcaaggacatcacattcggggtgctgtccctttaatgggggcgatgaacatcaagtggccggcatcagggacctcaaaacaaccacacaaacagggaccttcaaacaaccgtgcacactgggggtggcag

SEQ ID NO: 431304 - DNA, 351 bp, Oryza sativa
tttttgtttttttttttttttggtttttttttttttttttttttttttttttttttttttttttttttttttttttttttttttttttttttttttttttaaaaaaaaaaaaaccccctttttttaataaaaaaatccgggggggggaaaaagtttttggggggggtaaaaaaaaaaaggaggtgtttttcggggggggggaaaaaaaaacccccctcgcgtcccccccccccccccaaaaaaaacccctggtcctccccccctttaaaaaaattatcccggggtttgttaaaaaaatttttggggaaaaaatttttttgccccctttatttaacccctttaaaaaggggc

SEQ ID NO: 431305 - DNA, 345 bp, Oryza sativa
tttgtgttttttttattttttgggttttttttttatttgcaatgttcggcccgcatagattaccaataattaagtttgaaccaacaagtttaagaaaaaaaaaagttaagtaaacctacaacaacaggggccttacagaacacacacataactaccacccccccccctgcctcttttaaaaaaaaatacaaccttttttaggataacgcaacacatgattgatttgagtaggtcgatcgatcgacctaggcgtggatgggcttgcaaaccacgggggggtgcttgaggatctggttggtgaactggccgggctttttggggggggccaccttgtccatcccgggc

SEQ ID NO: 431306 - DNA, 401 bp, Oryza sativa
tttttgtttttattttttttgttttttttttttttttttttttttttttttttttttttttttttttattaaattattaaaaaaaaaaaaaaaaaaaaaaaaaaaaaaaaaaaaaaaaaaaaaaaaaaaaaaaaaaaaaaaaaaaaaaaaaaaaaaaaaaaaaaaaaaaaaaaaaaaattaaaaaataaccgaaaacaaaaaaattaaaaaaaaagacaaaaaaaccaccccaaaaaaaaaacccgggaacctaaaaaaggaccccaaaaagaaaacgaaaaaaaaaaaaattaaaaaaaaaaccaaaaatttgccaaaaaaaaaaaacccaaaaaaaaaatcttaacccttaaaaaaaaaaccaaaaaaaagaggaacccccaaaaaaaaaaaatgaaaa

SEQ ID NO: 431307 - DNA, 260 bp, Oryza sativa
ggatactctagcaaatcggaccgaacccgtggctggggacctatatctccaggttcgagacgacgcacacaacgacggagattccgtggaacacgatccaagcagacatggggaacccgcgctgagaaagagggccgccccggggagccagaacatcgctgcaaggcctgtccaccgccacctgggaggcgccgacgccaatttgtgttgtgcagaaggcggacctggctagctatgaggatcatgaagcactgagagga

SEQ ID NO: 431308 - DNA, 307 bp, Oryza sativa
gttgtttttttatttttttgtggtttttttttttttttttttttttttttttttttttttttttttttttttttttttttttttttttttttggaaaaaccaaggggggaaaaaaaaaaaaggggggttaaaaaaaaaggggtaaacggaaaaaatcgaaaaggacccggctgaaaaaccaagaaccccccgttgttaatggaaaaaaaacaaagggggcctaaaaaaaaaaaacggggaaaaaaaaaagggggggatttttttttatgggggtttttttggaaccaaaattcttaagcccttgggg

SEQ ID NO: 431309 - DNA, 77 bp, Oryza sativa
ccccccgccctttttttttgtgtttttaaaaatatcctcttaaacactcttttttttattatatcttttttattatt

SEQ ID NO: 431310 - DNA, 251 bp, Oryza sativa
tgtatataattcgcgaaagctcagctgcttctgcttgttcttcttctttcggattcgagaggaggatgtccatctcgctgcgcctcgcggacccgacggcggagccgcccgtgctgccgccgctgcggcagtcggcggtgcgggcggagggcttccccgccgtcgccgatttgcggacgggcgcgcttaggggaagcgcctcgctgctcgtgaagccgtagccgctgctgggggcgggacacgcggctagc

SEQ ID NO: 431311 - DNA, 76 bp, Oryza sativa
tggttttttaaattttggggctccccacctcttttttttattccctttctgagcaacacaccccaaaaaacaacct

SEQ ID NO: 431312 - DNA, 494 bp, Oryza sativa
  unsure (1)..(494): unsure at all n locations
tgtatgtcgcgatctccggagagaggagagaaaaattcggaacggcccccccgacacacgcgaaaccgccgcaccccgcgcgagtcaatcctccgtgtggccgagtcctcttccacccctcccctcgcgttaacaccaccgcgcgcacgcgctgctcctgctccccccacaacgcgacgcgcctaagcaaacctcatcttcttcttcttcctcgcttccttcctccacctccacgcggcgaatccaccaggtgtgccatgggtggctcgttctccaccagccggcgccgccgcgacgagtactacgcggtccggccctcgtcgccgccgcaccactactacacctacccaccgccccctcctccgacgncgtaccaccaccaccacccgtcgtcaccgcctatcccgtcgcaccaccaccaccagcacccttaccggtcttcgccgtcgtcgcaccacgccacctcgtcctccttgtactactaccacccaccc

SEQ ID NO: 431313 - DNA, 319 bp, Oryza sativa
  unsure (1)..(319): unsure at all n locations
ggggttcatcaaggagagcccttttggatttaatcaaaaaaattttttctcttcatctgtccctgtaaactctctttgggatttagtagctaattgaattagtaggtgggaagggggggttgggattagntngggctctgtccctcgttggctgtggcgagcggatcatgcttatatttggcttttgcggctgcatgtgactcggcatgccaccaagaaatgcaaaggccccggtcgatgtggccaaaagagtggctacaagaagagagtaagagagcagtttaactttacgcccatcagtgtgagggagacatgaatg

SEQ ID NO: 431314 - DNA, 355 bp, Oryza sativa
gggggcgttcttccttttttttttttttttttttttttttttttttttttttttttttttttttttttttttttttttttttttttttaaaaaaaaaaaaaaagggggggaaaaaaaagggggggcccccccgggttcccaaccccttcaaaaaacctaaaaaaagggttttgggcagggggggggggaaaaaaacccccccaaaaaaaccccagaaaattttgggggtccccccccccccgggttttaaaaaacccccggaaaaaaaaaaaaaattccccccccccggggggggttttattttttttttaaaaaagggggttttttgggccccttttggaaaaagggggcccaa

SEQ ID NO: 431315 - DNA, 284 bp, Oryza sativa
gctctctctctgatctcgtcgttctcgatggactggaaacccgaacacgttacagctacaggtggcggcggcgtcgccgcgctcccgtgacaacaacaacaacgacggcggcagggcggtccacgccgacccgaggggcgtgaccccggtgaagaagcacgagctcttcttgcgccgctacgacgagtgggtgaattaccacttccagacctaccaagggttgcatgcaattggagcaagagtcgagctagacgttctcaaggacctgattatcaatggcggac

SEQ ID NO: 431316 - DNA, 408 bp, Oryza sativa
aaaaaacgacgtcgcaaacacacataaataaacttaaatcctctaaaaaaaccacccttttttttttaaattttataaaaattataaaatatttttaaattttttttaaaattaaaaaaaaataaaaaaaaaataaaaaaaaaaaaaaaaaaaaaaaaaaaaaaaaaattaaaaaaaaaaaaaaaaaaaaaaaaaaaaaaaaaaaaaaaaaaaaaataaacccttttaaaaaaggataaaaccgaaaaaaaatttaaaaaaatacgaaaaaaaaaaaaaaaaaaaaaaaaaaaaaaatgaaaaaaaaaaaaaaaaaaaccataaaaaactaaaaaaaaattaaaaaaaaaaaaagaccgaaaaaaaactaaaaaaaacagggaaaaaaaatcggaacgattacaaaaa

SEQ ID NO: 431317 - DNA, 381 bp, Oryza sativa
ttgtttttttttttttttttggggcaaaaaaaaaatgatgggctttatttaaggagtctgttcattttgtatgtacggtatagcatggtatgaatatatacattatcatgaaaatgaactttaccagggaaataactaatttagccgtccagggaagagctataactataagcttaaatagctttcggagcaaaaatattactgacaataatcggaagccaaaagaaagaaaaatgtctgaattcaaacctaagaagttaacgactaagatagctagtcacctttgtaagttgtcaagggctcgtatcttcagggttttgaaggtgcccatgaaccgttaactgatatcctcttgaagttgatggggagttctgattagag

SEQ ID NO: 431318 - DNA, 419 bp, Oryza sativa
gtgtttttttatttttttgtttttttaattatttatatttttttttttttttttttttttttttttttttttttttttttttaaaaacgaaaaaaaaaaaaaaaaaaaaaaaaaaaccaaattttttaaaatttttaaaaattaaaaaaatttaaaaaaaaaaaagatttaaaaaaaaaaaaaaaaaaaggttttattacaaaaaaaaaaaaaaaaaaaaaaaaagtttaaatttaaaaaattttcaaaatttaataaaaagcaaaaaaaaaaaaaaaaaaaaatttttcgttttgcggcggcccccttccaaacggaaaaggtttgccccaaaaaaaaagggtggcgcccttttaaacgggggcgggaaacgcaaacttaaacggggcaaagtgccccaaatttgccccccccggccc

SEQ ID NO: 431319 - DNA, 459 bp, Oryza sativa
  unsure (1)..(459): unsure at all n locations
tcgctcctcctcccctctcctcccctccagcggggcggcgggatggaggccggccacggcggccccggacagggcgacgggatggaggcctccgcggcggcccgacgcgaggcgacgagatggaggcggcggcgggctgcatcgagggcggcggcgaccggcgccggtcgagaggggcggtggccggctgcatcgggcgcggggcggcgagatgggggcgactggcgccggtcgaggtggcggtggccggcgccggtcgagaggggcggcagccggctgcgtcggggacagccgttgccggtcgggagggcggcggcggcaggcggagaactttttttttcttttctctatgctatctgatgaatgctgaagatgtgaaanatgtgaactttcttttttctttctctattctctgcgatgaatgctctctttggtctctgggaagaatgctcatttgtc

SEQ ID NO: 431320 - DNA, 331 bp, Oryza sativa
tttggttgtttttttttttttttttttttttttttttttttttttttttttttttttttttttttttttttttttttttttttttttttttttttttttttttttttttttttttttttttttttttttttggggaaaaaaaaaaaaaaaaaaaagtttgggttataaaaaaaaaaaaaaaaaaaaaaaaaggccccccccccgccgggaaaatttgggggggcccccaaaaaagggggggaaaaaaaagaggggcccaaaaaaaaaaactcccccccccctaaaaaaaaagggggaacagggggggggggagaaaaccgggggtgttttt

SEQ ID NO: 431321 - DNA, 479 bp, Oryza sativa
ggtataccaatatgttccgcattatttgttgtgctatgcttgccatggccagtacttagctaagcactcttgcgttttacaacttctctagaatgattagtgctgaatgttatcgtaagatgataaaacgtttatcctaagtcctactatgcattttcctttctaaacttgaatctaaattgtttttgccacttttttgcagaccgtgttggttgtagagagtgtaagttcaatgataaagcatgacaggaagctaagattacttgttacagcttgatttcattctctctaagttcaacaactctgacgctttagtgtttttgcttgtcctcccggatacaagcgtgtttttttgggcagagtttggagtatatgtagtttattatttttgtagtatatgtattggtacgattgttatttgtaccgccccgtgttgtaaaatatggaccacaaatcatgtaacccagtagactactaga

SEQ ID NO: 431322 - DNA, 227 bp, Oryza sativa
tgttgtttttttttttttttttttttctatatatttttttattttaaaaaaaaaaaaaaaaaaaaaaaaaaaaaaaaaaaaaaaaaaaaaaaaaacaaaaaaaaaacaaaaataaaaaaaacaaaaaaaaaaaaaagtaatcaaagaaaacagccaaaggacaaaaaaaaaaaaaacaaaaaaaaagggccaaaaaaatttttatattaaaaaaaaaacaccaaaaa

SEQ ID NO: 431323 - DNA, 435 bp, Oryza sativa
tttgttttttttttttttttgtttttttttctttttttttttttttttttttttttttttttttttttttttaaaaaaaaaaaaaaacttccttttttttttttggtttgggcctgcatttgctgatcggggggaccatgaaccccaaccctgccccatttccccattggcccaacaaaagggggccccatcagcagggggggggccttccccttttatcaccccccccctggcgggctgggtcatttttttggggttttccccccccccccctgcggtaattaagcccctcccttttttttttctttttttacacataaaacctcggaatcttgtgttttgggcgcccttaacataatttgggggactccactggcttgcccccacggtggaattagggaggagggggggtccattgttcttgggggggggccc

SEQ ID NO: 431324 - DNA, 179 bp, Oryza sativa
ggttgttttttttttttggttgtttttatttattttttttttttttatttttttattatgtaacaatttgtttggttttgaaaaaagatgaaaacggaaagaaaaaaaaagaacaaggggaagacaggagcaaaaaaaaaataggagacaaaaaaaaaaaaagaacaaggggggattgg

SEQ ID NO: 431325 - DNA, 450 bp, Oryza sativa
cttggtgctcatatcttctatgcaacaaaaaattgttctaaactctatgtaattgtagatgtgatatataatcattttcatgtatttttttaaaattacgtagtttcttaatttatcaaatgatagggctccacgaagcacaaaaaaggtaaatactgaaagataagttctgtgcactttgagttttattttctttcttggaactcaggacttctgatgatgatagattgatagctctattttattcattcatgcatatttgcttcatattgttcttgattcagtagctaggctggttgagagggataattgataaattgtatttcctatcttctgagatttcttctaaccgtgcatgtcagctaaaactatggcataaaatccatattgcaagtatggagctggtgaggtgcttgactgatggggagacattgtgaggtgctcggcgct

SEQ ID NO: 431326 - DNA, 374 bp, Oryza sativa
ttggttttttttttttttttttttttttttttttttttttttttttttttttttttttttttcccaaaaaaaaaggagtcccttcctttaattaacgggataatgaaaaaggggaaaaaaacaattccatgattatcacggggccttttatgggggaaaggggggttggcctggaaaaaaaattggaacaaaccggatcccactttttttaggatttttgaggcatacagaaacaacagggccataatttccccacttaaaataatcccaatttctgagaaaccattttaaaacattcttggggaaaaaaaaaacccaccccattttatcccaaggggaaaaaaaatccccaagccccaagcaatttttccgag

SEQ ID NO: 431327 - DNA, 235 bp, Oryza sativa
gttgttttatttatttgcgtcggtccttcttttttttttttttttttttttttttttttttttttgttttatttttaaggctgaaatttctactttgcaagaaaccccaacaggagagaaaaggaaccaaggaaaccaagaacggaaccaaaaaaacacacaccaaggggggacaaccggagacgccaaaaaccaaaaaagaagacgcacaaatggtgggaaaaacacgagcaga

SEQ ID NO: 431328 - DNA, 224 bp, Oryza sativa
aacccgttctgcttatatcaacgcaaaccaccctctacgccgcgcgcgcgaggcagattctcgacggggagcgcaatcgtcgccgccagatcccgccccgatcgaccgcgactcgttcccacggtcccgcgtataccggtctatctctctctctatctctctctctctgggatcggagcgattgcctttctttttgcgcggaggagatcggcgagaatgggagc

SEQ ID NO: 431329 - DNA, 275 bp, Oryza sativa
tttgttttttttttattttcgtcgttccttctttttttttttttttattggagggaacaaaaccgatatattaacaacaacattttggagatatcagctaggaaaataacactctagcaacaattctacatgacattttccatcttggtttaaacctttttttcccctcttctcgatacaaagcaagcaatgcaaaatgcaagaaccaatcaacagagctacgtagtcagttaaaaaaatgatgatgatgaccatgaaaatggggcagccaaggc

SEQ ID NO: 431330 - DNA, 431 bp, Oryza sativa
gccgccctttttttttttgtgtgttcaagactacatagatatcacaattcacacgctcagaacactgaagctatactgtaaaccagtaagtgatatcatgtttcatgctcgtattacttacacgatagtacatccagtctgtcatctcttcttatttcactttaatacttatacaagcgtatttaagtgtggcacatccattggctattgccgtagaggcgtcgggtaccgacaggctacaaacttatatgctggcctagttataatgtcagcaggaccagcatatcgaagatgctggaagagcagcagtgcgccttgcagaatgcgaatagccggttcttacatgacaggcctagtggcagctccagcggggccagcttgtcttagcagctggaaataggattctagtttctgcctcaggacagcatgct

SEQ ID NO: 431331 - DNA, 410 bp, Oryza sativa
tcgtgtagattagatttagattagtcctatgtgtctcttgccgggttcttcttctcgggactcatgctcgcattgcacctctttgctccagcgaaaatgtgagattgaccagagatctgccatcgcaaggttcagtttcagcaagagctaaactcgatcggattcagaccgcgaagctaagctttgcgaacggatgatgaagccggcgacgtcggagtccgacatgacgagcctcgcgacgtcgtcgccggcacggtcgcaccaaggcggccgcggcggcgatctacgtgcagatcagcccgtcgcgcgactcccacacgacgacggcgacaagtacgccgacgacgcacgccacgccggtgtacaacaacaggccgctcgactcgccgttgcaccacttctcctacttc

SEQ ID NO: 431332 - DNA, 327 bp, Oryza sativa
tttgtttttttttgacacaccccccaagttattaattcgtatccttgagggattccattacaaatctgacgcaaccaatgtgcaaatttaggcctctatcgggtaccgcacacggtacagatgaagcaccacgctcgacaccaacataaattaaaactctgtactgtacatcatgtaatagcatattgatcacacttaataagcatgtatcctctcagttctcaggtgttcatcactggctctcttctcttgacccttaccaagagcccattcttcatgtggagtatgacggaaagcctcggcttcacgacgtgccccggcaccacc

SEQ ID NO: 431333 - DNA, 315 bp, Oryza sativa
gttgttttttttttttgtgttttttcataagagcaactggaaatgctgctacatgcaacatatgaaaaacttagtcgacagcaaggtttgagagtgactaattctaacttaaaagagtaaatagacggagatcttagatgcaacttcaggtataggcaaggattaacctatgaccatggggtggtgtctcactcggagcctaggaccacaagaattctctgggtttcaccgagtgttcgggtgacatctgcatgcgcagcaagcgcacggtggtcccggtcagcggcagggggttggtggccccgacgagcttgc

SEQ ID NO: 431334 - DNA, 293 bp, Oryza sativa
aaactaaaaattggcaccagaaaaagggggcatcaaggtgcccaaagaaacacaaagtaattttttgggggagtttttcaaaggcccaaacagaaaacaaaggaagacagctcaacggaagaggcaaaattacatccagagttctacgaggaagacaaaagagggatctagggaagagcaccctaacacaatgcagagtagagcgcatctagtagtagcggtaacttaggaagcacagataagatgagatacccaacctaccggttgtaggcagcactacaaaatatgagcca

SEQ ID NO: 431335 - DNA, 351 bp, Oryza sativa
atgtccgtctatgaacatctgggtagggttccctggatcaaggcggcgaaggcggctagggtttctaggcgggccacatggcctctccggcgacggcggtggactcccttagcgcgtggctcgctgagctggatcggcagcagcagctgctggtgagctgcacgaggctgatcaagcaggtggaggagcacttcgcgtcggtggagccctggctggctgagaggtcatgactcgctaacaacaagggcacctcggatgatgcacgggccttggccgtcatggactcgctccgtcgtcgggaggcctacattgatggcttctgtttccgcgcgcttgaccaccttgacgacc

SEQ ID NO: 431336 - DNA, 412 bp, Oryza sativa
ctcgactttaccagtgactcctccgtctccacacattacagctaccacgccgccgccgccgccgccgacgacgaggaggagatgtggcggagttctgtagctcgtgctcttcttcttctgcgctccgttatacacaggcctctcccgccgtcgtcatctacacttcgagccttaacccgagcgccaccggctacccgccccctctcccgcttcctctcctcctccccggagcccctcccggatgccggtgggggcgctgcttacgagtcctctgattccaccgatgccggtgaggatggtcttgtctctgatcccaccgaagccttttaggacatcctgttctttttttgggaggaggaactctgggactctgattatgtctttttcgttgtctttttccccgaccctttgt

SEQ ID NO: 431337 - DNA, 78 bp, Oryza sativa
ggtgttttttttttcgcgtccccccttttttttccacaattccatattattaacacctacactaaggacatgcccaaa

SEQ ID NO: 431338 - DNA, 459 bp, Oryza sativa
ccctaattcccttcctccgttcctcagccactggcgctggcggcgactggcaagaggagttgccggccgccgcatccatcccctccccagcgccagaccgccagcggcaggccggcagcgccgttcgaacttcgaagccccctctatgccgccgccgccggcccgccacctcccttcctgccgcctcgctccttgcgccgcctacctcccctactgtgggtctgtggctgcgtcggctccgtcctccctccccggcgacgccccctgtgccgtcggcccgccgcggcgccgcctcccttccctagttccctgcaccacctccggcctccgtccaccgtccccagtgccgctcgagccgagctcgacgccccctgcgtcgccggcgtccctgactcgacgccgtccatcatgacctcgccgagacgccatgtcgacaaccgatcgacgacaattcatgca

SEQ ID NO: 431339 - DNA, 64 bp, Oryza sativa
gttgtttttttttttttcgcgttcccccttttttttttttttttttttttttttttttcttttc

SEQ ID NO: 431340 - DNA, 88 bp, Oryza sativa
gtttgtttttttttttttggtttttcccctttttttttttttttttttttttttttccggccggggcacccggaaccgaccggaccga

SEQ ID NO: 431341 - DNA, 66 bp, Oryza sativa; identical to SEQ ID NO: 62033

SEQ ID NO: 431342 - DNA, 304 bp, Oryza sativa
gttgttttttttttatactaacaaaaaaatcatatcaaacaatttttacatggtgtataacgtgtaaacctcagggaaaaaatatatatcagccttacagctcaagtgacagattatactacctggatattgattctgaatgaaccattaagaaccagactctaaaggatattagaaggtatggtctttgccaaacatgctataacagcaggagggccgcatagggccagcagaatcaggggggcaatcatgcaggcgccaagacgccggtatgccccgaagtgcacagatggtgacccatagc

SEQ ID NO: 431343 - DNA, 380 bp, Oryza sativa
gctgtttcagagatgaaggcagctgtgaggagcaagaagagcaagggctctttctgccaccctcctctgctcctgctcatcgtggcaatccagttcttggtgatttactcaccaacccttgatcagtacatggtgatgctaaccacaggcaagcctggtttcccatcaatgttgattgatggtaggaggagcttcaaacaagtagatgagttcatcccggagcctcacctgcgatgcgacttcagagacaatagattccacctgtgcgagatggagggcgccatccgcattctcggcgcacgtcggaagtgttcctgggggcgccgagccttgcctccatcttcggcggaggcggcgggagtgaacgccatgggcgtgga

SEQ ID NO: 431344 - DNA, 193 bp, Oryza sativa
  unsure (1)..(193): unsure at all n locations
ttgtttgttttttttttttttttttttttttttttttttttttttttttttttttttttttttttttttttttttttttttttttttttttnaattaaaaaaaaaaaaaatttaaaaaaggaaaaaaggggaaaaaaaaaaaaaaaaatttaagggaaggaaaaaaaccagagaaatttaaaaagggtggaat

SEQ ID NO: 431345 - DNA, 329 bp, Oryza sativa
ttgtgttgaacagaacacataggctgccattgatatagtacacaaaataactgatacagactggagatgtgtcgactgtgctagggggacacatgtagtggggatattacaaggaatagtgttatgaaggtataaggggctatataacaaaacaggctgggatttagaaagcctggagagtcacttgggatacaggaggatgacaggttgtagccgatgcatattgccttcacaagacatctgccgttgcttccaggcgatctgtcttggaaaagtggaatatgcaaattggtccaatcttgatttgtgctgccttttcatcgagcaag

SEQ ID NO: 431346 - DNA, 390 bp, Oryza sativa
gccgagctgacgatgtcggaccaccggccggtggtggcgacgtacgcggcggaggtggaggtgttcagcagcaggaagctgcagagggcgctgacgctcacggacgccgaggtggaggccggcaccgtcagactacgtgccggaccaccttgccggtattgagggccagagaggatcggttactgcaaggataaacttgacactgtagcgctctcatgtgtaaacactgtaatcgtgtaatcgcccatggccgagacggattctcttctttctcaagctcacaatccactggtgcatttgccattttgcttcatactgagtgaacccggagaaactttcgtgttataccactcgaactaattttttggtaccagtattgttttcaatcct

SEQ ID NO: 431347 - DNA, 166 bp, Oryza sativa
gttgttttttttttttttgttgtttcttcctttttttttttttttttgttttttttctttttttttttttttttttcggggcgcacccaggggctccttctttttttcccccccccacaaaaaccacacgaaaaagaagccaaaacaacagggacaacaaaaggaa

SEQ ID NO: 431348 - DNA, 304 bp, Oryza sativa
actgctcccccctcccatactgttccactctctgctctcctcttcgcggcggccgcggacgcggcggcggagtgacgaggaggagcaatggcgatggtcttctgcgcctactccccatctgtcggcgttgtcacccactccgcgccgggcaggatcaggccgcctcgcggactcggattcctcaccaccaccaccaagtttaggcccctcgtgctcaccaagcgttggggatggcagggaaacatttccgcggctcggctgaggacgcgctgctgtctcatgtttcgcggcggcgaggcctatg

SEQ ID NO: 431349 - DNA, 55 bp, Oryza sativa
  unsure (1)..(55): unsure at all n locations
aagggggaatgcttggaaagggaatnggttttaaatttggtgaacgggggagggg

SEQ ID NO: 431350 - DNA, 394 bp, Oryza sativa
ggagcaaagctaccagaaaggcagaaagttggcagtagcagctcacagtaacaacacacaattcaactttcactctagagacagcactacagcaggcaactcctccagtattctaaattagcagttagcacttcgatagtaatcgccaatctcaaagagctgtctaatgtacatgactcgcatacaagcttttggtcagtggccatcccatgattgggatttgtgaacacatgaatgcagctagccgcacaaactcgcgagctgctgttggatacaatgtacaaactctttggttattaacagtaactaggtggagacggcggtgaacgattcctgaatcgataagcgaaacctagttagttctgcccattttcttcctccagtacaacgttgc

SEQ ID NO: 431351 - DNA, 313 bp, Oryza sativa
tcggtggtggcgtgcgggcgggcgggcgccgctcgcgtgcccgtgacgctgcttcccagcgccgctgcctccgccttccacgccgcgtgggcgcgaaggcggggcttgggagttggaggaggaaggatagggggcacggcacgggtggcagtagtgcaaggcaagcaggtccccgtgtataattcgggcggcggcggcggaggattggatcggggaatcggcgacgcgggccagaggaggaggaggatgggggcaagcatgcgggctgaggcgcagacgctactgctgcagggggaccagggtggacgccgag

SEQ ID NO: 431352 - DNA, 178 bp, Oryza sativa
ggaaacaaaccccaatcttttttatatccacaggagaaaaaaataccagaatcaaacaaactacgaacaagagcccccatctcctatatgagttttttttgggcccaacaaaaagtttttgggggtatgggaccctggggggacaaaatcatttccgatcgggggatctaacgatgcc

SEQ ID NO: 431353 - DNA, 297 bp, Oryza sativa
gtcgtcttcggctcgctttctccaccgtctccggcgacgagcggaagcaaccttctccggcgagcggaggcaaccctggggggctaggcgagcagcaggatgcaggtgaagcagaaggtgtacgagctctacaaggggacggtggagcgggtcacggggccgcgcaccgtgtcggcgttcctcgagaagggcgtcctctccgtccccgagttcatcctcgccggcgacaacctcgtctccaagtgccccacctggtcctgggaggcgggcgatccgagcaagaggaagccgtatctc

SEQ ID NO: 431354 - DNA, 159 bp, Oryza sativa
ttgttttttttttttttttttttttttctttcttttttttttttttttttttttttttttacatattatttttttataaaacaaccaaaaaaaaaaaaaaaaaaaaaaaaaaaaaaaaaaaaaaaaaaggaaaaaaagtaaaaagtaaaggaaataaaa

SEQ ID NO: 431355 - DNA, 119 bp, Oryza sativa
ttggttgttttttttttttttttttttttttttttttttttttttttttttttttttttttttttggaaaaaattaataaataaaaacaaacatacaggggaaacgtacaggggaggtg

SEQ ID NO: 431356 - DNA, 433 bp, Oryza sativa
tcgggaaaaggttcctcagtagtgtgtgttgtctgtgcgtgagctcccacctccttcccttccccctccccaccaaacccctctccgatccaagccttccttcccccctctctctctctctccctcgcatgccggcgcgctcgccgaggcggcggcgctgatgaccatgggcggcgtcacgtccaccatcgccgcgcgcttcgccttcttcccgcccacgccgccgtcctacaccgacgtcgccgacgccgccacgggccgcctcgacatccccgagatctcccgcccgcccgcgcgccgacggcggagggacggaggcggggacgcctcggcgtcgggcgccgcacccggcgaggacgaggactgcacggaggtggtgcgcctacgcacgcggcgcgggaacgagatcgatggggtgcacgtgcgccacgag

SEQ ID NO: 431357 - DNA, 416 bp, Oryza sativa
ttggtttttttttgcctgtaggaactagcatacactgatccaaacggaatcattctacagaacagaacaccaacatatcaaaaagggaaacaagaaaaaagctatccatcctgtgctgtccggctgtttggccttacacatgtcttctactacacctctgattaaacaaccaccattcacccccaacaacctgagtaccaacgctaaactaagaccgatacagcattttctttgagacgagggcacaatctactttacttattctcgcctaagctaccgattactcaggtttatttgtaaagttcctcaacaatctcagccttctttgggcagcggactagaagaacttttcgtagtcatcctgtgttggctgcccccagaaatccatgaaaccaatatcagtgagagacccatat

SEQ ID NO: 431358 - DNA, 336 bp, Oryza sativa
ccgggccgacccacccgtctggcttgatgcaagagactgacttatctctatgaacggcttctgacaaggatagcttgcttgagggtaactaaccactgttgacagattctaacaatagcttgattgtagaaactggaccttcattgacacattaccatgaggatagcatggttgaagaaaccaatctatggtgcttgacaacttctcacaagggcaacttgaaacaggagacgggcttatctcagacaatatcttctcatgagaataacttgaaattgcaatacaaggaaagttgaggcattgatatgttgacacaagatgtagacttgattgaat

SEQ ID NO: 431359 - DNA, 317 bp, Oryza sativa
gttgtttttttttttttttttttttttttttttttttttttttttttttttttttttttttttttttttttttttttttttttttttttaatttatatttaaatataaaaaaaaaaaaaaaaaaaaaaaaaaaaaaaaaaaaaaaaaaaaaaaaaaaaaaaaaaaaaaaaaaaaaaaaaaaaaaaaaaaaataaggaaaaaaaaaaaaaaaaaaaaaaaaaaaaaagggccaaaggaaagaaaaaaaaaaagggggggggggaaaaaaaaaaaaaaaaaaaaagggggggggggcaaaaaaaaaaaacaagggaggg

SEQ ID NO: 431360 - DNA, 410 bp, Oryza sativa
aattgtttgcaaattgtactagcatagctaaagcctgaaagactaaatgctcatatgcaattttgtggaattaatgtaaaggaacactactgttttaggacacccttctcacttatgttttgttcagactagtttggtcttggtctggttaatactgagaatacataaatgtatttttacatgttaatctaatcaacacgaagcacccttttttcgtctaacttttggctagtaaatctagggctgtcaactgcatacttgattagttctgttcatgatttttgtagtctgtacgattggggcaccatgtcgtgtgcctaggttctggttgtagattattcccctacgatctcattcttggctccagctctgtcttccatccttatctcttggtcccaatctcccgtgac

SEQ ID NO: 431361 - DNA, 72 bp, Oryza sativa
  unsure (1)..(72): unsure at all n locations
tttgttgttttttaaaaatcgccgttccaccccccncctaaaaactacaacccacaacaaacataaccacaa

SEQ ID NO: 431362 - DNA, 213 bp, Oryza sativa
accgcatgagcaatggtgctatcatcggcgcttccaccgtgctggtggtggagggggaggaagccgtgagcgtggagtctatcaagaacagtggcggtggaaaggaggatgtccagttgtgcacgtcggagaatacgcttaaggacatctgtcagacaacctactaccattgaagcggctatgacgaggcatggaaacgaaccctaaattgca

SEQ ID NO: 431363 - DNA, 213 bp, Oryza sativa
agccatacctttttttactaattagaatgtggcaggcgaatacatttacatgcaccttgcgatataaaggcaaactaactatagtaaacatgccgcaagaccgaggacacgtacaagtattggcgcgataacgactataaggacatagaccaagaaaattaaacagagcagagagccacgacgagcggggggcggagagagagatggggagag

SEQ ID NO: 431364 - DNA, 373 bp, Oryza sativa
gcgttggatctctccggctaccggtgacgtccaatcacccaagaagaggttggtagagagtggggagaaggagaagctgatggagctcctccgggagcggctcgtcgagtgcggctggagggacgagatgaaagctctctgcaggttcggttccttgtcccaccaaattcttgtatcgtttgtgatgagtatctgcttggtgatcctgaattccggcaacgattccgtgcctaagcctatgtgaacaatgatctctgtcttctgtctcctagcgcgtatagctaccagtttgcttaatgtacaaagcacaagcgtttgtacggctttaacatgaatgaatgaatgaacgaataattagcttcaacatattggt

SEQ ID NO: 431365 - DNA, 343 bp, Oryza sativa
tcgcttttaaatggagatgatggcattgctcatgtgaagagacatcttgttgaaaatgcatcacagaacattgtgactctggagctgaaattatcacgaggatggggaggagaaaatgcttatcatgttggtggatatcgctacttacttgttgatccagatagaaaagtatcaagagcctccccacctgggaaagtcaccaccctctcaaaggattctctactttccttgaatagactaagagaagaaatagatttggagaagtcaagggccaagaggtctgactcttgtcatgacaaggattttgaagtatgcatcagagccaaaaataatgcatgggtca

SEQ ID NO: 431366 - DNA, 207 bp, Oryza sativa
atgggaaacagcatatataattgatggggggggatccacaacagttaacatcctgatgaggatcagagtcaaacacatcaacagccacaggccatgaaactatttcatgcattacataataactccttagctaccaaaatactacccagaaacttcacacttgctcctagtactaagcataacacgatagaatccccttcatgtctc

SEQ ID NO: 431367 - DNA, 180 bp, Oryza sativa
ggagcaaggattttggatttttttggaattcttaaagaattataataaaaggcattttccttcgtccattttattttgggtacttagaacactggcacgcccgcacattttatttccctggggggggagattttagttaaaattttttcaaaacacatttattttgggcctgagatcttc

SEQ ID NO: 431368 - DNA, 429 bp, Oryza sativa
attattttggtgattggaaaatactggatgatgtagcgttttgttggattttctgacaaccatatatgcaaatccttatcttttcatgttattgaactttatccttatcttttcatattgaactttactggaactccagcatggaggaaatcgatctagcgtacagggaagctgcaaatggtgtctcatccacaagacctgttatagaaatgacgattccttctgtgttggataagaccatctccccacctggtatgccaatttcttgttcccagcattgcagttgcataccacgtgtggcgtctgatttgtataaactataattgcgccctacaggtcatatattcaagattaattttccccaccccccaaaaaatccaagtttaaatttggatatgtggctgggaaacctcaccttcttcgtatgct

SEQ ID NO: 431369 - DNA, 154 bp, Oryza sativa
  unsure (1)..(154): unsure at all n locations
ataaaaaatataaaataaagaaatgtagaagggaagagaaagaaacaaaaatttatacagaagttacaaactgaaaaagttaatagagcagggtaaagggtacaatggaagacaaccaaaaaacacaaaccaggaaggctnttgacccaagggg

SEQ ID NO: 431370 - DNA, 427 bp, Oryza sativa
aacaaagagattgaatatacattatatacattttggatccagtcccaaaacaatcgagatccatgcatatgcatgttccatgatcgagctactaatttagttaatcaaccgcggcgactgcagttggaatgtgtgagatgcatatatatatatatatataacaacaagtatatgtatatgaaaataaataatgggggccggcaattgatgcaggtgagtgagagatcgaagatccatatatagtgtgtagtacgtaggtccgggctgggggctggggcgatgatggttatagtacaggagtgaaaaattagtgcatcctgccctgctgcgtctgggggagaaggccggggatgtaagggacgccgaacttggggatgaactcctggccctggatgaagcctcacgggaatctttgacgtctgtagtg

SEQ ID NO: 431371 - DNA, 255 bp, Oryza sativa
gccttcgccactgccacgaacagttcgctcaccgcctcaccggatcgccgccgccgaccaacgcgcagcgcgggcgccgcgtccccgaacaatggcgctcatagcgccgagcccccgggtgctgcgcgcgcgcgaggcgcccgccgcaggcgccctgcagccacccgcggctgcatgctcgaccgtcgctggcggtggcggggcggcggggaggccgctcgggatgtggagcggtggcgggggcgggggcggggg

SEQ ID NO: 431372 - DNA, 119 bp, Oryza sativa
ttttttaggttgtatatgattcggttcgtatttctgttattgtggacaagattcaggatagaaacttatattcgtagtgtactattttgtgaaatatgttctttgcacattagcccgat

SEQ ID NO: 431373 - DNA, 97 bp, Oryza sativa
caaaaaaccgaaaaatttaaacaattccttcagaggccaaaaaaaaaaccccaaaaaaaaaaaaaaacaaaaaaacacaaaacctttccaaaccccg

SEQ ID NO: 431374 - DNA, 375 bp, Oryza sativa
tttgtgtttgggctgtgtgtatgatttgatatatggattcctcactcagactggggtttaaccacaaattttagatgagaaccactttacaaattatatgtacaatgcaagttaaccttaacctaagtgtatgatgctgaagaagcaatggcgttttcagatatccacaagactatttacatcaccccattctccatttatttcctaagctaaagtcgtcagattcttatgtatgaacaaggtcgtgtttctgatcttcttggtgagaaaatgagcaattttttttttcaggagtaggatctgatgagcctgaacccctggaacgagcccttgagcaggttgccaatgatggccgccgcgccttcgccgacgttg

SEQ ID NO: 431375 - DNA, 411 bp, Oryza sativa
ttgatccttttgtgcgccgccctttttttttttgttgttttttttttttttttgtttttttttttttttttttttttttttaaaaaaaaaagcgagagttttattcctttggggttaaacaagaacgccccacaagctcggttaaaacaacccaaaaaacagggcataaacctacaggattgaccccaaaaaaaaaaaccttgcgaagaaaaaaccgaacggggatcaaaaacccccagggggctcaactttgaccgaagaaatttataatgaaacaaagggcgaatcccccaaacaagggggggcccccagacttcaaagctgccacaaattaatccacaacaccggaaagggggtccgacaataaccatgaaaatcgaagagcaccaaagatttcccccattaacacaa

SEQ ID NO: 431376 - DNA, 293 bp, Oryza sativa
gtgttttttttttttatggggaatttttggggttttattaactgatgaaaccttacacgaaaaagtaacctctatctaacaaacattggatcgggtaatgcctcacaccgttttgataccacacacccgcatcaggctgatggacacaatgatggatatttgatttaacaaactctgtgataatgctccacagtcagagatcggttgattggccacagtgaaaaatcaacaccgcggagaggctagacctcatcctgtcctccctttcgcctcagcatccccccgccgtcacc

SEQ ID NO: 431377 - DNA, 159 bp, Oryza sativa
  unsure (1)..(159): unsure at all n locations
gctttcggttttttctggacctagcacgattactgactgaccggatcgccgacgacgaccaacgcgcactgcgggcaccgngtgctcgaacaatggcgctcatagcgccgagcccccgggtgctgcgcgcgcgcgaggcgaccgcctcaggcgcgctgt

SEQ ID NO: 431378 - DNA, 109 bp, Oryza sativa
ttggtttttttttttttttttttttttttttttttttttttttttttttttttttttttttttttggaaggattttaaaaggggtattttgggggggaaaaggggaaaa

SEQ ID NO: 431379 - DNA, 140 bp, Oryza sativa
ggggggttttttaattttttggggtttttttttttttttttttttttttttttttttttttttttttttttttttttttttttttatttttattttttttttttatttatttttttttaaaaaaagaaaaaaggtaaaaa

SEQ ID NO: 431380 - DNA, 295 bp, Oryza sativa
ttcgtttactcggaagccaccaaaccctagccgggagccctgaccttgcgaggaaggggaagaggagagatcgacatcggggagactcatccatggcgcttcgagccctgaacagagagatccagggtatgaaggcgcgagaggtgccggagtaccttgagccgtttctgacttgtgggaacgtggagaagagcacagaccattgctacctccgatacatcgacaaggtcatggtgaccagcttgcccgagccgatattacacgtcatgtacggactcatggtacttttactacc

SEQ ID NO: 431381 - DNA, 332 bp, Oryza sativa
gttgtttttttttttttttttttttttttttatcagaaccataccgatatacacatataacctaccaaataggcacatgaagcatttaatatagtaaactaccaaattccatccagtcatgtcttgtacataagtgtacatgaatacggtattggccctaggcccgcaacttttcaacaggggccagatgaaggacggcacggttcaagccgacgttttaccttgctgaatatgtcaatggtcgagcagactgacctaagtctggctctcttgcccaccgcacagttaccttctcttacccgggagaagggcggttagctgcccaatggaag

SEQ ID NO: 431382 - DNA, 264 bp, Oryza sativa
tttgtttttttttttttttttttttttttttttttttttttttttttttttttttttttttttttttttttttttttttttttttttttttaaaaaaaaaaaaattttttttaaaaaccccatttaaacttaaaaaaagccccaaatggcaaaaccccaaacgaaaaattttataaacccttaaaaacccaattgggggggaaaaaaggggcccccttaaaaaagggtttttttttaaaaaaaaggtttttaatgggttttttt

SEQ ID NO: 431383 - DNA, 292 bp, Oryza sativa
tttgttttttttttttttttttttttttttttttttttttttttttttttttttttttttttttttttttttttttttttttttttaaaaaaaattgtcttttttttgcgcctgtgctttgcatttaaaaaaacatcaaatttcgtgtttggaggttttcaggcccttttgtaacattttcccgatcaaaactaacctttttttaattttttgttgaagttttgccaattgttaaactataaccttttttttttccctttgtccccaagttttttcttttttcccttttcca

SEQ ID NO: 431384 - DNA, 201 bp, Oryza sativa
acgcgcgcgtttttaggttatcgccaacattcagactggagggagctgctcgtggagccgccatggactggtggagggccgggccaccgtgaggatgcttgattcacacattgattctacctttcttgcgcttgacggcgacgctcatggccaatgggtcactgtccccaagaagaacattggcctttgtgacgcccacat

SEQ ID NO: 431385 - DNA, 299 bp, Oryza sativa
gtgtttttttttggatgggagccaaaaatgagccattacacctcatttggtcaggcaggagggtaaaaaacatcgttgatgcagcggcaaaagatacaccgggcaggcaatcatgagtggagagcatacaaaaaacacgaggcagtaagtgacccagggcaactagagggatacattcgaatccagaagtgcctgtgatacgataagcttggtcaagagcactgcaggatggtattgctcagcttgtacgcgtgtgacaccaagaccagaatgcgtatccttgggtgtctagaacgaca

SEQ ID NO: 431386 - DNA, 482 bp, Oryza sativa
  unsure (1)..(482): unsure at all n locations
tttgttttaacattgaaaatcatttcatgtgcaataaactacagtgacggtatgttgaaggaagagggtttgcgtgatgcccagaaaaagtatcgtttggctaaacttccttctttgatcgaatattttggttactgcctctgctgtggcagccattttgctgggccagtatatgagatgaaagattatcttgaatatactgaacggaaaggattatgggccagcccaactccttcaccactattgcctactttgcgtgctctagttcaagctggcgcatgtatggggttatatttgtatctatcacctcaatttccactttcacggtttagcgagcccttatattatgagtgnggttttctggcaccggctcttctatcagtacatgtcaggctttactgctcgttggaaatactactttatatggtcactttcagaagctgcaatcattatatctggtctgggttttagcggctggtctg

SEQ ID NO: 431387 - DNA, 230 bp, Oryza sativa
gccactcacttcatgtggggtgggacttcatttacagtatggtgaattaataccctttgcgttatgcccagaaaaagaatagttcggctaaactttctttctttgatcgaatattttggaaactggctctaatgaggcagccattttgttgggcccgcctctgaaatgaatgattatcttcgaatatcctgttcggaaaggattatggctcaaaccaacttcttcaccac

SEQ ID NO: 431388 - DNA, 101 bp, Oryza sativa
  unsure (1)..(101): unsure at all n locations
ggtntgttttttttttttttgttgttttttctttttttttttttttttttttttttttttttttttttttttttttttttttttttttttttcaatatctc

SEQ ID NO: 431389 - DNA, 317 bp, Oryza sativa
  unsure (1)..(317): unsure at all n locations
ggttgataggatcaaaacagttgtattaccacagctttttattggatggaagactgccaaatttcgcaaagactgaacctaacatagacaatcatggaacatgatgcaatgcactcagaaatataaatcaatgagtgcggtctctgtaaatgatattntcctatacttgatggctttatcacagcaatgacgggctgcgctgggattaagataacattatgacgcagctggcttaggtgtactctcaatcattcacagcagatagcttaagacagtcaggtcttgaatcttgaactctgaatatgcagagtatctgt

SEQ ID NO: 431390 - DNA, 245 bp, Oryza sativa
ggtttggttgctgggcggtgaacgcacagtcaactgtgagactcatcagaagacgaccgtggtgagagaagatcgaaacacacagtctattctcacgatgattgccatgatacacacgacactgctagcagagtcggaatgcacaactcttattcaaaggacggcatgcacagcgtagacactataaatggcgtatgcgactgcatagggtcctaagaagtatctggctgaaatcgatgatgatt

SEQ ID NO: 431391 - DNA, 166 bp, Oryza sativa
tttgttgttttttttttttttgtttgttttttttttttttttttttttttttttttttttttttggaattctacaaccacaccatgaattttagggaacatatgttcgggaacatggtagggggaaaaataaaaaaaaaaaaaaaaactaatcaataataattaaa

SEQ ID NO: 431392 - DNA, 81 bp, Oryza sativa
gcagttcaaaaaaaagctgaagagaaaaaacaaatggggggagaatattaaaaaaaaaaatgggggggaaaaacaaaatat

SEQ ID NO: 431393 - DNA, 122 bp, Oryza sativa
cctttaatggcgcctttttttgtgttttttttgtgttttttttttttttataaaaaaaaatgtaaagaaaaaaacttagaaaaaaaaaaaaaaaggaaaatttttaaaaaaaaggagaaaat

SEQ ID NO: 431394 - DNA, 411 bp, Oryza sativa
ttgttttttttttttttttttttttttgttttttttttttttatttttgtttaactgaatttttttctttggatcaaaacaatgacaacttattatcactaccaaaactgaggggaaaaaagaagacgcaatgacaaaacctaccctttggaggagttaaaactacgaagtttgggggaaaaactgaatggcttccgctcggggggaaaaaaaaaactggggtaaactaccaagtttgcatgcaaactaaaatccctctttatgaagaaaacgatgaacaaaagggctgcaaaaatcaaaccggacttgggccgggggggatcggccgggatccggcgggacgatcaaaagcgtcgctgccggattcgaccgggatgcacttcaagaaggcgccgatgaccaagcggaccg

SEQ ID NO: 431395 - DNA, 440 bp, Oryza sativa
gtttttttttttttttttgttgttttttttttttttttttttttttttttttttttttttttttttttttttttttttttttttcccaagaaaacccacaggaaaaaaacaaaaagggggattgggccccaggccgggaaaggtaacatgggggcggcccaaaccaaaaaaaaagggggggggcttttttggaaaacccgggggcccggaaaaaaaaaaaaaacgggcccaaaaaaaaaactggggccttttttggaagcccttgaacggccccgaaaaggggaaaaccctgccttcggaccccccccaagggtaatcccccccccccgaaaataaggggccgggggggacccaccataagccccccccccgggaaaacgagaaaacccgggaaaaggggttaaaaagaacccaaaaaaagggggccagaaggcccaccg

SEQ ID NO: 431396 - DNA, 243 bp, Oryza sativa
atgacgcgacgtaagctgatccttaatggcgcgcgcagggggggccaaggaggagcgcggcgggccggcgggtgggcggggggggcccgcaggcgagggggaaccaaggagggggcagtgcggcaccggggggaggaggaaggaggcagccagcggcagcgaggcggctgcaaggggaggggcaggccgcgcgcgcaggcgagcaggagcaccgggggcagggcgggggtaaggggggaggcg

SEQ ID NO: 431397 - DNA, 425 bp, Oryza sativa
cgtctttgaacctaccgtcttgtgtgttgttgtttggatcggttcgtcgtgtatatatgggtgtgtcacggccatgaacggctgagatcgcacacacatagagacagacaatgtactctcagaaacgcacccattacacgatgaaaaccaatcaaacacgaaaaaaaaaagcacaaaagaccgacaaacaacgcctgcgacgacggaggcatgtgggggccagagaggggcaccgcgtcactgacgctgggccccaccgccctcgatgacaaactcttttatttagccccacgtcacgcgtacccacacacacctacggagtcgagtactaccacttcagctcactcaactcatcactcgctacacgcacacgtacgtacaactccggcgagtccccggcggcggcggctcgcgcgggccatgca

SEQ ID NO: 431398 - DNA, 149 bp, Oryza sativa
ttggttgttttttttttttttgttgttttttttttttttttttttttttttttttttttttttttttttttttttttttgaaacaaaaaaaacccaggaaaaaagggaaggccagagaagaactgggttgggcgaaaaacaaaacgggg

SEQ ID NO: 431399 - DNA, 175 bp, Oryza sativa
tggtaaatcaacagtaaattaagcatcaacgggagcggccgtattaatcttatggcgactgataccaacccaccacccaaacactccaacccatatatcacatattcaatagaaccaccatttcaagactccactacagcaagagctaacaaccaccagatcaagaccatgaacg

SEQ ID NO: 431400 - DNA, 208 bp, Oryza sativa
gttgagcggtcaaggctgcgtcgtcgtcgtcgtcgtcgtcacctgcagcggaggaggaggaggaggagagaaggttcataggaggaggaggttgcgatgcactatatagctgcatcttatctcatctctccctgcctgtctgggggcccattctattgataggtactttctggtctctatcgttatcgtcttctatcaccacgtttct

SEQ ID NO: 431401 - DNA, 240 bp, Oryza sativa
gacccggaaggaaaaaaaaaaaaaaaaaaaaaaaaaaaaaaaaaaaaaaaaaaaaaaaaaaaaaaaaaaaaaaaaaaaaaaaaaaaaaaaaaaaaaaaaaaaaaaaaaaaaaaaaaaaaaaaaaaaaaaaaaaaaaaaaaacaaaaaaaaaaaaaaaaaaaaaaaaaaccaaaaaaaaaaaaaaaaaaaaaaaaaaaaaaaaaaaaaaaaaaacaaaaaacccgaaggccccaccggcac

SEQ ID NO: 431402 - DNA, 369 bp, Oryza sativa
ttgcagctgcagacgtcgccgttgcggacgccgaggtggtagcagaggcagatggtcttctgctgctggtggtgatggtggcgcgacgcggtcgtggacgacgcggcggccggcgtcttgggcggcgagctcggcaggctcatggacaggtcgaggtcgaggtcgaggttgaggtcggggcaccgcggcgcgtccgagctgccgccgctgctgctgtggccgtcctccgacggcggggacgccgcggacctggcgaagctcgcattgctcggcgccgcggcgtgcaccgggttgtgtagcctgtgctgctgcggcggcggcgccggcgcaagggacggaaaggcggcggtgctggccgtcgtggtcagc

SEQ ID NO: 431403 - DNA, 197 bp, Oryza sativa
ctattccactgtatataaattagctagtaaggtataacagggcagtttgaccaaaggaggactatttttcagcgatgtatttacacaagaaagttactatgcgctgcagaaaccaaggaatctgtagttaatgccaattttgacccattaagtgacccacaagataaaatgttggggtacattttagaatggatctc

SEQ ID NO: 431404 - DNA, 301 bp, Oryza sativa
  unsure (1)..(301): unsure at all n locations
gcttgttaactaagcttaccacactcacatactcctatatattttggcacgcattgattacctgctagctccttgagcaatatcaatatggctcagccgacttggtcagcaaggcgcgtcactgccgccctggtcgtgatggtggtggtggtggtggnnttcctcgaacccggctggtcgcggacgcagatgtcgccgagctcaagatcatcatcgagcccgggagtgttaaactccgcgaattcgggtacgcgaccttctatagccagcaggccatgcgcgacgccatccatgggatgaa

SEQ ID NO: 431405 - DNA, 237 bp, Oryza sativa
tttgttttttttttttttttgtttttttttttttttttttttttcccactccatctcgagcttattgttattatcaaataaaagaggagggggatgtaacaaccaaagaaccgaattaaatctaacgactgacatgatctaaataaaaggaaggaagctgaatctgctgatgctgctaggtgggcaggtgctgagatggaggatggatatggcccatcaaatcaaattcgaattggg

SEQ ID NO: 431406 - DNA, 459 bp, Oryza sativa
aaggagaacgaatatgaccttaaactacttccccaaagtaattccgattatcaaccaaccatccatatgaaagtcattggagtgacaagagaactcacagaggggggcaaatgttgacataataaagggctaagttagttctataataacaaaatggctcccacagattatgtcctctcctcgcgtaacactcactcctccaagcaaaatagttaggaagctaagcgtttgcgcccagctcaaccctcccaggatgggcgtggccacctccctgcgaacctccaccttgattgttggaataagagttgccaccaccagagcgaccacccctgcctctggtgctgtaccccctctgctggtagtaaccaggctcattatagtagtacccaccaccctaacccccaccacggtcattctggtagccaccgccgccgccaccaccacgaccattctggtacc

SEQ ID NO: 431407 - DNA, 269 bp, Oryza sativa
gtgtttttttttttgtgttctttttttttttttttttttggagaaagagtcttgggatgaatgcaccaagggtgaaaggatttccaaaaatttaaacttacaaacagcttaaaactaactggatagtccggtaccactgcaaacaatctgactatagagcagcctggatatgtccgagctggtatcaataacaatcccaatcataagccatccgcacagggaaaacactatatagtgaccctggaaaacacgaaactagaaatgaaaaa

SEQ ID NO: 431408 - DNA, 526 bp, Oryza sativa
cagagaaatacgtacatattttcattacttgatcagaaccaagtcatgaagggagtaacacaaacctcaagccaagaatcagtaactttaaacaggtactctgatactattcacaacatcaaagaggttaccaacttggttgttgttgaggtgtggattaaatcaccctgaggaacataaaaagcttgtgcacatggtgctaatctgccaataatccagatttaaattaacaaagcggttcattttaaattaaggtgcacactgaaaacaaaatgaacatgttaccattctaaaagcaaacctcatagcaccagtaacacttcctcaatcgtcattgcaagacatgattactaattcaccttatctaaagcttttccataatcttcagtacacatccaataccaggtttcaatacaataatcatctacggagtactaactagcccaatttgcacaattaattcatgtagtatataaatacaataaatcatttaactatgtatttttcggttatattttttaaaaac

SEQ ID NO: 431409 - DNA, 393 bp, Oryza sativa
gttttggagacaaggaggaaacagaacaatcaactgtcagagtcatcagaagatgagcgtgatggtagaagaacgaaacacacggttgattctcctgatgattcccaacagaaacagcacactcctagtagagttggaatgcacaactcttattcaaaggatggcatgaacagtgaggatgcaataaagggtttacgtgacggtatggcttctaagaagtatcctgctaaaatcgatgatgattctgagtcagaagatggaagtccttttcgaaaagataagagaaaagcacacggtaataacaacattgattctggcagttcacgttcagaagaatcaggggaacatagattccattttgagaaagcgaaagcataaaaagagcccgtagca

SEQ ID NO: 431410 - DNA, 95 bp, Oryza sativa
ttggtgggttttttttttgggggggtcctcctttttttttttcttatttccccaccccttttactcattccccccagaaagacggaccccaagga

SEQ ID NO: 431411 - DNA, 361 bp, Oryza sativa
gctttatctagcgattgatcgatcgatcggttgatgatgcagtagctgctactgttcttctgttcgatccataaaccactatctttttttttgtgttcttggaatcaagaattcaagatcaatggtggtcgatggcggcgccgccgtggcgtctcggccgagcacgtcgcgccgccgcgccgccgtcacggcgaagcccagggcagtcgtcgcctcgcgctacctcctcccgtcctccaggcccgcttcgccggcggcggcgacacggccggctgccacgaggcggccggcgacgatggcggctgacgccgtggcgagagccgggtcggtcgtgtttcaggacgcgagctactgcttggat

SEQ ID NO: 431412 - DNA, 101 bp, Oryza sativa
  unsure (1)..(101): unsure at all n locations
tttgttgtttttttttttttgttgttcgcctttttttaaattaaacaatcaaacaaacaatataataccttacaatataatgttttctactganttactta

SEQ ID NO: 431413 - DNA, 315 bp, Oryza sativa
gggcttaaaaaaattttttaaaaaggcttttttagcccccaaaattttaaatttttaaattaaaaaggggggggcaaatccaaaaagccccatttttgggaaaaaccttagggggggacccgttaaaaaaaggtttccctttaaaaaattaaaaaccccaaaaagggggcccctatccaaaaaaaagggtttaaagctttttaaaaaagggggaccgggggggcccaaaaaaatgggaaaaacaaagggaaaagggtttcacaggagggttttaaaaaaccaggggctttaaagtcccaaggggtacaccaaagg

SEQ ID NO: 431414 - DNA, 359 bp, Oryza sativa
  unsure (1)..(359): unsure at all n locations
gtttatcgccaacaagcccaaacccggagagagccggaggagatccgtcgtctcccgcatcctcaccggccgccggcgatggagaagggcaagggcctcgcccgccgctgggcggtggagctccacgacgcctnctcctcctcctcctcccactcctccatccccgacccgcccggcttcaccagatccgcccccgacgcggacgacgccgccggcgcgcggcagcggaagaattccgagaccgcgtggaaagcgcaaaaagcgtgggaggtggcgcaagcgccgtttaagaacctgatgatgatgggtttcatgatgtggatggccgggagcaccgtccacctgtttagcataagtat

SEQ ID NO: 431415 - DNA, 300 bp, Oryza sativa
agacccttcaaggaaaagttaccgggccaaaatttggaaaaaaaagggtaaaaaacccccattgttaacccaaaacccaaaattttaggaacaaaaatttgaagcccctacaacggttttatatgaaccccaaaccaccggcaggtagcaaaatgggcaaaagcccaaaaaaccccaaaataaaaaggggaaaggttaaaattgccccccagaattaaaccggatcggggcaaatgggcccaaagagggttccggtttaacacccaaaaatttggccccgtccaaaggggaattttttcc

SEQ ID NO: 431416 - DNA, 78 bp, Oryza sativa
tttgttgtttttttttttttgtgttttttccattggggatcggaaatcttatgacggcaattatcagggattgcatgc

SEQ ID NO: 431417 - DNA, 72 bp, Oryza sativa
tttttttttttttttttttttttttttttttttttttttttttttttttttttttttttttttttttttttt

SEQ ID NO: 431418 - DNA, 151 bp, Oryza sativa
ttttggtttttttattttttttttgtttttttttttttttttttttttttttttttttttttttttttttttttttttttttttttttttgggacaagaaaaaaaaaaaaatattgattcctttttaaaaacaccaaaagagggccggggg

SEQ ID NO: 431419 - DNA, 198 bp, Oryza sativa
tgttatgtccgacagcctgatgctcgcatagtaagggagctatatcgatcttttgcgcattctaaccggcctgcggccatggataagggcatgctataccaaattccatgcattggaaggattcacgaatacccattctacttcttctgccactttcaggggtaaacgcgcgtgagaatttaccagatccgccccccc

SEQ ID NO: 431420 - DNA, 91 bp, Oryza sativa
gggtggttttttttttttgggggggtcttcctcttttgttgttttggtagtttttttggcgcgggtctttcccccgcccgtcccccccctc

SEQ ID NO: 431421 - DNA, 66 bp, Oryza sativa
gttggtttttttttttttggtggttcttcttttttttttttttttttttttttttttactttatac

SEQ ID NO: 431422 - DNA, 271 bp, Oryza sativa
ggtgttttttttggggggaaacctcttacttttatgttgagagagttcagcatatacctatccagactgcagttacagtaaaacaataccttgaaaactcgactccaacttatatgtgacatactatagattgctgaaccaaactgatttattatgtgggctaccatcaatgttgttgaatccaatatcgcgtttggcatcacctatcggacccagtttgccaagttgcatttaccagccagttggaatttgaccaccagtcggcatagat

SEQ ID NO: 431423 - DNA, 175 bp, Oryza sativa
tttgttgttttttttttttttgttgttttttttttttttttttttttttttacatttcatttttaatttttatttaacatttatttattgaacaaacaagttaaaacaccaaaatcaaaaaaaactgaaggggggcccaaacaaagcaaaaacacacaggggccaaaccatttac

SEQ ID NO: 431424 - DNA, 320 bp, Oryza sativa
ggtttgtttatttcagattacgtaggaaatatactttcattatactaatagttataccgccttttctcgataattaatagacacattgcttagtaatattttttttgtaaaaatctagaaagtgagaacaagcgcgaatttttgcaatagaaattttagtacaaggagagattctcttctgcttgttttatttggccttacaggttagtgtggatgtattggcatatcaggcaaggatggcttatctgagagccgcaaggatgggggaatttgtgctgacttatgaagacaagggtggagactggatgcttgttggcgat

SEQ ID NO: 431425 - DNA, 275 bp, Oryza sativa
ctttttccccctttcgccttccccctctttcctgattccccacctcctccctcgccgccgccgccgccgctgactcccaccgtgaccgcctcccccgccggcgcggtttcggaggaggcccggcgcctgcaggaggaggagggagggagggaaggaggtcctggcccgtcttcgtcgtcgttgactcgtgcgggtcccgacgccggccgtgctgcgcagtgctcgaccacgccgagcgcgccgtgggggggcatggcggtgaggtgggagggaag

SEQ ID NO: 431426 - DNA, 296 bp, Oryza sativa
tttgttgtttttttttttttggctctactgcatgaaatatatatttacagtgattatctttactgaattagatagagaagtgcgaaaaccatacatgttaggaatgtaactgactcataaaatatgcattacaagatccaatagacgtgcatggataataaaattagctttgtgcattaagctggaacttggcttcaacaatgacagtcgggatcatgattgaaatagaattgactcacatacagcattatataatgcattccgggaactatttacaggctataaggttgtctttt

SEQ ID NO: 431427 - DNA, 139 bp, Oryza sativa
gtttgttttttttttttttgtttttttttttgttttttttttttttgagtaaaaaagggagatatattactgaaacacactacaaagacagcgaggtgaaactaaagcatatcaatggattgacctaacactcccctaa

SEQ ID NO: 431428 - DNA, 75 bp, Oryza sativa
gttggtttttttttttttggttttttttttttttttttttttttttttatttttttgttcttagttgaggaaaaa

SEQ ID NO: 431429 - DNA, 236 bp, Oryza sativa
gtctattttcaacaagcccaaacccggagagagcgggaggagatccgtacgatgcggcatgctcaccgagcgccggcgatggagaatagcaagggccttgcccgccgctgggcggtggagcttcacgacgccttctactgcttcttctcccactcctgcatccccgacccggccggcttcaccagatccgaccccgacgcggacgacgcccccggcgcgcggtaatggaagaattt

SEQ ID NO: 431430 - DNA, 439 bp, Oryza sativa
  unsure (1)..(439): unsure at all n locations
acnatcacatgagtaagtctaactaganntggcctatattgtctggcgttacatcacacacaagtttaataacagataacttgatctaacattacatcacagtttgtcagattcccatggaggcataagcagcagtagaccaggtgtaagcttctttggcttgaactttgctgattcttgagttgaaacattgacaaaagcttgcccagaagtgaccttaattgttgcacttgtagaaccctgagaatgggcatgcaattccactagtgccttttgctttgaagacactgttttccttgactgacttgcagaattggtgttagcagctgtacgtgactttcttttcctgctttgtttagagctttgttgtgtgtttgagagcactaaattatcnagctggatttacaancttggagagggaatctggtngctgctagag

SEQ ID NO: 431431 - DNA, 242 bp, Oryza sativa
  unsure (1)..(242): unsure at all n locations
cctttgtttgcgacgctggcgaaggccggcggtcgggaggcggcggctgaagaggaggtcgtgttgtggacggaggacccgaggaggttcgagacgcccgacggcgaggcctacctacagtaccgtcttctcgccgncgcccagccgggcttctacttcttcagaaacggaaagcgcggcgagcgtgcgaccacgccggcagacgggatggagatggctcacacgtacatgccggggagcaa

SEQ ID NO: 431432 - DNA, 276 bp, Oryza sativa
  unsure (1)..(276): unsure at all n locations
nttgttttttttttttttgaacggaagaacacnatgacattatataatggtggcacagacttgttttatgtgaagagacacggactttaggtgtgtgttgcatatatacattacaagcgtttgagtaaaaaaaagaggactcacatatttacatgacacagtgaagcgtggctgcaagttcgtatgctcgtcggaagcacacactaggaatttcactcaccagctgtttgatgtgcatctatgttatgcacacttcagtgatgtatcatctacatg

SEQ ID NO: 431433 - DNA, 451 bp, Oryza sativa
tttgtttaatgttattgtttttttaatttttgttttattttgttcaaagttttatatttaattttattgtttcatgacacttttagtgccaggaaaagcacagggtttaccacaaaaaggccaaacacgggaaggagcttaacaaaggcaaggtgacaacaatggaaaaaggcatttccaacccccaaaccaaacagggggggagaccaggtggttgggccccaaaagggggaaaaaatttaggcaaggaacctcaaaaggggcgaaaagtttttcccggaaaaaaaaaaagctttgggcccccaagggaccccctgaacaggttttccgggggggaattcgggggggccaaaaaaaactgtaaaggggcccaaaaaaatttccaaaaaagggggaaaccaggggggccttaaccaaagggcccccggaaaaaaaaaaaaaatgcccccct

SEQ ID NO: 431434 - DNA, 335 bp, Oryza sativa
ttgtttttttttttttttttttttttttctttttttttttttttttttttttttttttttttttttttttttttttttttttttttttttttttttttttaaaacaaaaaattggccccccaagggcccccaaaaaaaagggaaaaaaaggggggttacaacccaggggaaccgggggtaaaaaacccagggggggaagggttttaaaacccaaaaaaaggtccccccccttataaaaaacccgggaaaaaacaattttggggaaaaaaatcctggccccccacccaaagggcaaaggcctccaaatatggggggcccaaaattctaaacaaaaa

SEQ ID NO: 431435 - DNA, 318 bp, Oryza sativa
tctgttctaagccagcggttcagcgatcttgaagacagagctaaatcaagacgtgaatcccaagattaatggctaacagttttttttgttttgatttttttggccacgaatgctgaatgcatttgtaccttgtgtctggagcaaagtatattcatcgcatactggttttgtatcggtatttgagttagaggtgggtatcatttttgagtctatgataccactgccacccggagtgaataaaccagagtaaccatggtatgtaagaccgatttatctactcttctattggaaggcaatggtggactaattctgttgttt

SEQ ID NO: 431436 - DNA, 391 bp, Oryza sativa
ttggttttttttttttttttgttttttctcccctcttaaatagggtgctcccaattccataaatgtcatgttaggaatcgtacaaaagatttaatctaaattcgataaagatggatgagctcaggatgctccattattccaataacaaacagaagcaatagctgcgttcacttgaataaaactattgcggaggtggggaattaactcagctatcagtatcagtatgtactacttggaatgtgaaagccagtgttagaacaaaattgcagaaaccaattcgccccaagaaaatgcttcaggccttctttgtcaccaagcgacaaggtcgcaggtagttttatgctatgtacaccatcacaaacttgactcatgcttccacaagtccttgact

SEQ ID NO: 431437 - DNA, 146 bp, Oryza sativa
ggaatcgggtatactatccagtttaaaagataataaaaattgatcgcaacacatccagatactacgatggccattgctgtactcggcgcataagcaggacatattattccatacactgatatgatcataacagacactgttacaag

SEQ ID NO: 431438 - DNA, 218 bp, Oryza sativa
  unsure (1)..(218): unsure at all n locations
ccngggatcttagggatggggcngtaacacattttttttttttttttttctttttatctaccatattttattaacatcatatccacctaaccctcaccaaaaaatacaaactaaaaaactctctcactctcaaagcccaaaaacaatctaacccctcttatcaaaaataaattcctcacctatcctacaaaaacaaaatacgggggaaacaagcaccc

SEQ ID NO: 431439 - DNA, 324 bp, Oryza sativa
gggactcataaattgtgttgttactattttttttttttttttttttttttttttttttttttttttttttttttttttttttactttatcacaaaaaaaaaaacaaaaaccccccataaccccacaaaaacacccccccacaaaaaaaaaaacccccacaaaaaaaaaccccaaaaaccaccccccccaccgaaaacaaacccctaaaccaccgaaaaaaacccacccccaaaggaggaaacctacctccaaaaaaccccaaacacccaaagaacaactcccaaaaacaaacaaaaaaaatggccaaaggcctcaaaaaccccc

SEQ ID NO: 431440 - DNA, 486 bp, Oryza sativa
tgttttttttatttttgggtggtttttttttttttttttttttttttttttttttttttttttttttttttttttttttttttttttttttttttttttttttgggccccgggaaccaaaaaaaaaaattttttttccccagggggccgtttggggaccggggaaaagggggaaaaaggtttttttttaccccccccccacggggttatgggcaaggaaggggccgccccccgggggggtctaaaaaaggccccccaaaggggggactcccccccaggatttttccctttttttaaaaacgaccccctttttttttaaggggggaaaaaaaagaacaaggggggacagggcggggcctttgggcgcccctttgtttttttcccccaagggagggtaggcggaaaaagcctatttgggggccccccaggggcccaggggaccgggggcaaatttcccccggggagaggcccccccggggtaaaaacc

SEQ ID NO: 431441 - DNA, 443 bp, Oryza sativa
  unsure (1)..(443): unsure at all n locations
ngggtttttataacatggggggggaccaaatcgcattatgggggcctatacgctcacatatactccgtctcgtgcatagacggatctgaccacacacaaagaagctgcctgaatgcacgggcgactcgagacggcgccaaacaaaagacaagctgcttcgtctgcatgcacgatccatatgcatgcaacacatcgatgctagccggcaacagtaccatgcacgcacgcggggcgagcgcaaacccaagcatgcctccgtagggatactcgcatgtgtgacgtgcacatatgcggcatggtttgggtcacctaaaatcattgaggacgtttgcatggcaagatatatggcatatagttttacacaggggtggagtcgccggccttgagcaattggagggcgctcttgattgtgggcagccacccggcggagtaccagaagtaga

SEQ ID NO: 431442 - DNA, 501 bp, Oryza sativa
ttgtgtttttatttttttttgttacagtaaatcactcgcaataatcaaatctgatttccagttctgcattaccaccaaatactccaaattcaacggatgcagttcaagtatgtttcccatttgcaagtagtattctgattttgggggtgcataacagcataagcaaacgatagaatacctttatgtacaggcaactacaacacaagtcagcacaacctttgcattgccagaaaaccggctagctgacttcagatggattaataatcagatctgtatacagcaaacccgttacaggggttagggaacaacacaattttctctcgcaagtgtaggaaagtttcatccgcaatcttatactatactctaaagacccacgagtttccggtgcacgtgttcatggagagagtgttcgtcgccgtcatggtgatggaatacgtatgtcaaaaccccaacgaggcacaggaccgagccgacaaggatcttgtcgtaacgttccaccca

SEQ ID NO: 431443 - DNA, 471 bp, Oryza sativa
  unsure (1)..(471): unsure at all n locations
ttngggatttttaatttttggtggttatttttttttttttttttttttttttttttttttttttttttttttttttttttttttttttaagcaacaacaacaaacccttttttatattcacccccgggttaattttaccggggaggggggacccccttacaaaatccaaaagggcttggaccaaaacttctgaggctacggggaaaactggtgattcagttttaaaacaaggaagaaaaaaccggccttcttaactggggggttaaatgcaaaagggggggggggattaaacacccaaacccgaaaaacttcaattgggctgagggggtttagcccaaaaacaaaaaactatagctggggccttcactcaaggggggcccctccggttttatttatttaggtaaacaccatggagaagggggggggggttttttttatatgggaaaaaaaaagggaagccttttcccccct

SEQ ID NO: 431444 - DNA, 432 bp, Oryza sativa
ttttggttttataattttttggtttttttttttttttttttttttttttttttttttttttttttttttttttttttttttttttttttttttttttttttttttttttttttttttattttattttattatgaggggggaaaaaagtaaaaaaaatgggggaaaaaaaaaaagggaacaaaagggggcccaaaacaaaaaaaaagggggcccctaaaaaaaaaccaccccgggcagaaagggaaaaaaacggggggggaaaaaaacaaagggggaaaaaaaaaaggggggcccccaccacccgggggggggtttggggaacacaaaggggggcccctcttaaaaaaaaaaaaaaagggggggaaaaaacggcctttttgtggggccccccaactaaccagggggggaaaaaacccacctttcggagggggg

SEQ ID NO: 431445 - DNA, 409 bp, Oryza sativa
  unsure (1)..(409): unsure at all n locations
cccnngggcctctataaggtcnggacaccaccccattgacttatttttttttctcggcatagctcccaaagaatttgcatacaagaaaattcagctgatcttactttctcctgtgattctctctaaactgtctgaaacagtgcagaaacatacgaaatcgagctatgactttcctatcccatcaaaaagttggggatctaccaattcttgtctataaacccatctaaagaaagatttggatcttgcagctcacaccaacagcatttatccacgaattgttttagagcagcaacctccaaggatcgaggaggaggacgattatagaacgcacctcgcagccccaggctgggctccggcagcggcagcgccaacgtcagatcgcggtggtcgtggcagtcgaagcccgcat

SEQ ID NO: 431446 - DNA, 404 bp, Oryza sativa
  unsure (1)..(404): unsure at all n locations
ggccgcctttttttttnngggatttttgatttttgggggtttttcttttttttgggaatggaaaccacaattcgatacagacatacagtacatttcactcaagtacaaaggggcaggtagcaactacaaatgacacaaaaacagaatgacagaaatgcatgccagaactcctagacacactgaattacttttaaccaatctttttaatttccaaggacaagaaatacatttgatgggaatcggtcttaaccaggcctttttcaaggacgggtaatacatttgggggacaattaacacatggttactcatcgcagatcacctaagcaattttcagcaaagcatttttttttcttgggaactaaacttgaattctcctggatctcaacaaggcaacatttggaaaa

SEQ ID NO: 431447 - DNA, 56 bp, Oryza sativa
gggtttttatttttttttgggtttattttttttttttttttttttttttttttttt

SEQ ID NO: 431448 - DNA, 480 bp, Oryza sativa
aacggtgtgaaaacatgagcatttagctttatttgtattcttcatcaatgctctgaagatatgcccacagcgcgaaacttccgcgaaagtgtggttctgttggcagcatgacattcacgcattaaaagtatcaaagtcgctgtacctttgctttcatcatcaatttggtgtgaggaccacatcaccgtttctccgtccggcacgcgagatgccacatgcatcacggcggtgacttgattgaagcaaaggcatcctatgccactggtttcttcttctacgggcgatgatgataatgagctttgtggacgaccatgaacatcgacggcgggggcccggtcctccactgactaaaaaggattatggagtagctgcacaaggtccacgagcgtgacaaactgtaaccatatacgacgcatacacgacgtttattatgtatcacagacgacgcaaaaaattaacagatacggtacaccatgactt

SEQ ID NO: 431449 - DNA, 430 bp, Oryza sativa
aaccaaaacagcataaacatcatatgtacaaatcagcacaaagaaacttcagccacgctacaagcagttcgctgggaggaggtaaagtctcttgtacactcaagtaatatattgcagtaggagcctctccaactgtttttccgtcaaaaaaaaacctgaggagagtgccgacgctgaaacaaaatttgacccaacctcacacctctgggaggagagtgccgatgctgaaacagaatttgacaaggtttaagagatcacacgatttcaaactgaggttgacgataattgcgctccattcctttggtagggtactttgccatatcaggtatccattgcctcggaggccgatgaagcattcttcttcttcttggtcttctttcttttcttggccttagggtccttcccctgcttggcggaattgctctccttt

SEQ ID NO: 431450 - DNA, 433 bp, Oryza sativa
  unsure (1)..(433): unsure at all n locations
cggccgcccttttttnngggattttatatttacggggggtacacccattttttttttttttcattcatcctttattaacatctttttttttaatttttttttacatatagtttctcaacaacacaacggaagaacacaagcaagccttattttaccacaagaaatattaccacacattaaacaccccaaaacaaatgccggcttgctaacgcccaacccaaacgcttacaagacaaaataaaaaaaaagacacaatggtttcacaaaaaaaagggccccaaaaaccccttattttaaataaacccccccaccacacttgaactcaaaccccctcaaagagcaaaaaaaaaaaacgacttaaactacacggaaaacccccgttttcaaaagggatatgactccaaaaaaaccccctgaccaacggcttagtggg

SEQ ID NO: 431451 - DNA, 343 bp, Oryza sativa
gggggtctaaaactttaattgggctttaattctcaaaacacgagagacagaccttaacccctacggggtgtcagaagaatccataagaatcagacttaaatcctatgacgaaaaaagatagcaatgctatgaatgtttgcctaagagttttacggactcctgaaagtaaaacctatcgcgtaggccaaggagaggttcttgggtacttcaacataacccatacagggcaaattccacaaccggaaatgccttaatggtaaaagggagaccagctcaaaggtacctttgcctcagaaatggttggaccagcttgtggtgctcaccacccacagggatcccggag

SEQ ID NO: 431452 - DNA, 63 bp, Oryza sativa
  unsure (1)..(63): unsure at all n locations
ccgccctttttttttnngggttttttatattttggggtttaaactttttaattttttcttttt

SEQ ID NO: 431453 - DNA, 69 bp, Oryza sativa
  unsure (1)..(69): unsure at all n locations
ccgccctttttttngggaattataaattttcgttgttaccccatctttttttttttttttttttttttt

SEQ ID NO: 431454 - DNA, 224 bp, Oryza sativa
cccactcccaaaaaacccacctttaaccactttaaaacaaatgggcaaaaccgacaggagaggaatttcggggaactgataaactcctaacccacattttttttccacgggctggcctaatgccatcacacccaattcggagtactaagaagaaaacacccccttcatgatgggaaattttttaccacccctgccaaaaggtacctaccccgtagcccaatttt

SEQ ID NO: 431455 - DNA, 477 bp, Oryza sativa
ggtgtttttttattttttgttgttttttttttttttttttttttttttttttttttttttttgggtttttttttttttttttttttttttttttttttttttttttttttttaacccaggcaacgggcccaaaaaaacgtggggggaaaaaggcccgcccacggcccaaaaaaaaagggcgggccgaatttgataacagcctaaaaaaaacagaaaaaccgtgaacgggtaaaaaaaaaaaaactacccctttaaagggggctaaactttgaagggccctaaaaggggggaaaagcatcataaccatactgtccggggggaccccaaaaaaaccggaaaaaaaccccccctattgcagacgggggggggcaaactttatcaaaggggggtggaaactcaaaaactgtacaacccgtgcaaggccgcacttaaggggggccccatacaaccttgcgggggcccaaagaaaaagcacta

SEQ ID NO: 431456 - DNA, 462 bp, Oryza sativa
gtggtttttttaatgtttggggtttttacttttttttttttttttttttttttttttttttttttttttttttttttttttttttttttttttttttttttttttttttgggggcccccaaaaaaaagggcattccaaaaaaacctttattttgggaaaagccccccccccaatttaagggaaacccccccggaaatttttaacaaaaaaaaacctttaatttttaaaccctggggattttcccccggggggggcccccaaagggtccccattccgggggaaaaacccaaaaaaagggggtttcaggacctttttaaaaggggttttttgggccggggctaaaaaagaaaaaagggggcccctcatttgggtccgccaccgggggggcccccccctttgggcacaaaaacccaggaaaatttcttcgggggggcaaagaaagaatatacaaaaaccgggggg

SEQ ID NO: 431457 - DNA, 335 bp, Oryza sativa
ttgtggttttttgaattttggggttttctactttttttttttttttttttttttttttttttattttttttactctttttttttttttaccacaaaaaataaaaaaaaacacttctcgacccagggttcaacaaagcgccataaaaaaaagcctccaacacccggaacggggcgccccccccaggcccacaaatgatgaggctagacctatccaaacggttagcaggaagggcttccccgaggcaccagcagagaggggacccgtgctccctttaattacacatgcaaccccaatgtgtgagtcaacctggctataagaaaacatattcattttt

SEQ ID NO: 431458 - DNA, 376 bp, Oryza sativa
ttgtggttttttaggcacaggggtctacactttttttttttttttttttttttttttatttttttttttttacaacatttagtaactgacggagccatctcaatgacagacaaaccgaacaccacacggggggggcacggacaccaaccatgacaacacccaaaccgaacaaaggcggagggaaaaaaacgaaggaaaccacacgacaaggaccaaggcccccacaccggagcggagcaaccgacacagacacccactacggacccacagaaaaaaaaaacgcccgagccgcctaccatgcccgggacggaaccccaaccaacggcaaaacaaaagccgacctttgagcccaaaagccctgggcaaccaaaagaga

SEQ ID NO: 431459 - DNA, 353 bp, Oryza sativa
  unsure (1)..(353): unsure at all n locations
cggccgccctttttttnggtttttttttttttttggggtttcttcttttttttttttgttttttttttttttttaactatttttcaaaataaaaacttccttacaaaaaaaacttttccattcaaaatcccatttttggggtttcacctcctttttaggggccccaccgcagtgggggggacccaaaaaagaaagggggcccaggaaaaaaaaaggaaacaggcaaccacaaaatttatccacccacagcttacaccaaccccccttcccgaccccatatcccccgcacaaacaaatttactttcaaacgaccggaaccggggctttcaaacaaaacctgggctttcaaacca

SEQ ID NO: 431460 - DNA, 495 bp, Oryza sativa
gtggttttttggacaaaggggcgagactgatttgacacaaccacgtgtaacattgaacacaacgaacgaaatgactaattaagtattaaaaggcctagcgagtgtttttacctacaaactcacataccgatcactaacagtagcctttattggcattccttgcctgtacacaatgctggaagtgatctggaagtgagatgatggaactacctatcaacactaaacataggggaatagcctacagcctctccctacacaagctagaatggctggaatccttcacgtcagtgtaactgaaaagtaaaggtcttccggttagtgaatttttggtagcaaaatagctattttttctcaaaacttgcgaccttttcgggcagcgtttaattgctccagcaaatcttgtatggtagaagaagcatcctttagcttccctcgcagattttcctcttctaggtctcgtcgacctctttcttctgagaagatgtcaatcaatgc

SEQ ID NO: 431461 - DNA, 401 bp, Oryza sativa
aaaaaaaaaacaaacaaccaaacccaggggacaaaaaatttgggggggggcaatagttatggaaaaaaaaggggtcccaaatcattccccctaaaggggcatgggccccaaaaaaaaatcctcccccaaccggaatggcccctttggggagccccagaaacccttttagggccctttttggggcggccgggtttaaaaaaccaaggaccaggtaccttttgttttgcggggggcccacccggttgtttacccgaaactggaggggcgaacccaaatagggggcctaaaaaacttcagagaaaaaaaactggcacctggggggggaaaaaccgcccgtttttaaggcattgggatttttttttttggccgctttttttccttcccagaaaaaactatttttt

SEQ ID NO: 431462 - DNA, 286 bp, Oryza sativa
accgccggaggactttcattacataaaaaaaagggcctggaaaaaaatttacatattttgggggacacatgccccgggggagggaaaaccaaccccataaagcttaataggaggtgcaagggcgtacaaaaatccccaaaggttagttggatacagcaatcattgggaaattgggtaccccctccgtttcaaaaaaaaaggcaatctaggattggccggattcatttgggggttaaaaaacctagatttataaatatgcccaatgcttaaaagatttacattttgg

SEQ ID NO: 431463 - DNA, 497 bp, Oryza sativa
ttggggtattatgaatatcggagattctatattaactctcctgtgtatatcaatgacatcagagttgagtcagtaatccatcctatgcaacaaatatcccatgtaactacaaagtaatgggcactttattatcaatgcaaagcatcccctactaaaacctcagtttgttagacttttaattcaaacatgaacacaatgctttcattatataaaaaatataagtaattccgcgtacaaattgctttggtgcatacaccaagagaatgcattggtgtcataaataattgatgacaaattgaaaggtcataatctttgcaaatagggcaattgaagaacaaagggctcgactttccaatattagattcagcatcgcatcacatcccttgaagtgatgccattctatcttctcacagctgcagttttgtagtcatatacaggtagtgtaagtagagcccaaagtgtagcatatctattgtgtcatttgtggattttctata

SEQ ID NO: 431464 - DNA, 417 bp, Oryza sativa
ttgtggtttttttattttttgtgtttttctttttttttttttttttttttttttttttattttttttttaattctcaataccaccacaaaccacccccccccaaaaaacccaatttaatcaacaaaacccacacacttaccaccccccctaaaaaaaaaaaactcacaaaaattaaacatctccctctttttaaacacacccaatggtaaatttacaccaaaaaggggaggcgggcataccccacgcgggaaactaaaaaaaaccaaacacctggggaggggggggggttaaaaaatacccaaaaacgttgaatggggcggtaaaggggcttaatttaaaacgccgaaacccccccaactttcacaaaaaggagctctgcaccgggcgagaaaaaaaacccgggggggcacatgggg

SEQ ID NO: 431465 - DNA, 402 bp, Oryza sativa
gtgttttttttttttatgagatacagttatcgtctaaaatgaatattatcagagtacaaagctggtttcttattgttcttcagaagtacacaagggaaaggctttccaagtacagggaattgaatgatacagagtacagaataacaagctacacaaattcacacatgacacatttgacaattggtttgatccaattccagttgcagtgcacttaaattggagggtagaaaaagctccattctgacgatgagacggcctcacctcaactagcttcatctgaagaaatgtcaagttgtcaagtagccttacaagctgactaaacttcagctatcttgttcctcaatcctggtggctgcaatggttaggctactccatcgtttagctcaggtgaacggtgcactg

SEQ ID NO: 431466 - DNA, 150 bp, Oryza sativa
gttgtttttttaatttttttgtgtttttcttttttttttttttttttttttttttttttttatattaaaagaggggttaaaaaattatataaaaccacaaacggaaaagcccacaacacaactaccacccccccaacagagacaaaacag

SEQ ID NO: 431467 - DNA, 419 bp, Oryza sativa
ttgttgttttttttttttttgtgtttttttttttttttttttttttccaactaaaattgtttttttttacaatgaataaaaagtaaaaaaggccagattgctataccacccaaggcaacaagggtacaaaaggaaaaaatttaaagaaccataaagtctggacaaccttatacccttaaaaaccatgaaaattattccacccataacaccgctgatgcatataccacttgcaaattttctaatttgccaataggcccaaacttatcaatggcttgcccatttagaaaattggaaaaattggaaaattatggggacttggaaacgatgaaaaaaagggcaagcatctctcccgtgggaagtattggaaggcgttcatccctttgctttcttttgtactgaaggcccacatgccccaaccc

SEQ ID NO: 431468 - DNA, 401 bp, Oryza sativa
  unsure (1)..(401): unsure at all n locations
cggcgcctttttnnggatttttaagattggggtttacatttttttttttttttttttttttttttttttttttttcgccaccgcggcgtaggacttggccccacaaataaagcccttgaaaaaaaggaacgccaaaaatggtggataaaaaaggttaaagagggccccaacctttatcaccatgcgactcattgctccgaaaataaaataaaaaaatgttttttccgggggagacccttttattctttattttaccggggggcggaagggttaaataaataaacaatcggggccagcttgaatactataaaatagccggcgaaggacaacttgtacatcaccatggacaggggtgaagagctctccctccccataaacgtggagataaatttttaactcta

SEQ ID NO: 431469 - DNA, 418 bp, Oryza sativa
gtggtttttttttttggggggggtaaattctatatacaaacaattaaaattgatgcataagcataactaggtacagctgctggcacaaaccaaacaaagtgagcaacaccagacgcattatctacctgtactattaaaagcttactgcaaactcagcaggacatgaacatccatccagtgggtctttctcgcaaccaaaaagggaaaaagaaaacactgaacctgattgatcctgaggtcaactatgcctacccatatattctaccggttccatctctgctactcacacccgggctaaattacaggcagaccaaacaaaaacaaccagtcaccacttcgacgacaaaattcacagggaggacacaccgattaagactgaacttcccgcgcgttgtcgactgtttttttaacttttctt

SEQ ID NO: 431470 - DNA, 366 bp, Oryza sativa
gtgtttttatattttttgggttttcttttttttttttttttttttttttttttttttttttttctatttaggaaataaaaaggaaaagaaaaaaacaaagaaaaccagacaaacaggggaagaagcggagggggggaaagagccccccagaacccaccaaaaaaaccaccaaacaaacaaaagggcaaaggggggaacggcgaaggggggggggagcgcaggggcggagagggaacacgggggagaggagcagcagaaaaagggacgaagcaggatgacgaggtgcggcactcgtcgaccaacggggggtccatggagcaggcccagagcgggggggaggctaacgggagcttggcgcccgcgggg

SEQ ID NO: 431471 - DNA, 495 bp, Oryza sativa
tgtggtatctgtgcaagctgggcacatgtctcatcattcctccctcagcctaggaacagtttgtcctaaagctaagtataatgttttacaataattccacaacttgcatgggatacactagctggttttacaaagcttccaaagggaaggggaaaataatatattggtgtttattgatactctaagcagataaaaagaaaaagaaaaaaaaaaggaagcattagcttgctcagagaaactaagaagctaaagttggagtgagtgtatagttagtggcatgggctgatacatctccatttgacataatggttgcctgcaaaattgcccaatatcctttaagttagtatttgcacatcttgcttgagtatatctgatcacctaatgagctgactcttgaaccctgcatgtttgtatttttggccagtaccctaatcttacaacatgttggtaactcaaaatcagtaaaagtttattttctctgtagctctgagaatg

SEQ ID NO: 431472 - DNA, 180 bp, Oryza sativa
ggccgccctttttttttggtttttttattttttggggtttttctttttttttttttttttttttttttttttttttttttttttttttgatttttttattttttttttttttccctgaaagggcacgaaccggggccacaaaaaaacaggggcccccacggtaccaacccaccggggggg

SEQ ID NO: 431473 - DNA, 384 bp, Oryza sativa
gggaaaaaaaaaagcagaaacccccggaaaccttggccacccaacccaattaaaatggacaattccagaacaggtaagaaaaattccgtttttttaaccccagaaacccgaaactttggttcccccaaaacgggaaaaagggggggaaaaagggaacaaatccttggttttatggggggggtttacaaaaaaaaaaaaccctcccgggggggccggaatttggcaccctatcgggaagcaggaacgggggtttaagggggggactttgggtccgggcccagggacccccaccccacccccttgggggttcggaacctttgggcgggatttacaaaaccgggtgggggggggacccctccacaggggcccgccggacccgggggt

SEQ ID NO: 431474 - DNA, 489 bp, Oryza sativa
gtgtttttttattttttggtgtttttttttttttttttttagcatagcaggcaataagatgataagcctaatggcatcaaacatttcggggccaagcctccaaggacaaacaaactggcaattttataagagaataaaaggcacatatccattgcactaaattcttggaagaccatccaagggctaatgcctccattgaatctatcgctgctttttgacaaggacagactcgcgactccattatttggtgaatatccccacaacccaacacacttatatgtaaatcagataaccccacttattccaaagcttaatttctcttgacaattgcaatataacaagaatgataggagtgacatgtgtagcaaacacctaccgggtgtcaggatttgtccttgacatgaccaggtttttggcagcatgtcatggggcttatcctgaaatagggtgttggttccctctgttagctgataaacaggagccttgggc

SEQ ID NO: 431475 - DNA, 203 bp, Oryza sativa
  unsure (1)..(203): unsure at all n locations
nnggggtttatcaaaaatctgtggaaaccactcgatatctaagatattcgattattctgatattcaaaccacttgatatactgctctgttagcaattggacatcttttctccacactcatagttctaacttacgtcatcattcagtcttctatccagccacttcccggagcagccaatcattacacaaacagcaacattctga

SEQ ID NO: 431476 - DNA, 265 bp, Oryza sativa
aacagggaaaaatatacacatattgtacaaaggaggccggagcccatattccccaactatactcttacctcctccacataaaaactccactgatccgtaaccagaggtcccggaaaaccctgctaacctcaactactataattaattgcgagctgaatagctttacgcaacatatatctcccctccagcttcaccatgttgctccccactgactgttttccttgcagctgaaaactcagcactcatagcatacattccttgtatc

SEQ ID NO: 431477 - DNA, 341 bp, Oryza sativa
ggctaaaggggggtggaaaaaaattaaaaaaaataaaaacccccggcaaaacggttttttctcgaacattttttttattttacaggccaccaaaacccacaagaaccccggccggttttggtgggttcgcccatggcccccggggggggggggaccccccggggggggccgtgcttgagcccccccttccaaacaacggtaaaccggcagaaggacatggggcccacctccgggggcccccccccttccaggaagggcaccacccccccggggaggaacccgggcaccaccccggggtacaatgggtcccccaaagaacccgggccccggacccccttggg

SEQ ID NO: 431478 - DNA, 302 bp, Oryza sativa
  unsure (1)..(302): unsure at all n locations
acgcgacgtagttgttccttagaggtggcgccttttttttttttttttttattttttttaannnngtgggatgggccaagcacaagtatgtttatagagttatacagtatattactgggggagaggtttatatcatgcttgttcggttccaagaagttgggtagatacatgaaggaaaagaaagatgaactggtcgaaggttttccagattgaaaataagggaattaaaaaaaaaaaaagattgcagatattgggggaataagcagttgacctagtcctatctttaggcatattggaggaat

SEQ ID NO: 431479 - DNA, 268 bp, Oryza sativa
ccctaattccctccacacacattaaccactgcacattacgcagtcagcgacagcgaggatggccggccgagccagctgcgtactcattctccttctcgccattgccggcttcggcgacgttcttgccgccggcggcgcgacgccattgtcgtcgtcgtcgcaggtgagcacgactacggtagctggattgaatgaggtgaaccgggatgcttgcgtgcatgaacgggtgcttcacgcagattgttcgggtgcgccttcggggtgcatg

SEQ ID NO: 431480 - DNA, 119 bp, Oryza sativa
cggccggattctgggtcgcccacgcgttttattttccctcgcggctggagagtgagagattgtcgatggccagcatatagatgctcagaagccggtggaggacggtggaggcgccacca

SEQ ID NO: 431481 - DNA, 360 bp, Oryza sativa
aagaaaaaaaattactcctagactacgggggaaaaagatttattaacatccgggaaatgttgggacaagattttatattaaaaaacctttttgttcacatacccaatacgaaaaatggggggaaggcacaaatacaaataaaaaaattcccccaccccccaccattgtggattggggcgggcccaaaacttagttttcacccacaagaaaattaatccacgagtttatggcccagcattacttttcccataattgttaatccaattttggaaaggggtgaaggttgcccaccggaaacgagttttgacgatgcccatgtcggggatgacaaccagtatggttttccaggggggccaccac

SEQ ID NO: 431482 - DNA, 463 bp, Oryza sativa
gtttgaattctactgatgttactaaattctaattcttgcagacgtcagcagctgcagtgtgcacccttgcaggaggcacaactcgatggcaagaaactagaaaaggacgacaagagaagattatgccagtggtggtggcgccactggaatgccatcctggtcgtcattctcgacatgggcatcgtcaaagctcgtcgccggtggccaacctttaccccttgccagaattggataaacaatgatgggaataggagtgctggaccatgagctggtggattgattttcttgtggttgataactgagtctggagccggccatatccatcaattgtggggttgttgtaattttttttattttgtatttcgtccattctaccaaaggtttgtaattgcgtatggggatcagaatagttggttttattataaaatttttggcccaaaaattttcccggatgtttaaataa

SEQ ID NO: 431483 - DNA, 410 bp, Oryza sativa
gggggggggaaggggggggaaaaaggggagggggaaaaaaaaaaaaaaatttgggggttttgggagaaaaaaaaggggggggcttgaaagggaaaacacaccacccctttttttggtttaaagaagcaaaaaaatttttgaagagggggaaaaatatggggggaaaaaaaaaaaggaggggttcaaaaaaaaagggaataaaaaaaaaggaaggggggttttttaaaacaaaaaaaagggggaaaaatctattggaaaaatttgaaaaattttacaaatttggggttttttagggccctttttttttagggttaaaaggggcaaagggggagggggttaaaaatttggaaaggggagggggggccccggggtaaaaaaaaagggggaaatttttaaagttttgggggggg

SEQ ID NO: 431484 - DNA, 74 bp, Oryza sativa
gtaatatggtgagagcgagaagagaaataaagtgtgggaggggaaagcgagcgaacagggcaacaacggggcaa

SEQ ID NO: 431485 - DNA, 107 bp, Oryza sativa
tatctaagccaaacagggtcaggagccggagcggctcgggagaggaaacactagagcgatactaccgaacaaccgcccgaaagtatacgcgcgccaaggcatgaagc

SEQ ID NO: 431486 - DNA, 366 bp, Oryza sativa
tatacagcccctgaaacccaacctccggcgcccggcggcgtcgcgcaaccgctcggcatgccgccgcccgcccccgcccccgccacgctcgtctccctcagcgcgctcgttacctcgctcgcgcgcttgggccgacccgtggacgcgctgcgcgccttccgcgacatgctcgcgcggggtgagcccgccgaccacttaaccctcccacctgtactccgctactgcgcgctcaccggttcggcggtgctcggcgactacgcccacgcgctggccctaaagatcggggcccaaggtaaccctcttgtggcgttcgggctggtgctctgctactcgggcctgcccaaactttcccgactcccggaggct

SEQ ID NO: 431487 - DNA, 215 bp, Oryza sativa
tctattcaaccgttgacgccgctcccctcatccttcgtcgagcccccaccacgccttcaccgaccgccactcctgctcgcccgaattgacgccgccgtcgtcgtgggttgacatctgcgatcctcctatcgaacttctacccgacggcactgtctccatccattcctcctctggcgcctgctctcccggaccctaccgtccttatcgccccaaca

SEQ ID NO: 431488 - DNA, 403 bp, Oryza sativa
atctcaaccaaattggggagacgagctttttttttttttgaaagaacttcacaacggcaagcattttacaaactatttgttgattgaatgggaaaacgatcagtacacaaacagacatgggcgcaaaaactttttaagattttaagcttgacaaggaaaggcaaggcaaattcctagtacagaaagggaaacttttgtctagtcaagatgggtgacccgagaaagacatttgggggggatcaaaattttatgatcaaagctttcaaaacccggaatatctcctcatatacatcttaagcgggtgggaaaacctttttccctgcaccaatttttgaccctgccggaatgacctttaacacattgaaccctacgggttttgaaggggcctgcactggccaatgaa

SEQ ID NO: 431489 - DNA, 75 bp, Oryza sativa
actagttttagatattgagcggccgtcctagtttgagtgagagagcattagaaggcagtatatcatgaaacccat

SEQ ID NO: 431490 - DNA, 463 bp, Oryza sativa
agggacatagaaatgcaaaacatcatcccccaacaggtagtacatgattacatgaagaaaataacaaaattggcacaaatccataaacaaaatacactgaagattagcttgcgcctgcctattgttcttaccccaagaaacacgacattaacaaactctgcccccccaaactcgaaggggtccagtcaatcccttctttctgcctatctgagcaaataacattcgaatgaacacattattccctggccgctaacttgcctctaatttaccaactccttaagtatattcacatctgatctgatgctaatcagtagggaactgaatggaagagagaaacaaagttacaggggttccttcattttatcttgttctcaatgcattgggcttaaaggagcatattagacttggcaggcaatcttctgtagagtttaagggacagagggcattctgttgggaaccgggg

SEQ ID NO: 431491 - DNA, 396 bp, Oryza sativa
gattaattagggtttggccctttttatagtttttttattaagtttattagaaataatttgaaatattggtatattttgaagaataagttattaattgtatacgggtacagaggagaagatgaaacagggagaaattagggtggaggggaaaaaagggagagaaaaaaaacagagagggagaggcctaggaggggggtttcttcttggaaaggttgggggacttgggcggggtcaaaaaggggggcaagttcgaaggggtggttgggtttaacctgagaaatcacccgggcttggaaggggttggagaaaaaaaaggcgggtgggttaaaaaggatgggggtaaacttggaggaaaaaacggaaaaggggggagtggttgttttagagggttttaaa

SEQ ID NO: 431492 - DNA, 148 bp, Oryza sativa
ggaaaaaattcacccatatttttgggcagaagcccaatttatttttgcccaatgggcacactcagcatcaaaggggaaaaaatgaaactgaaaataaaaataaacaaaagttgttggaggagtagtagtacacttgaatcatgcccaa

SEQ ID NO: 431493 - DNA, 305 bp, Oryza sativa
gttttatcggcggaggagatggtgacgctgtcgggggcgcactctatcggcacgtctcactgctcatcgttcacaaaccggctgtacaagtactacggcacgtacggtactggacccgtagatgccggctgtgtacgccgtggacatgaagagtaagtgcccgtcggagacggcggtgcatcatgacgcgacgatggtgcagcttgacgacgtgacgccgttcaagatggacaaccagtactacaggaacgtgcttgccgggaacgttacgttcgcctccgacgaggcccttctcgacacgccgg

SEQ ID NO: 431494 - DNA, 93 bp, Oryza sativa
gcccctgtaatttacaataaatatgattcattttatctgtacatagcaaattaatttataaaaagggtaaaaaaaaggaaatatttttttctt

SEQ ID NO: 431495 - DNA, 353 bp, Oryza sativa
ggtgagaattcaaaaaaatacgcgcttaccccatcacaaaacaaaggtgagcacacggactacaccatgagtttagcataagtaataaacctaaaaaaataaagacatctcatactcttcaggctaacatgctctacacacaacataactggagtggaattcctgatgggacaagatcaacctaacagatggacaaggacatacagacacggcagaacctttccgggaagataagactgtaacaggggggttccgtgcacgttcaactgtcattgccatcagcggaacatccaacctaccgggaagcgcaaattcaagggcctctggacgacacctgtaggagggcagtgatt

SEQ ID NO: 431496 - DNA, 395 bp, Oryza sativa
gggtaccccacacaaagcatacgttaggatctggggagtaggaaaattaacacaaacacatcctaataaaattctcggaagtaccatgaacgacagcaattaaaatacggggatgcccaattgcccagattcatcttttaaagtatcattacgggccatttagcacttagcagtagacctaaactggtgtctaagtgagggcagaatttctcacagtaagtttttagttattccgatgggatttttaatatggggaatctcaaggggaaacttctggttccgggtcgaaggtaagcttttaaggagggaaaccgggtctttacgaaggcatttgggtggaagttttaatttgctcaagaaggtcctttaagggaacctcaggttttttttggagt

SEQ ID NO: 431497 - DNA, 285 bp, Oryza sativa
attttcttctctttctcgctgcgattagagaattcaccttcttcttcctcctctcgcctcctacctcttgctgcagcgcacggcgccgcgccgtcatctcgagcttgtatccttggtcttcatcttctctcaccttcccttgagaagatttgctattactagcttaatatttctaggaaagaggagaagaggagaggagaggagagggttggaacgcaacgttaggtgggggcgtgctagggaagtaagaactagaggaagggaggcccaactgttctatccttc

SEQ ID NO: 431498 - DNA, 116 bp, Oryza sativa
aggatcaataaacgccttttccctgtacacaggaaaccaatatcttgagactgcacaacggttaacaaagtggactatatagcatgcgatctgtaagagagcaatgcttctttgcg

SEQ ID NO: 431499 - DNA, 423 bp, Oryza sativa
atttgctccttttgtatgcatctgatgtggaatcacacaatagtggagttctctttcagtttattaatcatggtggtaaaccatatatagttttcaccagtgtacaatatagtgtgcaattcatcagtccaattgtatggccagtagctcatgtgtagctttaggggcaaatagtaaagtcagaatatataactagacatgcatgcagtgttgctccagtatatttcagagcttatatgtactgaacttttgtgcaatttagttatgatgatctgatctttttgtatattaccagctgcaatttttcgatatgagctttgtataatcttatgcacatattgctcagattatctttttgcacatatttgctttggatattcttttggatatgccagctgcttagttttatttggttagcagccc

SEQ ID NO: 431500 - DNA, 285 bp, Oryza sativa
cttgctctcgatctcctacagaagctacaatagccagcaaatcaatcgatcgatcgatacgtgcaatggcggccatgaaggtgaacaagattgccgtggcggcgctgttcctcgtcgccgtggtggtggcgggcggcgccggcgctagcgcccacgttggggttggggctggggccggggccgacgccggcgttggtgccgccgtaggggccggcgctgacgtcgttcttggggttggcgccaacttcttcggtgtctgtggtgctggagttggggctggaattg

SEQ ID NO: 431501 - DNA, 195 bp, Oryza sativa
tgcaagcgcgccgcggacggaattggccgggccgcacccacgccgctctgttagtctaggacggcatcatcgccggtgctgctgttgctgcgggagatggtgcacccgccgcctcgccttctcctgcgatggacgtggccgccgcccaatgagggagcgcggaaagccactctgcgtcaacgacaaccgtggcaa

SEQ ID NO: 431502 - DNA, 213 bp, Oryza sativa
cccctgaagatcgacgcagacccatttatatagaagaggatatttatatagatgtgtgtgtgagaatcaacccatatgacctaccaaaaagaaaagactgccaaaggaaggtgggcatgccaaacactcctctcctccttcacatgaaaaaaaccattatcatagaccatccatttgctgcgcctaaaacagctctcaaccaattccaagtcc

SEQ ID NO: 431503 - DNA, 285 bp, Oryza sativa
gtgttttatacgatcacgcgtacaggtgccacttccacgccgcaatcctgcgttccggcgacgaggcgtggatgctcatggataggcatctcattgtcaactttccccaccttttgagggatgactgccgtgtccctatatacccacgactgctaagatgctactgcacaatggtaaggattattggtgcgacgtgacgaccggagcagtcaccaccgtctgctaaggcaagtggaagttgcggtggccagatgagccaggtcaggagatccaatccagccacct

SEQ ID NO: 431504 - DNA, 472 bp, Oryza sativa
gataggttgacttcctgaaagctatggatgcatacaaggaaacgatggtagataaggaggaaggaagcaaattaacattggagcatacaaagtaaagcgtttccactgtacagctcatgtgaagctattggttggtatgcttctctttcttccttgcacttttgtctccctcatatgaagaaagaaatctaagctacctctcttctgtacagaaaccaaacatatcccgactcctgaatgatgtataggttcggacgttcattgctgtcgacgacatgtttacagcttgccttcttgctgcaaaagctttataccaacagtgcttgagcttttgttgaccatcgtatttcaagttatccttgggttaacttcaatcgtggaacaacgttcattgcttgcagctcctggaataaaagcttgcaagcatacggcatcctcattttggcatatttctccatttttgacatgaaca

SEQ ID NO: 431505 - DNA, 246 bp, Oryza sativa
tttttgttgtgttttttttttgaaaaaggcaggtgccctctcggagacaaaagttggatacgactaaagaagggaataaacaacagagcgttctatggactacaaagggaatgtgcaacaaacattaggctattcgatggactgctacaaaatattcattgaacttaagtcgcccgcatggccaaaatgaccattaagcagactttgtcttggacagaaacaaaacgtttcccaactcctgaggga

SEQ ID NO: 431506 - DNA, 451 bp, Oryza sativa
tgtataccaagtggtggttgtagcatatcattgacttgtgatcaatgccctggcacaagtgcgacagattctactggagcaacctgtgtgcagcaggcataaaaggtgtctactgacagtgatcaagttgctaaggctgcaatgatgactgttgaaggtgccatgaatttcatgagaagcacgatatctggagacttgggctcctttccatgaacagacgctgcatctggaaaggagagcatgcctatgggcatgaatccaaattttgacaccatgggagcagatagtgatcttgctgttgacttaaatgtatggtactcagcggggttttacactggttggttccttatgcaccagtccattgaaaaatactagacaaggctgtcttctattaaaagccatttggagtttctccaaaaatgttctttccattccacaaaaataagaaatc

SEQ ID NO: 431507 - DNA, 207 bp, Oryza sativa
cccttaaacaattttaaataaatttatgaaataaaactacacacataatgttttagaaaccccacgaacaaacggaaaaaaaataatggcatacaaaaaaaccggggctaatccaaagtgcacacacccatagacaagccagcagacccaacaatttttttcggaacacgggggcccccccggggaatcccggcccggtacccgaag

SEQ ID NO: 431508 - DNA, 399 bp, Oryza sativa
gagagttgagattactattacatgcagtagaccagttacaaaattactgaattgcatacggcctgacagaagattattcttcctagttggaactgcaggattaatacgttgtggtagaggaaaatgtgcagtacctgagccaaatgaacaggactggcttgctctatgtacaaaccaggatggaagggtaactggttagttaatttaaacaattaaaagaaaacgaactccaataatgaaaggcgttgatggagaagtaggtcagccgcctgaatgacatgctggtaatgttgtaaattgcccatctttgaaagcatgaatgaactgctggggtaaggaatgcttgggccaatagacggcgcttgttgcatttggaacaagagcattgatttcactaga

SEQ ID NO: 431509 - DNA, 281 bp, Oryza sativa
gaaggcaaatgcattggcagaggcgacatgagcgagccatggtaaccagcggaaagcaggcggcgggcgcccgggccgtctggggtggattgggaaccaccggaaacggacgcgcgagtgaccttcgtattgctcatgtaataagagagctgatgaatggcggcactgtacagcaataaagagcttggggaagacagaagcgaggaccctgatcatggaaagagggcacaagctttaaaagagctcttcttgcctagtttgcgggactatgtcaagacaat

SEQ ID NO: 431510 - DNA, 148 bp, Oryza sativa
ggggttattctcttttaaattaaaatgtattttttgagacaaaaccgccaaaaagggccaatgcaaaccacaaaaaacaagaaccaacaatttttgtcaccgataaaaacaaccgatatacaagggttcatctacccggacaaaacaa

SEQ ID NO: 431511 - DNA, 334 bp, Oryza sativa
  unsure (1)..(334): unsure at all n locations
tatttttctcttcctcgtcgttgcgatttgagaattcaccttcttcttcctcctctcctctcgcctcctacctcttgctgcagcgcacggcgccgcgccatcatcgagcttgaatncttgttcttcatcttctgacaccttcccttgagaagatttgttactagtttaatatttccaagaaagagaagaggagaggagagggtggtaacccagcgttaggtgggggggcgtgctagtcaagaagagaagagaaggaagggaggtccaactgctccatcctccctttcccaaatccactcctttctaccttggttcaatcattgatttgattttt

SEQ ID NO: 431512 - DNA, 441 bp, Oryza sativa
ctcctcctcctcttctccccattctgatctctgacaccgcggcggccatctcccccatctcgatggcggcgccgccgcagccgcagtcggagccggagcccgccgcgggcggcgcggggctggaggcgctggaggggctcgcgctggacaccgtcatcgccaaggccggggcgcgccaggccgcggcgctggcctgcgccagcacgcgcctccgcgacgccgcgggcgacgacgcgctgtggcgccgcttttgggccgacgaccttgcccttcacgcgccgttcgcccccgacggacgtgcgcttccttccttcaaggatgccttataaagtattggttggagtcttttggcatggattctttacctttggtaaggagagggaaaatttttggaggttcggtgaaaagcggctggttgaaactttcctgaggcctcaagaa

SEQ ID NO: 431513 - DNA, 325 bp, Oryza sativa
agccaaaaccctggggatgagaaaacaaattacatggcactttggaattaccgcgctaaggccccgggggaacggaacaaccaccccctattaaacaggccatgattattttggtggctagcaaaccacttatgttttttacacacattcatgccggccgtcagacgaaatattccagaaacaaggatcgtttgcgctggctatatccgggaaggggggccccgacaaaatagggctagcttgactaggacccctgcggaagggggaacggacgggttggcctagaagccggcggacccccccccggtcggtttggaaggggaaa

SEQ ID NO: 431514 - DNA, 402 bp, Oryza sativa
cttttctcctcctttcctcccatccttctcttccttcttctctcaccccatctcctcctcccctctcctcccctccagcggggcggcgggatggaggccggccacggtggccccggacagggcgacgggatggaggcctccgcggcggcccgacgcgaggcgacgagatggaggcggcggcgggctgcatcgagggcggaggcgaccggcgccggacgagaggggcggtggccggctgtatcgggcgcggggcggcgagatgggggcgactggcgccggtcgaggtggcggtggcctgcccccggccgagagggcggcagccggttgcgtctgggacagccagtgccggaccggagggcggctgctgcaggcgagaacttttttttcttttctctatgctat

SEQ ID NO: 431515 - DNA, 59 bp, Oryza sativa
aattgttaatatagaaattagtttaatgataaggaatatggtaaaggaaaatggataaa

SEQ ID NO: 431516 - DNA, 484 bp, Oryza sativa
ctttaatcatttatgttactgttccattcttgttgagtaaaagatacaagtgccatctcctatcatctccgttcttctcaaattctcaatgaacagctcaacaccatgtttttcatatttagttgattatactcctgatgattaagcaatccctaagcctgcaattcacatttctctctaaattttgaaatttcaaataacatgttttcaaaatcatgttccttgacaataacaagttgccagtactccattgttataatattagtaggcatcatgtactaacacgggtttatctgttaaattagtttgctgccaagatttgccctgctgcatcatttagagaccacatgcctaatcgagaaaggccccaaaggtgccacttccacaaaagagctttggttaagcttttggagtgaggtgcactacaattccttggttgcaacttgagatcttcccaattccaagacccagaagaagccctggc

SEQ ID NO: 431517 - DNA, 442 bp, Oryza sativa
atcagccgaagaacaagacaaaacaaaaagttcaagatttctgccgtcttctgcccaaggatgattacagttttagttggaggcccacgacgtgcacagcacgctcaatgatcgagagcatcctgtgctcatggggtacaggcattcagcccaacccacaacatatatttttcttttttcttttattcagtagcagcagcttgatgcatacactacattctacaggtacaagtacaagctctcagaaaaaaagaccatagcgcaaggcactgtgttgaaggaatacacggatccatgttcatggcattttgatagtagtaacagcactgggcacattattttctgaagcgactgatgagatgacacgctggtgctcacgttcatagctgtctgtttgtacaacatcagcagaacttgacagcttccagctttctatttctca

SEQ ID NO: 431518 - DNA, 243 bp, Oryza sativa
gtttatgtgtcgccttctctcgcgaaccctagccttggcgccgcgcggactccgccgcggtgcccttctacggccgcctacatgtccgtggtgtctcatcgaaggtggagtacaattgagatcgacctgtcgtcggaggacgccctcttctcgaagtcctcgtccggcgtcgaggggggcggctttgggccgtgggagatggggatgcggcgactggaggacgccattcacggtgtactcgtg

SEQ ID NO: 431519 - DNA, 278 bp, Oryza sativa
tttgtttccaccaccagcacctactacttcatcgtggtggtctatttctacctacaagctttccccaccatggcgtcattgtacgccttcgctggccttgctcatgcaccctaaggacctcattcttcgcgtgatcgacgatgtacaacaaggattctcagtccacgtaaaggttaatatattgtgaatgtgcctacctggaccgaggatgggaagcacactgttgcttaaatgtggttattgtctctctgagcataaacttgattaaaaattctgtt

SEQ ID NO: 431520 - DNA, 159 bp, Oryza sativa
attattattattattttactccaaacaccccacaagtgcgcacaattacactcgaaacccccgattggacaaactgaaagagagtctaccacgcacgcgtgcaagctcttttacctcgaaaacaatttgccccaacggccacccgaccaggaccctgca

SEQ ID NO: 431521 - DNA, 181 bp, Oryza sativa
tctttatagacccacgcgcctttcttttacgagtagctgctgctgcagagctaggttgttctttgaacggtgagggcgacgaaggagctgcacagaagcattctcctcgctctgcatactcgccagacttggccggatgcaatggatgaatgaccccgttagaccccaatgggaaacatca

SEQ ID NO: 431522 - DNA, 281 bp, Oryza sativa
  unsure (1)..(281): unsure at all n locations
gtggcgcgagaccggaataggaggtttcaatggaggtggtgggcggcgtgtcgtcgctgagcgcgtcttcgccggcgccggcgcgggcgcggctgcggcagctgtcgcccggcgaggcgagcggcggggggagcttcctgctgatgaggacggcgccgaggagcaggctgcaggcggcggcgaggccggcgaggcgggcggcgctggtggtggaggcgaggggaggggggtggntttaccatttcttctcttccctccctcttctctatctatcttttatt

SEQ ID NO: 431523 - DNA, 402 bp, Oryza sativa
ttcggtttactttcaagtcttccgccttggttggtccgaccagtcagtgacccaggcaatcttcggcgatgggggccagattgagctctggtgggacgacgactttctacagaagccgcggatgtggcggtgtcacttcgggcgagagggatgctgcccctgctggtgctgcaggtgctgctcgagtacggacgtgcgatctgctggcgaactgccgtgaggggggcactgttggaaatcaactcgctgctgtacctacggccaggctccctcgacgcactcctacgtttggtgaagcgcgtagccttcaaccctcacctgatcattcactactgtgacctgacacgcttcttcctgtcggctttctaccacttgagcgaaactcacttgttcttgaacatg

SEQ ID NO: 431524 - DNA, 244 bp, Oryza sativa
ttatttggagaaagattttttaggggtaaaaccaagccaaacctggtcttaaggtggggctgcatttaaaaacaagggggggcgccttttgggttttgggggggggtttaatggtttccaaaaaagcgggcgttaaaaaaaagttagggcgcctccctttgagggggaaaatttggggggggggggttatttccaaaggggggggccatgggcaggaaaatgccctcaaacctttttggggttt

SEQ ID NO: 431525 - DNA, 173 bp, Oryza sativa
  unsure (1)..(173): unsure at all n locations
aaaaaaaacgccaaaggnccccacacggaagcaaccaaccnagcccacaaaagacagacaggaacccccccaagcccccccnnnncctgggcaaaaacgaagcagcaacaaaanaaaaccgcccaaaaancccggggcccccaagggcggggaacgacgacaaaaccgggggg

SEQ ID NO: 431526 - DNA, 519 bp, Oryza sativa
ttggtttgtccgtaaaactattgcttgcaaaaggagcttatgttgacccaatgtctacttttgggacaccacttcatcttgctgctaaagaagggcaggatggcaccatgaagatattgttggacaacaatgcagattgcaacaagatggtaaacggtataacacctctcctccttgctatgaaagctgcatcagcaaaatgtatggagctgctggttgaggctggagctgatgctacttactctgatgtcatctggaattatatgtcaactacttttatggatgatgaagatagtggttcatctgtgttctcggattctgaaccagaagagattgatgccaatcaccatattcccgtcaatgacaaacctgtgaatcgaaggaaaattgcagagtttaagttcgtagggcttgaggcagttgagaagaaggattatttttctgcactaggattttacagtgaggccatggaccttgaccctgatgatgcaaccctgctgttcaataggagcctttgct

SEQ ID NO: 431527 - DNA, 565 bp, Oryza sativa
  unsure (1)..(565): unsure at all n locations
tttttaannaaggaacaatnggggctgcatccaagatagcaatatatacatgcatctgcatagagcatatgcatacaagagtacagacaactcttagcattcattaaatttaagtcataacttcacaacaaagtttatcgaattactctacattgaagtggcatctcttctagataatataaatacagagagaacttcattggacaagtgacatcttaagcaggtctttattggacacgtgatatctttagcgggtctccattcataaataactttagcaaaaaaatcttcaatggacaatttctgggacaagtgacatctttagcagaacaatttcagtaaccctttcgattttgacctaaaaataatagtttgaattctgtgagcaatattgcatgtagaatataaagaactatctatcataatataaatacattcttgatcacaaactgacaagacaccatgcatgcaaactggccaggatcaaagaaacaaaatagctacatatgcaatcaatgtatgttattgaggtcacttgatcatgcagcaccaatagggaacactt

SEQ ID NO: 431528 - DNA, 432 bp, Oryza sativa
tcgatttagccaagatacaggagcgatcggctccgcggcgttcatcgccgaaactccactgttcatcttcaacctccagccattcttgtgtgtgagagaaagagagctctgttcttgtgttcctaggctgattccaacaaaacacacagccgaaacaatcaaacttaacgcggcacaatgtctagcatcaattcgtttccgcctcaagaacggtgtgaatactcattgtcaacttcgcttgatggcttctggcttctcccgttctccggctctccactctactctgcctcccggctacataccttgcacgattggtgtgtgcagcgactgcgagtccgcaactccgcctctctttctctatctccggcctcaggtgctcagcaccggaacaacaccggcggtccacggtcggcgtggggcatgcagcgacca

SEQ ID NO: 431529 - DNA, 583 bp, Oryza sativa
tcgcattttttttacctgacatatttcatacttgttgactgataggcctggttagcctgtgatttacctgaattagtctgcatgtaagtacactgcaccagccagattgggctaccagctcactaattttagcacatgtcttgatacgaaacagtgaaccatggaatgctctttggcagcttgtaactctgaatatgtagctacatacatgaacataattcagagatacagttgtacaaagatttcacctgaattttttcagagccatctatgttcttgtagttttcacctgaattctgatacctttagaaatttggagatttcatattcactccctgaatatgtgcatcatggcagcaatgactcctgaagcgttagggctaaatacttgtgttagccaatattacacacatgaggaaccctctgtcttgtatgtctacatataagtataaagcaccttatatgcaagctacaaatctgtttgttatatctatgccctgcatataacatgttggtaatttggttgtcttcatcgatcaattttcatttgttataagctatgctcaatgatgaatataagttt

SEQ ID NO: 431530 - DNA, 298 bp, Oryza sativa
ggaaataatggtaaaaaaaagaacggggggaaagaaaaaaaagaaaaccgggggggaaggggaaacgcgggggaggaaaccgggggaaaaacggagcccgaactcagaaaaagaaaaaacaaacctatagggggggggaaaaaaggcaaggcggtgccaccggggggggacaaccacgcgggaaaagggggtccgattaaacctaccgaaaacaaaaacggaaaaaccgggggaggcaaaggcgggggcccacgacgaggagctgaaaaggccgtatagcgggggggcaaacggggaa

SEQ ID NO: 431531 - DNA, 414 bp, Oryza sativa
aattaactcaaaactggtaaaaaaatgtatccatgatgccattatctccaaaaaaagagagaaaaaaaagaaaaaagaaaaaaaaaaaaaaaaaaaaaaaaaaaagggtagtatggggcggtggttgtgggggcggccggtttgggggagccgggatgccgggcgggggcggggaaatggggagatctaaaggggggggacggggggaagtttgacgggggggggatggggggggcgggggggggaaaaccgggggggtcttgcagtgaatgggggtggggaaagttggggttagggcggtgggggttggagcgggggggcctgccaccgagggggtgtagcaagaggggccacagggggatggggggagggggcccattagggcggggaggatttggggggtgggcgggggtg

SEQ ID NO: 431532 - DNA, 378 bp, Oryza sativa
  unsure (1)..(378): unsure at all n locations
aaanaaaacagaagggcccactcccggtcttcagggccattcacaaaccaaaaggttttttgaacagtctaactgacaagtcgacaagttttaaaataaagcacagattgtagctaatctactacgatattagtttagttcgttccgtgatgcacgcgtgcatcaaccctgtatcttctaccaagtccttagatcatttcgcagcatctttccctcggttcctcggatgcctgataccgtggaaatatttgtttccacatagacactgaaatgctttaacaggatctttgccatcacccaaatcaataccattgccccatgtgagcttctcaaaggcctccaccttgttggttgtcaaataagcaagatgataattat

SEQ ID NO: 431533 - DNA, 352 bp, Oryza sativa
gcgaacatttttatgtactaacacagtttgcttgagtgggctgacgctatttcgaatgatgttcagtgttcttacagatttcattgctgtttacattttgtatttttcttctatcaaaccagatcaagctgtagaagaaacaaagtaacacagatttttttttcagcaacctacaatgtcgatacaaagttgtctttgcagaaactttttttgttctcgttggtaatgtactccgtatgaacaaaatataaagaatggacatagttgtttttgttaaaaaaaaaaaaaaaaaaaaaaaaaaaaaaaaaaaaaaaaaaaaaaaggggaggaagtatagggggtcctagtttac

SEQ ID NO: 431534 - DNA, 118 bp, Oryza sativa
cccaaaaacgaataaggatgagaaaaaaaaataatggggggaattaaaaaggggggtaaaaaaaaagggatggggtaaacctccgggggggttttaaacttcggaagggggggaagaa

SEQ ID NO: 431535 - DNA, 115 bp, Oryza sativa
ttagtttttagcgagacacattttgtttcgcgtgccggatccaaaccaatcttccctccggctactagaacagaataggacaatgggggcttgctgggcgatgaggaactttgcc

SEQ ID NO: 431536 - DNA, 499 bp, Oryza sativa
tcgctcctctcccacgcctcgccgccgcccgagcagccgtcggtaaagccgggcggctgcaaagacggcggcggcggggctcccctttctcctcactcctggtcaagtggttggggcgccgatgagaccggagcacgaggggcgcagctcggcgaggactgccagatccggcgccgttgaattcggatccggccctcccttggccggatctgggctggacgcgcaagtcggcggcgaaggcggcagccgcggcggcgaccgcggcgcgagggccgcgcggaggaggcgacggtggcggcgaccgcagcgcgaggggcgcacggaggaggaggcggtggcggacgtggctcgaggaccgcgcggcggcgactgcggcgcgaggacctcgcggcaacggtggctgcggttcgcggacgtgcgtcaactgctgcttctctggcttgtgtgcaccaggaagcggttggcggtggcgacgtctcttttcccaggcggcttaaaa

SEQ ID NO: 431537 - DNA, 397 bp, Oryza sativa
ggcaacaaacggaaatcccttaccccctcgcagtcatattgtgcttgtctagtactccctccgtccaaaaagaccccacctaagagcggggtgatcctcttagtacaatgaattcgttacactgaaagggtcacattccatctttgattattattatttttatcggaggggatatactctgcagaacagcagttgctatctaggaagcaccgatgcacataatcagtgatcaacaaaatgacgtaacagtagttcggtatgtttacatagacattataatggggcatcacacagatgcagcaaaaagtactctcagatgtctcactgtcagttcgagttagcacaatgaaacttctgcgatagtcaccgactcgccattcaacttacgaaagggaac

SEQ ID NO: 431538 - DNA, 310 bp, Oryza sativa
gggtgggcccttaaccaaaacaattttgtttattttttttattttgtaaatacagagttcattacgaacgggaacaaaaaaggaaaaagaaaaaacaatttgggaaaaaaaatatagggtgcggaaaaaaaaatttgggaaacaaaggtgttttaaaggtggaacaggttcgagggaattagaatacaaaagggaaacagtaatggaatttgtgagaaactgaacatcaaaaaaaatattggttgccaaataaaacaaaatgggtttaaaaagaaaaatggcctgaccaaaaggggtgaccctggaaaaa

SEQ ID NO: 431539 - DNA, 295 bp, Oryza sativa
  unsure (1)..(295): unsure at all n locations
ccggtccggaaggcccgggccagaccgacccgaggtgatgaactccgaggaggagaagccaaatcataggcgataaacgaccatgtaaatctgctccatgattatatatgctcatccttatgcgtgtnaaaaaaaaaaaggtggtgagagccgacccaaatgcggtggcacatgaaaaaggaatgggggccggataatatggagccgaggttacttacgcctgcatggcacgccaaagctcttttaaactggtaggtaatgtacttcccatgaacaaaatataaagaatggacat

SEQ ID NO: 431540 - DNA, 381 bp, Oryza sativa
gggcccatcacccctttgaagattagttacggatttgggttaacttggtgagcaacaaatgggcttaatatttcactgaagttctaaaggacaagggaataaatttaaaagggccacgttttagactaaacccaaaaaaaatggttggaaaagctaacacaatatgggggaaatatttttttcctgctccaaccattttttggtgccttgaagaagactttggtttacaccctggtggatgccacgtttttgctgaaaaggggaaggatggaaacaacttggaaaggggtggcgcccaagaaagctagggcccccgctattgggtaaaaaatgaaacccctttttgggggttaaattggggggcggggaccagttttacgg

SEQ ID NO: 431541 - DNA, 462 bp, Oryza sativa
ctttttgtttaaacttaattgagaagacattatgacaattttcaagttaaagcactaggggcttcccatttggaggtgtgagttcccttcacctctgtttctacttgacgcgatctacacctttctttttttggcttccaaatcttctatggtctttgctctccatcctgatttgttgtatgcttcttctgtgcaatgaagctaacaaaaagtccaaagcagagctttgcttcagagattctaaattcagttattttagctattgtaacatgtaatagtcattgcttattgtgttcttggctcaacgtgcagctctccaattatgttccctttttcgttacaacaattcagtttgaatgtggacccaggttctagaatgttttatgtataatgtttttagttgaataaatatccataatccatatatgactatgcataatttccagtgaagaaagtactatt

SEQ ID NO: 431542 - DNA, 503 bp, Oryza sativa
atttatcgtttcccctgaaatcacgctgccgatagcttcctcttccccttgatatcgctctccacaaaatcgattagcctacacacgatttcaccatccacaaaatcgctcagcctcctcctccgcttgatcttgctggccatctccttcaccaccgctgtacgcagtctcgccggagatccgcctgacgacggagtttgaggtggcgcgacggagatccaccaggagcgaaaaccagtctctgctcccgcggagcacggcctcgacgacgcttcctccttcccacctcaccccaactctctcagattggcgccgctgccagccactcactcgccatcggcaagatcagtcgcaccgccgacccctcgctctaccttgccaagaacagtgccgctgcacctcaatccagccatctccatgactaagcaaggaaacctttcctattttttgccaagaatttcatttttcttacactgaatcccttgtgagtattttattattaa

SEQ ID NO: 431543 - DNA, 340 bp, Oryza sativa
tcggtttatttgcaagtgttacggcttcgttggccctaccagtcagtgacccagttcaatctccggcgatgggggccggaatgagcagcggccggcggccgagcttttactgtggaggcggtggcggcggtgtcggtcggccgagagggatgctgaccctgctggcgctgcaggtgctgctcgagtacggacgcgcgggcgccagccggccccccgtgacggcggcgttgctcgccgccaacgcgctgctgtaccttccgccaggcttccttgacgcgcttcttcctttggttaaccgggttggctttaacccttaccttattatttacttctgggacct

SEQ ID NO: 431544 - DNA, 319 bp, Oryza sativa
cttggcaacaaaaaaaagccctttaattaatcggagggggaaaaaagggggaaacccaccgttttttctacgggggaaggaacatttttgtttttacagggggccctgggaacccccatcccaccccgcaaggatggtttgaagccccggaacaggaggccttaaaagggggtccaggaacttttcggaagggaaaataaaggccatcctgcccttgacacaacactttttaacttcggggggggggacaagcggaacaaagcctccccaaccactgggggaatcccgatcaactgaagcctgggaagcttgggagaaa

SEQ ID NO: 431545 - DNA, 512 bp, Oryza sativa
gccgcttggtgatggctcgagctctgctcctgctcatcctagcagcgctagcttcggcctcgtcaatggctgccaagaagcaggggcgacagcctcgcggctgcggcggccacacctcgacgtcgccgacgccggagctggagctgccgccgtgctccggccaccgcggtcaagccccagcgccagtgttggggcttcttggccggaggggatcacctggagctccgcctccgccgcggtcacacccgccggtatcatacgtacgcccacagccgcgcccgtggccaccgtcaccgccgcatccgcagcctccattcccgatcagcccggttgcgccgtcgtcgtcaccaccgacgtcaccaccgtcgtcaccgtgcttgtagtcgccgtcgttgcaggatcagtcggattcaggattttcagtcaggaaggaagctcaaatgatttgctaaatctggttcgggcacttcggaactattgtaaattctttgccttttgcgggttcaagattt

SEQ ID NO: 431546 - DNA, 342 bp, Oryza sativa
aaaaagaaaagcatttcctcctgggaaaataaaaaaaacaagaaggaaaaacccccccccccccatgggggtttccattttaggcaacacagcgggaaagtttattcaaccatccccaaaaggccaatcatttggaaaaaggggcggggggttaaaagggcccaaaaaaccccccccaggaaaaacctgggggttgggctgaaaacggaaaaaggctccatggaagcccaaaaaaaacaattgcccatttttaaacaaggggacgaaacctttcttccaaaaacctaaccggacttaaaatggtagacggggagccaaaggaggctccctaaattccctggg

SEQ ID NO: 431547 - DNA, 144 bp, Oryza sativa
  unsure (1)..(144): unsure at all n locations
ccctttntttctttttttaattgttcatttggaaggagatgcgaaagaccccaaagcccaacagaagggagtcatcaaggagagagttataaacatgacattgacaacgacaaaacaaatatcaatgctctgcacacgagaggg

SEQ ID NO: 431548 - DNA, 388 bp, Oryza sativa
  unsure (1)..(388): unsure at all n locations
caggcacgcgacgaggttggttccctagattgcgcgccttnttttttttttttttgtgttttaagcaaaaaggggaagccctttacccagggacggaagattccatggaggggataaacaagaaccatgggtcagaccaaatacatatttgttagcataaagaaaaagaggggtgctttttccggggaaataaaaagtgttagtttaacagggtgctgggttatccgcgctccaaattacaacggacgcaagggggataaaccgaggaccgttatcaaatggttatcagagcattttatagggtgaattttgattagcttcggcttggagcacaaagtttttaagatacaggggtggcacgagtgccacaaatttttttcgaatactg

SEQ ID NO: 431549 - DNA, 267 bp, Oryza sativa
ttgagattcaaaaggcgttgtcatagcatctctaatttctctactgatgtacttcgtctggatcaagatttgaattgcccagatggaccggatcggacggctgggattgcgccgagattcgtgaggccgccgcgttaaaccatcctcgtctccctccccacgtcgcgccacgcgccacgccgagctcgctctcgccgcgccacgccgcgccgcgcgttcgaccggatcggatcggcggcgagggagaggagaggggtagggatggag

SEQ ID NO: 431550 - DNA, 533 bp, Oryza sativa
aaattgaaaattggtaaaaaccaataaaaccctaacataatacatatacagcatagcatatgcccaaacatccttagatttctatcatcacttgtctttttttttaagagcaatcatcacttgttatgcatgtgctgttgtttcttgatcaactctatgtcttctgtcggctggctgcctcagtagctttccatcgatggagagggagtcgaggccccaagcctagggaggcaagaaaggggagcttcatgacctcaaaagggagatcttgcaggtctctttggagatgaatctaaaaaataaaacctgcactccatatgttgtgtcattataaaatctcccaaacatcattcgtaatccaatgaccaaacacataaaaaatgatacatctttcttataccacataactataacttgtaagagatcggccagaaagatgtgccacaccttgcaaggagggcaaactctgtaaagacattgattttacctttacaacctacaacaccacatttaaatgcatagtatttttttga

SEQ ID NO: 431551 - DNA, 363 bp, Oryza sativa
attgggtgttgcctttttcaatttaaattaatgggtatttttttgattgatatattttatattttgtgtggaaagtattatgttaaataaaataattataagagggggttttaaccagacacaaaagtaaattggtgaaaagttttaggtaactgaaaggaagcaggggtagtttggtcatacagaatagaaaagattaaatgttaggaaaaaaaatttgggggaataggcatgaggaagatttatttgaaagcgttggggaaggagattatgtaggcaaaagaaaagcttgaagaagacagtgagggacaaaattattttgggggaaatgggtattaaaaaaaatttggggaggagcttgtt

SEQ ID NO: 431552 - DNA, 332 bp, Oryza sativa
gggaaaaaaaaaaacccaaatggatttggggggggggaaaaaaggggaaaaaacggggaaaaaaggggaaaatttggggggctttttataaaaaaaaaccttaatttacaaccggaaaaaaaaccggggcaaggaaaaggaaagaagggggttcttaaaaaaactaaaaaggggggggggggggattcccggaaaaaccccggggaaaaaaaaaaaggcgggggtaccgcaaaaaagattaaaaatttttcctggaaaaagggggtttccgggaagaaaaaaaaaaggcttggcccctccaaaaagagggggaaaaaatttttttttggggg

SEQ ID NO: 431553 - DNA, 253 bp, Oryza sativa
gcccaggcccgggcgcctccttgctccggctgctaccgaacccgcgggtctcccccttccgcaacgaggaggtcgccatcgtccgctgctccggcggcgcccgctacgtcatcgcctgcctcatgccaaccatcaggcgccccatggagttcaaggttatgcgcttcgactccgacgtcggccgctggaaatccacagctgtgttcatcagtgagccggtcgagagggacagggtgcttcccaatcctgacac

SEQ ID NO: 431554 - DNA, 371 bp, Oryza sativa
accctgaaaattcattgatcattattcactcatggaccaaaaacattttttacaccacaagggaacatgagagagcttttgaacccccgggatcaataaatgaatgaatttagggacaaacaaatcacattacaggggggaacagggggagtattaatttattatcaaccccccgcacaaataaatacattttccaaatccaacacttaaaacccgttaaaactgggggggaaaaaaaaaaatactcgggataatagcgggctgtaattcacaacaagggcattttaaaattttaaacgggaaacacaatcattaacatattcttcctagggtacaacacctttacacaggggggtttttcttttttttcc

SEQ ID NO: 431555 - DNA, 378 bp, Oryza sativa
caggcaccgacgaagtttgttcctctagattgccgcccttttttttttttttttttgttttttttgagttttttcggtttgccccttttccattttttttttgggtatgattttttttttttttttgggatttttattttttttttaaaaaaaatgggcgggggaatataatttattttgggggaaaaaaattatatgcagaaaaacttgcacatgggcagggggggggaaaattttttgggccttggtgcaaaaacaaacaaacaaaaagggggggctttcccaatggggggcggttgaattggccgaaaaaaaaaaaataatttggaagttccaatacccgttttacaaaaaagcctttttttggaaacggggggg

SEQ ID NO: 431556 - DNA, 330 bp, Oryza sativa
aaaaaaaaaaaaaaaaaggggggcaaatatataaaaaaagaaaaggggggggataacaattgggaaaaaaatttttaaaaaaaaaaagaggaaattttgggaaaaaaaaaaaggggaaatccatttttttaaaagggggacaaaacaggaaaaagggggggcaaaaaaaaaaaagggggtcaaaaaaaaatcttttttggaaatttaaaagcaaggaaaaaaaaaaaaagctttggggaaaaaaagggggggggagaaaagggtaaaaaaaccccaggggggaaaaaaagaaaaaaaccccttcgcagaaaaaaaaaaaggggggggggg

SEQ ID NO: 431557 - DNA, 323 bp, Oryza sativa
gggaaaaaaaaaaggccataattttggggggccgggggggcaaaaattttgggaggaaaaaaaaaaaatttaccaggggttggcagggggggaaaatttgggggaaaggggggaaaaaattcccttttttttaaaaggaaaaaggggggaaaaaaaagaggggaaggggggggggttttcaaaaaaaattttaacccgggggggtccaagaaaaaaaaaaaaggcttttaaaaggggggaaaaaaaatttttaaaggggggggtttaaaacaaaaaaaaaaaggggggcggttaattttgggggggggtttttttgttttttt

SEQ ID NO: 431558 - DNA, 288 bp, Oryza sativa
gccggatgaccttttcaaattaaattaatgttaaagggagaaagaagaaaacaggaacagaacaaacagaaaaggaaggtttaacataaaagtcaacctccacaggcagacaaaacacccaacagtcaaaaaagtattggggatccagtaggcaaaacacagaaaacaaaggcctactaaagaacaaacatttgaagggaaaacgggaaaacgcaaaatacccaggcaggggagccgaattacagaaaggcaagaacaatgagaggttctaaaaccagaaggagagaa

SEQ ID NO: 431559 - DNA, 372 bp, Oryza sativa
atgcggtttgcgacccctgaacgacgcccactactcttccacgcctcggcgtctcgtgagcacacagcgggaaagtcgggtgggtgtaaagaccgccagtaggcggagctcaccatgtgtcctcactcccaggtcaagtggatgtagtgccgatgagaccggagcacaaggggcgcacctcggggaggactgacagatccggcgccgttgaattcggatccggccctcccttggccggatctgggctggacgcgcaagtcggcggcgaaagcggcagccgcggcggcgaccgcggcgcgagggcctcgcggaggaggcgacggcggtggcgaccgcaacgcgaggggcgcacggaggacgaagcggtggctg

SEQ ID NO: 431560 - DNA, 345 bp, Oryza sativa
aaacgactaaatgaaattcccaattttacttaaaaaccaggggggtataaaaaaaaacagacttgttggggaaacaaaaataaacggggcatagggggggggggattttttcccccaccgggggcggggcaaaattgaaaaaaaaaggcccagggaaattactacggaaacccacggataactccctccaaacgaaaatataagacatttttttatggaagggggggggattttcaatttatttggggggggctggaacaggcaaaacagaatggatagaggggacaaattgggggagaccacaggggaaaacgggggggggaaaaaaataaggggggagggggg

SEQ ID NO: 431561 - DNA, 325 bp, Oryza sativa
gttaattgagactgaacgcgacacgccaaaaaccaaagtctggacggcatccagaccacaatctacaagagattctgagaccatatctgaaccatggacgtcatgggcacaactcaagcggtcaaagcacacacactgctgggctcctctaaaagaaccagaacgcagggaccaagcatgcactatgctgggaggcctgcctacaatgttgggctacacccaggcaaactaaagaactcacccaaagaggcaagcgagcgttgaactaacatagccaaagagggtcaggatcaaccaaaaccttgaatcgaggccagcaaagggg

SEQ ID NO: 431562 - DNA, 373 bp, Oryza sativa
tttttttttttgttttttttttattttttcggttttgccctttccccttttttttttttttttttttgggccgggaaaaccttttttttttgcaggaagacccaaaaaaaagacccccgattttggccttagccataatcaaaccctggattggcaaatttttaaactttaacatcccaggaaaaaaatccaaaggttttgacggggtttttttttttaggggggggtgccaaaaaaagggtaagctaaaactggaattacaaagatggctaagggaggttcccattttaagactaggccatcaaggctgggggggggggagcccttggcccacggggaacaagggggaaagggttcctttgggggaacaatt

SEQ ID NO: 431563 - DNA, 245 bp, Oryza sativa
aagccgggcggatgcaaagacggcggaggcgggggttcccatttctcctcactcctggtcaagtggatggggcgccgatgagaccggagcacgaggggcgcagcttggagaggactgccagatccggcgccggtgaattcggatccggccctcccttggacggatctgggctggacgcgcaaaggaggcggcgaaagcgggagagcgcggtgggaccgaggcgcgagggctcgtcggaagaggcg

SEQ ID NO: 431564 - DNA, 466 bp, Oryza sativa
gaaggtgagttaaaccacgagagctgctataagggctctcatggaaggctgcattctgaccacctccccaacacggagctcaacggagcgagggactgcaagacacactttccgacctgatcccgccgccgaggaggctacaacgacagcgacctctggctggagaagaccaagaagcagcagcagcagaagaagaagaacaagggcgcgaggaggctgccactgcgccaagaggaggaggatgatttcgaggccgacttcgaggagtaagaggtggattccggcgagtgggaggtggagtccgacgcctacgaggccaagccgctcgccgcgccccggagcggctacgctaaaggtggattgaaaaacactactgttgctggtgctgatgggcctgcagcaaggtctgctaaaaggaagagaaagaaccaaatcaggggtatccgccagcggccatggggcaaaa

SEQ ID NO: 431565 - DNA, 402 bp, Oryza sativa
ggggaggaagggggggaaaaaatttttaaaaaaaaaaaatttttgggaaaaaaaaaaaaaaatattttttttttttttgggaaaaaaaaaaagggggggaaaatttggggggaaaaaaaaatattagaccccgtgaaaaagaggaaaaattcccagaggaggaaaaaaaaaggggacccgggggggggggggaaaaatggggaagggcccaaacgcaaattaaataaggggggccaatttagaaaaagggggggagatttattggaaatattagggggaaaaataaaaaaaagggggcccggaggaaaaaaattttttggccgctcaagggtatttgtaaaaagggggggggggggtaaacttgaaaaaaaaaaggggggggggataaaaatgggggggggg

SEQ ID NO: 431566 - DNA, 293 bp, Oryza sativa
ggaacccaacaaagggaaaagggggtcaagggtttaagaaaatggcctgggaattaccgggcaaaaaaaaggggggttggaaaaagcctcaatacacactgggggaaaaccgggaacggtgttggggctccaaatttggggaggggcaagggtctgggaaaaacaatttttttgggggggaacttaaaaggtttttttattaaaaaacacgggggggggcaaaggctaactatttggccctttggggattggttaggtttagggggggcatgagaaaaggggggttttttttt

SEQ ID NO: 431567 - DNA, 225 bp, Oryza sativa
  unsure (1)..(225): unsure at all n locations
acaggnggtgggaaataccacatttacaatttggaaacaaaatttcatatagagagagagagagaatgggcaggaagacgaatttaggggggaaaaaaattttttattttttctggggggggattaaggagggcggaggtaaaaaaaaattttaaaaaaaaaagggaggggggggttgttttcaccaagggggaaggggggtttgattaataaaaaaaagggggg

SEQ ID NO: 431568 - DNA, 569 bp, Oryza sativa
catcggtcacattatcctcgctgactccgccgcgcgccgcgtgctcgccttcctccccctcgcgccaccaccgccgccgccgagtcctcgtcaccggagagcgagggggtctccgccgtggtcgcctgcgcgctacgcggcgacgctgccggcttccttccgccggagtcaaccttgggggtaaggattgctgcaaacaactccagtttctgaataaagacagtgccgatattaatggataagaaacagacctcgttaggcactcctgtctacaggacaaatcccttcgattctgactctgattctgaagtgccctcaagaccgtcaagggcacaatctgtcccagtgcgacgcacagatcaatctatacaagagctggaggactatgctgttgataaagtagaagaaacatcacgcaaagtaaatgattgtgtcagagccgctgaagcaatcagagaagatgtacaaaaacactgggtactttgcatcgtcaggtgaacagatcacccgaactcaatcagtagccgcggatattgaacacgatcttagtatgagtgagaagcttttgg

SEQ ID NO: 431569 - DNA, 373 bp, Oryza sativa
ttttttttttgttttttttatatattttgcgggttgctctatcacatgttttttttattaaatttttttttttttttatattaattttatgtgacaaaaaagatgggaaaaaaagaaaagattttgattaagaaaaaaaaaaaaaagggggtttgaaaaaaaaaatgcaccaggaaagaaaaatcaaaagaaaaaaagacaattggaagaaatggaaaaagagaaaacggggggtaatgtacataacacaatattatgaaggcctaccgaggaaaaaaaaagaaaagttttgaagggaaaaaaaaaaagtgacctgaggaggcaagaagtaaaaaaaagtgtgagcaaaaagtagaggggggggtggcaccag

SEQ ID NO: 431570 - DNA, 459 bp, Oryza sativa
cctggtcgcctccggctccccggacgtttgcaggctgtcgctgtctgccgctggccggtccacctcggcacggtctgtgtccggcagcagcagaacccagccattcccaaagcccactctcgccagagtgaagtctgaaagggccaccgccgccgccgcagcctcgccacggcctccagcgctggcggtgccagcgagcaattcgctcaaggacatggccaggacagcaccatcagcgtcttcgaaagcgccatccaccttgcagaagagcaaactgtctccaaggcctagccctgacaaggcggcggcatctctgaagccgatcacccagagatcgccggcttcagtgactgcaagaggtggaaggactccagtagtgtcgtcgtcacgtgtaccgggcaacatcgctgcaaagaaaagagcagaatctgcaaatggtggtagtgcaagctcaaaggc

SEQ ID NO: 431571 - DNA, 253 bp, Oryza sativa
cttgttctagatcgcagcggccctttatttttatggagggtttttttatatatatctttctttatttctaccatgtccctttgataattactaactacagcagctccaccctaaataccacacacaccccaaccactgcacggacaaaacaagaatcaacgctaacaccaaaaaaaacagagaccaaaaaaaagacaaaaccgccaataacccattacccgtcgacaaaggataaatccgccacagctacact

SEQ ID NO: 431572 - DNA, 467 bp, Oryza sativa
atatgaggctctggcagcatttgcaattacaatttgctatggcctgcacagatgtcagacatgagcaaaacattcaatatcagacatgagcagaaccttcaacatcagagacacgggtaaaacattcgatatcagacatgtgcaagacttcacgaaatgatccaggttaatggaactggtagggaataatggatggttcggtgcctaacatgtcgccaaatccattggcatcccacagcatcagcaaaaggatgttcccgagttttgttcacacatacgagagaaaggtctcattttataatacgctttatacattcccagcttgtatgattgaataccccagatgccgctggatctagacatatttagtcttcccacgactctcctgcttcttcaccactctgaattctgaccgcagcttgcccacacctacagggcactcccccttctcatcgtaatcagcaaac

SEQ ID NO: 431573 - DNA, 159 bp, Oryza sativa
gccccattacaaatttttttattttaaaggaatatatacatgagggggaaaaaaaaaaaaactccaccggggggaaaagaaaatcctgggtggggatacaaacacaaaacaggtggtgaaaaagggggacttgagtcgggttgggggggaaaagaataa

SEQ ID NO: 431574 - DNA, 477 bp, Oryza sativa
gttctggtcgatcccctccgtcgtcgtcgcgtgaactcctcgccgatcccctccgtcgtcgtcgcgtgaactcctcgccgatcccccgcctccgtcgcgccgtcacgccgccgattcccccctcctcgtctggcgcgccgcggggttcagtcggcgccgatccccatcccccaggtggccgtcgccgatcctgcatctcctctgtcccgtcctcgccgatcccccgcctccgtcgcgccgtcacgccgccgattctcgcctctccaagaccgctttcatttttgcatcttccccagatcactgctggtcaacaggtcaacaaaagaggtagtggaggctgaggaggtcgccatccacaaccgacaacgacaacgcgacgcccgtgtcgccttaagagccaccgctgcctatccgtactcacgccaccgtttcttctgtgccgaaaggtacaggacaccctttggcacccctacccca

SEQ ID NO: 431575 - DNA, 192 bp, Oryza sativa
ggacgataaacggagcaacctgaacactatagtatgcacttatgcccacgcacaaacactaagtagagggtgacaggggacagaccataagctgggaagagcgacacatggaaactgaaaccgtgtgccaacaggaacgaaacgcacaggaccatgttagtggactgctaacatataagctcactgacttgg

SEQ ID NO: 431576 - DNA, 293 bp, Oryza sativa
attataaagggggaagaaaaaaatattccccaaaaaaaataaaattttgaaaggaaaagaggggtttacaagggaaaaaaaccacagctaagggggggggccccacaaaaaaaaacaaggacggagggggaggttttcctaaaggggtttcaacttaccgaaaaaaaaaagggtaaaaaccaaaaaattaaggggttttatttccgggaaaaagggggtggttgaagaaaaaaaaggggcccaatatatctaggaaaaaaaactggaaccccgttaaaaagaacttttttaac

SEQ ID NO: 431577 - DNA, 383 bp, Oryza sativa
cacgcgtactgaatttttgtatcctaagaatggccgcccttttttttttttttttttgttttttttaaaatttttgttgttgcccctttaacattttttttatttttttagtggaaaaaacagcaatttgataataatttggtaaaaataaaacaattttttttaattaaaaaaaaacgaaatagctgggcaaaaaggaatcaaacacaataaaccactgctaagattacggatggacacttcactagactgaggacaatgttaaatggttgtacgcccagggcgttgttggtgaaaggggaagaaaggaggccttgccaggaataagaagaggccgttgctggtgacgatggtttggaccatgaaaacgaacaaggggaaca

SEQ ID NO: 431578 - DNA, 73 bp, Oryza sativa
ggcttctcctccccctctttaccttgtccggctcggttcggttccggggttcgtttaagggttaagggggttg

SEQ ID NO: 431579 - DNA, 407 bp, Oryza sativa
gtaaaaaaaaatgatcatcatggttaatgcatgtttagggatatttccacaggtatttcaaatggttttcctgctgagcaggctacagagaccatattgtttaatttgcacattgcagcactcaactggcttggtgttggtaagtttatttggtaggcaaaagaattggaccggggtgctccagcctaacacagtgcagcctagagatattaagaccagctcatagaaaagcattaaccgttgatgtgcatggagtatttttccttgtatttgtttgtcaataagatgctggcagctccattcctgaagatccatgagctgagcatagtgggttgcctctcccaatattaacatgagacatgaattatcatgaagtaaacctattccttgaagattgagcggggatc

SEQ ID NO: 431580 - DNA, 351 bp, Oryza sativa
gtttagtttacataaagattgagaacttggtaggtagggtgatctagacattaaggttcggagctggttgttgcggtaatgggatgcaccaacaggctggacgccacgagagtcgagttgacaggtggtcgatccgagcttgtgactcgacggagttatggactgggacactcttgccccaaagaacgactatcacaaccgtgccagggcacaccccgttcaccgggaccgaagcgactgctgtgttaggcagaagaacgtcgccttatgacatgtcattcaggcgaatgaaggggaggctgaagatcatggacaggaactggtgccagtgcaagtcgactctgatggagg

SEQ ID NO: 431581 - DNA, 371 bp, Oryza sativa
  unsure (1)..(371): unsure at all n locations
nnnntnnnnntttgttttttttaannnnnccggggnggcccaaggcacctcctttaacacatagggatgatatacaaaacagtacgcacacaatacgtccttttttcagctttgtcttaacacctgaccatgcaaatttagctatctcgaaccatttacaatccaaagctgaatctttctacggattgctttgtaaagcaccttctttcgaagagaaaattgttgcagtctagtctgaaacaattgcagcccactgcgattaattgcttcataaccaatggagtactagttttcttctctagggaaaacgtagaacttcagaaccttgaacctcacgtcgacactgatctaaggggggggttacatccagg

SEQ ID NO: 431582 - DNA, 382 bp, Oryza sativa
gagttcccggccacgcgctcacgcgttgcggttgcggcagctgagcgagtgagcgccgaggctccccggccatgtccaagcccgatcgccgctccggcgccgacacgtccccgtcgctccgcttcctcggccttctcaagcagcccgacgacggcagcggcgaccacgagctggagctcgacgagcgcgacgtcgtctggtcgtcgtcgtcgtcgacgaacacctcgccctgctcgtgggcctcctcaaccaattcctcgccgtacctcaccccgtccgtgtccgagggcgtgggcgttcgccggccgatgccgtcgtcccacgcctttcccgccgccggcagggttggcctgttccgcctccttcgcgacgatcacgcccc

SEQ ID NO: 431583 - DNA, 287 bp, Oryza sativa
ttttttttttgtgttttttttattttttttggttttgctcttttcaaattttttttttttttttttttttttttttttttttttgggaaaaaaacaccttagggccaaaggcatttgggaaaaattaaaaaaggggatcgggtttggaaaacttaacgggaggggggggttgggtcattcaaaggggaattaacccctaaaattttaaaacacccccatcggggggaaagggggaaaatttggaggggaaaacccgggtgggggggaaaacccgggggggggggggg

SEQ ID NO: 431584 - DNA, 423 bp, Oryza sativa
ggggaaagggttttttttattccaccccaaaaaattcccccccaaacggaaaaaaggggggggggccaaattaaaaaattggaaagggcttttcaggggaaaaaccaccggtcaaaagggggtttgggggggaaaaaaacaaaaaagggcccccatgatccccaatttcccgcccaaattccattgggattatttggggcaaaaaaaaggctttaaaaaaaaaaaaacgggggggaaccttatggggggggggggaacattttggggggggggaaggggggccaaaagggtcccttaccctttgggaaaaaggggaaccgggggttgagcccctatggcaccggggtcttttggggggaaaaccacctccctttccctatccggtggggaggggaccctcaaagacccaaaacttttttttgt

SEQ ID NO: 431585 - DNA, 310 bp, Oryza sativa
aattgattggggaaggcccttttccaatttttgtgctgagatgatattttttttgtacgggttttgagaaaaacaaattacaggactttgggactacaacttggacagcatggttaatccaaataatacaatttaaagtagagacattgtgacaacaaattgaacaatggggtttttttgggtaaacgaccaaattgaacagcacactaattacctaacaagagcaggccagtgggaggaattgcttccacaccgaagcgggcctggaacgaattcagtttgttgaaatgggaaaggctgacccaaaatt

SEQ ID NO: 431586 - DNA, 360 bp, Oryza sativa
tttttttttttggtttttttatttttttttgttttgtcccttttaaaaatttttttttttttttttttttatttttttttttttttaaaatattattttatagtttttaaattttagaaaaaaaataaaaaagtcaatcgtgtgggggcatattaaagggaaaaaaaaaaccggaaaaaaaaaattttaaaaagtaaaaaaagaacaataaaaaaaccctagggaaatggggttaattttgaaaaaaaagaataaaaattgtataaaagaaaaccttaaaaaaaaaaagccaaaaagttaaaaaaaaaagtaaaaaaaaacttttaaaaaaatttcaaaaatttagcaaaagggttaggg

SEQ ID NO: 431587 - DNA, 577 bp, Oryza sativa
tttttttttttgtttttttttttttttttggttttgcttttttaaaattttttttttttttttttttttttttttttttttttttggggggaaaaagaaagggttgaaaaattgtttgtttttttaaaaagggcaaagggtaaaaggggttttagtttttttgaagggaattaacagccaaaaaggtgaaaaatttttttaaaaaaattagggggggaattaaggggaaaaagggggaattcaaaagttaaattttattttatttggaaaaaaattaaagggggggaaaaaaaaaattggtttttgaaaaaatttttattgaaaggtttttaaagggccgggttttttcaccaaaaattttgaaattaaaattagggattttgttttaaaggggaaaaaaaaaggggggtaaatttttaaagtttttttgaagagggaggttttttggggtaaaaaataaaaaatgggggggggggggggaaaattaagggggggatttgtgtttttaggggggttgtgatgaaaaaaaaaaagattgggtttagttttataagaaaaaattataaggttttgttag

SEQ ID NO: 431588 - DNA, 350 bp, Oryza sativa
gaccaaaggaattagcagcctcgtaccatctcagaaatggtacatcatagtacaacagcacctgcactaatttatgctctaaaaatcggctgacccaaagcctccgggctctcttaagctgaaggatacacgaccacatgacatcgacaaaattgttcgttacagcgtcagaaaaattttcagacaaaaagttcagcgtcttctcacctgcctacacctacacatactttgcctccgtacttagggctgggagtccctgtctatggcccggcttcccgtcggcggcggcggcggcctggaacggcggggctgaacacggcggagtggaggtttcccctcctccatccact

SEQ ID NO: 431589 - DNA, 403 bp, Oryza sativa
ttaatatcgccttctctccgaccgctcgccggcgacggcgcccgcgtcgactagacggagctgagcccggcagggtcacacgccgagccgacaggatgtggaacgtatgcatgttctaccacaggctcctagactaccggagggccgaggtgcaagccctcgccgagctcttcggcgggcctggcgccggggacgccgtcacgaggcgcatgccggagaaccaccacgttgactactatttacagctcggacgcctaccgggcgacgagcgcctcgccgcgcagatcgccaaccgcagtaaaagcgcctcgcctgatcgattgattcaccaccattcgctggctaagcttcttcttgcgggttaatcttgggggggcgccgtgacgccatgtgtgggttttgt

SEQ ID NO: 431590 - DNA, 371 bp, Oryza sativa
  unsure (1)..(371): unsure at all n locations
tgaaaaaaaaagagaggccacgaagagagctgagctgctgcctctagcttacttggtgataaggaggaggaggaggaggagggcaccnacatggcctgagtcacggcctacaccgtggcgctcctcggcgccaccggcgcgcgcgttcccgccgttccacgctccttcctgcttttgccgccccgtggttgagctcttcaaccgttgcgtctccagtaatctttcgcgtcttgaccctgttcctcggcaggtgcggtttttcttggtgaacattccatttcccacccggttattctctttttacccccccttggttcttttttttctcaccaaggttttcccccctgcccctttttttcctttttcttttt

SEQ ID NO: 431591 - DNA, 392 bp, Oryza sativa
ttaaatagccctactttaccgtaatggctatagctggtttactggttggtggtactaattgatatggtttgctggttggtggtactaattgacttattttgcccccttgcattagttttaatatggatcagatttccaaatagattggcatcttttgatacagaaattggataacctgccgatgaagtggtggaaggccgtggatgaacaattccactttgctgctaaaaatggacaggtctatgttgaaggatctgacagtatgtgttgctagatatcatacattgacttagagaagcatgatggctggatttaatatctgaagcagtcgttgtgaaattactttgtctatgctttaaccaagagcgcttaaacactatcttttaatttat

SEQ ID NO: 431592 - DNA, 274 bp, Oryza sativa
  unsure (1)..(274): unsure at all n locations
tttgcgccctctnttnnnnnnnnnnnntggtttcttgagaagcagaattttatttagccattagggcctgagaaacattccaggattacaacagcttttagggggctactacaggcatcactggttacatgcatatacagacggtaacacccaataataaccggaactcctgaaggaagaagataggaaattaggtcatctaggacaacaattacgctggggttggctctgaaagggaagcaaaacccccgggtaaactaaagaccaacaaaca

SEQ ID NO: 431593 - DNA, 236 bp, Oryza sativa
ataagacgccgcccaactcgcgaaggcggagggggaaattaagagagaaaaagagaaggaagaaaaaaaaaataaaactcgcgcacagcaaccgaatcatctggctcctcctcaagtagtctagacctcctctcttctccggagtctgcgtgcgaacgaagcagaggagcttcgtggccggccgggccgccatggagagccgcaaggaggaggagccccattggggaggaggggcc

SEQ ID NO: 431594 - DNA, 348 bp, Oryza sativa
aaaaaaaaaaaattttggccttttattggggtttatcaaaaacaaggcccaaaacaagggggggtcccttttttaggggggggaacccccccgggggggggtggggcttagcttaggggcccccagacccctggaaaccgggggggttgggggcgatgaaactaaaaaactgcccccgcctggcgttggcaaaccccatgatcccgccaaggggacgggggggggccttttgggcccccccgggcccctggggccccggggggggaagggggccccccaaccggggggggttccacaggggccaaaccccgccattgaaaaacccgggggacccggggttcccccggg

SEQ ID NO: 431595 - DNA, 384 bp, Oryza sativa
ataaaaaaaagggggggaggaaatttagcaaaaaaaaaaaaaggggaaaaaaaccccaaaaaaaaattggggggaaacaaaacaaaaaaggggcaaaatagcgccaaaaaaaggggaaaaaaaaaaagggggaaaaaaaaaaagggctgaaaggggcccctgcccaaaaaaaaaaaaaaagggggaaaaaaaaaaaaggggggcaccaaaaaaaaaaggggcccagggacaaaaaaaaattttttttttccccaaaaccaattttttttttttccccaaaagggggggggggccaaacccaaacgggagggggaaaattttgaaaaaataaaccacaatttccaaaagggaaaaaaaaaaaattttccccggcgggggggaaaa

SEQ ID NO: 431596 - DNA, 296 bp, Oryza sativa
gcgcccttttttttttttttttttggggcaaatgaaacatatgagccatgacaccatccatccacaaacacatacgcagttttccccacaccatgggaagcacatcctggggtttcaatttacataactcctcaaataccgggctgtattaagtttctacagtgagggacgcttgctagtcaggcatgggctggatgaggagtgtgccctgcccatggctggtgcagtatgcgtgagcagcacagctgcagcaggagcggaggacgagagctgacagcatgccgcatgaatgatga

SEQ ID NO: 431597 - DNA, 242 bp, Oryza sativa
ttttttttggggttttttttttttttttgtcttttttttttttttttttttttttttttttttttttttttatttttttttaaaaataaaaaatattaaaaaaaaaaaagggaagaaaaaaaaaaaaacaaaaaaaaaaaggggaaaaaaaaacaaaaaaaaaaattttcccccaaaaaaaaagaaaacagaggaaaaaccccaccaaaaaaaccggtaaaaaaaaaaaaaattgaagatcc

SEQ ID NO: 431598 - DNA, 294 bp, Oryza sativa
  unsure (1)..(294): unsure at all n locations
ttttttttgggggttttttgggnttttggggttttccccttttatctcgcagtttagaccgtaaaaaaaaagagtaaaaaaatgaaaaagaaaaaacaggaaaaaaagatcaaaaaatcccaaaacaaaaaaaacacaaagaaaaaaaaaaaaactgaaaaaaatgaacaaaggaaagaaaaatgaaaagaaactgataaaaattaaaggattataaaaaaaaaggaagaaaacaaaacaggagaaataaaaaaaaaataaagtccaaaaaagggaaaaaaaaataagtgttac

SEQ ID NO: 431599 - DNA, 235 bp, Oryza sativa
tttttttttttttgttttttttgtttattttttttttttttttttttttttttttttttttttttttttttttaaaggaaaaaaaaaaacctttggaaaaaaaaaaaaaaaaacaccatttgaaaaagaaaaaataaaaaacccaaagggggcggaaaaaccaaaccttggaaagcaaacttctaaatttcaaaaaaagagtttttttttttttctttagctcgcccggtttttg

SEQ ID NO: 431600 - DNA, 136 bp, Oryza sativa
tcactatagttaaagctggtaccgctggcgggaccgcggcccggatttccggggttggcccaccccgtccttttggaaaaaaagggtggtttcagaaccaaacgggaaaatgggtttggcaggaccactttggaaa

SEQ ID NO: 431601 - DNA, 140 bp, Oryza sativa
aattggagggtttattgggggttccaaaagggggggggcaacattactttggtcaccattacaaaaggcttaagcaaggaacagaaaacgaaaacgctcctacctgctaatagggaaaaaaattaaaacacaataacccc

SEQ ID NO: 431602 - DNA, 122 bp, Oryza sativa
ttcatgtggaaccaaagagggagctctttggaaccaaggttgggggcttaagagaccaaaaaaaaattggttaggcgccccgggaatctttaaaaacttttttagtggtggggaccaaaaac

SEQ ID NO: 431603 - DNA, 417 bp, Oryza sativa
ggcgacataacttaggggtagattttccaagggctaaatagctggatcgctcaacagggtttagatcccatgtttacaccaaaatttggggttattaaaaccattggcgacagggaacataattttgatggataaaagggataataggaatccatggatattttgcactatgtaaatggccacttccaagggctttttgcatactgaagggttggtggtccatatgatcaaagggtcaaaggcaaagccctcatttttcaagcaagggctactgtttacacagggcagtttcaactggcaaacaattttgagtttcacctgcctatagggaaaaaagtttttaaactggagcaattaactgatcaagattgcaacggggggcaggagggggccatgggcttctgagtttttcctggt

SEQ ID NO: 431604 - DNA, 461 bp, Oryza sativa
ttgacttaaaaatactaatgagttacatgcaaattttctttttagcttaaaaaggatattgagctaatgatagtgatgaccaggtgggtagtaacttattgtcttgtcgggaagatttgaaaatattattatgctatatatgttgtatattatcggagccaaccatttacttataagtgattatggctggctgcagtgttccttttgaacatttatgtgaattttgaagcctggatacattatgaaatccgaatatctccttttcttttcattggaaaaaaaatttgtatgcaactttttttctgagcaattacttcctgttgtagaggctgcagagtttgaacttgttgagcccatctaaatactctaaaggagatgctgaaagaggaggtggatgagagcactaaaagaaagtttgatagttgggggtgtcttttggttactatggttaaaaaacaaac

SEQ ID NO: 431605 - DNA, 202 bp, Oryza sativa
  unsure (1)..(202): unsure at all n locations
accagtgggaattttttnggcgatcgaaccatcccatttacatatattggacacaccgtatgcgtggacaataaacgttaccgcaagttatgaaaggtaaaggcactgacctgcaccataccgggagtttgcgcagcatatagcctggggacttgagctaacggtcttttatacaaacatctaaggctacagcgcttaatag

SEQ ID NO: 431606 - DNA, 75 bp, Oryza sativa
gtatgaaaaagagggagacagttgaacacacggggcgattgaaaaagcgtgaccgaccgagaggtgacggaagaa

SEQ ID NO: 431607 - DNA, 184 bp, Oryza sativa
  unsure (1)..(184): unsure at all n locations
aaaacccaggngcgcgaggcgcgggacgagagcggaccgtgcgcgggcaagaccaaggggaggtgagacagcgaaagtatttcaaaaagacgaagcaactagaagagaccggaaggagggagagaaggattcacactgaagaagcggacagctaagacaacatagcggttaaggcgcgaagcca

SEQ ID NO: 431608 - DNA, 420 bp, Oryza sativa
ggggggccaacaaaaatttccgaaaaaattaaactggcctcgcacaggtcaattttacatggtccaacaatgcaaagtaccacaagggaaaggcccattgaaagcccagctggggaactagatccaactatcgggaactaggaaaagccgctgcgggaaaattaaacagttcaaactggagataattttgcaaaacgggcccaattgcctgacaaccccttaaaaggggggattggagaataggcaaaagctggggcccaaaacattactgttacaaacaaaatttgaaaaccccggagcttctggcactaagcaaaatattgaattggggactacccaacttttggaaaacctttagttccgggggcattacaagaaaaggcctagcgaattaacctgggaaaagggttaactaaaaat

SEQ ID NO: 431609 - DNA, 283 bp, Oryza sativa
cacatgtagaaacaaagaggggagctgatggaaacgaggctggtgggctaaagaacaaaagaaaatttgctaaggcaacagggaattcttcaaaagcttcttcagttgctggatcaaaaaagcgcagaaaagctatgtttgaatctagtgaatctagcgcttcagacaccagcactgatagcgaagaagagattattgaagatggtcctgctgcaagtaatgtagggccagatcaacatccccgcagatcaagcaggcagaagcaagaagttaagtataatga

SEQ ID NO: 431610 - DNA, 216 bp, Oryza sativa
tctcctcatcccagagcaagaagctcatctgctccttctctcgcatggcagccatggccaccaccgcgtccagcctcctcaagacctccttcgctggcgcgcgcctccccgccgccgtccgcaaccccaccgtctccgtcgcgccgcgcaccggcggcgccatctgcaactccatctcgtcgtcgtcgtccactcccccctacgaccttaacgcca

SEQ ID NO: 431611 - DNA, 171 bp, Oryza sativa
agtgatgggttttaagagcactaagaaaatgtatatgcaatgacaaccaggtgaagccgggggacaaagaagagaggaaagcgggacaagcaaacgccccgaaaaaatgacaggcgaacaataagggggcaaacaagccaaactgattaatcaaacactgtatggtcaacc

SEQ ID NO: 431612 - DNA, 225 bp, Oryza sativa
  unsure (1)..(225): unsure at all n locations
cgcgcacgcgagcgcgggtcccctagagcgggcgccccctnnnnnnnnnnnnnnggagggaaaaattagaggngccaggaancacaaaaccaacagaanagacaaanccangncnggnaggcanggangaaacggngaaaccacaaaagcacaacnaggnncggggccccagacagcggaaggcacanccanaggaaaaaaagangaaaaaacaccnacgaaagc

SEQ ID NO: 431613 - DNA, 307 bp, Oryza sativa
ttttggtgctgtcactactatggtctggtttttgctttggcatcacgcgttatgtcaaagctaacggacggaagttcacgaaccgtcctcgctttcacctatcgcgccattgatgcgaacaaaagggattatatacacactcatggccgactcacctttctgggcatgcatgtgtgctctcagttttgtatcaagtttaactttccctctttgtaagattttgcacatgttctgaccatcacggctttatattttcttgttgaatgggaacatcaggaattgattcgttctgaaataaacatatggt

SEQ ID NO: 431614 - DNA, 299 bp, Oryza sativa
tttaaacctctccctgtccccactctcgcgcctcctcccatggcttccttcccgaccaccgccgccgccgccgccgcgcaggcattcgccttcgccctcgcgccgaagccatcctcctccgccgccgcaccatccgcgctcttcccccgcaccgccgcggcggcggcgttcccgacgctggctgtgcgaggaagcgggaaggcgaggcagccggtggtggccgcggcggcgggggcggggacggggagcgagcagagggagacgatactgctccacgggtgcgactacaaccactggct

SEQ ID NO: 431615 - DNA, 506 bp, Oryza sativa
acagcaggtaattgcttctgtacagcaggaagatatgatgaaaccctcaagttaatgggcgtcgaatgcagcaggtaattgcatttgcaatagcactgtggtttaactattttctacatgaaatggtgcaacccggataaatcaatgtcgctgcaaaattacttatgaaacatcgtggtaaaaacaagacaacctgataaatttacagattacgtttacctagaactatggatatttgtccaatccacgatttatgtaaacaccaccagcatcctcttattttcttgcatgatgacgcatctcggactgggtaacctccggtaaggttacaatattgcaccacccccatcttccagaagcaggatgtgaaatagcttgtgtagcgtccatcatatatatgtgcatcgctcacatttgacacttgacagtacaaatatccgtagcctgagaatgatgccatgttaaaattctaacttctcatgtggagtctttctttggtgctggag

SEQ ID NO: 431616 - DNA, 252 bp, Oryza sativa
aaaaggaaaaccatttaaggcaatataccattcgaaaggaaacatgaaccctggaaaaacaggggggttcaatagaggcaccagggggtcaccccgaaaaatggggggcttaaggaaacaaaccaagcggcccccaaggctgaacaataccttgggttggacaaaaaaaacggacgggggcgatcggaaaacagccttttttgcttaaacatcgttacttacccttggtgaaaaggggtgaaacagcccgaa

SEQ ID NO: 431617 - DNA, 158 bp, Oryza sativa
ttccactgaaccgccgacaccacccgccgacacccccttgcattgtgtagcggcggcgcctccgacatctatactgcgccgacatcccccatcctcgagctggacacggtggcacgccttcacctttcttgggtagcgttttctcctcatacttcccc

SEQ ID NO: 431618 - DNA, 292 bp, Oryza sativa
ataattagtttttttactatttacaagtttgtggaaagaaaacaaagagcaatttaaaaatttaactagcaaaaaccgatggagaggaaactgatgaacactgggcagcccccaaagtgagaatggtcatagcatagcggtatccccccatcggaagacatggaaaaccaagggaggcagaaggattctagcagggccttaggccgagaggaaaaacaagagcctatgacgcggttgaggggaccccaaaggaagacaaaccatgctccaagcgggacaagggggtctttaa

SEQ ID NO: 431619 - DNA, 440 bp, Oryza sativa
ttagtacataattttttttatgttatgttagcgttgaatattgacctggcctcaagttgctatgatagctctgaattttgatagataaacactgctaaggcacaagtgcggtattacagacatttcacagactgatatttataggattagatgttcaattaagtttcaggattttgctttgtttttaatgaagcatgatctgattttttttaccaattcatataattagatggctgagatttgttgtttcatgtaatgcatgcaaaatgtttgacttagaatttttcttgtagacaactcagggacagatggagtagtagctggagggccaatattatagcctaggacacgaacaaatgcagaaaatggaggtgttgattgctaatgatcctcggaatatgcccttagctggtgaagaaaatgttccaggtgttaataat

SEQ ID NO: 431620 - DNA, 170 bp, Oryza sativa
cgcgcgcgcgcgagcgcgggtcctctagagtgtgcgccctctttttttttttttttgggggtttaaaagaagtattagtcttttacccatgtccaaacaatccctaaacatggccagaggctttgctgatgatcagcgggtgactcgtgaaaacgaccaggattcccaga

SEQ ID NO: 431621 - DNA, 721 bp, Oryza sativa
ggggggaaaattttaaattcattattttatccaaaaagcaataacgaaagaagaacgatagttagggggaaaaagagtaaaaaaagaacaaaaacgatcacaaacacgaaagaacgaacaaacaacaaaggacgaaaaaggaaaatggcacttagaaaaagtaaaaaacacactaataaaaaaaaagggaaaaaccgccacacaaaaataaaaaggctagaaaaatattaacaaaaaaaggggtcttgttttcaagaaacaaacaacaaagtatttagatagaaaaaaaaaaggatgaaaataaaaaaaaaaattaaaagcggaaaaaaaaaaaaacttttaaaacccaagagccagacacgttataggcaaaaaataacacgaaaaaaaaaagttgtattgggaaaaaaaaaaaatacataataaaaattgaacaatagaaaaaaggggggggccaaaactaaaaacaaattgggggaaaagtaaaaaaaacatgagaaaacagaaaaaaaaactggttaaaaaaaaaaataataaaaaaacattaaaaaaaaaaaatagataaaagagaaaataaaaaaaaaaaaaaaaaaaagacgtaaaaaaacccaaaaactataaaaacaaaaaaaaaaaaaacatcaagccggtcgaaaaaaaattaggtaataaaaaaaacaaggaagaaaacttaaaaaaaaaaggtataaaaaaataacaa

SEQ ID NO: 431622 - DNA, 356 bp, Oryza sativa
ggcagaaaattttacatccattatttttccattttgcataccgcaagaagaccgctagctaggctgaatagagtgaaaaaaggccaaaaactatcacaacacgtggccgaactacaacacgtgcgcacggtaccacactagaacgtaaaaccttttttgagagcggtataccctaccatctatttggtagcacttatcaacaaggggcgaacagatcagccaagatgtaggctcaaatgtgcttgcacttagtcatgacggaacttactttatcaccctggtacgattgcaagttccgctccagcgctgatgaccatctcttgttgaatgccgagggggcccctcacactgggaag

SEQ ID NO: 431623 - DNA, 331 bp, Oryza sativa
ggggagccgggccccgaattaagatttaaaaccccccccaaggggggggggagacccaacccccccgaattggcccaagaaccccgcctaatccaaccaaaccggggggggtcttatttcaccaacccgacccggacttataaaagggctaacacccccccccccttttttttatttgggggctcggcgactcaagacgactggtactgggaaagggggaaggggaacaacccagatttaggggggggggccccaatcggggaagaccaccgggttgggggggcccccgccgggggaacccacctttttggggggcttggcgacgtccatg

SEQ ID NO: 431624 - DNA, 134 bp, Oryza sativa
tgcaaacccatcgtatcaaccaccaaatcgaaggcacgttggtgagcaccaacagcttcattgggcatggcttgggggctcgtttttggcgggaaccttcttgccggttattgaagggcaccgttcggggaagc

SEQ ID NO: 431625 - DNA, 170 bp, Oryza sativa
tgcacgcccaagctcagaacaaccaatattgaggtgcttatggcggcgacgccggaggacttcgcggccagcaagcgggccatggactacgtgctgggcaagcacgtgaacctcgagccgaatacaatatgcacatcatggaaggaagagagggagactgcccccctgga

SEQ ID NO: 431626 - DNA, 193 bp, Oryza sativa
atggaggcttagtttattctgacgaggattgggcttattgtaattacgctgacgggggctcttactgcctgctaaacaacagcgaattttatgtttggcatgcaggtgcatctgaaggcttatcccaggtgggtttactttagagaccacccgtatgcatgccacttattgatatgtacccaaaaaagtgggc

SEQ ID NO: 431627 - DNA, 260 bp, Oryza sativa
tgcaccaccacaaccacctacgactggccggaatattatcagaagccgtcgccgacgacgccatggacttcgtagaggcgtggggtctgaccccgctcgccgaggaagacctagtcgatcactacctactactgcgacagatgcggccttagcttagcagccacgagtaaagatggcagggacgaagagcttcgtaaggccggaatcaatcataacgcatttatgctgagttataagaaatgtaaactgccagcactaaa

SEQ ID NO: 431628 - DNA, 373 bp, Oryza sativa
caacggaccttaaataaccccataaaatggggggataaacccgaccaaccaacagaggaaggcattaaaaaaaaaaaaaaaaaaaaaaaggggggcttggtagcccttaagaagggagggggggaaaaaaaaggctggacaaaggttttggggaggaaaaataatccactgggccttaattataaccggaccgggcataaggggccctgggggagggggaaaataaacggggggactttcccgcggggccgggggccgccgaaggcccagccgggttttaagggggcgcgtggggggcaaacaaaccccgggaccccccggggacggggggggtttccgaaaacgggcccactgaaaagggggggggggggac

SEQ ID NO: 431629 - DNA, 717 bp, Oryza sativa
  unsure (1)..(717): unsure at all n locations
aaaaaataaataaaaaaaaaaaaaaaaaaaaaaaaaaaaaaaaattaaaaaaaaaaaaaaaaaaaaaaaaaaaaaaaaaaaaaaaaaaaataaaaaaaaaataaaaaaaaaaaaaaaaaaaggaaaaaaaaaaaaaaaaaaagaagggngaaaaaaaatgggggccctctttaaaaaaaaaaaaaaaccccaagtgggggctcccaaaaaaaaaaacaaacccctatagaaaaaaaaaaaaccaaattctttatgggggggtgaaaaaaaaaaaaaaaggtctttcaatcctaaaaaaataaaaaaaagaaaaaaaaaanntctcaactctgggttttttcggcccctcccacaaaaaagaaaaaaccccaacgggaaaaaatttttatggaaaaaaagaaaaaaaaaaaaaaatttgagaggagaaaaaaaaaaaaattttggaaaaaatcacaaaaaaaaaaaaaaagggaagacccccaaaaaaaaaaaaaagggggggggggaaaattttaccccccacaaaaaaaaaaaaatttttaaaaaaaaaaaaaaaaaaaaataaaaaaaaaaaaaaaataaaagtaaaaaatggaaaaaaaaaaaaaagggaaaaaaaaaaaaataaaaaatccaaaaaaaaaaaaatggtgaaaaaaaaaaaaaaaaaaaaaaaaggggggggccaaaaagataaaaaaaaaaacagggggtggg

SEQ ID NO: 431630 - DNA, 224 bp, Oryza sativa
gaagcacgccgacggaagcgaggatccagaagtgctggccgccggcgccgagaccgcccgagggggccggcacgctcgagagcggcgcctgcgccggaggcgccggcgcgcaaaagaaaatagccggctacgacggggacttaaaagggaacgcatgcgccggcacgccaagacaccgccaggggagaaggccaaggaagccggggacacgcggggagggcccg

SEQ ID NO: 431631 - DNA, 200 bp, Oryza sativa
tacatgcctagactgtgcctgatgcctgaggggtgctctaacggccatgcccggtcgctgaactctggatatagcttagatcgaggtctaaaaagttgtagctgcaacccgcgcaaattgatagcagactaggccttgtaccggtgttacatttctgctgatgagaacgttcgcttgccttgcgtaggcaactgccagag

SEQ ID NO: 431632 - DNA, 443 bp, Oryza sativa
tttgccgccctatctatttttttttttgggtttgcattcaattgcatatcaatattattaattttcacaaaaaaaaatggttacacattcttcccgctttcggggtaccaccgactatgaacatattgacagaaagacttccattaatctatgcaagttcaatggccccatggaatcatatatggcaagagacagccattcttaaccaaacttgatgaacaaaggatgcatatctccatctcatgccccactccccaccccaccaaaatctagagtgaggaagtaagaaataacagcatgggcacgaggaagaaatttctaggaggcaaaaaaataggtagggggtggaaattctagcaaattcctagggattaacttctaaaaaaggctaatagagaaaaagaaacgaacaattaaataagggtgatacactgaggagcgct

SEQ ID NO: 431633 - DNA, 373 bp, Oryza sativa
ttctgacggccgccaaggaggaggcggcagcggcggcttcggcgccggcaatgggcggcgaggaggcggcggcgcgggcggcgcagaagcggtacgaggggctcctcacggtgcgggccaaggcggtcaagggcaagggcgcctggtactgggcgcacctggagccggtgctcatccccgccgccgacaccgggatgccgcccaaggccgtcaagctgcgctgcggcctctgctccgccgtcttctccgcctccaacccatcgcgcacggcttcggagcacctcaagcggggcacctgccccaacttctccgcgccaccgccgggcgccgccgcggcattcggttcgtccggttcgcagcatcagtagtagac

SEQ ID NO: 431634 - DNA, 155 bp, Oryza sativa
tttttttgtttttgcgaaaaggaaaagaacaaaggcacaaagaatgaaaaaaaaaagatgggaaagggcccaaaggaaaacctaaaaaaacaaaactggaaaagatcaaaaacattggggctagaaaaaaaagggtcaaaacaattcaccttggg

SEQ ID NO: 431635 - DNA, 342 bp, Oryza sativa
tagtttgccgctggcgccgagccgcccgagggcaccggcacgctcgagagctgcgcctgcgccggaggcgccggcgcgtctttcttcttagccggcttcgacggcttcttaatagggaacgcatgcgccgacacgccagactccgccggcgagatggccatggatgccggggacggcggggaggccggaggcggcggcagcacgagcaggcgggacgaccagttgacaggcgcagagcgggagcgctagcttagggccttggcggggaacaggggcccccggcaggaagccgccgggctgcactgccatggaggcagcccccgacgcagcttgagcttgagc

SEQ ID NO: 431636 - DNA, 493 bp, Oryza sativa
tcctccccttccgtctctccgcgctccagctgcacgccaattaaaccctactcctcttgcgttgcgttatctgcggttccgtctcccactactcgcgcacacgtagaaacggaaggagaaacaaacaaaaggcgccgagtaacgcagatagagagttgtttccgcaccgagcgcgtccgcggcagtgtgtgtgtgtagcggtagcgcacgcgcggctcgcgggcgcgccggttgcaccagctgtgcgttgcggcgacgatggaggtgacggccgagttcggcggcgcctactacggcggcgcggcgggccgcgagaagaaggcgctgcagcaggggtgcggggaccacttcgccgtggacgaccttctcgtgttgccctacggcgaggaggatgaaacaacaagggaagggtgaggccaccggccgtaaggaggaagctgccggctttgggaacgcgttggcggactcgtcgaccataacgggcctggatagc

SEQ ID NO: 431637 - DNA, 184 bp, Oryza sativa
tttttattgttggtttatatttttttttgggttttaccttttttacatattctttttataaccaaacttaataaccccagaaaaaatataaaaaagaaaaaacccgaggacccccacaaaagaacaacaacaaaccaacacccccaaaccgaacccgagccagccgcattcgaaaaaaaaagca

SEQ ID NO: 431638 - DNA, 75 bp, Oryza sativa
ttctagaccagggaggaatcaaggcccgagggagacttttgaggccgaaggtggaggtcaagcggcggagaagag

SEQ ID NO: 431639 - DNA, 295 bp, Oryza sativa
cccattaaatattttcgaccttcatttgcaccaatctaaagcttctaaacagggggtttttgagggatgaattattcaccacatcaacaaggtagacggaaggcttaatcacaacagcaagggtagtgggcaccaagggcaggggctggaaacgtggcatttgaaaccaattaaaaagttctaaggggacaattgcagccaactgaagtacttttggaaaagggggcgggaaatggccaaaccataacccgtagccttcacagcatagagccccttcccggacggccattcattg

SEQ ID NO: 431640 - DNA, 451 bp, Oryza sativa
tccagcgcgcgaatgtacgtgcggacgcaggacccaattcagggactacaccgatccgcgccggcggaacacgagagcgtatagatatagattgtgccggtacaagcacccgctgcggaagggggaaacatggtaatccgtacgagctgatgtcgtcgtgcttacagagctcatacgctgcactttgattattctgccagaagacagtcttaaggccctgcgctacccagtcgcccggcgatgccgctcctgctacgtggatctggcggcgggatttgcaacggggacggcgtcgggccctgctcgtgctggcacagaagttggggagaatagggagaaaagggttacttggctttggtgagcatttaacgggaggcaagtctgccctggtgcaaaagggaaagggatcgcttagggaagtctaatattgaggttgtttgccgcggggttt

SEQ ID NO: 431641 - DNA, 86 bp, Oryza sativa
ttttcggtcaaagcttcgatcagagcatattggaagcgttgacaggttctaacgtattcgaacctacaactttttcacaagggctt

SEQ ID NO: 431642 - DNA, 444 bp, Oryza sativa
agatgatatacaagtatattagcgggtagtagttggtgcatttgaatagtggcattcgagttgagggctgatcattagcgcttaaggtgcaaagctaactagcgtagcataacggtggaagaggaggcatgcagttctgctgttctaaggtgaatgggctaatttagtgctaacaaaaggacgattccactatagcataggcgacacacatggcatttagcagacatctattggcgtttggagctgaggtgccttgtggaagcgaaagatgaaaacggaccgaagatgaatgccattgatcgctgcaaaagttggccatacttttttttaagttgcagcgaacatgggttgaaacatgtagagaaagggtgactgaaaatctgcctgctgctagaacttgaatgtgcatggctattcgacctaccatgagtggctgaatgtagg

SEQ ID NO: 431643 - DNA, 365 bp, Oryza sativa
ttgcctttgaatggaagtatagccaagctggtggatttacaaaattgattgcttgcagaacaaatgacaatgacctgattgggagaagtaggtaaatctgagctggctttgacatgtagtagtgtggcttttgcttcatcaaacaagtgcatcatcataatatggatgtcctgagaggactgctggacaggcaatgctgctgtggtggtgaaagtattatgcataacattccttatttttgctttcaaaatgttaatcaggtacatcacgatgttttttcctgtacatttccgatatgtgctctgattactgccggtaaatgtttttttccttaatgttcaaaatcatgtaggcttactgggatg

SEQ ID NO: 431644 - DNA, 319 bp, Oryza sativa
ttttgggtttttttttttttgggttttttttttttttttttttttttttgaatgtattttttggtttttctctaaaaagtgcaaagacaggttcagaaagagcaaaataaactgaacagaacaagggaggcaaactggacaaagaaagacaaaaacaccgcaaaaaggaaaaatttggggggaaaaaaagcaaacctggggggggaaaaaaggggggacggggggaccaacaaaggggcctggggaaaaccgggagaccaacctataaatgaccggggaactctagtctaaaggcatcgaaaaggccggggccaggaca

SEQ ID NO: 431645 - DNA, 316 bp, Oryza sativa
aaaaaaaaaccaaaaaatttttgggaaggaaaaaagggggggttaaaagggaaacgctttcaaagggggccctttaaggggggggaaaattaaaaataaaaaaggggttaaacaaaactgggtaggttccaacaaaaaaaaaaaaatttggttttggggggggggggaaaccaaaaaaaatttccggaaacctgttttccccattggcaaaaaaccaaaaagggttcccaggggggggggacaaaagggaaagggggttttttttttttttccgggaaaaaacagattggggtttttggcaacaagggaattttta

SEQ ID NO: 431646 - DNA, 442 bp, Oryza sativa
gttggtatataagtaatcattgaaatgatcttaccctctgtaagaatggaatacatgtggcagcttggccatgtacaacatgtacatttgaccaaaccaaatttccctccctttagaggagaaagaataaaagaaatagaagaagatacaagaggagtagtacatgtctagttgcacgtgtgatatataaaataaaggaaggcaaatcccctagtttaatttaatttatgtccccgtatacgccactggtgaagtccagcatgagtttgttgagcttctttgtgtggatcctctgtgggatcaccttgagctcatcactcggcggcgcagggggtcgcggcgcggcggcggaggagatgagcatctgggcgagcttggcggcgtcctccgggcggcagatggcgttgttgaagcaaaggtagcggccgtaggcggtgggcac

SEQ ID NO: 431647 - DNA, 434 bp, Oryza sativa
ggtcgttgacaagttttggttgggcatgaggatgagggagagcaacgaggaggagaagaagagcgtgtgcgtgatggacgcgtccggcccgctcggtcacgccctcgtcgcccgtctactacgacgaggctacaccgaccacgccggcacctacccccaccaccaccaccatccagaagaagagtaccagcagcacccccgcctgaagctgttccgcgccgaccccttggactaccacgccatcgccgacgccgtccatggctgctccggcctcttcgccatcttcaacaccccttcctcctcgcaatcgcagtcgcactcctgcttcctagatgaggaggagggatgcgtggagcttcaaggtgccccgcggctcacatcattctggaggcgtgcgcgcagacggacaccatggagaggggtggtcttcaact

SEQ ID NO: 431648 - DNA, 310 bp, Oryza sativa
tttttttttttttttttttttttttttttttttttttttttttttttttttttttttttttttttttttataaaaaaaaaaaaaaaaaaaaaaaaaaaaaaaaaaaaaaaaaaaaaaaaaaaaaaaaaaaaaaaaaaaaaaaaaaaaaaaaaaagaaaatgtggggaaaaaaaattgggggaaaaaaaaaaaaaaaaaaaaaaaaaaaaaaaacaaagcaaaaaaagaaaaggggaagaaaaaaaaaaaaatagtgatttttttttaaaaaaaaaagagaataaaggggaaggagaaaaagaataataat

SEQ ID NO: 431649 - DNA, 281 bp, Oryza sativa
aaaaaaaaaacaaagaaaaaaaaaaaaaaattttgttacaccatttttttttgggattaaaatcaaaaaggggatttttaattaagcaacaaaaaaaaaaaaggttaaaaaaaatggtgttaacccaaaaaaaaaaggtggaggggcccaaaacaaaggggaaaataaaccaccggggccaaagggggttttttttaaaaaaaaaaaattgtggttttccggggcgcgttaaaaaaaaaattttatttttttatttgggggggcttgaaaatttttttttt

SEQ ID NO: 431650 - DNA, 373 bp, Oryza sativa
ctgagtctttcatctggaacattgatggggaatcattatcaatggatgaacgagatttccaaaagaagatggacttggcaagggaacgcatgttgggattatcagctagctcagagaatcaggacaaccaaaacaatcttgatgtacgggagcaaaaatcacaaacactgaaagctagcagggattctgatgtcaatctctctttgaaagataatttccaaggtcctggactggaaatgagaagggacagtgatgcaagtagtaacccagttgaagcgtgtgcaatcgatttctgatttggagaagaaaggagcagccgagcttctagggaatgatgacttgaacaaaaaaattcaagagtacccattctttt

SEQ ID NO: 431651 - DNA, 274 bp, Oryza sativa
ggcccccggaaaaacccaggggttttttttcccccccgggaacaggggggggggccccaagaaaaaagggttttggggggggggcccccggggccccttttcccaaaaacaaaaacccggggaaaaaaaggggtttccaaaaataaaaaagggggggaaaatatttttgtttaaaaaaaaccccccggggaaaaccggaaaaccggggggaacactttggaaccccccgggaccgtttaatttgatagaacggggggcctttggtttgttttgg

SEQ ID NO: 431652 - DNA, 413 bp, Oryza sativa
ttttggtttttttttttttttttgtttttttttttttttttttttttttttttttttttttttttttttttttttttttttttttttttttttttttttttttttttttttttttttttttaaaaaaaaaaaccggggggtaaaaaaaaaaaaccccccccgggaaaaaccgcccccaaaaaaaaggggggttttaaccctccccccccccagggggggggccaatacccccccccccccttttaaaaaaaacccccggggggaaagggccccctttttaccccgggggaaaaatggggggtagggggggaccccctggcccaaatttggggggggaaaattggggggggggcccccccccccccccacaaaaaacggggcctttaccccccgggggggggggggcccccccg

SEQ ID NO: 431653 - DNA, 455 bp, Oryza sativa
ttttgtttttttttttttttttttttttttttttttttttttttttttttttttttttttttttttttttttttttttttttattttttttttttaattaataataattttaaaaattttttttttaaaaaaaaaaaaaaaaaaaaagggaaaaaaaaaaaaaaaaggggttcaaaaacccggaaaaaaaaaaaaaaaaaaaaaaaaaaaaaaaaaaaaaaagggggaattttaaaaaaaaatttaaaccaaggggaagaaaaaaaggttaaaaaaaaaagggggaaaaaaaattaaaaaaaaaaaacccaaagggggcaaaaaaacggggggggggggccccccggaaaattcgggccggcccccgggggggccaaaattttcctttaagggggggtaaaaaaaaggggggaaaaaaaaggaaaaaatttttttctgggaaaaaaattctttgg

SEQ ID NO: 431654 - DNA, 395 bp, Oryza sativa
  unsure (1)..(395): unsure at all n locations
gttgttaggcacaattggtactctagtttcagatgctatgtaccattctgattttagaactttgatcaattacctaaagtaagaatgtcaataaggaatgcaatcttgtatctgtggtattgtatagtactatgattgtattgccggtgcttaaggacaatcattgattattatcagcactattatgttacagttctgaaaaaaaaaaaaaaaaaaaaaaaaaaaaaaaaaaaaaaaaaaaaaaaaaaaaaaaaaaaaaaaaaaaaaaaaaaaaaaaaaaaaaaaaaaaaaaaaaaaaaaaaaaaaaaaaaaaaaaaaaaaaaaaaaaaaangggggggggcgttttaaaggaccaaaattttttacccccttcggtgtcacaaaaaattttttt

SEQ ID NO: 431655 - DNA, 130 bp, Oryza sativa
ctttgttttttgaatgagggcgcaaactccaactaaaattactaggaatccttccaattcctgagagattggttgctcctatttctatttcacttttcggccattcaacaggaaagtcttcttttgggaa

SEQ ID NO: 431656 - DNA, 320 bp, Oryza sativa
  unsure (1)..(320): unsure at all n locations
aantaatttggggttttagggagaatcccgggcttcccaacccaaaaaaaactttttttttttaaataggaacaaaaaggccataggctgaaggctaaaaaccacccattaaataacggggaaagacaattctgggttggggggttttaaaaggggccttaagtgggggaaaaacgacagtttacagctgggcgcaaacatgagttcgcgaattggtcacctaacccccggcaaaaaagctcaaaaaagggttggctggggcaaaaaaatttaaatcccgggaaaaaaggccggtaacggaaaaattcgggccaaccccc

SEQ ID NO: 431657 - DNA, 348 bp, Oryza sativa
tttttgtttttttttttttttttgtttttttttttttttttttttttttttttttttttttttttttgtcttttttttttttttgtttcactatttttattgactttcttggtttgaagcaaaatagcactgaaacacaaactgagctatgggctgcagcaggaaaagcatacatgagaccaaagcataaaagggcaagcatcataagggtcgaaaaggacagggggtgctgcacccattgaaaagggggaaaaaaatgttgtcgctgcaatagggggcctagaaggcaaacgccaaacattggtcatggagaacaacaccccacggggcgctcattgcctgaaaaac

SEQ ID NO: 431658 - DNA, 331 bp, Oryza sativa
tcataatccgcgacgacgaaaaccctagccgtcgccggaatgtttaaggccgaggccgccgtcgccggcgacgccgccaagcccgacccggagatgggagtcgcgggggagaaggaggtggttgtggagaaggtgccggcgaggaggaaggtagtggcggaggaggaggacccgcggctgtggtgggcgttcgtgcggaaggtgtactgtattctggcgctgcagttcgccgtcacggtggagatcgacgttgtgtcgtgggccgtccgccccatcccgcgcttgttcgcggcgggctccctcgcttcgtggctcgtatacctcgccatgc

SEQ ID NO: 431659 - DNA, 371 bp, Oryza sativa
ttttgtttttttttttttttttttttttttttttttttttttttttttttttttttttttttttttttttttttttttttttaggctcaaggatttgggggcccaaccaaaagcccccttgggtcaaaaaatgggtgccccaatttttttttttagcaacatttgggcaagacttttggggatagcaaaccaaccccctgggggggggggactttggggggaacgggaaattggggcggggcctttggcaaagggaaaattttccaaaacccggccccaaatggaacagggtcaacttggggaaatatttaagggggggtcccacaaaaaaaaccttaatgggaaaaggggggtttttaccgggctaaaaa

SEQ ID NO: 431660 - DNA, 472 bp, Oryza sativa
cagaacccctgctgggcatcctcctctttcaaaacatcctttgctctccaaccacttcatcttgatgttcttaatctcctatagtctttccctgtgcgaattttttctttgagaaccaaagtttcttagggaaattctgttgaatttttcctttgagaaccaaggtttctcggggagactctgccaaaatttttatcaactagcaagttgaaaatacatcattgtacatatattttgtctgcacatttatatacagtagcaaaacctgtttgtagaggaaattattatagtgtttctgctggttgatccatgatagattaaacaggagggggtgtgactggtaggatgtcaccaatcctctcccgggtcatcctctccggatttatgatcagctcgacgctccggcgaggctctcatcttgtcctctctttctccgtcgtcttcctttactggttctatgtcttctcagtaa

SEQ ID NO: 431661 - DNA, 407 bp, Oryza sativa
ttgggtttttttttttttttttttttttttttttttttttttttttttttttttttttttttttttttttttttttttgtttgtttttttttttgtaaatttttttgtccttaacttggggccacaaaaaagggaaaaaaaaaaaaaaaaagggggtgtgcaaaaaaaaaaggggggggaggaacatgggaactatgggactaggcaaaggggagaaaaaaggggcccccaagaaggccccccaagaaagaaaattctcatttttttaaaaaaaaaaaaaccccggggctgttcggaaaaaaaggcgaaaaattataagggggggcaatctccaagcccccccgcgcaaaaaaaaaaaaaccagaaagggggccgggaccgaaaaaaaaaaaaattttttataaaaa

SEQ ID NO: 431662 - DNA, 414 bp, Oryza sativa
aaagcatccaaagctcaatatatgattgctgcgcgatgaaacatcaatgcgcattaagaaacacactccacgaatggctggcgagctcagactgcgctacagttcaatcgcattgttttacaagggagcacccattcctaccgacttaacgaaaaaggatgccttcatttaaccagatccattaaagaccggactcaacagaaacaggaattttctggagcggcctctgattgctttaacttggatcgaatttagagctcaactgctgtaagtcttcgcatttagtaggcttctttgggaggtggggtgtttacattgcttcttcatcaggactctcaggctcaaacttatccatgctagccatgcgatctatgccgtccataccaccgatgccaccgattatatcagctatgc

SEQ ID NO: 431663 - DNA, 443 bp, Oryza sativa
gttaggtacgtggtgagcggcgacgggaaggggaagttcaggaccatcaccgaggccattaaggccgtgccggagtacaacaagaagagggtcatcctcgacatcaggcccggcacctacaagtaattaactaaatccttttcgatcaaattatcccatccgtcctaaaatatataacggtagtagctttttacataaagtttttgaccattcattttaatatagcttattttattctggcttgttttatcatcaaaatagctataatcttaacatgtacttttatatattcataataattattttaataagacgaatgaacaaatgttatatgaaaaagcaacggcgtcatacattttaagatgaaagcaatataatctgagcatgaaatcatggcggattatatatatatatatatatatatatatatatatatatatata

SEQ ID NO: 431664 - DNA, 329 bp, Oryza sativa
aagtaaaaaaacgggaccccaaaaaaaagcgggggaattccattttttttttattccaacaagaaattttggggggaaatgtccgggggacctactttcctatttaagggctttaattaaattttgaggaacaaccttggccttgggggggggggtatgggggttgaaaccactgccctttttttggggggggaaaataaaaaaaacaaagtttgaaaagaaccccttgccaaggggggcggttttggggggctcctcggggaggccccggagagttttccccgaaaaaagaatttggagccccgaatcattgaacgaaacggggggga

SEQ ID NO: 431665 - DNA, 450 bp, Oryza sativa
  unsure (1)..(450): unsure at all n locations
ggcggggtttgaacgtgttcaacatgtcccgggaagaggaggaagcgaagaaattgagtcacagtgagctaagactacggccgctggacttcgtgcactccttcttcacggcgatggtgttcctcaccgttgcgttcagtgatgtcgggctgcagaactgcttcttcgggcagaatcctggcggcaacaccaaggagctcctcaagaacctgcctcttggcatggcgttcttgtcgagcttcgtcttcttgatcttcccgaccaagaggaagggcatcggatacaacgacaatacacccaaccgcaaggccgaggatgtaactaaaaattaaattaaagctcttatatacgtagctaggtcacacgtacatgtctctcaaaaatttcttgttagaatatatatataatgtaattaacaagtatttgattggagatcagttaattanaatt

SEQ ID NO: 431666 - DNA, 356 bp, Oryza sativa
ttttgtttttttttttttttttttttttttttttttttttttttttttttttttttttttaatttttaaatttttttttttattttttggaaaaaagaaaaaacataaacaagtataaaaaaaaaaaaaaaaaatttaaaaaaaaaaaaaaaagaaaaaaaaaaaaagaaaaattattaaaaaaaaaaaaaacggaagaaaatgcagtgaccaactaaaaaagcttgctctccattctaaaggaataaaaaacaacaagagacaaaaaaacccaataaaaaaagggcccaaaaaatttcccggccaaaaatctcaaaaagaaaaaattctaaaaccaaaatgccccccaatagaaa

SEQ ID NO: 431667 - DNA, 146 bp, Oryza sativa
ctggacgcccgccggcacggttccggacttactggccggatctacccacgcgtgtttttgaccgcgtgcagcaagtgtggatggggtgggtatctaacagttcaatggttgcgtaaaggctccacggagcccaaaaagtttgaagg

SEQ ID NO: 431668 - DNA, 321 bp, Oryza sativa
tttttgttttttttttttttttttttttttttttttttttttttttttttgaagtttatatttctttgaaacgaacattttttaagcttagcagaaacaaatcagtctactgggaacaacattaaaacacaatcctttcacgagcaagcacaaggttaacaagaaggggatttctaacgggggtggccagatcccaacaaccaagcaacaaagaaccgggcaggttgtgggatgaaatgccattgttcagttaactaaatccgggaggggatttttgatcaagggacaggggccacttaaagccattggcttttttttgaa

SEQ ID NO: 431669 - DNA, 434 bp, Oryza sativa
aatcagcagccgcagaataacaattccaccaagcattcatatggctcgacaagcaggacttctagcattccggggacagggcatgggggttaccagcaagatggtacttatgattcctacaacaaccaaagcttccaatggaatcagtactccaagacaacacctgcagctggtacaaatgcatacggtacccaggccttggagaaaccgaaaaggaaacatgaagagagctacagttacaactattctgctactggcaattcatatggccatgagagaactaattcaaggcgtggccggttttcaaagaggagaaggcatagtaatgatggttacactactatggattttggtggagataacagagaaactgtagctgccagcacagaaacaactgctttcactgacgtggcagtggcacaagtcaatggcac

SEQ ID NO: 431670 - DNA, 496 bp, Oryza sativa
aattattatcaaaaaaaagatagataagagagaggggttatttggcggttttgggggttttaagggcggtcgtttttgggggtcccggcttccgtgccctttgcttggcgcctcttggcttttttttggggtccccgggggggggtcccttgggggggccctttttttcccgcccggcggggggggcccctggggttttttttggggggccccttgctgcctttcccgggccgggtgtttcccccggtggcgggggggcccccgggggtgcccctttttttcggtggggcggccctctttccctttttgcccgggggcttgtttggggggggggccccccgttgggcgtttttctccgggtgggcggtttgggggggtttgggggccccccctttttgggcttttttgggggggggggggggggggttcccccctgttggctcccctttttttgggggtctttggggcgcccctcttgggcttcttctcttttttt

SEQ ID NO: 431671 - DNA, 443 bp, Oryza sativa
ttttgtttttttttttttttttttttttttttttttttttttttttttttttttttttggaaaaaacaagctttttactcccagtagcacaggcctggtgaatataagcataacatatttttatcccatcctacggatctaatggtctcaaaagggggttttttttttaactaatttttaaaacctaaaagaccgggtccacaccagccaggtatatggaggtataggcaaatatatatatataggggggggggggggtatatatggataagcccgccgccgaaaaataaccgggggacacctgggagggtaacccattgggggggcaggaggatctcgccgggatcggggtgcctgagctagggggctatttcatgggacaccttgccggcctttaatgggggggggctttccgccgggaagcattttcccaggtccggggg

SEQ ID NO: 431672 - DNA, 416 bp, Oryza sativa
ttgtttttttttttttttttttttttttttttttttttttttttttatgaacaagatggagacccttcatgatctttgcattaatatactccaattttgcaaccgtacaatacaaacaggctactatttggtttttttttcaccaacttataccaaccaaccaagggttaattaaacatgttttggaagggactgacattttcactgtattatataagactggtgaaagaaaccccacatgacccaaatacaaagttaggatgacaacttcaacaacaacaacaacaaacaacccccggaaaaaaaaaaaaaaacaacaacaacaaacaacaaccggggggacgaaaaacagtagctgaagccgatccaaattcctttggtggagaattgcgtttggatcacaacaccttgatggc

SEQ ID NO: 431673 - DNA, 403 bp, Oryza sativa
tttgtttttttttttttttttttttttttttttttttttttttttttttttttttttttttttttttttttttttttttttttttttttttttttttgggaaaaaaaaaaaaaagggggccaaaccccactttttttttttaaaaccccccacaaaggtttgaagggcctggctttaaggggcaaaaaaaaaaaggggtttaattttttggggaaatcccgcttttaaaagggttttttttccccaaaaaaacccaatttaaaaggcttggggggggccctggggtaacccccaaagaaggggtccttaaccggagaaaatttctccccccggggggggagggggggggcaaccagggggggttttgaacttgggaagggaaaaaaggcttttttttcgccac

SEQ ID NO: 431674 - DNA, 424 bp, Oryza sativa
ttttgttataattattctgggacgaaattagaaatagatatgtacatttctctaaggtttactcgttcctctaagataaatggcttgtgatgctttggatctgaagagttagatttttctaacacttgatatgagtataacacatgccgtctcatgattcacgtagttggcttctctgtgcctgactacgagggcccaccatagaaacagtagcagtatcagaagaccatgcctcggtttcttgttctgaagccaaagaagaccataccgtatgcctctcaaaaccctctctctatataaacagggccagagagtccagcactccaaataaaccacctcttcaaacgtgcgtcggctgaccgctttcatccatccaccagtctcgcttcttcgtgtctacggtctacctcggcgagtcggcggc

SEQ ID NO: 431675 - DNA, 141 bp, Oryza sativa
ttttttttttgttttttaaattttgggggggtttattttttttttttttttttttttttttttttctttttcctatcccccacaaaaaaataaaaaaaaaaccaaaaaaaaaacaaccacccaaccaccccccgcgcgaac

SEQ ID NO: 431676 - DNA, 305 bp, Oryza sativa
  unsure (1)..(305): unsure at all n locations
ccctgactttgtgaaatctgcagttgtgccactgacatgtgggccccactttttcgcgatggctcacatgtcagttccacaactgtaaaatgcaaaccgcacaaagtcaggggagtctctcgttcgcgtgcgggatggggtngttggtctcttaagagttgagaatgagatggtgtagtgttgatttcatgcggctgcgttgatgattcgtgttaaggcggatggaaggactattggaatcatgccagggtacatacacaagccacgctcgtgttgggatagtatctcgctctggtaccttgaca

SEQ ID NO: 431677 - DNA, 253 bp, Oryza sativa
tttgttttttttttttttttgggtttttttttttttttaaaatttttttgttttttttttgaagacaattaacttgttaaaaacccgatattctggtggaaactactaggtaaaaaacctaggccttccgcgattacaagagaagatcctacaaagcactaatttaagaacggtcctagggttcagggttattggggggggaaaaggaaaaggggaaggcaacgggacctgggtcaaggaacagatttcttag

SEQ ID NO: 431678 - DNA, 370 bp, Oryza sativa
  unsure (1)..(370): unsure at all n locations
catggtgcagcttcattaggaagctaaaacaggcattggctgtttatcaatctacaaagctgtgcactgaattggtgcacaaatatttttaagaatttcagggtagaacacagtcaatgcaaaccttccttgaattaactgaatagtttaattgtccaagcatctttctcctactggggctcaagatgtgttccaggatattgcaccctcatggttgnagtagttttttggtatttctgattcaaaagcaccgtttgtggggttgacatacattttgtgtgccatgcttctccagagattctgatttttggttgtggtagacacatccaaccaatcagtcctgagctccgcaaattcattcggtcaactg

SEQ ID NO: 431679 - DNA, 679 bp, Oryza sativa
ttccccccttcatttcttccgttaacccttcccctttttttcaccccaaacccccctcccccccccctaaaaccccccaaaatttaacccccctcccagcccccccctcccaaccaaacccccccctttaaacccccccaaaaaccccccaacaaaaaatacccaaaaccacctacccccaaaccccccccccccttttttcacccttccccccccttaccgttttaaacctcccatcccccccttaacccattccatccaccccctaaacaacccccttctaatccccccctcacccttaccccccaacccaccccttctctttctcaaccccccccccaacccccccctcccgccttacccccccctccccctaacccccacagccccccccaacacccattaacaccccccaccttcccccctccccccaagtctcacacaccccccccccccctataaaccccccccccccttcccccccccacaaccccccccccccttttgcacccacccaaccccccccattccaaaaattccaaccccccctcccccaccgaaaccccccccccctttcccccccccccttttccccccccccccctaacaccccccttccccctttactacccccccccctagcccacccttccccccctccccttccccccccctcccc

SEQ ID NO: 431680 - DNA, 186 bp, Oryza sativa
tctccctctgccgccgccgccgcatccacgctcagcagccatggcggtggtcgagcagccgcagcagcaggtggcgaagctcttcaactgctggtccttcgaagacgtttaggttgaacgacatttttcctcgcctactacctctcgtttctctttctgttcctttctacttaccttttctttact

SEQ ID NO: 431681 - DNA, 80 bp, Oryza sativa
tcggcggtggagaggaggtggcccccgcctacggcaagtgtacattaacatgcatggcggtcccgtgcaaggacccggcc

SEQ ID NO: 431682 - DNA, 91 bp, Oryza sativa
ttttcccttttttttttttttttttttgtttttttttaatttttttgggttttttaactttctttttttttttctttaaaatccctacccc

SEQ ID NO: 431683 - DNA, 448 bp, Oryza sativa
ataacaaaaaaccacactttttttttatttccccaaaaataaaaaaaaaccctttaaaaaaaaaacacgagctgaaaaaacccgaactttcttttaaaaatttccaaccccaacatatttcacaacttattaacaaaaaaaacccgctgaagaggggggaaaaaaataaaaacaatttctaaaaaacacggcccacctaaaatgtccacaaccaaattttaaaaaaaaaaatttaccccatttatttcttgtattttaaaaaaaattgcccaaaaaaaaagtgacttttttttttatagggccgaatccccccccccccgaatttttccaaaaataaaaggccacaaaaatttttcaaaatcttgggttttaacaaaaaaaaaaaaacaaaccccccccctcccgttttaaaaaccaaaaaaaaccaaaaaccttccggggccctttt

SEQ ID NO: 431684 - DNA, 532 bp, Oryza sativa
  unsure (1)..(532): unsure at all n locations
nttttcttttttttttttttttttttttgttttatataaatttttggggggttttactcttttatgaaaaattttttttttttattaaaaaaaaaaaaacgccaacccttttttttttttttctgaaaaaaaacaaaggggcccctcgggaaaaaaaaaaaaaaggcccccacaaccccccccaatttccccccaccaaaaaaaaacagggaaaacccaaaaaccgtccccggaaaaaaaaacacccggaacacccccgacttttggggcaaacaaaaaccgggggaagggccacaaggggcacaccccccccggaaaaccccccccaaaaaaaaaaaaaaaaccgggaaagggccaaaaaagaaagagaatcccccccttaagcccccccaaaaaacccccccccggggggggaaaacaggccaccctaaaccacccccaaaaaaaacccccttgggaaaaaaaaaaaaagaccttttagggggaaaaaaaatcccaaaaaaaaaaccccccaccaaaaaaggggcccccc

SEQ ID NO: 431685 - DNA, 257 bp, Oryza sativa
caactatgtcgatctccttcgctttaaattttgtggtagatttttgtctccttcgctctccacgctaccgcctcgccgtgccggagcccgggcgttccccgccgtcgagaaccttcgtctccgcctccatctcctccgccgccgccgcagatggatcgggaagaagtgacggagttcctcggccaggtgcccctcctgcagtgccttcccagttcctccatccgaaggatcgccgacgcctccctggtgaagcgcta

SEQ ID NO: 431686 - DNA, 251 bp, Oryza sativa
aaatcacactcctcctcatcagatccacacccatcctccccaccccccaagcggcggcgagaccaaatcccccacttctctctcaatctctctctctgctagggtttatccctccgcgccgccgcccccggaagacgagagagcgccatggccggcggtcccgggcggtgtcgttcctgaccaacatcgccaaggcggcggcggggctcggcgccgcggcctccctcctgtcggcgtcgctctacaccgtc

SEQ ID NO: 431687 - DNA, 428 bp, Oryza sativa
acgtaggtgaggcggagcgcagactttaagttgtatgggagtaaagggaggtcataattacaagaaatgaagtagggataggaagaaaatatatggaaaaaggcatctattcgatctacccaactacgcttcttgaaaatttaaagaaaatggaactcaaccaagaatcgaactactttacatcaacaattgtttgtctatcatcaattctattctgtaccaacatggtgcatggacatgtctgactttgtatcatgatgctgcagccgtatcacccctgtcgtgtaggagcggatgccatcctctgatgatgataactggatgccatggtagtaactaggactacggcgaggccaacacgcacagtctagcgggagctggagcaccttgacagagcaagccttctccaggtttggtgtggcatggag

SEQ ID NO: 431688 - DNA, 295 bp, Oryza sativa
  unsure (1)..(295): unsure at all n locations
tagagcgccccccccctnttttttaacccccnaanccaaaagcccacaacgcccaataaaaaagacgccccccnttacaacccaacccccgcaaaccaacccccaacacncacaaccaaccacacaaacccccnccccgccaaaacaccacccccccaacaccccccaancaccccaaaaaaccagggccaaacccaaccccctccccaaacctccccccccccaaccccaaaccccaaaaccccacaacaaaaccccccaaacccacccccccccaaacacccccaaaaaccca

SEQ ID NO: 431689 - DNA, 103 bp, Oryza sativa
ccacgcgatctgtctcgccgcctcctccccctcctcgtcgtctccgttttcgaacgcacgaacgtcaccagcctccctggcctcgatggaacgctcctttccg

SEQ ID NO: 431690 - DNA, 386 bp, Oryza sativa
aatgaacaattgacggaacaaaaacccatttaaaatcccatgttcaaaaagggaaacacccatgggaaaccccatggggacatcgaatttaacattgccccttaaatctcccccaccagccaaggaaacaggccaggaaatttgttccaaaaacttggccaaaaacacttacataaggccccccatgaggcccccgattggagaaaaaattgtttaaaacaatggttccagattctttgccccaatgttttccccaaagacatcgcaggaaaccccccggggatacaaatgccaggcaaactgcctgaaaaacaggggggagtccaaacaaggattcttaatccggatggtcgcccccaaccccctgggcggacccggggatttcc

SEQ ID NO: 431691 - DNA, 361 bp, Oryza sativa
  unsure (1)..(361): unsure at all n locations
cttttgttgttctgggctaacaatcctattaaggactcttgcttctacttcacacagttgatctggtactttgcactccatgtgtattcctgcgctgtgttctacgaatacattggtgtaaagcatcccgcacgctacctggaagcaatgttttatacaatactaacaaccaacggtggcctgatgaaagtacttaagttcatgtttttgggacaagaatgagaaacattttccttgtctggtgatatagaatagggggatattataagtcccgatgtataaatcaaattcaccatgnnggattgcagatgtgatctacttaatgaaatnggggatttataacgttacatgttccttcaat

SEQ ID NO: 431692 - DNA, 428 bp, Oryza sativa
cactgccgctccctctccctccccctccccctcccccgacctctactcctcgacctacccacctccaatggggtgtcctccgccgccgccgccgccgccaccacttcctccggtgcgtcgccgcctccgctgccaccctgcagaaggaactcacggtgccgcgcaccccaacagccgcgcagagccccggtccagtgaacccgcctacgctgttcgacagaatgcccgagaggagcgtcgcgacggtttccgctgcggataacctgctcgacgaaatgtctcggacgtgcgtcgcgggccgccgtggtcggcctctggaggcgcctcctcgggacggcggcgggaagagcgcgagcgccgcgatcgtggcgctggcgcatgccggccggcacgcggaggtcgtcgagctctttgccgctgcggagggg

SEQ ID NO: 431693 - DNA, 275 bp, Oryza sativa
atctacccctctcgccgccgccgccgccgccaccaccgcgagacgcgagaggagagtgaaagaaagattcagcgagagagagagagtaagcatgatgtccttcagccagcccgacgccttctcgccgtcgcagttcacctcctcccagaatgccgccgccgactctaccaccccttccaagagccgtggcgcatcgagcaccatgccgctcaccgtgaagcagatctctgaagcgcagcaatctggcatcaccgggaagaagggcgctcccttct

SEQ ID NO: 431694 - DNA, 274 bp, Oryza sativa
gttgtgagttgttgtaaagttgcgagagagagagagagagatcagttagtttgttgagtggaagcagatcaggaagatgctggagaagctgtgggacgacgtggtggtcgttcctcttccggtgtccgttctcgtgtagcttcgtccggctgttacttccctcccccttgtctttttcttagttgtcgtctgcttgtcgtgctgtttttcttcctagcttacttatttcgcttccttctacctcctcttctcctttattctcttttgatttttt

SEQ ID NO: 431695 - DNA, 307 bp, Oryza sativa
aacaacaattccatttttttttactttaacaataaatatatatttttaattttttaactttttcacttaataaaaactatcttcaaaaattcatctgaaaatctctaaaaaaaattcaaaaccccacaaaaaatttttttcccccccccccaacccctacaaaaattaaaaaaaaaaaaatcccttgtcaaaaacaaaattaaaaaaaaacccccccttttttaaaaaacactaaaaaaaaagggcctgcttccccccgactcaaaaagccaaaaaccaaaaaacttttaaaaaaaccccctcaaaa

SEQ ID NO: 431696 - DNA, 294 bp, Oryza sativa
ggggtgaagggggaaaacgtgcgggctccggctggccctaccgtccccttcccgtacgacgtgctccttgcggcgagcggcgacggcgacccctcgtcgcccgtggccatccgcctccatcgccgccgacgtcttcttcgtcgtcgcggctaccgcctccgacttctcctccttcgcatcgtagccctacgactccgtctgcatcgccgttgtcgtgcccttcgttaccgtgttcaccaactacgcttcgtctccatctctgtctcattgtctccctccgtctttgctagcctt

SEQ ID NO: 431697 - DNA, 239 bp, Oryza sativa
ggaggggatttatataggctgatctctaataaattcagagtagatctgtcccacattaacaaccacatctgtttcaggcctacagtttggttttatttaaaccaaatgccactcacatcattccctaagaccattctatcaaacatctgtgctttcctgtccatcatacccccaattttccttttctttgcatttgtactacaaaggcccctaaccaccaattccctttactaattaaa

SEQ ID NO: 431698 - DNA, 316 bp, Oryza sativa
  unsure (1)..(316): unsure at all n locations
nataatttttttttttttttttttttttttgttttttttatatttttttggtttttaaaatttttttaatttttaataaattttattttatataaaattattatacaataatacaaataaataaaacaaaaatatatctaaaaaaaaaacaaaaaaaaaaaaacaccaataaaaaaaaaacaaacaaaaaaaaaaaaaaaaaaaaaaaaaaaaaaaaaaaaaaataaaaaatataaaaacaaacaccacaaaaaaaaacaaaaaaaacaaactacataaaaaaataaaaaaataaaacacataaaattcacacatt

SEQ ID NO: 431699 - DNA, 517 bp, Oryza sativa
  unsure (1)..(517): unsure at all n locations
aaagcgtgttaatgatgggaaattttaagattcagttgggaagtcgtagtacagagttccgtaacaggcattcattcctgcattgctagagttaaagagacatcccaattttgagtagtgccaagtacagggtatcctttattttgtcctgcccaagtgtagcataagactaaacaaatggttctactgtaatttgtaaggtaatagtgatactacagaattgcagaactgcagattggttttgatacatagagttagctctgcaggtccaacaccttgagaagcgactaaatgatcaatttgctatgcggcgtgctttggagaaagcattaggttataagccttgtgccattcattcatccaatgagagctgcattccaaaggtaaaattttcctccacttttttcctcaattgtatcgcaaatgtttttgaaggctgtgttttcccgttgcttactgaaagcttctgngtctttcttctcatgttgtctcagcctactgaggaactaataaagga

SEQ ID NO: 431700 - DNA, 100 bp, Oryza sativa
tgcctctcgccttcgcgcgaccgcgccgcctgctgcgccgccggccggagcggctccgggaggcaggactccaccgcgcggaggaggtctgagcgcacct

SEQ ID NO: 431701 - DNA, 433 bp, Oryza sativa
tttttttttttttttttttttttttttgtgttttttaaatttttttggggtttttattttaataaaaaaaaaaaaatataaaaaaaaataaaattaacaaaaaagcgataatgggaaaaaaagaatggagaaagggggaaagtcgaaaaggtttgtgggcggttgggaaacaaaaaaaaaaaggagaaaaaaaaaaactaaaaagagaaaaaaaaaaaaaaaggaaaaagggggaaaaaaaaaaaggaaaaaagaaccaaagaaacgggagacaagaggcacataaggacaaaagagaaaaaaatgcgaaaaaaagggaaaaaaaaaaagggaaaggtaaaaaggaaaaaaccaaaaggcaaaaaaaaataaaaggaaaaaaaaccggggaaattaacaatggataaaagaagaaaaaacatctccaaggggg

SEQ ID NO: 431702 - DNA, 146 bp, Oryza sativa
acacactgccacacagggattgagagaagaaccccacggggcggagacaacgcccgtcacaccaacaaacgaagaggaaaaggaggccacacaccaaccctgcaaccccggggacgaaccagccaagaacgaacccccgccagagc

SEQ ID NO: 431703 - DNA, 357 bp, Oryza sativa
ggaaacaatccatacatacatacatacatacatgggatacgtccaggggagctgagctaccagcctaccaacaattacttattattactattattctccccaagcactaatccaatccagggatgaacccaagagcaacaagaagaaaaaaaagaagaagaattttggacaaaaggcctaaagagctagagcagcaagcaaacagaaacaggggaacaggggggaccacttacatggcctttttttggggcaggaaaaattttttgggtaatttcttggcacaaaatttgcaggtgtacatgggattgaccccaactatgacttgggccgcaaacaagcaagcaagcaagcccccct

SEQ ID NO: 431704 - DNA, 300 bp, Oryza sativa
gtgtgggggcgaggcggccggggatggataagctggtgcagttcggagaggaaggcgtggctcgtggtacggctgctgcccggtacgaggagaggaggtatgcgtgctcacaggctgcagatgcagcagcggatcgcgagggcccaagctaagaaggaagagcttcagaagcagccagaacaaattattctatcagaagttcgtcaaatggttcagcagatgcaagccctcaatcagcatcttgaagaagcttgataccgtcatagatgaatattttaaaccaattcttaagaatgctaa

SEQ ID NO: 431705 - DNA, 96 bp, Oryza sativa
tcgctcatatgaaatctgatggctctcttgaggaaagtgttgaaactcgtctccttaggaaatcactagaggaaatggctgatgtacgaagctagg

SEQ ID NO: 431706 - DNA, 394 bp, Oryza sativa
ggggggaaaaaataggtcctattacaaccccaagcatgacgggggcacggtggggaaaaaaaacaaaaaaaccattggcttacgggggcatacccatactttgggggggcccataaggggccccttttttccatttgcaaaaagggaacccccctttgggttttaaaaaaacaaggggaattgggtttaaaaaaggtgggccccgggaaaaaatttgagggaccccccctggaaaaaaaccccaaaggttgtaaacaaaatgggggggggccaaccccccccttttggggcttgggggtggagggggccaccctggttaagggtttcgaaaaaaaatacctttctttttcatggacaaaaaaaacgataccggggaggggcctttcccgggggg

SEQ ID NO: 431707 - DNA, 262 bp, Oryza sativa
ccttcgtgtcacagagtacaagcaatagttgctgatacttgcacaaattgttgccttactggtaattcatgtgctcgtaaacaagcacatgtgagttcacatcatcactacaggcaagagcatgatcggagcagtgcttgcggtactgtaggtaatatctacctgacagatgcccatggtgaaggaaacgctgcaagcgtgcccgtgctcccaaatgtgagaggacaatttgacatgacggagtcgacacctttcgtggact

SEQ ID NO: 431708 - DNA, 129 bp, Oryza sativa
gttctagaacgcgagcgccgccctttttgggttgggttaagtaaaaaaggggggacgaaaaaaaaaaaaggaaaaaaggagagaagaaaaagggaggggaagaaggaagaaaggggggggaaaagagag

SEQ ID NO: 431709 - DNA, 72 bp, Oryza sativa
cttcgtcttcctctcgccgctgattcgattcgatcctatccgatccaaggggtggggtagcaatggcgacta

SEQ ID NO: 431710 - DNA, 228 bp, Oryza sativa
  unsure (1)..(228): unsure at all n locations
catttccgttacctttccaccaaatccccaatctttttttttcttcttcttttcttgcaattgatgcgcttcgccatcgggatttgaggggaggaagaagaagggccctncnnncctactccccctttgtctcgctcttcacgctcattacaatttttataatctctttcttcttcaccggtgtccggcgcatccaggccggctgtgcaggcgctgcagactcccgag

SEQ ID NO: 431711 - DNA, 240 bp, Oryza sativa
actaaatagttacttaatttcattaaattttaattttttacatttacatactcctaatcgggcgccaccagggtaaaaaaaaaaaacgggggcaaacaatttcaaaaaggaacaagaaaaaaactcattttaaacaaaaaaacaaaatatgcccaaaaacaaacaaggggggcgccctccaagggggaaccccctctttaagccccccaaaaaaacaaaaaagtaaacccctacccacaa

SEQ ID NO: 431712 - DNA, 223 bp, Oryza sativa
gatctctgtgatcagtaggtcataaagataggaatgaaatggcacagtaaatcctttgttttctggaatagatttgctgcagtagccacaagttgggtgattcattttgatgttgccgctagctgtgtcattctcttagactattttggataagttggcaaagcattagtgcaatgctttatttgaggtattgactacatttttcgattgctcgtgtcttttt

SEQ ID NO: 431713 - DNA, 53 bp, Oryza sativa
cataaatacacacttaccggtacagatttttactcattttttacaaaacttca

SEQ ID NO: 431714 - DNA, 400 bp, Oryza sativa
atatttttttttttttatttacatcaccggttttttttaaatattttgggcgccttttcatttttacacacttatctttctatatcttactttttctccaattacaaaaacacaggggaacacaaaacacactatttcttgcaagcatacaaaaaaaaaactccaacccattttacaaatttcaccccctccccaaaaagggaaaaaaaaaacctccaaccaaacccaaaggggttaccccccccccaagggggatcaacaaaataccccaacccctttaaaaaacaaaggggttttgaaaaaactggccccctttcaaaaaatgtcacccaccgcaccaatggttttggaaaccgggcccaaaaaacaaccccggggcccccagagccccaaaaaccaa

SEQ ID NO: 431715 - DNA, 81 bp, Oryza sativa
tcggtttctccactactagcccacagctcccaagaatctctgccatttcttgagctggtcgatccatcggggagggagaga

SEQ ID NO: 431716 - DNA, 491 bp, Oryza sativa
aacaacacgtgccgattttacgagaaagggagcaatttactagagagcgacttcacatgggagatggaaatattttacatatgcatactgctaagctagcactaccagattattgagctaagacggcggcgagcaaattacagataggaacaagatgggagttcatcgcggccaaaaagacaatcttttgccacgttgagacaagccgcacacatgcacgtttttttatcacggcatcatgtgttcgatatcaacaactaattatactactagcgtctaagctacggtttgagcacggcgatcaccgtttgtccgtagcggcgaatcggccggtccgagtcaagcgccgccgtcaccgccgccgccgtacttggtgtcgggccttccgccgtccctcgtgtcgctcatggaccgcagtaatggcgactccgaccctactatggaggccttgaaggagcgcttgcagtgagccaatgcgctcttgatgccgt

SEQ ID NO: 431717 - DNA, 326 bp, Oryza sativa
tgctgctgaagctcaggaagccgaaggtccctgtcccggcggaatgtaacggcggcggcggctccccggcgccgaagacgaaccgtttcttgatcaagttccgagtggacgacgcgcccttcgtctcgctcttcacgcgcgacaacagctctcgcacctccgacgccggcgccggcgccggcgcagccaggccggctgtgcaggcgctgcagactcccgaggcggcggccatcaccgccgaggaatcggcggttcgcgaaggagatgctgctcaagtacctgaacaagatcaaaccgctttacgtcaagggtctcccgccgctacg

SEQ ID NO: 431718 - DNA, 240 bp, Oryza sativa
ccacactctttatttttgtcttaacccatgacaaactttttttcctaacaaaaaagggccacaaaatacccccccccccggggggccccccattgtttatttcatcaaccccggcccccttaatccaattttttatgcggggggggcccccccccccaaggggaacaaagccccggcccccttttatggccactggggtaaaagcctctttaaagaactcggcccccggaccccaccccc

SEQ ID NO: 431719 - DNA, 260 bp, Oryza sativa
acatctaatctatgaagtgcaatcttaatatatatctgaacaaccaaaaaggggacaagacactcagttaagtgtcaaacaaacaccatgatgttacaacttacaactgcgaaacattttgaaagaacagacctatatgaacaatctaatcataaaagatttggtggttggggaacaaaccaacaagggtggcttttaaagggagaaccccttagggatttggcagtttcaaaaagaacccggtcctggttcagaatacc

SEQ ID NO: 431720 - DNA, 93 bp, Oryza sativa
attcctccgggctgtggatgacctacggcggctggcgacgtgtttattgacttaccatgagagcacccctcccataagaccccaacccattcc

SEQ ID NO: 431721 - DNA, 227 bp, Oryza sativa
aatcccaaaaatcacatggggcaaatgttccatgatttcacaatcttgaatagtaaaccacactagtcagctctgccagagaaaatgattgccttttggtagggacaaaaaatgggaactggcttcccatgcattcattcatacttattattggctagcccaaccaaggctatggtaaggaatccactggcttataatactggttaacaaaaaaaaaaggactacca

SEQ ID NO: 431722 - DNA, 306 bp, Oryza sativa
aggtgaaaaccaaacatttttttagccgccggaaaaacccggcattttttgggggcgggcaaaccctggcgggagaatattacaggtttttttcccccccaagaattaaataaaacaccaatccgccaaaaaatgaatttgcaacaaatggggtcaacattatcacaagaagaaagccccatctgcatttgcaaagggaaaaggaaagctggaagcctagcctggtcttttcagggaagccatcacccccaggcctttaaaaagaggcgctcctgcaaacacagggctaaagggtggaacccacgc

SEQ ID NO: 431723 - DNA, 159 bp, Oryza sativa
gcttataaggaaaaaaaaaattcagccgcgagcccgcagcctccggtcgcctcctccgccatctactcggagctcccggatcgaggggagcgctcgccgccgccgcagcgacctcgccggatcacggcggcgggggccgatcgatcggaggccggtcga

SEQ ID NO: 431724 - DNA, 466 bp, Oryza sativa
ctttggaattggctctgatgtaatttctccccgtaaaattagcacttccctggctgaaaacgttgattttggaagacaatgcctaacagcagttcaaattcatggtgataattatttaattctgtgtggtaattgggagaatagttttcagatcatttcccttggtgatggaagaattgtgcagagcgtccggcagcataaagatgttgtcagctgtggggcagtttcatcagatggaagtgtaattgcaaccggaagttatgacacatctgttatgatctggcatgcattccgaggaaaatcagctgataaaaaatcaagaaatgcaaattatgatctgtctactaaggatcatgttattatcgaaagcccttatatattttatgtgggcatgatgattttatcacatgcttatttgttggtacggaacttgattttgttttcagggatcctaaatggaacatgt

SEQ ID NO: 431725 - DNA, 72 bp, Oryza sativa
cgaataagaaaagaaaggctttcgtctcggtgggcaaaagggcgaggtcaaagcgccggttctgcatccaac

SEQ ID NO: 431726 - DNA, 68 bp, Oryza sativa
tctctctctctcccgaaccttctcgccatggccgaccacgctgcggcggaggcggctccgcagcgttc

SEQ ID NO: 431727 - DNA, 382 bp, Oryza sativa
atattttctcttttttttttttttttttttgtttttttaatatttttttccctttttaaattttttcttattttcttttcccttaaataatcttacatacattaaaaacaccaaacaaaaaacaacttacctatcttaacaaacaaaaaaaaaaaaaacaaccccccccccacctacataaacaaaaacacctattaccccccaaaaaacacccaccaaccattataacaaaaccaaaaaattcccaaacccccccccatcaaaactaccccccccccccccaacaaaccccccctaaaaaaaaaatccccttctccccccccaccccctcccccttttttttttaccccaacccaagaacttcccaatccacccccccccc

SEQ ID NO: 431728 - DNA, 95 bp, Oryza sativa
ccgcttcatgctccgccgattcctctcctcctcctccgcctcctcctccggcgtcgtcggcgtcagcagcggcgccggccatgggttgtggtttt

SEQ ID NO: 431729 - DNA, 81 bp, Oryza sativa
tcgatcttctcacaaagctaattctggcttctcttatgactatcagttggttgatgttcctgattaccgtggcagaggaga

SEQ ID NO: 431730 - DNA, 426 bp, Oryza sativa
ggagtgaacgtctaggaagaacatgttcctaaatacattcataggacagctcctgatcagaatgatgtctacaaattgccagctgaaaaaaaaatgaaattacatccggaagcttagggcagcttttagatcataatcgctaaaaatgtttttgccctgtcatctgcgtcccaacgcctgggattgcaagacttgaacttgaataatctacactctcgaaattcgatttcaatgagagaatcgtggatgcaatacaaaatccctccaatcatgagtgcttcaactcgccgatgcagaaatcttcaatgatctcaaagactctgaagccatgttgagggcaacccaaaaaatccttctgtcgaatcaccaccagcattgtttaggatggcatctccccttggatgttcctccacataagaggtgaca

SEQ ID NO: 431731 - DNA, 150 bp, Oryza sativa
tgctgtcgccgccgtcgtgccgccgccggtcgtccacgcgcacccagatcccagccggcaggctgacgctgaatatccccgcagctaaccctgcttggtgaactcggcgagcaaccagagatcgtgtaagcgcggaggatcgggatggag

SEQ ID NO: 431732 - DNA, 89 bp, Oryza sativa
tcggctgcgccaccgccctcaacggatcattcttccgggaccgcggtgaggagccgacatggacacctcactccctcgatgagcagatg

SEQ ID NO: 431733 - DNA, 154 bp, Oryza sativa
gacattttgcattatataatattggaaggtaaagatataattatttatccctcatttcttctgctatggcgatacatgctccatgtagattatcattcctctaatccctttactagtctgcccgatcagcactgaacactaaatccaatatgtt

SEQ ID NO: 431734 - DNA, 341 bp, Oryza sativa
  unsure (1)..(341): unsure at all n locations
cacaannggaagcataggttatcttaaggaaaagggggttcctttacnggacaggaccaaatccttgtacaagacaaaaccggcccacatggaaactagtaaggcaggtcggattacataggagagcacgtgccaggcatggtagggggcaacattgaaccaacaacccttcacaacaataatagaccacggcgatgaacaaaactaggacgactctttatgctcttccacctccgtttactttttctacattaggttctttctcctttggagtctttctcgaacgtcactccagggacaagcttagggacattaatttacatttttctgtagcgtgtacc

SEQ ID NO: 431735 - DNA, 695 bp, Oryza sativa
tttttttttttttttttttttttttgggttttttttaatttttttggttttttttttttttttaacccaatttttttttgttttccttttatttggttgacaaaccccaaaaccccgttttaacaaaaaaaaaaggggcttttttgaaaaaaaattttgggcctagtgaaaaaaaaactttttttagggcccataaagggttaaaaaaaaaaaaccctgggggggggggagaaccaacgggacccgaagaaggccttctaaaattccacagccccatgcttaaggaattttttttcccaaaaaccctttaagaaagaaaaaaaaaatttttttcaccaacaaccctgggggggaaactcccctgtgaccccccaatttgtaaacggttctgggggagaaaaaaaaaaaaacccccctcccctaaaaaacttaaaaaacttgggggggccctctttttctcaatctttttttcccgcgcttccctggttttttttttccaaaaaacaccttcccatttttaaaagagaaaaaaaggtcttttttttccctattaaaaggggggggggtcaaaacccccccggaaaaaaaaaaagggggggcaaaaaaaaaccccaaaaaaatggtgtgaaaataaaaaaacccccccccaccccttttaaataaaaaaaaggtttgcaccccccccacttgttttt

SEQ ID NO: 431736 - DNA, 383 bp, Oryza sativa
  unsure (1)..(383): unsure at all n locations
aaaaanacacggggagtatatactgatgattccgcccatatagttagattctttataacactttaccacaaaatacaatgggtatagtatttatattacaatattaatggagcgaccgaccagaaggatgaattagccacttttccaagctggacacacatttttggtagataattaattatcacatatggcgaggtttgcatatactccctacatactcataaaaaaagttgttttggacagcgacacagccttcaaaacataactttcatatcttattccttttaaaatatttattaaaacagtgctgtctgctatttttataaaagaatttttcaagacaaatcaatgcaagtaatttttacatttttaaacccaataat

SEQ ID NO: 431737 - DNA, 211 bp, Oryza sativa
gcgcggtctcgtgggcttaatttaatttctctcttcatcatcatctcgctctcgatctcctacagaagctacaatagccagcaaatcaatcgatcgatcgatacgtgcaatggcggccatgaaggtgaacaagattgccgtggcggcgctgttcctggtcggcgtggtggtgctactggggctcaagatgtgttccaggatattgcaccct

SEQ ID NO: 431738 - DNA, 328 bp, Oryza sativa
ggggaaaaagctgcaagccaatgcatgttttgattaacggcaagatcatgcacattatcccaggaagggggggaagaatttacggggctttaaagaccaaaaaaaaggaaaattctgtctgatctactgaacaaaactcgggggcgccgggtccttcccttcctgaacctacacggggccccgcgccggggccggcactacgggggacggcctccggggggatgagcaacttgaacctgccctcctccttgcacgggtggagcaacttctgggacgggagccctatctcccggagaacgagccggccggccttccggggcccccgggg

SEQ ID NO: 431739 - DNA, 279 bp, Oryza sativa
ctcccgtactccggcggcctcgacctggtcacggtggcacttggggccgtgagcttcaatccggacgacgataagtaatttatctttttaatatattgttttatattttcaaatattatttttatattgtttatattcttattcatttttttattttaaaaatttatttatgattatttttcaatattttattttattaataataatataatattataaactttaatatattaatttttaacattttattattcttaattatattatatattttattaa

SEQ ID NO: 431740 - DNA, 240 bp, Oryza sativa
accataaaacttcaccacacagtctctacttcttagcccacataaataacaacacctaaatacacaccacctcccaaggcaccaacaaggatgacaaatactaaaccttctctaacggatgaatcttaaaacattcccaaggagccataaactcacacttacgtaccttccacacatgaagtaaactcacacaaatcaaaccaagcctttctttctttaactaccactttctgggcctaa

SEQ ID NO: 431741 - DNA, 177 bp, Oryza sativa
tgttgcgctactctactgtggtttcctcagagacggtcgcttgagcgccaaacctagctgcgatggatccattacggctgctagcgttcccctgggatggtgagcacgcgagcgctcgacctgctggggggttgtaggatcagggtggcggcggcgcaggtcgggccagaggagagg

SEQ ID NO: 431742 - DNA, 337 bp, Oryza sativa
tttgggtttttttttttttttttttttttttttttttttttttttttttttttttttttttttttttttttttcccaaaaaccgggaaaaggtaaaccgccggggaaacaatgggaggcaaaaaagggccggaggccccaaaaaaaaaccccaggaaaaaggaaatgggatttaaaaaacggacaaaaccggaaaaaacgggcccaaaaagccagggttcagggccaggcaacagggggtcaaacccacaaaggtctaaaaacaaacctggtgggggaagggccccaaaaaacacccaaaaacaacgggccagaaaaaaaacgggcggcaaaaaggg

SEQ ID NO: 431743 - DNA, 243 bp, Oryza sativa
tctctcctacttcgtcttcccccaattcaagaagcggaagagagagcgcggcggcggtggagagaaggttctagatcgctctggaggcggcgtgatctgggggcggccgctctgtggctactgcaccgagggatcccggcgcctgcagcggcttcgcaacctcccccggcgtggatgtcgccaacgtctcattctttcaatcttcttcacctcgcacccgggtggtcacctcgggcgcttcgt

SEQ ID NO: 431744 - DNA, 325 bp, Oryza sativa
atcataattgaggagatgttctgttaattgttgcttgcatgttcttctatcggttgcgtggtgacagatatgcgtgaattgaaaatctaatttaaccacaggccgagggagatttcccttatattctggtgatccgtgctactactactcctacttctgctcctacggtgtcgcctcctccccttcgatggacaccgtgagcgagagctgcatcagtagctggagccgtggggagatcacgctggccatcggctgtggccgctcgtcggcggcggcgtggactcggctggtcagctccggcgtggaggacgtgctggtggtgggg

SEQ ID NO: 431745 - DNA, 386 bp, Oryza sativa
gggggccaaaccgaagattttttagtaaaaacaccagaaaaataaacttgcagtagggggattggccaagggccaaaccaacaacaggtttacaaccccatacaggatttttttggggggcctaaacccaaaaaaggggggcagggagcccccgcttcattttaagagggaaaaaaaaccgaaggggtgccacacaggattatgcaggggtggtttttccactttcaaaagaaaagccctatttgaacccacccactcaagaaggccacaccaacaagggcacattattgggtcaagaatagaaaaccccagtttcatccttgggggatgaaagggtttttccgggggtcgctccctttgcaatttcccgggcaagggaagcgaaa

SEQ ID NO: 431746 - DNA, 412 bp, Oryza sativa
gaacaaaagcgtttgttcaataaaaaaaaattgaaatatggttgagcattctcacatacttgaatgatactctaaaaagttacactgagcatatctaaagctcgctataacataaactaccgatctcaatgtcgggggaaccttccacggaggttatggaatggaggaactccatatgggctacgcataccttagatggacactgatccagatctgaattttgaaaggactatcgtcatgttgtctggtgttgaacactgacctcgccagttttattgcggaggccaccgttgactactccaagccctcgatgttggacatctagggcttgaccaagactagctttaccacgtttggcgtgttggtcacgttcaccctgtacacgtgaccattatcctacgggtggctttca

SEQ ID NO: 431747 - DNA, 188 bp, Oryza sativa
ataaaaaaaataaaaaattatattaaattaaaaaatttaaaaaaaaaaaaaaagaaaaaaaaaaaaaaaaaaaacatttaaaaaaatcccaaaaagacaataaaaaaaaaaagtgggggagaaaaaaaaaaaaaaaatttttgcaaaaaaatcaaaaaaaaaaaaaaaacaaagcttaaaaaaacaaa

SEQ ID NO: 431748 - DNA, 281 bp, Oryza sativa
gggggaagggaaaaaaaccttttatttttaaaaaaggggaaaatttttaaatttgaaaaaaaaacttgatatttttaaaagaaaaaaccccttttttaaaaaaacccaagggataatttaaatttaaagaaaaaaattttttcaaaaaaaaaaaaaaatttaaaaaagggggagccctttgggggttaaaaaaatttaatgaaaaaggaacaaaattaaacatcaggggggcccccctggaaaaaaaaaaatgaaaaattggaaaaagggaggggaatttt

SEQ ID NO: 431749 - DNA, 282 bp, Oryza sativa
gggaaaggaaaaaaaaccttttattttaaaaaaaaggaaaaatttttaaatttgaaaaaaaaaatgtattattttaacaagaaaaacccctttttgaaaaaaacccgaaggaaaagttacatttaaaggaaaaaacttgttttaaaaaaaaataaaattttttaaagggaaaagcctttgggggttaaaaaaaattactgaaaaaggaaaaaaataaaaaaaccggggggcaccccgggaaaaaaaaaaattgaaaatttgaacaaggaggggggttttttt

SEQ ID NO: 431750 - DNA, 447 bp, Oryza sativa
gtagtggtatttatgggattgataaaaaatgaacttatttggaactaagcagtatgaattacaaccaagctagtctaaccataaagtgctcgagtaaatagtacacagtacataatgaaactatacgctacatggaaaaatatcgaagttatatatatctatcagactatcaaatatcctcgcttctaccagcagtgaatctcctctgtgctggtgtcgcccttttgctcacaatatgcctgcgctgcccttcgtacggcaggacatcctcgctgtcatcctccctaccgttaccatcctcatgaatcgagtcaaaaattttgctcttgccagtggatctccccagggttgatgctgccctagtgcgcactttggcacgtttgcgctcgccttcgtctggatcagagccatcgtccttccgatcgaaagagtcatcaaaacttctac

SEQ ID NO: 431751 - DNA, 528 bp, Oryza sativa
cacatcatttgatccatcaattcctaaacctgtattccaaacttctagcaagaccaaaacttttgacaagggcattgcaaagcctaagttctcagctggaaagggtagggaaacaactgaaacagaaatgaagaagggtgattggctttgcccaaattgcaacttcttaaattttgctcgaaatcggcactgccttgaatgcaaagcagatggaccaaagaagatagaaacagctaccactgaaatgaaaacgggagactggatctgtccacagtgccacttcatgaactttgcacggaataagatgtgttttaaatgtgaagaatctcgaccaaagaggcagctcatccctggagaatgggagtgcccctcatgcagctttgtgaactttcgacgcaacaaggtctgcttgaagtgcaagcatgaaggccccgaaaatgatacccatgacagccagcacggacacaataggtggaggaacacgagaggggctgacagaagtagaagttttgatgactctttcgatcg

SEQ ID NO: 431752 - DNA, 176 bp, Oryza sativa
aggttagtaggatgtgttacaccctgtactaaattaacttattctgtaacagaggaagtaatacactggtaaagggcaggatgttggattgggtttttatgaacttgtataaattaatcttgatcttttagtattccgtatttgtttactactggcctgcatgtgagtcagtccct

SEQ ID NO: 431753 - DNA, 224 bp, Oryza sativa
ttttgtttttttttttttttttgttttttttttttttttttttttttacaccgtttaccttaaacctaaattttcaaaagaaaaaaaagggtccaaaacatatgtaatacggacacaagaaaaaaaggggacatatctggattcccttaaaaaattccaaaaaatttaggtagcgcccactgggggaggaacaacaaaatttttatggcaaggacccggtcccc

SEQ ID NO: 431754 - DNA, 341 bp, Oryza sativa
gttaaggtgatgctgcccgaaaaaaaaaaagatccggtaccgggggaaacccccccagcaaaaacaatacaaaaaaggaaaagcaaagcaaaaaaaaaccaaaccggaacaaaccaaagggagggcaaagacgcccagcgaaaaaaagaagaaaaaaaccccccgggggggggcccgccaagtacggaccgggccccgaagggaagccaaaccacgttaaaataaggggaataaaaatagggggaaaaaaaggccaaagcagaatcccggggaaaaaggaaatcccctcacaataccacacaacaaacaaaccggggggaaaaaattggaaagcccggggg

SEQ ID NO: 431755 - DNA, 160 bp, Oryza sativa
tttgttcttcactgattcattaggcatcttgtcattgcccttcgtttgtacagatctggttatgttgtgctttgcatttactttcatggatagtatggactatgggggtttcactcgatacagaaacatctatatattctggcagtacaacattaccaga

SEQ ID NO: 431756 - DNA, 380 bp, Oryza sativa
ttttttttttttttttttttttttttttttttttttttttttttttttttttttttttttttttttttttttttttttttttttttttttttttttttttttttttttttttaaatatttttttttaaaaaaggaaaaaaaaaaaaccaaaaaaataaaaaaaaaaagggacaaaaaggaaaaaactttattttttaaaaaaaaaaagtaaaaaagggaaaggaaaaaaacccttaaaaaaaaaaattttgaaagggaaaaaaaaaaaattaaaaatttaaaagggggaataaaaacccttttttggaaaaaaaaaaaaattattggcgccctaaaaataaaaccccccccaaaaaaaaaaattaaaattttgggcttac

SEQ ID NO: 431757 - DNA, 406 bp, Oryza sativa
ttgtttttttttttttttttttttttttttttttttttttttttttttttttttctttttttttttttttttccccgggaaaagggggacaacttcaacatttttgttaaaacgggcaggcttaggatccagggacccagagacgttctaaagctcacatattaggggtttggatcacacagcagggttttaatgaagtccacagaccccatttgggatataaacccccccattttagcataacagtttttaccaatttaacaaatttgggtggcctttgacgggacaagggcttatagcagtttgggaattatttttggggggaaaaccctaagccgggggccttaagctaaaccaggcggggggagaggtcttttttataaacagccttttccttttccttggc

SEQ ID NO: 431758 - DNA, 387 bp, Oryza sativa
aaaaaaacgcttaaacttttttaacccgggttaaaaaaaggggaaaaaaaaaaattggggcgaaagcaaggccaaatggaagaattggggttaggggggggctttcggggccaaaaaaaataaaaatttggccagggaaaaaaaaggaccccgggcccccccccccaagcccttaaaaaaaaaaccgggggtccggggcggaaaaaaaattttttttgaaggggggcccccccccaaaaattggcccccccggggaaaattttttggggccaaaaccccaaaaaatccggaagagacaaccaaaattttggccaattcccccttttatggggaaccgtgaaaaaaaagcctttaaaattggagggggtgaaaaaaatcccccccaaa

SEQ ID NO: 431759 - DNA, 350 bp, Oryza sativa
gaaactgaaatatactgtttgaattccgacaaatggatgtccgaaacaagcaattaactaagcacacatattaccaaaccttttagctgcgtatataaaaaagctatggttttcaactgaaatcaagcttgctgagctgaacatcatcagatcatagcctaggggcgaagcaggggggggaggccaccgacatcgagtgacaggccctcgtaaggggccaacatggccatgtacagacaaaaagccatttcatcttgctcctactgtacggcagcgaaagacgggaagccgaggccacagttgatgcccagtgaatctgtcaagatggaacacacaaccgggttcggaag

SEQ ID NO: 431760 - DNA, 465 bp, Oryza sativa
ggaaatctctggtgctatggagaagggctatctccagatgagtgacctcgttcagaacttggttgatcaaaatgagaatggtaccattgccttgccagtttctgacaattcaaacaacagcaaccattctgaagacgtggatggaaattcaggggacattttaagtgaccaaaaccttgggtctaactttctttaccatgttgagcctgtggagcaaaatggcctagtgcttaatgaaaatatgttctctagtgccaatgctggagacctttttaatatatctagccccaatgatggattcctagaactgaaggattttgcagatattgcagatttggagaatcctttagccaatgaatccaccatctggccttctgatggttggccctggaaaccaactgattccatggaggctgtgaatggggctagcaatgtatttttttccttagctggtgaacagatatt

SEQ ID NO: 431761 - DNA, 212 bp, Oryza sativa
aacaaaaaaaaacttttgagctttggggggcttaggggctgaattagggcccaattaaaaataggaaaaaggggaaaaaattaaatctttaaaaaaaaaaaattggatacaaattttatggtttcgaggggaaaaaattttttttcgggggcaaaaaaaggcccccccctttttagcgaggcccggttgttaaaatcgggcccccctccaag

SEQ ID NO: 431762 - DNA, 472 bp, Oryza sativa
accatctctccgtcattccgcctcccgttgaccggggctcctccacatctcctctccatggtcgcgtggatccgccgtcggcggcgacggcaggggtggatccaccgagctccatcatttgtccgcccccgctcgcgccgatccaccgcctctcgcgtcggcagcgacgggaggggtggatccggcgacctccgtcgtctctccgcccccgctgacgccgatccaccgcctctcccgtggatccgccgtcgacggcgacgggaggggtttgatccggcgacctccgtcgtctctccacccccgctcgcgccgatccgctcgggctcgtcgtcgcgtcgtttgtgggctgcttcttcacgtccgtcgcctcgctcatcatctccaagctgcatccgccgtcggcagcgacgtgatgggcggatccagctcatcccttcagtcccaactctgtctgggtgttcaggaagagacc

SEQ ID NO: 431763 - DNA, 325 bp, Oryza sativa
aaaaaacccaacggaggaataatttttttttttggaaaaaaaaaaggggggcaattaaaagttaaaaaaaccccttttttttaaaaaaaaaggggcctttttttaaaaaatttgggggggaaaaaaaaaaagaacctttgggggggaatcgccaaaggaaacttaatgggggggaaaaatttcccctgggttttaaaaaaaaacccggccaggatttttaatttcaaaatccccgggggaaaaacaggggggggagggcatccaactttggttggggggccccccaaaaaaaaaggggtttcctaaaacaaagaaggttgggggg

SEQ ID NO: 431764 - DNA, 376 bp, Oryza sativa
tttttttttttttttttttttttttttttttttttttttttttttttttttttttttttttttttttttttttttttttttttttttttttaaaaaaaaaaagggaggaaaaattttttttttaggaaaaaaaaaaggggggcaattaaaagttaaaaaaaccccttttttttaaaaaaaaagggggctttttttaaaaaatttgggggggaaaaaaaaaaaaaacctttgggggggaatcgacaaaggaaacttaatgggggagaaaaatttccccggggaataaaaaaaaaacccggccaggatttttagttttaaaacccccgggggaaaaaaagggggggaagggaaaccaattttggttggggggcccccc

SEQ ID NO: 431765 - DNA, 449 bp, Oryza sativa
ggaacaaatataattttcatcaagaaaattcgagttcaacaattagataattatatttaaaaaataacatagataacaaagagtaattgctatattagtctgtcttcctagtagatggcatcccaacacattattgtctgaaataaggggtaccatcagaacagtaagaacacacttgcatagattcaaaacctcaagctgcttttcatctgtcaaaatagttggaattatgctgaaaggttaaagattttttccaatgcatctgacagcaaaacattcttataagacatggcaattcagagcaaatggcttcctattagtttatacagtttaaactgtgatagtgacttatatccagaaatcatctgcttataacacatgatactgattttgactgcaatttagtcctagttcctgcactaaccaatttaggcatcccatggagaatg

SEQ ID NO: 431766 - DNA, 520 bp, Oryza sativa
cgaattctgctgcattaccgcccatatggccggatcctgcgacacccgccggaccacaacgctgccatctccctcgccgatctcctccgtgtcgacgttgaggactgcctaagccagtgacgcccacctcgccgatctcccccagggccgttgccgaccggcatcgcaggggagaggaggggcgccgtcgtcctgctgcatccctgtataatctctcggcaggctatgcatctgtctatttggacatcctctttctcatggtgacctgcacggtgggtactatagcaagacatgttggaggttaaggaggagatgagcagctaatgaagaaaatgagtcaccttccaccttctacgaggatgtccgaacatggctgctcagggatggaggtgatggtctgcatctgcttctttcctacctataccgcaggctctggctggtacaaatgcaatcattcaccagttcttatgtcatggaaaacgtctgagttttctttaattactcacctccatctaatcgt

SEQ ID NO: 431767 - DNA, 413 bp, Oryza sativa
aaaaaaaatatataaaaaaaaaaaaaaaaaaaaaaaaaaaaaaaaaaaaaaaaaaggaaaaaaaaaaaaaaaaaaaaaaaaaaaaaaaaaaaaggaaaaaaaaaaaaaaaaaaaaaaaaaaaaaacaaggatacaaaaagaaaaaaaaaggggggggataaaaaaaaaattagaagtgaataaaaaaaacaaaaaagaaaaaaaaaaaaccaccaaaacaaaaaaaaaacaacttaaagtaaaaaaaaaaaaaaaccacgaaaaaaaaaggaaccaaaacaatttttaacaaaaacaaatagaaaaaaaatcaaaaaaccaaaggaaaaaaaaaattttcaaaaaaaaaaatgaggaaatgaaaaaaaggaaggaaaaacctaattaaaaaaaaaaaaaaaaaaacttaaaaa

SEQ ID NO: 431768 - DNA, 317 bp, Oryza sativa
ggtaggagggggactgactccgccgccgtcgctggtggcaatgctgctgcataatgggagctgattaccaaagaagcatactgagactgaggtggtaaatggtggataatttgctgtcgattatgatggaaatgcctattaaatgtttaaaattcctcttatttaattgatggttgctgctgtttaaatgctgtaaattgaagtgtttatatgctgtaaattgaagcgtttaaatgttgtaaattgaagtatttaaatgttgtaaattgaagcgtttaaatgttctttgtttagcattttaaggaacttaaagctca

SEQ ID NO: 431769 - DNA, 322 bp, Oryza sativa
cgtcgacctcgtcgagcacttcgtgcggaggtggcgggtggcggagctcgcggcggggctcttccacaagggccgacgcaacgcatgagtacctgtgcagatagtgaccaaagaagcataggaagaagaagcatttacaacgatatattataaagactcttttacccttaagcttcataattgaaaagagccctcgttcccaaggatgtgtttgatctgtacagggaatatggaactacaatgagctggactgaaggtcttgggatatgatttcgaactaatgacgatttccacgcttgtgttcatggcacattgccatacg

SEQ ID NO: 431770 - DNA, 382 bp, Oryza sativa
aaacaaggggaaaaaaaaattattttctgatttatctatatagccttcagttcaaagtttgatacttatactggaaaaggggaaatggacccagaacacgaatcaaccggaatttaagttcagttccagcacaattccaggcatccgcccgtttggctgatgtctacgtactgcaaaaatggcgctcatgtctgctagaccactaccaaattaggcccagaaaaaaaaaaccaagccttaagccttgaacattcacaggacaaaggctgcaaatggtccaagcaaactgatgcaaccatgcaaattttaggcacagttacactggggaaagaaggcatacatgtcaaggcaacatggcatgccattattacgccagttcact

SEQ ID NO: 431771 - DNA, 340 bp, Oryza sativa
atggaacatcacaaggaacccaaataaccgaagtttcgatcaacaacatttgcaaaattgccaccgcccaaaaaaattcagtccagtttttttagcaactaaaaacaagagcaaatttgctcaaattggcccaaataactttataaagcttcccaaatagatcactggaatagagcccaaaaagaaaagccccgagaattgaatgggtcaccatgcatgcgggatcattcttcaactcaagccctgcggttgccggatgaaaaacctttttggtctaccggggccttgcttccaaccaagtttttgtaaccctgttcccaggcatttagcttcccgtttg

SEQ ID NO: 431772 - DNA, 273 bp, Oryza sativa
caaggacaaacgcaccacctttttttcaacgactcaaacgctaattatacaaacgggggacaagttcatagcccatagggtccaaaaaagctagtcataacatgtttattggtacagagcttaggggcaaaccttcaagaaaaaagccccagtttgcgggaccggttacaccttaaaaacaggactaaattcttgccacctccggacccggtaaatttaaggggggaggtatcccaggcccggaccaaggagggcttcccttcgtggcgggat

SEQ ID NO: 431773 - DNA, 471 bp, Oryza sativa
ttgttttttttttttttttttttttttttttttttttttttttttttttttttttttttttttttttttttggaaaaaggggaaagcttttttctaagaccacctaaccctggccccggattaacccaagaccccccaagggggcctgaccaaattggttaaagcccccccccttattgccaagccacccggtttatcattcccagggctttttgggcccatgtccaaaaagccccaacccaaccttgggcgatccaagcaagcaaccatttccatttggcatcccctcacttcccctttccatcccttcccgcccccacggggttggcggcaatgtatttgcccccggttataaacctttccttttccccccccccagcccccggggcggccggcccataaaacttttgggccccggttaaccccccggggggccccaaggacattcccccccccccgttttttatcccc

SEQ ID NO: 431774 - DNA, 243 bp, Oryza sativa
ttttttttttttttttttttttttttttattttttattttttttttttttttttttttatttttaaatattttttttatgggttaaaaaaggggatagaaacaaaaaaatagaaaaaaaagaaaaaaaaaacgaaaaaaaaaaaacaaaaaaaaaaaaaaaaagaaaaaaaaaaaaaaaaaaaagggaaaatgaaaaaggaacaccaacaaaaaaaaagcaaagaaaaaaaattaagggaagg

SEQ ID NO: 431775 - DNA, 525 bp, Oryza sativa
gttttatgttacttctcttctctgacaaagatcacatcgcagtcgctaaagcggctaagaatcattaaatgttttactggttcccgccctcatgtgcatgccacaaatctcatttcactgcatctggataccataacaaggactcctgtgcttgagagattgccatcattagtgaaagcagacatcaaacttaatagtcagtgtcgcgatttcagtagttttgatgacttttctgggggttgcaatcatgaattctgcggcggttgtcgtggcgtacaagctgagaactgcgtgcttctgcgaggtttatcagaagctaagaatctggcattggtagctgaaactaaaatgtttgttttcagaagagacttgaagtggtgccctatctttaggaatttgaagactttgttactcaatgaatgctggtgtgtgctttccgatttgagtgcgctagcatgcattcttcagcattcacctgttttagaaaagctcactcttcaacttttttcgatgggacctaaacat

SEQ ID NO: 431776 - DNA, 352 bp, Oryza sativa
caaaaaaaccattgggccttttccccccaaagggaaaagggcccaacccctttttttttcgccccccaaacccggccaaaaaaaaaagaaaaaaaaaaaccccccggggggcccaaattaaataaattgggccctaactaaaaaattaacccccccaaaattcaaaaggcccgtttttaaaatggggccccaaatttttataccctccgggggaaaaaattggttacaccgggaaaaaaaacggatttgggggggggggaaaaattggaaacccgggcccccatgttttggggggaaaaaaattatttataccttaaggcccaaattttgtcacaaaatttggggggggggg

SEQ ID NO: 431777 - DNA, 325 bp, Oryza sativa
aaaaaaaaaaaaaaattaattaaaaaaaaaaaaaaaaaaaaaaaaaaatttttttttttaaaaaaaaaaaaaaattttttcaaaaaaaaaaaaaaaaaaaaaaaaaaaaatttcatggggagaaaaaaaaaacacacacaaaagagggaaaaaatttttaaataaaaaaaaaacggggaaaaaaaaaaaaagaaaaaaaaagaaaaaaaattttttaacggggagaaaaagacaaacaataaaaaaaaaaaaaaaaaaactttttaaaaaccctcggggggggggggagaaaaaaaattttttaaaaaaaaaccccgaaagggga

SEQ ID NO: 431778 - DNA, 446 bp, Oryza sativa
tttatatacgctacttatacgtcagagatagcttgactgttctaggggtcttgcaggcgggagcgggccaccgccgttgcggtggacgccatcgagcgtggaatggcgcgctggcgataatggagatggggtcctgggcatgagcggtctagcgctcctcgcaatgctggtctctcatacagaagctataggactggctcggcaaccacagcctgttaatgaccgatgcatctactgctcgtggttgaccccctctgagatggctagctacatgaattgcaggtggatttaccttttaacgcagacttggagctctgacacatattactgtagtgattgcgtgttgtgaagtggctacaccaatggccagccgtgtgtggcatatgtaatggatcatggtggtggcgacgtcaccttttgtgaggaagtacaagagtttatttcat

SEQ ID NO: 431779 - DNA, 382 bp, Oryza sativa
tttttttttttttttttttttttttttttttttttttttttttttttttttttttttttttttttttttttttttttttaaaccccccaaaaaaaagcaccaggcttaattatttaacggggaaacacgctgtactaaaggggccaaaaaaaaccataaaaaaaaaaaaatgggggaacagcccccaagattttagttaccagtttttggcccccacaactttggttcccaagcaaaaaggaaacagtttctcaaagagctaaacttaacttgggcctttggaaaatctggggcaggaaggattaaaaaacattctaaacggtttggtggggaggggcttgaaggggggaaaaaaactaatggaaaccctccctttcgaatt

SEQ ID NO: 431780 - DNA, 372 bp, Oryza sativa
tttgttttttttttttttttggtttttttttttttttttttttttttttttttgggtttttttttttttttttttttttttttttttttttttttttttggggaaaaactggccaatcctgggggaaaaaaaaaacagcacatgggctactatgtttgaaaaaaaaaaaaaaggggatgggtgggggccccctggatatgcacggggatacaaacaggggaaaaaaaaaaaacttctatttggggggggggaaaaaaaaaaacaaaacttaaattgacgacaacaccttttttcggggaaccaacaagaccacccgacccctaaaacccagggtttgttttattttccacctaacggggggaaccgggcctg

SEQ ID NO: 431781 - DNA, 369 bp, Oryza sativa
cgcgtcgctcaacacgaactcccgaaggcgaggcggctttggacgcacgcacgcacgcacgcgcgcgcggcctacctcctcggcgcgagttgctcagtcgcagggggggaggtgggagcggggcggggcgggcgtcccggtcggggattgctggttcgatccccccgcgcgtgtgggggtgtgggtgcgtgggatcgatctctccctctcgctcgctcgctcgctcgccctagcacctggcggtcggggcgtcgcatgcggcggcgcggcgaggcgaggcaaacgcgggtggattcgtcactggcggtggaggagaggcgagggggcggcggctgtgatggcgattcagacgatgcattcggagcagca

SEQ ID NO: 431782 - DNA, 399 bp, Oryza sativa
tttgggtatctggaacagaatggtttattgcaggaataacgcctaacttcagctcaagtctaatgagtcctgttgatctagcttcatcatgcattagaaggagtctaggacaagctctaatgctcaccatgtctctcgctaagattgtatcatcatcaaagctggctttatccttttgcatggatgcatgcaaaaacatatatcacatgtgtcacaagtcacagcattgaattgtaacctgcaaatgaacaacttattcctgccatgcatgttgatgccaacgcgccacgtatatatgcttaagagatcattgcatcctgcctccgtggaaggacgacgaccccggcttaatctcggcctccaaggtgccatgcatgtcgctgccgccaccgccatggt

SEQ ID NO: 431783 - DNA, 533 bp, Oryza sativa
gcgcgcggttgccacccgccgccgccggccacctctacgggtccgccggcgccgccaacatggggctcagcctctcccaggtcggctcccacctcgcctccaccctccaggaccacggccaccaccaccaccatcacggcgcctccccggacctcctccgcttcggcggcagcggcggtggcgccatggctgcacgcctcgagcacctcctgtcgtcgtccagcgcctccgcgttccggcccctgccgccgccgcagcagcagcctccggcgccgttcctcctcggcgcggcgccgcaggggttcggcgacggcggcgacggcagtggtccgcacggattcttgcagggtaagccgttccatggcctcatgcagctccctgacctccaagggaatggcaccggcgggccgtcgccgtcgggtccgggtctctacaacctcggttacatcgccaacagcgcgaacagctcgggtacttccagccatggcccaccgagccagggacagatgactaacaccgaccagttcagcgaa

SEQ ID NO: 431784 - DNA, 410 bp, Oryza sativa
gtgttgtggtcggacgagacctgctgccctcgcgtcggtaccgtcacctcctacggcgggcggcactacttaggggacgagcccttgctatagcggccaccaggtgcgaagcctgcagtgccggccatacaagtatatgcgcaccccatgcacgatgcagtcagaatgcagccggactacgccttctccggctaccgtccccagcacgagcagcagcaggctacggatcctctggctacggagctaagcgccagcccgactgtggcgaccgtccccaggccgagagaggagaacacacactgctccggctatggatctggatacggtggtggacgacggaagcaacaggaagaggatgagctacaggtgcagctacggtcgcatgccgcaggtcgaggagagctatggat

SEQ ID NO: 431785 - DNA, 365 bp, Oryza sativa
tctttttcttcttctccatgccgatcgcctccaagctcgtctacttccagcgccgccgcccatcgccggcgccgccggagccggagccggagcctcccgaccctcgccgcaggccctgccgagccggagccggagcctccgccgcacgccgccgcaagccgggtcaggaacatgttccaggaagcaaaagagatacctcaaagggtgtcgcatctgctggaaacataacaggacaagcaggcagcacgggctccagctcaaggctaaaccgcagcgtatcagatcatggccggcttcctgattcccgtcagcaggctagggaacggctacttcagaggcttaacagcgtggacttatcaggaaga

SEQ ID NO: 431786 - DNA, 413 bp, Oryza sativa
tttttttttttttttttttttttttttttttttttttttttttttttttttttttttttttttttttttttttttttttttttttttttttttttaaaggtaaaaaataaaaaaaaaaataaaaaaacccggggggaagggaaaaaaaaaatttaaacccaaaaaaaaagggggctaaaaaacccaaattttaaaagggaaagaattttactttaagtggaaatttaatgggattgggaaggggaaaaaacaaaaggcggaggccaaaattgggcacccccaaggggggggaaattttttttttgagccccaaaattttttaaagggaatgggaaacttaaattgggggcagccccccccttttttggctttttcggaaaaaaaaaaaaaaaaggcttttgggttgggggggg

SEQ ID NO: 431787 - DNA, 58 bp, Oryza sativa
tttggggttttatattttttgtgcgtatatttttttttatttttataatttataattt

SEQ ID NO: 431788 - DNA, 224 bp, Oryza sativa
tttttggtttttggttcagtgccttttaaaatattaacttaaaatttgttcactgtttccccgtttgttacatatgataaaggataccaaagcgggacacacatactgaacaaaagcacggaggcaaaatatgaatagcacagggggctaactatgtaaatcacaaaccccagctgcggcggcaaaagatgcaaaggggtcagcgggggtgccggccccagaca

SEQ ID NO: 431789 - DNA, 336 bp, Oryza sativa
tggttcttcaacaaatgcaagctgggaacagaatggtagtgctggaaatgattctgataagatggggaggttggaatgacgcaactgctggagctgacacgggagtcacacatccagcacaccaagggaatcactgttgggatttgcctgccacagcttaaaagagttcctactattggtgaggctgggtccctgcaaaggcagatgagtaggagaaaacatgtggagagcccgctcaacatgatgcttggtctgtccagggccctaacaggtcatcacatggaggatccagctggaacaagcagcctagcactcataatgatgacaactcctgga

SEQ ID NO: 431790 - DNA, 425 bp, Oryza sativa
ttttggttttttttttttttttttttttttttttttttttttttttttttttttttttttttttttggtttttttttttttttttttttttttttttttattttttttttttttttggaaaaaaaaaaccaaaattaaggggaaaaaaaaaaattttttttggccaaaggggcacactagtattaaaaggggaaaaaataaaaccgtaaaaaaaaaaaaaaaaaaatgggggggataaattgtactctcatttaaattgacaaaaaaattaagggaaaataaaaaaaagtggcccttaaactttatagaaaaaaaagggaaaagttttttttttttttgaaaaaaaaaacttttacggaaaaaaaaaaggagtaaaaacatgcaacccgagaaaataaatctaaaattcccccaatacatcaggg

SEQ ID NO: 431791 - DNA, 290 bp, Oryza sativa
tttttttttttttttttttttttttttttttttttttttttttttttttttttttttttttttttttttttttttttttttttttttttttttttttttttttattttaataataaaaaaaaaaaaaaaaaaaaaaaaaaaaaaaaaaaaaaaaaaaaaaaaaaaaaaaaaaaaaaaaaaaaaaaaaaaaaaaaaaaaaaaaatttttttttaaaaaaaaaggaggaaatataaaaaaaaaaaaaataaaaaatattttaaaaaaaaaaaaaaaaaataaaattttatat

SEQ ID NO: 431792 - DNA, 352 bp, Oryza sativa
tggggtttttaaatttttggggttaatatttttttttttttttttttttttttttttttttttttttttttttttttttttaaagaaggggggggccgggcaaaaaaggaaaaaccggaccgggaaagcaaaccaacccaaaataaaggaaggggaaaaaaagcagggcaaaagaaaaaaaaaggccaaatccggaaaaaaaaaaaatttttgggttccaaaaaaaaaaaaaaaaccaaaaggaaaaagaaaaaaaaaaaccaaggggccccaaaaaataaaaaaacaaaaaaaaaatagataaggggaggggcccgcccccccccccaaaaaaaaaaaaaacaagcccgcc

SEQ ID NO: 431793 - DNA, 103 bp, Oryza sativa
aaaaaaaaaaaataaaagataaaaaaagggggagatttaaaaaaataatgggtgggaagctaaagcaaaagataaaattaaggtgggccggtctatctgttga

SEQ ID NO: 431794 - DNA, 90 bp, Oryza sativa
aattaaattaatttaaattaaattgtattaaatataaaaaaaattaaataaaaaaaaattaaataaaataagaataaaaaaagttttttt

SEQ ID NO: 431795 - DNA, 493 bp, Oryza sativa
cttagataggctgttgtaggagtgcgaacatgtgaaattgatgattgttcctagatttgaaccatttgatttccactggcactggtcttgttatttcattcctttctctgtctctttgttacttgtgattacatatttgtttttacagcttaacatcttttgctacagctgaaagagaagctgtgagtgcagcagaaaaggcagagagaaaggtgcagcttagagataaaaaacgtagggaagagatggagagggttgagaaggagaagcaggctgaaatcaggagctacaagaacctgatggtccaagagaagatgacttccaacaagcaggttgcatctggtagcaagaccttggaagaactagaggatgacttcatgtgagaagacaaaataacaaattcatactgccagggttctctaaactgtgtttttgtcaaagacaggacaagcattcgcgggttgcaagcttggacaagatgatttctgggcag

SEQ ID NO: 431796 - DNA, 400 bp, Oryza sativa
ttttggttttttaaatttattggttttttattttttaaattattttatatttttttttttttttttttttattttttatggggacccgggggaccacccggaaaaaagggaccggaaccaggggggaaacaaaattaccaaaaagggggggaaaaaaaaggggggggaaaaaagggaaaaaggtgatcccggggaaaaaaagaaacccgaaaaaaatgcaaaaaaaaaaaaggggggaaaaaaaaaagggaaaagcgggggggcccaaaagggggggccaaccaaaaaaaaggggggagcccaaaaagcgcatttccaaaacggaaaaccgggcggcccaagaaaaaaaaagaaaagccaaacccccggggggggggggtcccggaaaggggcccaaggg

SEQ ID NO: 431797 - DNA, 290 bp, Oryza sativa
gggccaacaagagcccaaatttttttttaattaaaggaactagcccccgggggtactgggaaccaatcaccaaaagctggaaaattttggcatcccccccaaaaaaaaagggggaaattgggggcaccaccaacgaacccagggatgcaactggagctaaaaaaaaagggggggggaatggaaatatcttgcaaaaatagctcgctttgagttggggcaaatgggggaccccattttgaatcaaatgttggccggccgggaaaagaaagatgatgtaaaaggggtttttt

SEQ ID NO: 431798 - DNA, 96 bp, Oryza sativa
atgtttttttttttaattattgtttgttgtattattatttgtttgagcacgctgtcgaggcagtacttggtgtaagtgtgttttgaaaaaaaataa

SEQ ID NO: 431799 - DNA, 391 bp, Oryza sativa
atatcaccaaccaacttttatccgcatttcaacttaaaaagagcatgccttaagacatgtaacaggttccaaaggtaatataaatatgcttagttgggtactattgtgcaactagacagccaacagatcgaacatcaacaaaggaaaatgaagacgagatggaatagagagggcgttacaatatacattagaaaagagctcataggcttcttttgacagcccggtctgaaccaggtcgaagtaaatagaccaaacacgagagcaggacgcctggacgagcatgctgttctaaccaaaccacaaacgtgggaactcggggtcgtggtgggggttcctttagatcgatccatggactcttcgaaatgtctagacacacctggacttggatatg

SEQ ID NO: 431800 - DNA, 115 bp, Oryza sativa
agcctcttcatgcacgcagagactacagaagctcaaggggggggccaattcaaagctagcgggaggggcgcaaagactacagcggtacgcaaaggtgcagtcaacggattggcag

SEQ ID NO: 431801 - DNA, 256 bp, Oryza sativa
ctcaactaggaaaaaaaacgggaaaagttggggggaataaggggagaggccaggatattggtaaaagggggggtaataaaaaggagggggcaaaaaagaaggtaaaggggtttataggggaaaaaagtttggcggtgaaaaatacaaaaaaaatttgaaggcggaaaaaaaaaaaaaaaaatttgggggaactaaaggaggggggtaaacaaaaaaaaacgtaaaactctaaatggcggtttgagggctgaaaaat

SEQ ID NO: 431802 - DNA, 459 bp, Oryza sativa
tataaataataaaaaaaaaaaaaaaaaaaaaaaggaaggggataattgaaaaaaaaggggggtattaaaagaaaaaagggaaagaggttctaggggttccagctttgtctcccaggtcaaaaaaaaataggggggggcccttttggggggtccatgttttggtgggggccctggccaggactgggttttttgttgggggcccctattttcattccctgggccgggtttttccccgggggggcgggggaaaccccgggggttccccaattttttggctttgggccccttcccctttttcccgggggttttataagcaggggggcccccccggttccccttcccaaactggtgcccctcctgatgggcaagggggcccccccttttggggcccctttacggggggggggggggggggtccccccctgggggccctttccctttggttggccccttagcccc

SEQ ID NO: 431803 - DNA, 465 bp, Oryza sativa
ctcatagtcaagttgggagaataactatgcttcttctccatgcagcaaggttggatgattcgttgatttcacagcttgtggaatatctagacagaggttctgagtgggcaactttttttctatcgttgaagaagtatcttgacaatggtgttagcagagacatcttactcttggacttcaaatttgctcttgattgcacttataaggcaaactggagggctgaacactacatatccccgatatgctatgtagatctcattgagtgccttggctttttggctacaacgcatcttgtactgaatgactatatgttttgcacaaaatctctgttggccaaaatgatgaagtgtcgcactaccaagggttactatgagacatgtatggctcctagcacagatatcgatctgggctatgcaggtcattcagcacggcgtttcatatacctgtcagttaaggatcttttgg

SEQ ID NO: 431804 - DNA, 155 bp, Oryza sativa
attaaaaaaaaaaaaaaattgaaatataaaaaataaaaaaaaaaaaaaaaaaaattaaaaaaataaataaaaaaaataaaaaattttttttaaactaaaaatttttaaattaaattttaaaaaatttaaaaaaaaaaaaaaattttttttaaaat

SEQ ID NO: 431805 - DNA, 336 bp, Oryza sativa
tttttttttttttttttttttttttttttttttttttttttttttttttttttttttttttttttttttttttttttttttttttttttttttttttttttttttaaaaaaaaaaggggggaaaaaaatttaaaaaaaaacaatgggggggggggggtttaaaaaaaaaaaaaaaacttttaaaaaaattggttggaaaagggttaaaaaattttaaaaaaaaatttttaggggggggaaaaattttgggacccaagtaatacggggaaaaaaaaaaaaaacttaaaaggtgtgtaaaaaaaaggcaatttttggttaagaaccaaaggggggccc

SEQ ID NO: 431806 - DNA, 337 bp, Oryza sativa
atagaagaaaagggccttcacattccatcagaaaaggagttgacatggaacttttcaagcagttcaaaaggaggggtatgctcaaagggacggggcaaaactttgcccatcaagcatgaactggaggggggatgccacgctcatctgaggcgggggctcagctggttgcttggcattcttaaccacatcattggaatcgacaagggcatctaatacattgggggtagcggcgaatgcctccaacttatgcagccccaaggcatttacatcactaggtagcctcacatcctgaccaccctgggttttcttcttctccacttcattctctgggggcaac

SEQ ID NO: 431807 - DNA, 488 bp, Oryza sativa
gttgtcatggaaagggatacgagatattgaattaagacggatacaatgagggaattccatggaaaatttaaatgaactttcaacataaaatgtgaactgtactttttattatggtgtttggtctggaacttgattttgggatttgggtttatttttgtattttgtaacttggattagagggaggtaatatttaaattaatttagaagggatttgaatatttgggtttttgaaacatggattggactcgagtttatggagtttgcttttttggagggatgaactgcataacatgagattatttgacacagcttatgagatgacagtggaaaagcaaaaaaaaagtaattaatcttttactaaacaagagttttaacgcctcgtaaaatcaggggcgttactagccagcaatatgtcatgacgtccattactccctaccaatatgatcaatatagtcgttcgactaaaattagagttagcacaattctag

SEQ ID NO: 431808 - DNA, 406 bp, Oryza sativa
cttctatgcccaccaccatcccagtacccccctggcctccctaatgccgcgcttgaacccaccattgaccaccaccatgggctccgacgcctccgaccccttgtaccgtgctgcaccttgtctgcgcacctgattgtgtttggcttgcgagctccgccgctgcgggggctacgcgtgctggcgacactccttactttatttgggctgcggacttcaagtgctcaggctcccattcgctataattgataagagttcaaagtgaaaatggatcaaggcgaatggttagctgatttgattaggaggaaaacttaattctggactccagtttgaactagcctgcccacatctggcttttcttgtaccacttccggtttcagaccaatgatgcccccatagttgggcagct

SEQ ID NO: 431809 - DNA, 296 bp, Oryza sativa
gggaaaaaaggaagggggaatttttttaaaaagccgggcccccattaggggaaggggcaggagtacaaggagggagccccctgcggaaaggggatccatccaagtttggtggggaacccaccaacattgtacgaaaaacccccacactgaaaaaagcaaatgagggtttatttagggggtaaaaaaaaagggaggggctgcctaaaaaaaaagtggggactaaaggaaggaaaataagggctggatcaaaggttttatccacaggagcagcttccaaaccagaaaaccttattgca

SEQ ID NO: 431810 - DNA, 381 bp, Oryza sativa
ccaacctctgcaacatgccatttctcaaaggtacacatgaaaactgaaagcagttcatcaaaatgaaaattgtagaaatataacttacggttacctgccccacttttctatacattgacatccattatgtgtatcatcagctttcatgttgcttggatgatttagtaaacatcatatatgctattctagctccattttggatttgtgggacaaaaaatagaatatggtattcgacaattcaatccttcaatggttcacaaagataaggcaaacaatcaaactaatccactctaacattggctcattatgatcaacatcaaaagtttcatgttggacttgctatacagctattcgtctcaccattatttttctcatgtgtca

SEQ ID NO: 431811 - DNA, 385 bp, Oryza sativa
catccacataaaatctgcatatatgatgaagcagtcataaatccaattacacacactgcctcatataaaaaaactagcattgcacacgccactgcagtgaacacactgttgcatatccaaaactaaaattccacacgccactgcagtgaagtaaggagtccaatcacagagaatcctatattacaaaaggataaactcattttctatgttagttcatcatgttcagtactgatgaggagaaagcttgctgaactcctgcttctgcattctgatgttatgccctttcctggcattcccatctgcaatgagaacatcatctatccatgagacaatattggaggctaaactttccagcacccttgagtagcttacaagtattgcctgc

SEQ ID NO: 431812 - DNA, 404 bp, Oryza sativa
aacttgaacggagcacgggtttaacaggatacaattactatcagaagttaaaactctgagcacccaacaaaattaccacgctaaaatccgttgcacactgtatcatgaatccatgatcagctatgcaattacaggtctctgggataacaaaaattctcttccagctttaagtgttatctccggtacatgattatgtatgtgaccaaaatgactagaatcctcatctcagcagcaacaagcagatgcctcaacaaaacaccaaaaagggatcaatgacctccatctgatagattaaggatggcattactcagatgttccaacatgtccatttgagttatttgcaggtgttcccatgtattcagctgctgccaatattagaccagtaaatggaggtgaaggtcttc

SEQ ID NO: 431813 - DNA, 202 bp, Oryza sativa
tgggttttttttgatttgtgatggtttttaatattatttaattttttttttaatttttttcgagacacaggtaaaaaaaataaaacttggaaaggacaaaacgaaagggaaaaaagaaaccataaacagttatatccctaaacatgacaataagcagacaaacaaaaagggtgaatcaatcaaaagatgtaacaggacaaaa

SEQ ID NO: 431814 - DNA, 540 bp, Oryza sativa
ttgcttgttatgagttgcagcacggttgactggaatgctgaagacattagacaaatgctgaccaggttttactaactttttcttttcttcttttggacacattatttttaagaccgtgtcctttctactgtacctttaaagccaaaacaagcagagaacttgccatatgaaccaaacaagcttgtattgtattcaacattcaaaactgtccatgccttgaacttaacaacttcaatctgatagccgcactcttctgccatatctgttattgcatctaaatgaaacaagtctgatagtgttcatgattcttacatgaattgaatcttatgactcgacatgtattcttatggtaatttggtgctcaatgcagttttaaattttccacttccactgggtcaaaccattctccctactccggaatccatgctgctaaatttatctgcaaacttcatgcaaggctttgattttcatgcgggacacatgcctgttggacctggggcagtcacctatccccagaggcctggagcaactgtttgtgat

SEQ ID NO: 431815 - DNA, 296 bp, Oryza sativa
tttttttttttttttttttttttttttttttttttttttttttttttttttttttttttattaaataaaaaaaaaaaaaaaaaaaaaaaaaaaaaaaaaaaaaaaaaagaaaaaaaaaaaagggaaaaaaaaaaaaaaaaaaaaaaaaaaaaaaaaaaaaaaaaaagaaagaaaaaaaaaaaaaaaaaaaatggaaaaaaagagagagaaaaaatactcaaaaaaaaaaaaaaaaaagggggaggaaaaaaagcagggggaagagagtaaaataaaagggaaaaaaatggggggat

SEQ ID NO: 431816 - DNA, 387 bp, Oryza sativa
gaaagaaatagaaaactttatttcacgaataaacatattggaggtagatcgatcactggattacatatgtgatttatactacatatttttttcgaacaaacatatcctgagagtctaaataggacctggtctcataagatttttttttcctctccaccaccgccaagcaccaattaaaacacctagctgacagaccaagctatctgtaccaatgtaccatacagtgatcgttcaacactggctactgttatcactactagctagtgccacccatgaacatatatggaataagagacaacgatgaccacacttccacacaattaagggcggcgacgacattcttcgcgcggaaccaacttgggatagatgagaatacagtactacaat

SEQ ID NO: 431817 - DNA, 317 bp, Oryza sativa
gtctctctctactctctctcctgccgcctcgccaaaacggaaacgagagggctgagggctccatggagatcgcggtttcgatgtcggcgaggcgccgtgaactcgcagccggcggtggcaggccagccgttgggcgtgaaggaacagtagcgggctaatatccggccacaagacggcgaccgccgccgggggagtgccgcttggtggcggtgcgcgccacccgttcggcggaatgcccagcgggacttcgccacggacgggcggctcgccgaacgccgcttcagtcgatcgcgagcacgatccacacctcgaggatt

SEQ ID NO: 431818 - DNA, 403 bp, Oryza sativa
aatcatcaactgcagttcaatatagtattctgttatacacacgatcagtacaacgtaggtaacccaatgactggaagaggaaaagaaaaaaaaatcctatttgcaatttgcacatctcttgcaaacctcaaaaaggctctagaactaagtcaataacctagaaacaaatgaatcttcgctgattctgctaaaattttctaaactagtttgatatgaactaatgtctaaccattctggactttaaagaataaataaaaatataggaggggataaaaaaacccaaggcatagaagctgggtctaggcatgccaggtttcatattttgccgcatttgcttacatcgacctgtatcagtaatattgcaaacgaggaatctccgtatctcgctaattgggcaatagta

SEQ ID NO: 431819 - DNA, 128 bp, Oryza sativa
ttttttttttttttttttttttttttttttttttttttttttttttttatttttattttatttattaattttataatttttttttttaatttaaataaaataaaaaagaatataaaataatgtggaag

SEQ ID NO: 431820 - DNA, 363 bp, Oryza sativa
  unsure (1)..(363): unsure at all n locations
ctttacgcgtgggttgacatctttttgcctggcagccaaagaaagccgaggagaagccccaggcctagtgatccaggcatagatggaatagcttccagcatatcttgaggtgttcattttggctatgttgttcaggacacccttcctctttatttttgctgaacgcgcttcagtagatgttaaaaaaaaaccttcctggaatgggtgttccatagtcatatatcgctgtacgcttatagcccttctctcagtgcagtctgttgtgaacgaatttattcagaataagcaccctcactgttttgtagtggatttcaaaaaaaaaaaaataaaaaaaaaaaaaaaaaaaaaaaaannnnnnnaatt

SEQ ID NO: 431821 - DNA, 94 bp, Oryza sativa
ttttttttatttttttttttttttttttttttttattttttataaattattttttatattatattattataatagagaactaaaataagaacag

SEQ ID NO: 431822 - DNA, 245 bp, Oryza sativa
aaaggttaaaaaaaaaaaccaaaaatttacggggggttaaaaaaaagaaaaaaatatttccaaaaaaaaaactggaaaaaagggttaaaaaaaacaaaaaaattttagtcccctgggaaaaacgggaaggaacaaagctttgggggtaaaaggtgaattccccaaaaaaaaaattccttttaaaaacctcccaaaaaaacccattttttttagggaaggaggtttttaagggaaaaaccccaaaa

SEQ ID NO: 431823 - DNA, 397 bp, Oryza sativa
ttttgtttttttttttttttttttttttttgttttttttttttttttttttttttttttttaccggaggctaaagactttagaatttattatttcctaagaagaaacatggtttaggtacaggtaactttgggggggggacaaaaaacccccaggttatatatacactggaggggggcatacacatttcaaaggcatattaggggcttccttggtgggccaaaaaacaaaccttagaactggtttcaaaattcagactaaggaactcccaagcaaattgggaagttgaaaagaaagggcgaaccctttcaaaaccatttacagggtctggggacgaagaatttaagggtgaaccatttagaacgggatcctatccgggggggcgggccccaattggg

SEQ ID NO: 431824 - DNA, 400 bp, Oryza sativa
gtatgaaaatcatctgtgctcaaatttaagaacgtaaaagtgaagttctagatgtgcatgtagccgacatacatcatttacagaaaatgaaccgtacaagtataaaaccaaaatctagtctgaaattctgaatcgtatgtattttcagtgtcctacactagattacaaagatgcaacacagcaatccctcgacgtagaagtgttatgtaggatcatgaaagtgcatcagcaacagatgaaatagcgtcccttgtcgcatcacaaataatgaaactcgagaccatcaaattcttttctccagcaaacgaactagatctgctcaagtggtgtaaattggacgctgctcctgttcttagaagccccgtagcccacaaaaacggatatacagaatgctactacc

SEQ ID NO: 431825 - DNA, 478 bp, Oryza sativa
  unsure (1)..(478): unsure at all n locations
ctgtgacgcgtgggaagaaaatccaccccaaaaaggaaaaccctaggctcgcaccgcgcgccgccatttctcccccttccaccgcgcaccgcctcctccgccaaatccaccgccgcggcgcgcggcctcctcctccgccgcggcgtgccgccacctcgctcctctctccccatccaccgcgctgccggagtcgacctcngcgcccgcccaggtggtggtgtgtgccgggtagaggagggaggaggaagcgagggcgtcggacttgtgcgtgcgcaggtccaggggcaggacgacattcgacgcggtcgccgacgagtttttccccttttgcctttgatttcttcggccctttcctttcaagttttgatacaaagaattcagaaactcatactatatgatgggtagtttcctctgttagtcctgtatcttggaacctatactttatgatcaaagaattcagaaagggatcatggaacta

SEQ ID NO: 431826 - DNA, 252 bp, Oryza sativa
aaaaccaaaaaaaaaaattctaaaaaaaaaaaaaaaaataatggttttttttttggttttttaaaaaaaattgtttaattggccccaaccgaaaataaagtggaaaaataaaaaaacaagtttgtttactggtttgttgggaaaaaaactggcctttattggcaaaaaacccccaaaaaaagcaggaattgtgtaaacaaaaaaatggggggggggtaattttgaattttcccgcgtgagggtttggtaaaa

SEQ ID NO: 431827 - DNA, 379 bp, Oryza sativa
ttttttttttttttttttttttttttttttttttttttttttttttttttttttttttttttttttttttttaaaatatttttttttttttttttttttttaaaccaaaaaaaaaccctttaatccaaaaaaaaccaaattattggggggccaaaaagaaagtttttaaaaacaaaaggggaaacccccctaaaaatttttggggggtaacactaaaagggaaaaaaatttcccgggcgggaaaatccaattttccgggggggaaattggcccggttgaaaaaccctatttgggaaaaaaaaaattttcccggcggggcggaaggcccccaggggaaaaatgattattccgggggggaaatataaacccccgcgggggt

SEQ ID NO: 431828 - DNA, 453 bp, Oryza sativa
  unsure (1)..(453): unsure at all n locations
tcgcttcttcttcagctgcctccttctccacagcccacaggcgggacggcggtgagctcggaaacggcgggcggacgtggggaggcggcggctggcgcaggcgggataggcggcccgcggctcctctcctcccctccccggcagggactccggcgcgcgggcgggcgacgacgggcgaggagccacggctcctcccctccctctcccctcccctcccctccccggcggcgacgggagcgcgcaggcggcggatccggcaggcgggcgggcaggcaacgatgggcggctcgcggccgtccccgcacggatccggcagcagcggccgtccccgcccggatccggcagcagcgtccctctcccacccttccccgctcgagggcgacgacgacgatgacgacnaggcgggagtgggcggtggcgaccacaacaacgacgacgagggggagggctttc

SEQ ID NO: 431829 - DNA, 244 bp, Oryza sativa
aaaaaaaaaaaaaatttttaaaaaaaagataaaatataaaaaaaaaaaaatttttttttaaaaaaaggtgggggaaaaaaataaaaaaaaaaaaggggtttttaattaaaagggggggggaaaaaaaaatcttgaaagggttttttttgaggggggttttattaaacaaaaaaagttgttggaaaaattaaaagttctttgaaaaaaaaattatttgctggggggatccttaaaaaggggggga

SEQ ID NO: 431830 - DNA, 165 bp, Oryza sativa
cttctcttcctcctcctcctctctcgctctctcgctctctcttccccttccggcttccgcctccgcgcctcgacgaccagggtagctcggccggcgactccgcgagcggcggggagggagctggagcatcatcgcacgtgactggagagggaggacccccccccc

SEQ ID NO: 431831 - DNA, 496 bp, Oryza sativa
ctttaatatagagaagcttcagtctcctattcaaagttacgcactaaagtttctgaaggacaactgtaatatatctgagtgtctgtcgttagctgaagcaccagctactcctgacaggctgaatgattttggcattttgaaagtgccagaccagctttcagaagcaaacctattttatggcgtagcccctggtgcgatgcaggcatacagagagtttgtggagggtccttttgtggctaataagaaaaccaataactctcgacagaagaatgattatgagccatctacaacaggctctgttgcagatgcacataggggacatgcatatgaagatgatgatgtcgaggcatccacttatgtattgcatggtacatatgatgatggtttgccatcaaaatcgagtcacaaaaagaaacaccttatgcagcaaaggatgaatggcacaaggcattacagtactggtgttgacatgccttatgatccatatgtggagagc

SEQ ID NO: 431832 - DNA, 149 bp, Oryza sativa
gttaaaataaaattaaaaagttaaagaggataaaaggttaaaaaaaaaatgttaaaagaagaaaaaaaaggaaaaagataaaagcaaataattaaaaataaaaataaaagggggaaaaaaactaaaaatgggaaaaaaaatgtgaaaaa

SEQ ID NO: 431833 - DNA, 488 bp, Oryza sativa
cttttatttacttttcttcctcagcaaaattacttccactacattgctcatcaaacttccatttcatttccaagttcccatctctcccatttcccaaaattactcccacttgatcacgcatgtcatatttgtttgtggctttctaacattgtcaagggatttccaagttcccatctctcccatttccctattatttacttttcttctttagcaaaattactcccacttgatcatgcatgtcatatttgtgtggctttctaacattgtcaagggaattaggatgatgtgacttgtttaattaccttgtcgaatttcgtcctattcagtattcacaatgattctcgctcactttctctgactttttagcatgctgacctgagtattgactactgtcgatcactgcatctcatgtggaaaaagaaaaaagtttatcttggtgcttgtaactcctctttttcttttaatgcatgaatctgggagcagctgca

SEQ ID NO: 431834 - DNA, 329 bp, Oryza sativa
ggcccatggaagggaaaattaaaaaacttaaaagaaaaagacttttggggggggtataaaaaaagggagaagggggataaaaaccccaggccataaataaaggtacaaaaagggggggtcaatttggggttttttaaaataatgggataaaaaaatttttggagccttggaaaagaacactgggatataagggcctagaaataaaaaatggggggcaaacaaaaaaggggccaacgccaacagaagaggggggcatttgaaatgggggggccttattggggggggggcctccaattaataaaaaagggggggggcattttggggcctaa

SEQ ID NO: 431835 - DNA, 271 bp, Oryza sativa
aaaaaaaatgaataagggaaaaatgggggaaaaaaagggggagcaaaaaattaaagggaaaacccaaaactaaaaaaaggggaaaaaaaaaaagggaataaacgaaggtaaaaaaaaacccttttagagaaaacccccaattatggggaaaaagggggggaaaaaaaaaaggccaaaaaaatacccaaacccccggaaaaatataaaaaaaaaaaaacccggaattaaaaaaaaacggtgtgggggggttttaaaaagaaaattgggggtg

SEQ ID NO: 431836 - DNA, 399 bp, Oryza sativa
gacaaatcttcagccagaatatattatactgaaagcatcctagtccacaggaaggaagcacacgaggttcagaaggcgacatctatcagccaggctaccgaatactgatggtggctgcttttcatagccaagcaaaaaaagttcagaattgccactggaatatacagtagatgtattacaacaacacacggacaaggcagtgaatgtccccccctcctgaatcttgggaggatctgaatttctagtacagatttgatcagcttgtaaactgtttactgttatagacagctttggatcagaacactgaacacctaactccacacctttgacaattcagctgggggtgttcatttggctctctcctgcaagaattagtatctgggatatatacaaggaagc

SEQ ID NO: 431837 - DNA, 390 bp, Oryza sativa
cttgcaagttactattggatatattatgtaggagtgtaagggatgccaaaagtttgaatcaaggcatttaacaaaattccatcccaccctgagccatcccaagactcgcacacggaagaaaaacatccagcattaataaggaatataaagttcttcctaaaacactggtaaatatagcagggtcgatcagttgccatttacaataacatagtaacaagttttaagcaacaagcgaagcctgatcaccacaatgtcaccaccaccattttggccaaagccccaacttaccaacagagccacatacctttgtgcaccaccgtggcataggtatatcaaacgagacaaggcgaccaacaaggtaaaagagcattagagaccaggcgtgcccac

SEQ ID NO: 431838 - DNA, 483 bp, Oryza sativa
cttctgttacgagaggaggaagaagaggcgggcagcgaggagggaggagatcggcggcgagcggctagaggggaggagaaggtaggttgcgatggcgtttctttttggtgtatctacgggaacaaggggcggtgcttcaacttctggctggactccagtgggtgcaatctttgtgattatccttgaaccgactgaggtcttttcctggaagctttctgcgaactcacctgttattctattgtgtttcagtgtaggtactgattttacaaggttgcgcctctttctgctttcttctttttattcgtattttcttcttttgttttttttttttaacctcatattgtttgccttttcttgtttctttttcttcttttatttttttcgattataatctcttttgttttttccccttatgttgtttattgttttctttttttcttattccttcttccttttttaatcaatttcattttttttcttttt

SEQ ID NO: 431839 - DNA, 221 bp, Oryza sativa
tttgtttttttaatttttttttttttattttttatttttttatttttatttttattttttttaaaaaagatattattaaataaaaataatgaaattttaagaaaaaacaacaaaccgaaaaaaaaaataaaaagtcaacaacaaaataaataagtcaaaacaaagaaaaactgcacaaagaaaattagaatttaacacaagctgagacagaggaaaccaaa

SEQ ID NO: 431840 - DNA, 146 bp, Oryza sativa
tgggttttttaaattttttggtttttttttttttttttttttttttttttttatttttaggacaaaaaatcaaggtaaggggataaacacaaaagcaaaagctattagacaaaacgaaacagcaaaacgaccaagaaagggaaaca

SEQ ID NO: 431841 - DNA, 325 bp, Oryza sativa
aaacaatggcaattcctctactttttatttgcatggttacttcaactgcttgccctataaacagcctggggggtgtgttcttcagtaatgggatccattatatacaggggtatataactacccagggggacaacatggatctgttggatggctactacttttacataacataaccactttatgcactgacaagcaggttggatcattagaacaacaatctggaattccagtcccccagggataaaaaacttcttgggagcggttgaatgctttgatccatttgcgtaagtgaatgaaagaaagggcttaatttttcttgccaggg

SEQ ID NO: 431842 - DNA, 289 bp, Oryza sativa
tttttggttttttaaattttattttttttatttttgtttttttttttttaagggaaaaattttttttgaaacaaaaggggaacatgaacttccttaaaaagcgccctccttaataaaaacatcacagaaaaatcatatattaactcggggaagcagaactatagggggggacgaaaggtgagagcgctaaataaataaatccaaagggggaatttacgaagcaaggaggcatttgggggttttaaattgccttaaaaaaaggcctaattgacctaaaaaaacggggagg

SEQ ID NO: 431843 - DNA, 371 bp, Oryza sativa
aatggatggattacctatttatatttctataaacaactcagggtaccctgcttacaaattgttcatgcaatctctccactaacaagacgcttctctctctatagtccaaatcccccaaatccgctcaccccagccaccaatatcaatcagaaacagggcgtggtgcctagcaagaatacatcacggcgctcgttcatggatatatactaatcagcgtgattagtatttaggaggtgctggaggtaaccggtttggagtgcgtcggctgccggagttggcaccggaggtcacgtcgccgttttcatagcgccctctgcgtccatcagcgcttcttgaccttgattcgctggctgagctgggtcccgtggatg

SEQ ID NO: 431844 - DNA, 348 bp, Oryza sativa
ttttttttttttttttttttttttttttttttttttttttttttttttttttttttttttttttttttttttttttttttttttttttttttttttttttttttatattatataggaaagagaaaaaaatttttggggggggaatagggtcccaaaaaaaaaaaatcctggataaaagagagaaaaaattatgtaaaaaaaaaagactttataataaaaaaaggggaaataaaaaaaaaggggtataaaaaaaaaaaagtgaaaacgcaaaaaaccctgtagggtgaaaaaaaaaaaaaaaatttagaaaaaaaaaatttgggaaaaaaaaaatttttttatgggagg

SEQ ID NO: 431845 - DNA, 235 bp, Oryza sativa
tggtgacgccgacgccgacgggaagcaaatcgatggacggcggcggcggcatgttgggcgccgtgttgtgcttgctgctggtcttcgccatcttccccctcctcctctggcgccggcgctccgatgccgaccaccgcctcccaccccagccgctccaggacgaacgtgtgctccgcggcggtccctctcccggttcggtggcgcgcctcatgctccggaggcctcttctcacttt

SEQ ID NO: 431846 - DNA, 402 bp, Oryza sativa
ttgttttttagttaaggatgcacatagctatatttatagtcattggaactggaacactgatggatgaaatcctgcaccgatgactaccatcccactaatggtgccagtcaacctaagggtaaaccactgacactcagaacttcagctaatgtagctaattattcatcacacagagaaacacgtaatatcacatagttttcacatgattgagcaaacgttaggatcttccgtcatttgtagtggatagtactctacatagtccaactccggtgcattataggtagggtgcttattgtaatcaggtaccgatgcacctttctttccagccagctgggtcttctctttcttaactgactccaccaaccaagatcttggcgaggccacattttttgcgcaggagag

SEQ ID NO: 431847 - DNA, 415 bp, Oryza sativa
ttgttttttttttttttttgggttttttttttttttggtttttatttttttttttttatgttgtttttttaaagggaaaaaatgtgggcgaaacaaaaggagagcataggccccctaaaaaaaaacccccggaaagaaaaggatcacaggataaggaaaattttaccccgggaaccaggggcacaagggggcgacaaaaagggggggcattaaaaaaaggaccccaagggggcaattaacaaggcagggaggcataaggggaaaaaaacctgcttgaaaaagggccccctcctacaaaataaacgggggggggggtagggcggggcctggggggcggccccgacgcggggggtctgggggccaatgaggggcgggaagggccagacgggcaccttaaccctgggggagggccttt

SEQ ID NO: 431848 - DNA, 389 bp, Oryza sativa
attggtggttgtggattactggtgcaataaaggcgacgaacttggtaatatagggcatatggactaacatgtacaaaagtactaaagggaggagggctagttaggagtgaagagactggaggaagacaagttctacttgaaggtgatggatgtatgacacgcaaagtacatgtgggaaacagcgaccgcaacaagagaactgtaacacaacctggactgtgactagatgctgctatggattaaatactgcatgttgatgacagataaagatattgaagctactggggagcagtatctttggttgcagatggcgcggcggagcaacgacgtgatcgaggaggcgcggagcaagctcctggagaagcggcagtgcagtagggtgaaggcgc

SEQ ID NO: 431849 - DNA, 494 bp, Oryza sativa
ttggttgttaaacaaccatgggtgacatacttacattttagatttgaccagaatggtgcaggtatcgaacaaataggctgtacaacaatgctgcgaagtccatcacctgagcatgcatgtatgacgggccgggaaaacttaaacaggaccacaacatatgattgcaacaaatctgaccaagacctaagtgacaggacactggagaagcctctacttatttttttcaagtccccttgaaatgctagcaaggcccatccaccttgaaacacaggattattacagggcctgatactggcaggaacatttgccctgctgttgctagcatatgatcaaggaaagctccagccccaacctgggttggggtatgggctaaggagtcaggcactggtattgtttagacaagggatgtcagaaggagtttcgagactatttgattcacacctttgcttgttttcagcatgtaatctgatccagaagcatcgtacataccacac

SEQ ID NO: 431850 - DNA, 393 bp, Oryza sativa
aaaccaaaggtttccataatttaacaggtataccatactactaccctgactaaaccccataaaggaaaacacagcacaaaactgtacactcaaatatttagagacgcaatgaagtgttcatgccaggtttttttggcagaaactggttcattttaagagcctggttgctagtcactacaccagggggcccaagagacagagacaggggcccatcatctcctgtatcagaaccggtaagattatgcttttttgaggccatataaggggacagtgccagttgaggagaagggcccttttcttccttcaggggtgtcttattcagattattacgggggtctggggggtcttcattatttgaagattgggcatggatcacatgatccaagattgggt

SEQ ID NO: 431851 - DNA, 378 bp, Oryza sativa
attgctctttatttctttgctaaagatgttgaaagttatgaaagagcatatgggaaactgttggaaaacatgcttgctggagatttgtccctcacagcaaatatttgtggcattgaacttctcatttttacgtctgataagctgcctgagaggactcaacggtggaatggcttacttttcttttggggtgtcctttatgccagaaaggcaagtagttcaactgagctgcttgtcaaagggatgaatcatagtccattagaacaaattaatggacctgttaatcaacttgtctgttcccctaagatgcctcagtctttgggcatagatttgaatgagtgccctgttgatgaattgtatgatccagctgtatcagttcaa

SEQ ID NO: 431852 - DNA, 371 bp, Oryza sativa
tttggttttttgtttgaaacgaggcaacaactggatccatgcattttgtgctgcaaaagaatggtttttgccgtgctccacaatccctaggagggcagggagaagactattcagtgaggtaatatgtggttctgtacaaatgaattcgccgacttggccagttttggtgaagtttgtgacgtggttcacacagatatttacaaccatgcacaaacataccgatgtgagggcttttacagtctaaacagggtcactgcttctaggaattattcttacaggaaggccgactggcgtggggtcattagtatcagatgggccatgtccagcatcttaatccttctgcgggagatcagcaaaaggaagattcaacc

SEQ ID NO: 431853 - DNA, 255 bp, Oryza sativa
tgcccccaccctatctacgctggcagaactgcttagctggccacgctggatagatggggattcgctgacgaagtggactactttatactatggcagaaaacatgaagttagttgcaggaaggcagtccgtagctaataagatcactggagagctgggggagtcccaacatgtggacgatgatctatgagagatgtctggcagcaagcctatggtgcacataacactatctgacactgggcgaaccgtttacacta

SEQ ID NO: 431854 - DNA, 93 bp, Oryza sativa
aagggggcaacaactaaagccaaccaatatccccggcaaaagaaaggggcagccccagaatacacaaaacctaggacggcagggagaaaacca

SEQ ID NO: 431855 - DNA, 448 bp, Oryza sativa
gaaaccaagagggggcgtcgccggagtcggagtcggagacgtcacggcgagctccgcggcggcgatggagagctccctgggcggctggccgtcctacaacccgcaaaacttcagccaggtcgtccccgccgacccctccgcgcagcccttggtcggtcagcccctctgtgactctgtcccccctcactcgcgatcgatctctgtgcttagctgtcgtgatctcatgcctccgaccgccaagtacaattcagaattaggttgattgtgttgatgatgccatgaattgtgtgcctgatccctcacgccggagctttacctctagtcagtcctattgtgtgtcagagcgtgtgtctgaaattccagtgcgcatgattaacaaaaggtggttagtactatttggttctaagtcccaatgccaaatagttggatcataatatctcatttggga

SEQ ID NO: 431856 - DNA, 501 bp, Oryza sativa
tttgttttacatgcttactgctgagcgaattcaatcaataaaagaaataacaatcaacgaacgtgacggatttctgtacagccgccactcgctaccgaaagcctattggcatgtcctacacaaaaactcttctattatctacagtcatgcacatgcacgactaaaccgtacatacacgatttacagagttacatctagcagagattggttttgaccatctttatggctctcgttgtgtatcgtttggcatatctatagtctcctgttgaggctcggatgatgttttcgtacgagtatctccatgttgaaaattctgggatgaatcagcccgatcaaatttcggagtcaacgtcttaaccacgttagacctctttatcagaaggcccagtgcagaagatgatgctgctcgaacaactgcatctggtgattggctcagtctaccgaccaaaatagcaaacacctgggagaagtaggagcgaggaacccgtgatcatctaaaag

SEQ ID NO: 431857 - DNA, 395 bp, Oryza sativa
aagggggggataaaaacggcccaattttaaaggccaagccggacctgcccttttaaggatttttagcccaaccaagggaagggttgacccaaaaccaaatttagcccaaaggcttattatttaacccaaaatttttattcaaaaatccaaacggggggaaaatccatgcccctaaaaaccaatcactttttaaacattcattatttttaccaggtcgggaccaaaggtttttttaaggcctaattaacttaaaaggcgcccgcattcctaggaagcggcttatgggcgggcgggcccatgaaggggcccttataaaccagcccagccaaaggcccccctattaggggccccaccccatagatccagggggcggcccattcccccgcggcgagggc

SEQ ID NO: 431858 - DNA, 534 bp, Oryza sativa
atcaaggccgtcctcctcaacgaccaagaaaagtcggaggcgacgttgctcgagctgctccggcttctgcaacagctggagttcacggtggacaccttgacggttactgagattgggattcatgtagccgtaagaaactataaaaccagccatctccttgcttagcacaacatattgcttttctcctaagcataggtggcctaaagatgtagcttgccatccagatggttaattaatttttgctgtgtacagtgctgataacggcgactctcaagtttcagtgatgaatcgtagcatatcaggacaaaaggctagcatgattggtaggaaggaaagaaaaaagggagtgcaggctagaatgctagattattcagtactaatgtttaaacatcaccacccagtcttctctggggtgtacatgtggtcgtcagattgctcatcacattattatagttccatgatacatgccggttatctttgttgttatagtgagtgtaaaggtgtgcaaacgggaaatgagaagcgctgtcagca

SEQ ID NO: 431859 - DNA, 390 bp, Oryza sativa
ttggtttttttgttttttgttgtgtttttttttttttttttttgttatttcatttttgtttcgacactgtttttctgtcagtcgtcacttgtttccctaagcctgggggaaaaggcggcacaaaaactcggggatgggggaaggccaaggcccgggcggccaaaccgggcatacacaacccacagaggggcgggtaccaaataccgggggggggcagctaaaaagaccccgtggggcctcgaaaggcacacaaaggggctcctcaaaaggcacgggggatgcccgaaaacgaggacctccatggtgaaaaaagggggagggggccccccgaacaaaggtgggagaaaaccccttaaacccgggggaccccatgaccaaaagggggggggc

SEQ ID NO: 431860 - DNA, 83 bp, Oryza sativa
tttttttcctcgtggaattcgtgcaatgatggcgattgccctgaacattgtgaaatgctttggaattttattattttctattc

SEQ ID NO: 431861 - DNA, 492 bp, Oryza sativa
gggggttgggtgggtttcccgtctccttccgattgctgagtagcattagcaaaggagcaaaggaaaggaacctcgatctccatctccatctccgcccccaaaccctaacacacacacgccgactctccaaaccctacacccccccaacccccaaccccgccgatccccccgctcgccgccgatgggtcgcaagaagaacgtcgccatcgatgacgatgagtactccttcccgcaggaggacgccgcccccgcccccgccgccgacaaggacaagcccatcaagaagggcggcggcaagaagggcaagaagggcgccaaggccgccctgcccgacgacgacgactacgagccccccgcgcccccgcccccgcccggggacgacgacgacgacgaggagcccatcaacctcgtcttgaccggtaagaagaagaagaagaagggcggcggcggcgccgtgagctccttcagcgccttcgacgccctcgcggccga

SEQ ID NO: 431862 - DNA, 353 bp, Oryza sativa
aaaaaaaccacccacaagagttccttggtgggggggattatacctaatttaaaaagctacttccaattgtatttcattcataagggccctctaaaatttggaatctattgaaagggatatggcacatttgggggaagtttataggacacggaccattggggactatgaccattggggggggcacacaaaggttggctcccgcttgaacttgggttgagccaatttggcactatattttttacgagactttgggatcataattttgcgagcgctttttttgtgggccttaactgtacagggggtgtgctttggagcaagcttatttttcttagggtccagctttaaaaatttag

SEQ ID NO: 431863 - DNA, 524 bp, Oryza sativa
gtcaaagttcagatgagattatatgattctctgtcatgattaattcatacatcagaaaatgaacaattgaataatataaattctaaacaataatggagtgtagtccatcccaatatgatgcactcccatcagacaacagtggacttgctaaattgtcctgcgcatttcacaccctgtaatttttttcccttctttctctctatacaaaggcataataaattattactactattatatggcttacaggaaattacactaacagctatcaggaactaaaaagcacatgtaacctacaacactttgatgtgatcatcaagcacaaaaactccgcagttgacaattccaatcagctctgctgaatctgaaattaataattcgctaactggactagacttgtagccaaatagcaacagcaagggtgcccagataaataagtaggctaagctccagtctgttctggttgacaccattttgtgccgatgtcgcagcaggtctctctggaatattaacagatttattgcatg

SEQ ID NO: 431864 - DNA, 472 bp, Oryza sativa
tttgtttttttttttttttttgttttttttttttttttttttttttttttttttttttttttttttttttttttttttttttttttttttttggggaatctttaaatcttagaaaaaaaccccccacaaaggccaaaaaaaaaaaaagggcccaccctgaaagaacgaaatgggcccttaaaaaaaaaaaacaggtttgggggcccaaaaaaaaaaaaaggggccaaaaaaaattttgaacaacccccaaaaaaccgggggggggaaaaaaaaaaaaaaatttaagaaacccaaaaaaaaatttttttggagggggaaccccaagaataagggggggggggggcactggttcccgaaaaacccctgggcgccggggagaacccaaaagccccccatttttttaaagggcaagggaaacccggggtaaaaattgatcgggttggggggggtttccaaaaattgggcccggggg

SEQ ID NO: 431865 - DNA, 363 bp, Oryza sativa
tttgttttttttttttttttgtttttttttgttttttttgtttgatttatttattcttttgataatgtacatttgttttttttaaacaaaaaagacaacgggaaaaaatttcatcccaaaaagatgcaccccgattagacaaaaggggtcttgtttgggggtagggtccccccccaccccgggggtttaacaggggtcccgcccatgaactcagggggggggcattatcactgctattaaaaggggtacaggggattacactaacggcttttatgaagggaaaagggggcgggacctggaacaatttggtgggaccagctaatacaagggctgcgcacttgacaaaaacaacaagggccgggg

SEQ ID NO: 431866 - DNA, 336 bp, Oryza sativa
agcgggaaaaagaaagacgaatctacataggatcaaaattggggccatcagcaggcccccattagcataatcctaaaaaaccgcccaaaatatatggaaccaaaagaatgggccatggcataaggggatagcttactccaaaggggggcagccatattcactggtatgaagaagggggccctggttggcactcccaaccaggtcctctatgaaaaggagaaaacagcgcaatttaatgggggacttagggcatgacaagccggggggaaactcatgccgacaggtctaattttttaaaaggatactgctggccagcaactacttttagaagctggg

SEQ ID NO: 431867 - DNA, 344 bp, Oryza sativa
tttgttttttttttttttttgggggtaaataaagtgatttttatgttgtttacaggatgagaattaagcgattgataaaaagaactggtagaaagaaaaaaacaatactgggaagaaaacgccgccggagggccaaaagaaaaaaaaagggggcccttgaaagatccaattgggcctttaaaaaaaaaaaagaggctttggggccgtaaaaaaaaaaaagggggcaacaataaggttggacaaaggaggcgaaacagggggggggaaaaaaaaaaaaaacccgcgggagccaccaaggaaatttgatccacggggggatgccaaggatacaagggggggggggg

SEQ ID NO: 431868 - DNA, 444 bp, Oryza sativa
tttggttttttattctctgggctttcttacttttatcggtttcttttttttatcgtttaatacaattcagaggggcacgttctacataacctgcaccggtaactggtcgacactcacccaaacggggccccggaaacactactgtaggctcctgacgtgcacgagcacgacaaattacaccgcgatccgaatcagcagactaagggggcgacgatcgcgctgggggccacgaactcaaggacatataaaactgcaagtagcttatcgcgcacggggaaagtgcgcctgccggagagggggtggccccacgacacgtgcacggatttccaaagcgacggccctttcgggggagggatgaactcgaccaggatgccgaagccgaggaagaggacaacctctaaaaagctgaccagcgccgcggaggccccgtttgtgagggggggg

SEQ ID NO: 431869 - DNA, 333 bp, Oryza sativa
aaaaaatatattaaaaaatttttattaaaaaaaaaaaaaaaaattgagaaaaaaaaaaaaaaaaataaattgtgaggggatggaaaaaaaaaaaaacaaattggttttttaaaaaaaaaaagaagaccaaatttatggaaaaaaaaatttgggggtgaaaggaaaagaagaagaattagaaaaaaaaatggggttaacaaaaaccgaggaaaagggggataaaaatacatgaggagggaattcccaccaacccaaaaattatttatgttgaaaaaaccgctgttggttttaaaaagtttttttttggaaaccttgtttttaaaaaattaaaaa

SEQ ID NO: 431870 - DNA, 503 bp, Oryza sativa
atggtaatgcgtgaaatgttttggtactatcagtcaccgactcatggtgctctctaatttgacagcaaaatttgttgctgaacaggactacttaattgctatgatctaattcttactatttcgtatatgatctaattcttgatcatctggtgtggcactttattctaaatttttgaagcgcctatgtgttcactccctttattttgttgttttcaaaggtaaaactccatcatatttttctgattgttatgtcgttttcaattgttatgtttcaatgtgtagcttaaaggatataataaatactttggttgcagtagatagtttttactaattaatgttcatgcttgcaaagaaaaaaaatatgttcagttctgctaagcagaacaaagaggttgactctatatagaagaacatagaggaatgcatgtgtgttttcacagtgcatgagaaaatcagtgagaaagttcagccatcttccagtggtatcattgattgctctaatg

SEQ ID NO: 431871 - DNA, 458 bp, Oryza sativa
tttgttttttttttttttttttttttttttttttttttttttttttttttttttttttttttttttttttttttaaccaaaaaaaacccattttatttttttaaaaaggccatcgccaagaaactaaaaaagggaaacaaagggtgcaactaaaccccgaccacgagactttttcgggggcccgggcccctaataaatttaactggaaacccccacaagccaaagttgggggcagatttgaacactcacacaatttttgaaaaaaatacccaggggttgccccgacccatccttgggggggtttatttattatgaaccccatggcgaccctgggttccaacttggtaaaaaagggagatggcccgagagatggcccgcccgcggcaaggaaagggtagctaggggtaggggcaggcgagggtggccttttagaacaagggggcctgtttatggggggg

SEQ ID NO: 431872 - DNA, 420 bp, Oryza sativa
  unsure (1)..(420): unsure at all n locations
tttgtttttttttttttttttttttttttttttttttttttttttttttttttttttttttttttgggaaaaaacagaggaccaggataggacttttaaactttttggggcaaccataaggcagcctaaacaggttgtttaagactcccaactaccaagaccggcgacccgggaaaaaaaaggcaaaagatagacaccctggggggttgggactaagggggttatgacctgggactccacccaggaggggggaaactaagaacaggggggggcccccgggccatgcgaaaaaggggtgtccaaagaagaaaaacatgttggccaccaaatccttgggcagcgccgggaagctcctgaaggcggaagcgccggccccgggggggggtgccnaaaacccccacgcccgggaagacggggggg

SEQ ID NO: 431873 - DNA, 411 bp, Oryza sativa
gccgacctcgccgcctaccgcggcaggctctactacgagggcatgatgatgtcgcagccgccaccgtcttccacggcgtcggcgtcgtcggcatcctcctccggcgccggcgcttccgacttcaggagcttcccggcgctgcacgaggatctggtggacaacatgttcttcatctgacgacagcctttcgtcgcatggtccggtggtctctctctgttcttagtttacctcttactgcgtggagtctcaggtcatagactcattagtcacagactcacaggttgtctatcttttgacttttgttgaccgtgtcgtcggtcttggtagttggtagtcttatacatactgttgaggctgcattatggttgcacaagaaagtttaagagtactatactggtactctgtattttg

SEQ ID NO: 431874 - DNA, 388 bp, Oryza sativa
ttgtttttttttttttttttggttttttttttttttttttttttttttttttttggttaatttttttttttttaaccaaagtaaacccaaataatttcttgtagaacaacatgccctaaaaactaaaaagggcaaacaaagttgggaaacaaacccctgcaaaaaagagcctgggctcggcccccggcaccatatggagtctattggggacccccccaatgcccaagttggggggagaccggcacccgcccccggttttgggaaaaattaaaggcggggtttgcccctttggaacaatccgggggtttttttattatcaaacccgggccccccttgggtccccggttgctaaaaaagggaggatgccggggagggggccccccggcat

SEQ ID NO: 431875 - DNA, 415 bp, Oryza sativa
ttgttttttcaaggaagaacgaacgagattaggcaaccaatttagacaactctgctccagtccaacaggattgagccaccgccgccatcgccttcaagttgccagaccttagcttcttcagaaggatacatcggtaaatatgtgaatctcacctacccgctaatttttttcctctctcactcgcaacaccacacatttgtatacaggtcacattacacggcccattttggtccataataccgaggattagccttgatttgcctggccgggcgcacagtctcgctggactcccttggctagatcagctttaacggaagcccgtaggaaactggttcttgcgcattatgggtgatccctcctggcacaggataagtgctcttgacacaaaacaaatgtacctggctcccggaccaca

SEQ ID NO: 431876 - DNA, 357 bp, Oryza sativa
gtcctgctggatacaggtgtgcccaagatgggctccatcgcatcaacgaagcatggctggacgtctatcgtctcggataagtacaggtaccagagctgaggcaggtaccctctctgggtgcacaccagcgtgatgttttatgagcgcgatgagacggagaacaacactgtgtttggtgtggacctgtgcgcgcacgtgattatgattgactttatcgagcaggacgatcttaagaagacacaagctcatatggacccagctggttgatccctcattctcatgcctcatgatctggctattctcactgtccagttgatcatgatcgacacgaactgaggtgtgactgcctcacgttgg

SEQ ID NO: 431877 - DNA, 383 bp, Oryza sativa
tttgttttttttttttttttggtttttttttttttttttttttttttttttttttttttttttttgggaaaaaacaggggccccggaagggacttttaaactttttggggcaaccataagggagccttaacaggttgtttaggactaccaactcccaagaccggcgacaggggaaaaaaaaggcaaaagatcgacaacctggggggttgggactaaaggggttatgccctgggtctccccgccggaggggggaaactcagaaccggggggggcccccggaccatgccaaaaaagggttgccttaagagaggaaacggcgtcgaactaggcgttgcgcagcgccgggaagctcctgaaggcggaagcccccgccccgggggggg

SEQ ID NO: 431878 - DNA, 504 bp, Oryza sativa
aaatgaaacattttgttccatttcattgggtgaaactggcatacttggttgagcgaatggtgtaggaatatgttctgaaccttttggctgagtcatgaaagcagcattagctgttggattctcttccaagtatgccagtttcacccaatgaaaagaaacattttgttccatttgcctctccaccgccatttgctgttccctctctagtggagaaaaatgagtccattccgtcaccttctccatctcctccggtgaagccaacagatccaggaatgttcaggacgattgatgaagtgaccccacctccaacagctactgattacttgttcttaaaacaaccagaacagttacacttaacctctgctgagaacattgcaaacattgacttggatgatgtactttctgctgcccagacagctgtcgaaacagcagagcgagctgcatcagcagcccgtgctggtgcaaaccttgcacaactgcgcatcgcaaatctgaaagagaata

SEQ ID NO: 431879 - DNA, 430 bp, Oryza sativa
tttgttttttgttagtttaaaggattattgttaatttttgattgatgaggttgattcaaccggtttattttattattcttactatcttcctttggaggataaaatatacttgagttctgactagcggggcaacaagtaaaaaatgaatttccaaacagaaagaaggttgaatcaaaatagccacgcaccctggagcccaaaacgatccaagggggggtgcagtaataggggggggtatggacttcagccatgaaagaaaaggcaaccccaggagcacgctgggagaaaactggcaagtgggcaaggggaccccaaagatcgtccacaccaaacagaaatgcattctggtcctggggtggactgatgaaattccaggacggtttttagaggagtttcgggaactgtgtcattgccatgaagagaacattac

SEQ ID NO: 431880 - DNA, 312 bp, Oryza sativa
gggatccaacaagtaaagctggtgactgttttttggagttacatgaaatggttcactgaatggtttttggttgaacctgaaaaaaagtgacactggtgaaagattagagggcttggtgaagcagttacatgtccaattttattggtgttcagctgcgctatacttatggttgttaggtgctgatcgatcttctttgacctgagggctgtgaaaacacctgctttttgtttcagaacacggaccttaatctggggggccttgtaattttcctgaaaaactgtttgcactggaaaaattgccatctgggcagtt

SEQ ID NO: 431881 - DNA, 407 bp, Oryza sativa
  unsure (1)..(407): unsure at all n locations
ctttgttgtcgtgggcactaagcctaaattaacccagggtgtacatggaatatcagtgccatatcaaaccacagactagtgtaaagtagaagagacgtgtccatccaaaaacccataagctagaagcattatggggaaggattgcggcaagcacggcgacgacgacttccggcagggatgccggcgattcatcaccgtccttgtcgtcctcgccatcctcgtcggcattaattgcctcatcgtctaccctngttcttcgccccacccacccttgcttctaccttcaggacgccaccctccgccagctcgacctttccaacttctcctccaccgtcggcggcgtcctctccaccaccatccaggttacctgttgtttccgtatccctaatgatccgtgtggtgtttat

SEQ ID NO: 431882 - DNA, 478 bp, Oryza sativa
tttgtttttttttttttttttttttttttttttttttttttttttttttttttttttttttttttttttttttttttttttttttttttttttttttttttttttttttattggggggggggaaaaaaaaatattaaaaaaaaaaaaaggggggtttttaaaaaaaaaaaaaaaccccggggtaaaggggggaaaaaaaaaaaccaaaaaaaaagggttttttggaaaaggggaaaaaaaaaaaaaaaaagggggggggaaaaagggaaaaataagggaaaaaaaaaaggccaaagggggttttttgggaaaaaaaaaaaaaaaaaatggggaaaggggaattttttaactggaaaattttttttgggaaaaaaaaaaaaaaaaaaggggggggggggaggggtaaaaattttttgaagagagggggtttttttggttggaaggaaaatttttgggggggtattttttgggggggggg

SEQ ID NO: 431883 - DNA, 381 bp, Oryza sativa
aaaaaaaagggggccttttatttcctaaaaaaagggaaatacccaaagccatgcccaatctgggccaaattttcaaatttgggcccccggggcccatgggcccaaatgggccaaaaaatgcccccccccccaggttttccctatcaaacccccggctcccaaaaaaaaagttccccccccctttgaagagcccggggccaaaaaacattctttttaaccaacaaggcccggctccaatttaaaacagttttgcatttttaaacaatcggccaggggggcccccatttatgtatccggggcccccaaaaccctgttttgcctgaagggccacccggggtgccctttcccccccaaagagaatcccccccgcccatttcttgg

SEQ ID NO: 431884 - DNA, 449 bp, Oryza sativa
ttgttttgtcaataaatgcattagcttgatttcatagatttgatacaagtaaaaatggccccaaaactaacaaaccacacactcacgctttagaagtttgtaactaatcaatacagaaaaaaggcaatatctgactattcttcgacatcttcctcagtatcttgcaacaaagctcctcgcactctcgccctccgagatacagaggctatcctcttcgtggctttagctggaggaactttgataggtgaaactactggtgtttgctgctgtgctggaacaataacctgatcagagccctgagtcacatcagacacacttggaacctgattggccaccagctttggctttgttgcctttcttttgtctagaaaagaaagagcttcgagttgcttttgcattatttcattcttttccttttcagatgatagagtctccatcagctttgacgc

SEQ ID NO: 431885 - DNA, 496 bp, Oryza sativa
gggccaaatcctcaaaatgatggtgagggagttctacaaggtttaccaccatcgccaccaccattatatcctatccattccgaggatgaagctgaagaaacgccctcagctatggacatcagtgagccaagtcaggagcttgaagtagcaaggggaacccggatgtttcatattaatgacctaaatgttcccccaatttggattgaaactccagaagaagaggaggatccagaagaacgagtgtttgagatgcaagaacatatttctatgtatgctgatgatcaaggagatgatgaagatccttactcatgctctgcccctaatactgctgcatcaacttctacacctcatgctgaatttttacatttcgcacctacatcattattcactaaccccgctgaggtagtggtgagtaatttgatgattaggagttgtagatagagtgctaatagttagaggtcatataaataaataaacttgctagtatagtttagca

SEQ ID NO: 431886 - DNA, 459 bp, Oryza sativa
tttgtttttttttttttttttttttttttttttttttttttttttttttttttttttttttttttaaaaaaaaccaaaccattaatcctacttaaaggggctttccaccttctttacatttgggaacccacataataattcattattacccccatcatttttttttcactaggggcgcacaagaacaccaccaccttcaagaaataaaacctacctcggcggggactaggcggggataggaaattccgggggggggggggggcacagggggggatcataacataactgggttagctgggcctcgacggggcagtaggggggagtttggaacctgaagccgctggcgccgggggggccattgccgccgggggggaccaggaaggccgggcaggtgacaaaaagggggtaggggccggagatccaggtggcgacctttcaccggacgcgggcggtgatttt

SEQ ID NO: 431887 - DNA, 395 bp, Oryza sativa
tttggtttttttttttttttggttttttattttttttttttttttttttttttttttttttttattttatttttcaaataaactttttttttaaataaatgttatatatttttttgggggaggcaaaagcactgacagacaaaaaaaaaagggggggtttaaaaaaaaaaaaagaggaaaagcttggtttcaactgatccaaaaaacaaaaaaaaggggcacaccaaccaagagcacacagaaaggaaaacccatggtgctcttgatgaaaaaacaccggaaaaataaaaggcttattgggaaatggcccccaagaaaaaagaaactaatctggaagaagtgctggatctgtttctactccatttcccagaaaaaaaaaaaaaaccccagggggg

SEQ ID NO: 431888 - DNA, 479 bp, Oryza sativa
aaaatgagaaaaaaatcgaaaaacccctcgaaaaacggcgaaacgggtggagagagtggaggagagaaagagggagctcaaaagatgaggccttcgaagaagaaaatcgaagaagaagaagccctcgccggcggcggcggtcggcgcggcggcgccgacgacccctccggcggcggtggatgggggagcggggggcgagtcgtgctcgccgtggtcggaaaccctaaccctagctgctgcggcggcggcggcggcggtggcgtcggagacggagtcgagcagcagctgcgaggcgttcacgtgctcgttgtcgtcgtcggctttcaaccccgggtcgtcgggggcggacttgacctcctccctctccgccttctcgtcgtcggcctccaccgcgttcgtcgtcggccgtcggcgaccaggcgggcgacatggcgtggctgctggacgccttcggcaccgtcacgatcgaccaggtggac

SEQ ID NO: 431889 - DNA, 498 bp, Oryza sativa
  unsure (1)..(498): unsure at all n locations
tcgccgcggcggaggtccggcgaggcgtgcgggggctcagatccgagtgcggctgcgtgtgcgggtgcgccgtctcggcctcccggcgcgccatctcggcgagctggtggccgagcgcctcccccttgagtcgccgcccgccgccggccaccaccacctcgggcgggtcgcatggcacgtagaggtcgcgcagcacggggtcgacggcgagcatggagtagtcgagcgccgagaagaacgcgtcgtcggcctcctcctcctcgccgccgcagccgccggggaggtcgagcccccacgacgcggcgagctcggcggcggcggggcacccggagaacccctcgacgggcacccgcaaggccgcgccgtcgtcgccgccgcacccggtgtcgcagtccgcgcacaggaacgccggcgccgaggcggaagcgacgcgcgcggcggccggcctggcggtgcangcggtgcatagcggtgcgcggacgtgcttccccgagagcg

SEQ ID NO: 431890 - DNA, 469 bp, Oryza sativa
gagagtcatccatggcttccaccgtcgccctcaagggccgcccgctcgccaccctcctcaggcagctcctcgccgccgacgcgccgcccgccgccaccgggaggcccgtcgccgccgctcccgccgcctccgggaagcccgtgaccgcccccgccgccgcgaccgccaccaacgccgcctcccgccgcctgtacaacaccgagggcgcgccgctccgccgctacgacgtcgtcgacgagtccggcaccgacagcggcgacgagtacgacgccaccgctacggcggtgaccgcggctacggcggcggcggcggcggctacggcgggggcgaccgcggctacggaggcggcggcgggtacggcggcggcggcggaggcagccgcgcgtgctacatgtgcggcgaggagggccacatggccagggactgctcccagggaggaggcggcggcggtggctaccgtggtggtggc

SEQ ID NO: 431891 - DNA, 445 bp, Oryza sativa
ggtattcatgggtctatgcattgattaacacaaaaacagagagaaaagatgaacggtgcaatcttatacagacaagacaacggaggtggttgccacctaggagtaagctttcaaaattaaactgcaatgctaattcatagcagaacctatgttaacaaaacatccggtataggtatgggtgcccaccagcagtttcagactctcaggctcttcagtaataaggagaaaatatcaccatatgatccttgcaggctgcaaatttccttaacctcgcatctacttctggccaccaggtttagattgttgctgtatctgctgaagtagggttgctgccaattgcaatgttgcttgaaggcgcttttgagggtctccgtgatggtcttcctgagcagacggttgctggctagtctgtggtccagagggaagtgcaagttgcgctcgtaga

SEQ ID NO: 431892 - DNA, 402 bp, Oryza sativa
caaaaccaaccaggaaaagagcctgtggacagcttaaacaaagaatcaggattcatacggaatccacatggacattcttcaatgatgccacacagctcaggttctatccctgtccaaaactcattgccacctgctccgccatctgcatcacagttacaggttcatgcgccaccagttcaagggtcagtgccaccaaatccatccattatgcatacaccgaatgctcctatgccttctcacaacactttgcctttaccccctatgcattcttcgggaaatccagctcattctttcatgcctttgagatcgttcgtccctcctcttcctgaaggcccttcaccccttaagccgcacacatcaagggctttacaagcgcaacctgcactttcctctggaccacag

SEQ ID NO: 431893 - DNA, 326 bp, Oryza sativa
ttggtttttttaaaatgcatggtcccttgtcccacttatacaggcaatggtgggtattgagtctgaactattccgtgctccaagaatgaatagacggggtacatgaacttagcagtagtaatgcgaaactcggatgggagccaactcgtgacggggaaccgatggacacggtaggaattgcgaagcgggacttacgaagagcatcatactaataggagacgacccgagctgggcagctgacttgttctagcagacgccgctggcctccttgagggccagcacggtccatcttgcagagggagaccacattgggctgcctctccaac

SEQ ID NO: 431894 - DNA, 524 bp, Oryza sativa
atttcataagattgcatacagctttactccatggtaattagctctaatatatatttttttcatgcatacagtttactgcatgagctctatttgtttttcagataatgagctctaatatatgctcctacaaaatgcttaccttttccctccatgttaagtagctgtaccggtgttggttcacagcactggagagaagggctgcattctcaacaacaatgttggaatcttggtcaattctgtatgacacatcaatgccttctagatgaaggtggtagaccacgctagtggacgggtcaacggattggcgatcctcatcgttgctgcaaccgttgtcaattttgctgccgccattatcagtgacatcttttatggtcacatcatggggacggatccgctgagacagcgacctgatgtcccaggagagcacttccttgacaagatcctgaaactcatctgctgaagcgtagagtgattgcttttttacatgcatccagcaatcagaaagtgaagaaatgaagtgctca

SEQ ID NO: 431895 - DNA, 332 bp, Oryza sativa
gttcgccttctgcttcgatttcgacttcgattcggccggcggcggaggcggcgtcggttttggggggagttagggttagggttagggttagggtttccgggggtgatccctcccatggtgcagctgccgagctccgggaagcggccggccgagccggccatggcggcggcgtcggcggcgggggctacggtgaagctggaggcggacgagatgatgcatggcggcgaagaggacggcggcccgctcagcaagcgcgccaaggcgggggtccagatgcccgcgccgacgtcttcgactacgtcttcgcagcaagcaggacatgtatcaccatg

SEQ ID NO: 431896 - DNA, 433 bp, Oryza sativa
tttgtttttaaattaagtaagtatagataacaaagcacatcattgcttacaaatcgacaatacattattaattaatcccaaccgaatataaaaaagggagccaaaatagaagacgatataaaatgagtgattacactcgtgtacatggtacacttagggctaactacggatacacctccagaacatctaatacactacaagcacgcagcaaacgtacataaatacttatacatacatttctgcaatacttattggatctgctaaattaattacatttacttggatgcctgcagccggagctccggctacagtacttagatggactgcacggccttggccatgccgaaggcggcggcggaggctagagcgccgataacagcggtctggaaggcgcttgagaaagggcggttgccagtaaaccggcccttgacat

SEQ ID NO: 431897 - DNA, 383 bp, Oryza sativa
tttgtttttttttttttggttaatacaacatctgggcgcggtggacttgtgaacatggacagtgagaatcgcacttcattatggttatgaagaggaagaagaacaagtgcgacacaggaaagagttcaccaatttaccctctctgccacccaaatgtgagctattcatgatttacggtattagtcgaccttggtgcagtactcgctcggatgcttggcatatggagccggcgggcctattgactccggcgcggcctatcttggtgatggcgggtacaatggcgtactaaaaggccggatggttggctgtaaagtttttatcagtggaacgcgagcgggactaagtcataaggacctgctacgaggttaggggggccttgggct

SEQ ID NO: 431898 - DNA, 473 bp, Oryza sativa
tttgtttttttttttttttttgttttttttttttttttttttttttttttttttttttttttttttttttaaacaaaaacatcgaccgggggggaacgaacttttttcctttttttttgggggccatcccagaaattcccgccccaatagcaggggggaaaaagggggccaaaaagaataggggggtttttataacagcggcaccctcagcagttaaagggggggggatgggaaaaaaaaaagggttgattggatttaggggggggggtcgggcccggcaacaatcttggggatctcgccggggatcttggcctggccctggcggttgtaaaccatgggggggttcttccggggctcgatggggttgccgggggccctcctcatgggccccatcctgggggggagctctttggcgggcgactcccggagcgcgcgggggaactggcttttgagggaaaacgggaggagcccct

SEQ ID NO: 431899 - DNA, 417 bp, Oryza sativa
tttgtttttttttttttttttgttttttttttttttttttttttttttttttttttttttttttaaaaaaaaaattttaaattaatttaaaaaaaaaaaaaaaaaaaaaaaaaaaaaaaaaaaaaaaaaaaaaaaaggaatgaaaaaaaaaaattaaaaaaaaaaaagacaaaaaaaaaaaaaaaaatgaacataaaacgctaaaaggaaaatgaaaaaaataattgaaaaaaggatgataaaaaaacaaaaaaggggccctacacgggccaaacaatgaacaaagaaggggccatcaaattaacaaaaaaaaaagctaaaaaaaaaaaagttcaatgaacaaagaactaggaggggatctggcaaagaaaaatgggaaaaaaaccaaaaaagggaaaaaaaaaagggggaattcgg

SEQ ID NO: 431900 - DNA, 534 bp, Oryza sativa
  unsure (1)..(534): unsure at all n locations
atcctgttggattggagtataattccactaaagttgcctatctatcgtgtgttcttgtgttcttgtgatttgtttccctttttcctgcttaaatcagtgttgaatcttgtaagatcctgtcagccggctgcatcaaccccccacatcccggcctcccactagaccaccaccctcatcccgcggcggcctccatcgtcgactccgcttcccccgtgcgcagcccacatccacgccgacagtccgtcgcctacgccacgtctcgcaactggatccgctcctctccgtcgatctccaccacggtccctttcgcgccgcaccggaagctgcccgccagtcctctgatcgtcgctggatgctgtcggcgggtgatgcagtactcacccgtctcccctccatcagccgcaccggaagctgcccgccagtccttcgatcgtcgctggatgctgtcggcgggtgatgcagtactcacccgtcttccctccatcactgagggacattcccatcaacaaaaggtacacttggcngcatcactaa

SEQ ID NO: 431901 - DNA, 325 bp, Oryza sativa
aatggatatttaagaaattttggtttttcctttttttttttttttttttttttttttttttttttttttaaaacaaacacccccaccggggcggaacgacccttatccccttttttttgggggccatcccaaaaattcccgcccccaaaccaggggagaaaaagggggccaaaaaaaaaagggggggttaaaaaacaccagcaaccccaacagccaaagcgggggggatgggaaaaaaaaaaggggcgatggggtcaaggggggggcgaagcccccggcaacaaactgggggaccccgcccggaaacctggcccggccccggggg

SEQ ID NO: 431902 - DNA, 439 bp, Oryza sativa
tttggtatatttttattttttgggtttgatctcattgtttgtttttcttttctctttttcaattgcaaggtttgtcgcaaatgcttgtgaaatccagtgatcaagggtgccatgcatgcaacataaaaagcccaagatgaggattgaaacattgaagcactggaccaaaccagatccagtgaaaggcattagttgcctccttgatcggctcaagcggagcggacacattatgctgcgacaggcctgtacaaaaccgacctattgacgccttttttctcacatactgcccctagccttacagagaaggactacccacatgatgcctgacaaaacatgctgagctaaataacggtcccggaacccgtgtaagagcattttctctgcagccagcaggggatgaacagacaggaccaggcggaagcaagggcggctaacccat

SEQ ID NO: 431903 - DNA, 449 bp, Oryza sativa
ttttgttttttttttttttttggtttttttttttttttttttttttttttttttttttttttttttttttttttttttaaacaaaaactggcaaaacagcggcgggggggggccagaaaatttaatttccacccaaaaccaaggggggggcaatccccgggggggggaaaaaaatctattcccaaggggaaaaaccccggataaaaccggggccaaaataccgggttaccccgggtccccctttttgggccccaggggggggaaaaacgccaaaaaaatgggaaagaaaaaaggggccaaccggggggtggtgggcacaaaagccccttttttggggggcccccccttttccggggatatcccctggggggggccaatttgcttttttttttttacccctgtaaaagccggctttccttttaaaacggggccccccggggccttttttt

SEQ ID NO: 431904 - DNA, 408 bp, Oryza sativa
ctcgatttttcaaaattttcaaattccaggagagaaacaactccatcaagctttctccccggagaggtgagcgatctggagtcggatctggctggaggacagaagcgcagccgtccactaccttctgcggcaacagcctcagcacagcaagccacgcggccgaagattccgccggccgccgagatcgaggcgttcttcgcggcggccgaggaggctgaggccaagcgcttcgccgccaagtaagtatatacagaatttttaccgctcgctgtaacatctagtaaaagttactgcgcgccctagctagcttcgttcttcttctccgatgctcgcgcgtgggcgtgaatttgccgctgctgccggcgagcaagataattaacggtgcgtgcgctttttcccatggccgca

SEQ ID NO: 431905 - DNA, 523 bp, Oryza sativa
  unsure (1)..(523): unsure at all n locations
tttggtttttttattttttggggttttttttttttttttttttttttattttttttttttttntntgggaggagaaaaacttcctttaattccaaagtgcttttcaaattttaaaaaaagggggccccctggaagttttggggaatgccacacgcaacccttgggtttatgcaagcttttggggggccttgaaattgccccttgacccggcaaagaataacctaatttattccccccggtggggaaaaaccccccctatggggaaaataccctgggggcccaaaggaccaggggtttacaaaaaaatctgcccgaatggggcccccccaaggtggatgggtttttaaaacaaaccctggctggtggggaaaccccggaaaccctgccaaggttggggggttttttttccccggttggctaggggcgaaccccctaacatttggtaaggggggggggggtttttcgggcccagttgttttgttttaaaaaaggggtggattgcccccccccccccccccttttt

SEQ ID NO: 431906 - DNA, 360 bp, Oryza sativa
tttggttttttttttttttttggttttttatttttttttttttttttttgttttttttttttttttttattaagtggaataaaaacaaaagtccggggttttgggcctaaaacagaaaaaagggggggccctttagggcaagacaaccaagcttgggggggaaaaaaaaagaaagcctgtgaagagcacctggggggggggttttatggtgacatggggaaaaaatggaatgaacccgggggggaattacaaaaaatgtctttaaaatccgcccccaaacccagggatcagggcttaaggaaataacaccccccaggggggaagtttcaaaatcaaaaacatgtacggacgtggagggct

SEQ ID NO: 431907 - DNA, 505 bp, Oryza sativa
tttgtttttttttttttttttgttttttttttttttttttttttttttttttttttttttttttttttttttttttttttttttttttttttttttttttttttttaggaaaaaaaaggaaaaaagcccccttttttttaaaaaatttaaaaaaaaatttttaaaatggcccaaaagggggtaaaaaaaaaaaaaagggggggaaaaaacaaaaaaaaaaaattttaaaaaaaggaaaacccccaatttaaaggggggaaaagggaaacggaaaaaaaaaatcaaacccaaatttttttaaaggggggggtcaaaaagggggggaaaaaatttcaaattggaaggtttgagggttttaaacccttgggaccctaaaaggggggccggggaaaaaaaaaggtggagttttttggggagaaaaacaattttgtaaacggtaaaaataatttttgggggggttaaaaaccctctcggtattaagggaatttttataaaaccgggtctt

SEQ ID NO: 431908 - DNA, 451 bp, Oryza sativa
tttgttttttttttttttttggttttttttttttttttttttttttttttttttttttttttttttttttttttttttttttttttttttgggggccccaaaaaaaaaaaggcctttaacaacccaccccacccgtttggaaaatggtacacactggcctttggggcagacttttaatttggggaaataaggggagggcttatccccctgggggggggccccgccaaaaaaaaaaaaggggaaaaagaaaaaaaaaggggggtgaaacaaaaaaaaatttgggggggggttggggggaattacagtttaaattgggcattttttaaaaatggggaagaccgtttaaaatgacccccattggccccggaacatacccctggacatagggggaaaaaacggaaaaaaaaaaaaacttttttacttgacccttttaggatcctgaaggaaacgg

SEQ ID NO: 431909 - DNA, 431 bp, Oryza sativa
tttgttttttttttttttttggtttttttttttttttttttttttttttttttttttttttttttgggaagaagaaaaactactattaattccaagggtctatacaaaaataagaaaaaggggccgccctggaaggtctggggaatgcatcatgcaatcctggggtctatgcaagcttttgaaggaccttaaaattaccccatgacccggcaaagaataacttaattcattacccccggtggcaaaataccccctctatatggaaaatcccccgggggaccaagggaacaggggtttacaaaaaaacatgccgaatgggggctcctccaaggtgcatggctttttaaaacaaacactgcctggggggaaaacccaggaaaccctgcaaaggttgggggggtttttttcccctggctgcccagggcagaact

SEQ ID NO: 431910 - DNA, 360 bp, Oryza sativa
ttgggttttttatttttttggggttttttattcattcttttccttggtagaacaagctgatttgataaataaatcacaacaccataatctatgggtccggtctagaaccggcacgaaaaaacccactgccggtacagggctgaccctcatggcaaaactagggcatacacccaggcgggccacacggatcctcccatctatacgggccacggacgaacatcaaggggaccggggacacacacggacactttattggagagacccgcatggccgctaacctagctaggttagctggaggcgatgcgatggcatggcagcacggagggggcggtccatacttgccggggacaaaagtggggg

SEQ ID NO: 431911 - DNA, 378 bp, Oryza sativa
tacatacactcgggcagcatatgccctacatctgatactgctaagattggtcacttgagctgcaaccgtgggatgagcgatgctacctgatgccgaaggaaagccacataagagcacaacgactacctggacatgcgtcggtagacagcccactgttactgtcatagacctgaatagacttatccgatagttaatatgctgcaaaaaaggtaggacatatggcaaacattcctgcttaacgatgtgcaaacaaagatcaaggaaattgacggaatgctgaactcatcagatactgagcatgctactagaactactgacaatgccgagaagatacagagaatgctaaatcaagcgcggattgctaccattatcattgac

SEQ ID NO: 431912 - DNA, 357 bp, Oryza sativa
ttggtttttttattttttggggttttaacattaagaacttttcttgaaaattttgttatttgtttcgtaaaaaaaaaaaagcaaacgagacggagcggacttccacccttttttcactcggggcttaaaacgaagttacactgccaaataacccgggaaaaaaagggaaaagaaaaaaggggaggggggtatttaacaccgggaccctctaaacctaaaggcagggggttgggaacaaaaaatggggttattggaattaggggggggaggacggccccggcccaatatccgggggccccccggggatatgggcctggcccctgcgggtggaccccctggggggggtttccccgggct

SEQ ID NO: 431913 - DNA, 313 bp, Oryza sativa
tttggttttttttttttttttttttttttttttttttttttttttttttttttttttttttttttaattttaatttttaaaaaaataaaaaaaaaaaaaaaaaaaaaaaaaaaaaaaaaaaaaaaaaaaaaaaaaaaaaaaaaaaaaaaaaaaaaaaaaaaaaaaaaaggaaaaaaaaaaaaaaaatggaaaaaaaaaaaaaaaaaagaatataaaaaataaagaggaaaaaggagaaatatttttcaaaaaaaaaagttaaaaatatatggggaaaatatatatatatgagaaaataaggtaaattgaaaaa

SEQ ID NO: 431914 - DNA, 386 bp, Oryza sativa
ttttggtttttttttttttggtgtttttttttttttttttttttttttttttttgttcgaaatttacgcaaaacatatacttttttattattcaatgagaaaagcaatgagcgcaatggtgctttcttatcacgtggggggggaacgccaagaaacaaagggcaggggacaaaggggaaaaaaaagggttccgccaaagggggcaacgaaggggaccccaaagggaacggaaaaaccgctcgaccagggggaagggatcaagcagcgaccaagcaacggccccctccacgggggcaacacccattatagcccttagcagcgaaaggaggtgcctgtggaaggattccaccctaaaaaaaaacaacaaggggggggggggaggaaag

SEQ ID NO: 431915 - DNA, 366 bp, Oryza sativa
ttttgtttttttttttttttttgtttttttttttttttttttttttttactttttaagaatttgaaatttagcgaataccattaattttttgaagggcggaaaatacatggagaaaaaacagcggaatgggaatacgggcgcaacattgaggaataaacccccccccaagactttatgggaagggaattttcttggtgaaaaaaaaacatggacattggaagggaccaaaaaagggaaattaaagatcaaaacacggagatcgaacaaggggctcggggggggaacgagccccccttttgcagggaaaaaagcaagaaaaatttttcaaagaaaaaaacgggctggatggcaaacgggttcgggct

SEQ ID NO: 431916 - DNA, 388 bp, Oryza sativa
aaaaaaccccctattatttttaaggaaatgaatttcacggtgacaatcccttaaaaccgaaagcggcaaaaaatttaaaatcaaaattttttgaaccaaaattgaaaaccccatcatgggcccaggggggggagcaaaccccaaaaaccggtagactttttggtcactccaaaaacctagctttattttttaaaataaaaaaacatttttttcccccccctgggggcaaagggggctagacaaccgaagaattccatgccggcttaagccacttggatcttttatttgaaaagaggggtggccttccaaatataggggaaaacccctttggccacaagcttttgggcaaaatcgggggggacaccgggggggaaggggcccctgaggg

SEQ ID NO: 431917 - DNA, 395 bp, Oryza sativa
ttttgttttttttttttttttttttttttttttttttttttttttttttttttttttttttttttttttttatttttttttttaaaaaaaaaaataaaaaaaaaaaaagggaaaaaaaaaaaaaaaaagaaaaaaaaaaaggccaaaaaaaaaaaaaaagggaaaaaaaaaaagggaaaaaaaaaaaaaaaaggggaaaacggggggccaaaaaaaaaaaaaaagggaaaagggaaaaaaaacttgggaaaaaaaaaaaaaaaaaacggggaaagaaacccgggaaaaaacccccgaagggggaaaaaaaaaaaaacccaaaaaaaattccctggggggggggaaacgggaaaaccaaattatcctcccaaaaaaaaggaaaaacccctgggggg

SEQ ID NO: 431918 - DNA, 444 bp, Oryza sativa
ttttgtttttttttttttttttttttttttttttttttttttttttttttttttttttttttttttttttttttttttttttttttttttttttttaaacccaaaaaaaaaaaacccttaaaaaaaaaattttgggttaaaaaaaaaaaccgggagaaaaaaaaaaaaaggggtccaaaaaaatgggggggcaggggtttatttaaaccaaaggtcaggcccattggggggggccattaaaaggcaaaaaccccccccatttaaatccccccgaaaaaagggtttcaaaaacgggtggggccaaaaaaaaaaaaggggggggaaaaggggaatccccttggaaaccggggggtgaacgggcccaaaccggggggcgccgggaaatttggggttgaaggcccaaaggggggggggggggtccggggcaaacccccccaggagggg

SEQ ID NO: 431919 - DNA, 481 bp, Oryza sativa
ttttgttgaaaccagtaatcccacatctcatcagattattgtaggcaccaactgtatacctgggctcactccacattaactaacaaaaatgacaaaagaacgcaccgaaaaaaatgtggaggatcaacaacccagtagtactgttcaacattgctaaatctacgagctactacaactaaattcggatgctgacacagttgatccatcttacaacagcaggacatgccaatcctagagatagtacacagcaaggcaagaatgtacagaaaaagttttaacatggctaattgatacagatcttacaaaccaaatggcatgcatatcttggagcttacagctttacctagtgttgctcagtagtgcaattgctggaaaaaaatacactgagcaggattccattcagttcagatcaccctgattatctagaagcttcacagtagctactgcatctgagcaacatccattcatcaccctcatctag

SEQ ID NO: 431920 - DNA, 451 bp, Oryza sativa
tttgtttttttttttttttttttttttttttttttttttttttttttttttttttttttttttttttttttttttttttttttgggaaaccctttcgaaaacatgttttatcggagggggggcccccccccccccgggggcccagggggttacaaaccctaattaagctgggcttaagcaaaaaaggaaggcgcctggtcctagctccaggctacaagacggtacggtggccccgcccccgggtggtaacccggggggtcaagggggcccttgaattgggcgcccttcctccgggtaagcccctccgggaacccgaccttaaaccgggtccctaaggttcccgggggggcgggcttgggggcgaatggaaagcccttcggcgggacccccaagttggacccgggggaccccacgggggccccggagcacctcgccctggggcccgggggga

SEQ ID NO: 431921 - DNA, 467 bp, Oryza sativa
gcatgccttccaagttgaaggcttttaaacagctgttgggtatcttggatttgtggagcagaattatcccgctgcaaatgatcattgatcagacacctcatttttcatctatatctacatattttgctaaattaactagcatccagatatcaaaagacatgttcacattgccagcaccactgctgtaccagtatacatgcatgtaccaggtaaaacttttctctgcagaatcttgcaccaaaacgaaccaacacatgttgtatctaactatagtatcaacggtaatcggcgttcatcggtttggaacctgaggcaagtatcagatttgcaagagggaacagggcaacaggctgccaccggcatggccactgccattaaacagcattggtaggattgagtggctttcctcgccccatggtaaatcctcttgtgccatctggcatacgaggacccaggggtggctttga

SEQ ID NO: 431922 - DNA, 225 bp, Oryza sativa
tttgttttttttttttttttttttttttttttttttttttttttattttattttttttatttttatatattttttatttattttttttatttttaaaaaaaaaaaaataattgaaaattttgtttttttatctttatggaaagggaaaaaaaaggaaaaagggggggatttcaactcaggagggcacacagaaactaaaatcgcgcgacaaaaaagaaataaaaa

SEQ ID NO: 431923 - DNA, 488 bp, Oryza sativa
acagcacaaaaagcctagttttactgggagtactaattttacaaacagaatgctagtccaagtccagtatattatatataatgtacactacactgctcaaacctgataaaatgtctaaattaacagcaacaaaaacaccagctcccttctgataaaaggaataacaaattctgtatggacagatctatgctgaatttgcactgctgaagtccatgagcaaccacacctaggtgcattattacccacattttctatgttacaggaaggggctaggttaagcaacacaagggcttcacacctttactgtacaaaacattcataacaataagagcctttggcgctgagactatccccagcactcaatgagacaaactgttgcgacaaaattctctaacctggccactaaattcccccaacagacttgtctgctcatgatgcagttgagccagcagaaagaggaccatctctcagctgctgaagacagaact

SEQ ID NO: 431924 - DNA, 544 bp, Oryza sativa
gatgctttccgctgctggacggggtgggcctggacttgttcctagttctttgctgccctttgatgtttctgttgtgctccgtgggccatactggatacgcattatatatcggaagaaattttctgttgacatgcgctgtttcgctggggatcaggtttggctacaaccagcaactcctcctaaaggaggacctctggttggtggatcgttgccgtgcccacaatttcgaccattcataatggaacatgttgctcagggtctaaatgctcttgaacccagtttcatgaatgctacacaggccggtgcgcatttaaatagcagtgctggaactctgcaacctgcacccaatgcaaatcgtgtaaacgcgactcaaggtattggtatgtccaggcctgcttctggagttgctaaccatgtagcagccaatctgagtcgagcaggtaatgccatgttggcctcttcaggacttgcttcagggattggtggggcctctgtgcgactaacatctggagctaacctccctgtcatgtgaaagagagctgat

SEQ ID NO: 431925 - DNA, 390 bp, Oryza sativa
ttttgtttttttttttttttttttttttttttttttttttttttttttttttttttttttttttaataatttttatattaattttttttaatagataaattattatttaacaaaaaaaagaagaagggaaaaaaaaaaaaagggggcccaaaaaaaaagggagtcaaaaatgcggaaaaaaaaaaaaaaacgcccttccttgctaggcaaaaaaaaagggaaaaaaacccccccatggggaaaaaccccaaaaggaaagggggagccaccccaaattttatggaaagggggcgacaaaatttaaaattgccctgcaaaaaagggggggcaaaaaaaacccgggggaaaaaaatttaattccaaaagaaacgttggggaagggaccacccc

SEQ ID NO: 431926 - DNA, 477 bp, Oryza sativa
tttgttttttttttttttttttttttttttttttttttttttttttttttttgttaacccacacaacccaaaccatccgggctgctaaaaatccaagggaaaacaagggccggtactttaaatgaccggtccagggtctccgccaaacgtatgctaagcagaaacataatctgaaactaaattccaatggggggcaaaaataaggggtagtccaagggggctactcccgccccaagccaaacaaggggattggggaccctatccttccctgggaacccccggtaaacagcttcctgggctgattggagccctctcgtctttgatcgaggccgcagtgttaagcagcaagccccccaaggggaccagcggatggggtggggaaggaccgccacggctgaaccgggggcgggggtggctccggttgcgacaggaacaccggcggagggggttggacccaggggatgtggcggctagggc

SEQ ID NO: 431927 - DNA, 432 bp, Oryza sativa
gctcctgcaagccctagccgccacatctcctgcgtcctaccaccgccgccgctgttcctgtctccgccggcgccgccgccgccgccggttcagccgtcgtcgtccttcgccaccccatccgctcgtctccttgcgtggcttgctgcttgacgctgctgcatcgatcagagacgagaaggctccagacagcacaggaagcagttgaacaggagtaacaagggaaggaaaaggtacctaatgacattgatcggcatggggcgggagtagcacccttggactacacattattattgcacactattggaatttagttttagattatgtttctgcttagcataagttttgcgtagaacttgtaacggtcatttaaagttccggtccttattttcacgtggaatttgaggagctaggatggtttggattgtgtggatt

SEQ ID NO: 431928 - DNA, 464 bp, Oryza sativa
aattctgaagaaaatagatatatacagcctgtacatgtaatatgtttgataaagcacgtgcagcacaacagtggggtacacagttcagtccagtaagcaagaaaaagtttgttttttttccttttgctatacacatataaggccccttttgaaacacaagaagtatgtaacatgaatttcacagaaatcccggaggaaacaactcaactcaactcccgcagaaatagcaaaattttttccgcatttcaaacggggtcagatacagcgacgacgacgcacacaaaacaacacacgagacgcacgaccgagctccatcaccgcttcttgctttaaacccgtccatcaccagcggaatggattctgcatccccctcttcttcttcttcttctcgatgtaggccagcaccttctcctgctgccccgacgaagtctccaaaagcttcttggtggattcgagctcggtct

SEQ ID NO: 431929 - DNA, 466 bp, Oryza sativa
acactgaaatgtagtgcctcgttaaataaagtgctcatcaatcctcattatacaagaagattggatggatgtcatgaaacagaaaaggggcataacccttgatattgtacataatgctttttcattattacaataaataaataatttaggagagtatggtgactgtactactaactaaatctcttgacacaatcacactgttctcagggagagggaaaaaagagctaatacattttttatcaacagttaagctcactcttgctggaatggatgtaatcttcgggtgatccgagtaaccatattaacaaataacgttcaccctccgagtcaatcaagaaaccggtataccggacaaaaaatagacaagatattacacaaataataatcaatcagttaaaagggcgttatcttgatagggtttagtggtagcctttttctccagggagagtcacagactcacagttca

SEQ ID NO: 431930 - DNA, 505 bp, Oryza sativa
ttttgtttttttttttttttttttttttttttttttttttttttttttttttttttttttttttttttttttttttttttttttttttttttttttttttttttttttttttttttttggcccaaaaaaaggaaaaacaaaaacatttggggggggtccaagggaaaaaaaggggggccccggaggcctttttttaaaaaaaaaaagggaaaaccccccgtttttttaaacccccaaaaaaaaaaatttgatccccagctttttgggggggggaaccaaaaagggttttttttccaaaaaaaaccaaattttttttgggaaaaaaaaaaaaagttcaaaacaaaaaaggggggggtttcctaggggaaaacccccctgttttttttttaataaaaccccccaaaaaattttaaacctttttgggaaaaggtgtgggaaaagcaataaagccccttaaaaaacccctaaaaaaggggggcaaaatggttttggaaatacaaaagcc

SEQ ID NO: 431931 - DNA, 429 bp, Oryza sativa
tttggtttttttttttttttttttttttttttttttttttttttttttttttttttttttttccccggaaaatcagaggctcaaaattaatagggtttttaagcattttacaacttacaggggggggcaaatttacaagcccaacttttttaaagtaagctgtagggggaaagggacccatttttaacaacgggaaaaatttgggttttggaaggaaaccttttgaacaaattaatggggaaataaattgggggggtcgtttccgcccgatctaaaaaaaacgggccgtttgataccaaaagggggtttggcatccaattgaccgggatgacctttttggggatggggcttttgccggactcgggggggaccccaatggagaagggggccttgaggggggggggggtttccatcctccaaagggggccc

SEQ ID NO: 431932 - DNA, 471 bp, Oryza sativa
tttgtttcttttttttttttttttttttcttttttttttttttttttttttttttttttttttttttttgggaagaggcctacaggggggtattttttttaccaaatgcagaaaaaataattccctaaaacccttgtaacaaacatttgggctttctgggacaaaaaaccgggggggttctttttttttacaaggaaaaaaaggggccactaattacaggttttcctgggtaaaaaaactcgatgagactggagttaagttcattcatgggaaacggaatccagggggaaagaacccgaaatcaagggggaaaggggatcaaacaagggcgagtttggatccatgcaccctgacacaatgcaaaggttggagggaacaccccacttttgggaggaactgcccattttgcaacttgggaagacaacggtttcgtctgggaagaagggtatgtcgaatgccccttttttggta

SEQ ID NO: 431933 - DNA, 255 bp, Oryza sativa
tttgtttttttttttttttttgttttttctttttttttttttttttttattttattttatttggggacagagaaaaaccaaaaaacccccacaaggggaggggggcgaacaccagggagaaaaaaaggagccaaaaaaaaacaacagacccagaaaacaacaaaccccggcacaaccgcggaacgaaggctctgccaaaaggggaagcccaaaagggggggaaataaaacaccacccccatccccacattaaaag

SEQ ID NO: 431934 - DNA, 343 bp, Oryza sativa
aacagaaggaaacattaccacatccatgttattacaaacctcaacaggaaacagggctgatagcctgatagtttcggggcaaatggacctttaaaaaaacaacacttggaactgacaggtgcaatactggtttttaaaaacaaccccccccacatatttgacatttaaagggcaagagcatggcaccgggtggaagggttcaagacgtttaactaaactttggggggaactttgagctccatgtatgtttgaacaaccttgagggctttgggggcttccatgaggggctttttgggcattaagaagcatttaccaaggttggtcacaaaacatttaggggaac

SEQ ID NO: 431935 - DNA, 543 bp, Oryza sativa
ctttcggatcccttcttctccgggcggcgatttctttcttcccatcggccttgttggtttgaaatacagagtccaggtgcgagccaagtcccctctcttcgcgactgattgcgtttccttaaatatgcaaggctggtagagggccgggtgagaaattttgagatttcgaccaacagagggcggaaaacccttggattttagattcactcaaggcttcgtcgcgtcatgggtattttcaagttgaatctgctcctaaagctgcagcggcagcggcagcgccgtcgtcgccaaatccaagcccgtaatggatcagttttgattcatccacgggataaaataaacgctccagcctgtcaaaataacacacactcttggagtggccaagcgaagtgttcagacccaacgcttccggaggacatctcgtgtcatatacattccctgatgtctatgcgggatgctgctcgtgttgcctgtgtgtctcgggcgtttgcacgttcctggagatgccttcccaacctcgacttcagtgaggaatcattagga

SEQ ID NO: 431936 - DNA, 416 bp, Oryza sativa
tttgttttttttttttttttttttttttttttttttttaaagtaccgtgtaacattaaccgttactattacaggttgccatttgatggcaccaggtttattggacaaccatgtcgacgatcacttaacactgatgaacatattacacaggtaatgggcgtctctacacgaagatacagcctggggatagcccatctgcttagggcttaacattggggataaatataaaacatctttggaaaaggaaaggggtttctgaaataaaaggggcaaccagatttggattggggactcccagggtcaccagaaagggggcactcttaagccattgagggtgaaaggaactagcacaaaaatcccaggaagagggcatgcaatcaatccagggttatatttgggggccaaagcaacaaagaa

SEQ ID NO: 431937 - DNA, 571 bp, Oryza sativa
  unsure (1)..(571): unsure at all n locations
gctgtgcaaaagtccaaaccacgcctcgtgatctcacaccaaatcttccacggcgatgcaagaggccgaggagcccagcaccaagcttccgtcccgctcccccctcgacgggcccgcccctcccccttaccaccatcaccactacggcactttcctcccgccgccgccgccgcagcagcagcagcagcagaagcccgacggagcagcctccaaccacccgttcccggccgggtacgcagctcagggcgttgttgccttcccgtgcactgtgcagcagctggtcctcgtggagggcgtgcccatcagggagcctccgcttccgttttgcggcatcggcctaggctggattttgttcttactggggtttttcttggctgcacttccctggtatgctggtgcttttattctattctttgttgctttggaccacagagagaagcctggattgattgcatgcactattgctggtatttttgtgctagttcctntcatcctcaatggcataagagtgcatcccttctggtgatactggatgtcatcaatccatatctggatgtacctattatttcag

SEQ ID NO: 431938 - DNA, 161 bp, Oryza sativa
ttttgtttttttttttttttttttttttttttttttttttttttttttttttttttttttaaaaaatttaatattttaaataaataaaaaaaaaaaatattgtaaaaaatattaagaaaaacgcaaaaaaaaaaatggtctaaaaaaaataaaaaggggga

SEQ ID NO: 431939 - DNA, 477 bp, Oryza sativa
ttttgtttttttttttttttttttttttttttttttttttttttttttttttttttttttttttttttttttttttttttttttttgggggtaaaaccaaaacgggatttaaaagaccgcccaaaaacagggtttgggaaaaattttcccctcattaaaacacacccctacttttagctgcaagggggccctggaaaaattgggaaacggaacaacaattttgaggcaaacttcacccccccaggaaaacaacccctttttttttttccaaaccaaattccaaattcaaaagatcttcaaattttaaatccgaagggatcggaaccacccaaaaggggccttgaacttgccggccccgccggcgttttaaccccctccccggaaaggtgtttaacgggtgcctcccctgggaccgggtcctcccggtcccggtcccctgggcggggtgccccagcctccgggaccccccccgaaggg

SEQ ID NO: 431940 - DNA, 403 bp, Oryza sativa
gctaatctccaagaccaagacgcctatatatgccgctgcgagaaatattgataaaaacatacgcactgcatgctctccccattctccccatgaccagtgtacatacagacaccatgtacgctagtacacacgtatacgtacatgaaaaggcagagtgtgcgcagtacatgcagtacgtgtcgttgtagccttgcacgctcgcctgcagccagaagcagcctacaaacctagcgcggccggccggcgcggcacgtgtgcgtccacgccatcgatcagttttctttgatggtggcagccaggtcgaggcagttgctgacgaggcggttgacgtggcgctgcgccccgggtatgggcgacgtgaggtccgggaactcgtcgaaggcttccccgcagtccgtggaaa

SEQ ID NO: 431941 - DNA, 486 bp, Oryza sativa
  unsure (1)..(486): unsure at all n locations
tttgttttttttttttttttttttttttttttttttttttttttttttttttttttttttttttttttttttttttttttttttttttttttggggaaaaacccttttaaaaaaattgggccaaaaaaaagggaaaaagggccagaggggggggaaaagcccccaaaaggggaaagggggggggaattgggggaatgggaagggaacaaaaacggggggggaaacccccccgggggggaaacaagggtatgggatttgccaaaagtcacaccagccggggggggtttttccttgggggaaaaaaaaaaaagggggggccccatttttgggggaacctaaccgggggcccggggaaccctttaaaatttnaatttaaaaggggcagccccaaaaatttggcggtgccggggccggggttttttttttgggggggctgcaggtggtgcccgggccgggcgggggcccgggtaaacaccccggggaggg

SEQ ID NO: 431942 - DNA, 523 bp, Oryza sativa
gttcgacagtggagttaccttcaatcccactgaaagacaaatcttttttattccagcttttcaagtgttcgtcaagcaattttctctaacgttgcactattttcatggcaagtgtgtaacagggacctataaaaataggccatatcattattgctgatattattcttaaaatttgaagtgttgatatatttattgcgacaaatgctgttaaactacgtgcattgcacgtgcacaattactagttgtaaaaaaaaggacgacaaaatccaatacaacttcggcgcatcaccacccttttgttcttctcttcggcgagttctctcgacaagaggtaacttgattcgatgacttgtactatcggggctattatgtccctttagatgtttagcccttttatcatgaccatctgctattatatgtcttagttaatctagtcttagtatctcgatttagccctattggccagttctccctttagggttctcgccgatatcagctaaattgttttgctagattatattag

SEQ ID NO: 431943 - DNA, 577 bp, Oryza sativa
  unsure (1)..(577): unsure at all n locations
accacttcttctctacccggcggcgccaatccgagccgcactgctcctcctctcctccctcaacccccgccaccactcctgcttctcctcctccgcgtcacaccggatccggccgcttggaggtcggggccgccagatccagccaccacgcgcggcagcagcgcccctcctcctttgcgtcacgccggatccggccaccacgtgcagcagcagctcctcctccggccttcttccggcagcagcaccacggcaacagctcctcctctggtcttcctccagcagcagtgcaaagccaaggtctgcatggtggggttctaaatggggttgggaagggcgtggagacgaacaccgccaaggtggaggaggcagtcggcgacgacctccaagggctcctcctaaaggaataaaacgctagctatgaacttgtagcttgaacaaacaaaatgtatatgaatcaaaaggtcacaaacatggtatctaagcaatatataaggtcaccatatatatctactaagcatacangtagatcgggtaaaatcaagctcaagcacaatatgagagatggcaaaatggacaa

SEQ ID NO: 431944 - DNA, 178 bp, Oryza sativa
tttgttttttttttttttttttttttatttttttttttagaaatgataatgttaaagtttttataaatacaaacgcaaagattaagtttcatactgaaaggcataacttgggctcaaatgcgggtaaatgctactctttaaaaaaagcaaaaaacgggcgcaaaagaagaaaaaacaa

SEQ ID NO: 431945 - DNA, 354 bp, Oryza sativa
ttttgttttttttttttgtttggtttttttttttttttttttttttttttttttttttttttttttttttttttttttttttttttttttttttaaaaaaaaccccccccaaagccccatttttttttgggggggggggggcccttattcttttgggggggcgggaaacaaaaggggcccaagggcccaacggaaaacccccggggcggggcctttttttttccccgcggggtccttgggggggcaggggattccaacaatggggggcccggtggaaaaaacccccccgggggctaaaaaatccccccccgggcggtaaaggggggggggctttaggaaaccgcgtttttttag

SEQ ID NO: 431946 - DNA, 494 bp, Oryza sativa
ttttgtttttttttttttttttttttttttttttttttggcccaaaactggatatatttttatggtcaaagtaaaccaacaacgatgaaaacagaattaagtttgttttgcaaaataaggagccctcgattgctgaatgtacaaaattttttgggcatttaaaaatttggatctccagtgcaacaagaatgtttgagaagcagtccactgtcagtagctaaacactgcaccttagtgttttccacatgacaggggatgaaacattttcccaaccaaaaggtaccttgggccttcctaaaatgcagcctaagagtttaacaactttttgctttaaatcttgatgttgaagtagtcaaaatcaaaagggggcagccttacatatccattttcaccaccactcgagaagctgttaacaccgtattatacatgaagaactgaagctcaaagcaaaacactttttgaacaacataaattaaccctggcatgtgagaaaa

SEQ ID NO: 431947 - DNA, 421 bp, Oryza sativa
ttttgtttttttttttttttttgtttttttttttttttttttttagtacaattacaggagataggtgctctgttaggctctacaggcaataaggcagcttacgggttagaaatttcagattaagcggatctacaaaccctaacaaggcaacaaaacacagcgggaacacgagtaacacgaccacaaaagcccaaccaccaccaggtggcttaaccacaccttacaatggtacacacacgacactcaccatagataagggttattacaaactcaggcggcatataaaattgtgggaacacccaaaggcacaaagcgttgcacaaagtgcggcacaaacccacagcctatttgtgggggcccgaatttgccacaaatacacagtggggcagtggcacaaaatcacaaggccaaaagaaacggg

SEQ ID NO: 431948 - DNA, 369 bp, Oryza sativa
ttttgtttttttttttttttttgtttttttttttttttttttttttttttttttttttttttttttaatttttaataaataaaattaaataaatttaaaaaaaaaaaaaaaaaaaaaaaaaaaaggaaaaaaaaaaaaaaagaaaaaaaaaaaaggaaaactaaagaaaaaaaaaaaaaacctaaagtacaacaggaaaaaaaaaaaaaaacgggagggtgaaaaacaaaaaccaaaaaattgaaaagaaaaacccggggcccaaaaagaagaaaacaaattaaatccgggggcaaacaaggggaaacggggggggacccggaaaattccgaacggaacaaaaaaagcgcccaaataaaccaaggggaa

SEQ ID NO: 431949 - DNA, 498 bp, Oryza sativa
tgtatacttgacgcaacagcccatcgtctgatccatccacgccgcctgcctccgcgggaaggaaagggagagagagggaggggaggcagccctgctcctctgcctgccgccgactgttcgtccgtcccggcggcatgggcgcgaacggcaacgacgtggtggcggcggcggcggcggaggagagcccgatgggggccgcgagggtcgtcgcggagggcggggcgacggtgttccgcggcgcggactactcgctgccccgcacgacggtggcgctcgcgctgcggctgggcggcatccacttcaacgtcttcctcgtcctcgcctcgctcttcctcttccccctccgcgtcgccgccatggttgtggcgttccagcttctcttcatgctcatacccctcaacgacaaggacaaattgtgccgcaagatcgccaggttcatatgcaggtacgcgatgggctacttcccgattagtctgcatgtggaggactacaagtgct

SEQ ID NO: 431950 - DNA, 469 bp, Oryza sativa
tttgttttttttattttttttgtttttttttttttttttttttttttttttttttttttttttttttttttttttttttttttttattttttttttttttttttatttttttatttttttttttgaaaaaaaaaaaaaaaacattttaaaaaaggggggggaaaaaaaaaaggggaaaaaaaacggaaaaaaactaaaaaaacacattaatttgggaaaaaaaaaaaaaaagggcccccttaaaaattttttaaaaggaaaaaaaccaaaaaggtaaaaaacccgggggggggtaaaaagggattttttcaaaggggaaaaaaaaaaagttggggaccaaattggggcaaaaacctaaatttcccaaaaggggggggaaaggcccaaaaaccccaaggggggcccaagaaaaaaaaacgaaaaaaaaatcccgggggggggggcccccttcctaaaggggggggacaaa

SEQ ID NO: 431951 - DNA, 464 bp, Oryza sativa
ttttgtttttttaattttttggggttttatttttttttttttttcttttttttattttttgacttcatttttttttactcttgctttttgtggcccccccccctttccacctggaggaccaaaaggggaatggataaaaggccaaggttaaaaacctagaaaaaaacaaacacttaaatgcccccttacaaaaaccccgggggccccaaacaaaaaaccaccatttttcaaccccaaaaattataaatggaaggggatgaaaaaaaacccaagaagcggcaccagaaaaaccccttaaatttttaaacactcccaaaaaaaaaaaaaaggggagcccttttgggggcaaaccaaagttaagttaaaagtcctttcctcgaggggggggattatataaaaaccggaaaacgccccggacggggtttggggaacccaccttggccgggacaaggtttattgggggg

SEQ ID NO: 431952 - DNA, 515 bp, Oryza sativa
ttttgttttttttttttttttttttttgtctttttttttgagcaccatgattataccccgtaaattatatacagaaacacgtatacacaaacacttgcaccctaacattgacggaaaaacactgttagcaaaacacatttttaaagctgcaaaattagaaccggcaaaatggtcccaagtgcttgaccttcaggccttggcactcaggctcaattttaacctctctttatggaccgggctttaaggaaagtgcattgttaaaacattaacgggaaacctttgaccacagaattttgaaaccaggaatgtcaaaccttgctggacttagcttggaacacgctatgttgaaaacgctattgttgaagcttttgggataccatttacgaggtaccacttaccatgcaagactgagcctggaaattcgcgacttgtgaacaaacagactggcaaaaactgacagggaaaaattgggaagggacatttggggggaaatgtaaaggggccaacgataatgg

SEQ ID NO: 431953 - DNA, 505 bp, Oryza sativa
ttttgtttttttatttttttgggttttaatttttttttttttttttttttttttttttttttttttttttttttttttttttttttttttggaaaaaaaataaaatttttgaaaaaagaaggaaaaaaaaacaacaaaaaggaaaaaaaaaaaaaaggaaaaaaaaaaaaaaagggaaaaaaaaacaaacaaaaaagaaaaaaaaggggaaaaaaaaacgggaaaattaaataaaaaaaaaccgggaaattggaattttaaaaaaaacagacaaacccgtttaaaaaaaaaggggggggggcaaacggcgatggaaaaaaaaaattcacgaatttgaaggaaaggagaaacccgaaaaaaaaaaaaaggggggccaaaaggggggggggaaaaaaaaaatggccgacgccgggaaaaaaaaaattttaatttggccccgggggggacccaaaagggtttaaaaggggaaacggattagctgggccccgaaaaagaacccgagcgg

SEQ ID NO: 431954 - DNA, 366 bp, Oryza sativa
ttggttgatgaggaaatgagggggtttcactcatccgccactattttattcagattattggcaacatgttcatataccaggcatcggttttggctgtccgacaatcgggttacaccgcataatccccaaaattttaattccctttggggaaacagaccccttacaacaccggcctactagggatcactgaaaaggattgggtgggtcccttaaggaaaagctgcttacaccctttattcatacaacaacttttgaggaatagcactactacttctgtgggcctctaaaagcatttttacccagtagaacgtgagcttctttttatatcgagcaaagaattagagcactgaattatgagcaccaacc

SEQ ID NO: 431955 - DNA, 326 bp, Oryza sativa
tttgttttttttttttttttggttttatttttttttttttttttttttttttttttttttattttattttttttgttatataattaaataattaatttagaaaaaataaaaaaaaagacaccagggtagaaaaaaaagacgaaaaaagaaacagaaaaaggaacacaaagaacgacgaaaacagaataaaaaaaaatggtccaagcaaagaaaaaaaaagacaaaaactgactgaaaaaacgaggaaaaggccccaaaataatggagttagggggcacttatacaagaaaaaagagggaacgaaaaggcaatggcaaagggaaacc

SEQ ID NO: 431956 - DNA, 473 bp, Oryza sativa
ttaagccacagcactggaggatgggatgctgctgctgccaacctgaatgaatcatctgatgtggatgcacataaggactcatggggcaaagcaaaagatacaacagctaatgctgaagaaaaaaataatgaaagtggaaactggaacaaagctggaccactagacaaagtttgtggcagtgattggggtagtccaaagttttccagtggtgatggtccatccagctggaacaagggagacaaaattggaggagattctcaaaacggcagctggagcagacctggtggaaactttgaaggtggtcgtgggtttgggcgaggacggtgcagaggcaggggccgagaatctggggatttcggtggcagaaatgaccaaggaagctggaagaactcagggactagtgacagttctggaaggccctctcggaggtctgatagtcaagttgagaaggaagtgggagattctggtggata

SEQ ID NO: 431957 - DNA, 344 bp, Oryza sativa
tgtggcgagactcgtgagagaggagaagatccagaaatcgcaagctgcacgctatagctaggtagctatctccggggaaagagagagtaggctgccatggagagcttcttcgtcttcttcacggcggcggcgttgccggtggtggtggcggcggcggtgatcgccgggctgtgcattacggcggcgtggctggcgaggccgcggcgcgtggcggaggtgttccggaggcaggggatcgacggcccgccgccgtcgtcgttcctggcggtgaacctcccggagatgaaggcgagggtggccgccgcggcgtcggcggcggcgccaacggcggactgggaggagac

SEQ ID NO: 431958 - DNA, 522 bp, Oryza sativa
gtcctgtgttctcgcagaatgttggttttgctcaggaggaggctgcatggaatgatgtaggtggtgctgcagagtgggtggatggtggaggtgatgggctgattggtttgtcgcttgggcggcagcgcagctttgctgatatccttcaggacaatattggccgcagaactcctgcttcagagcatccctctcgtgcagttagtcgcaattcttttcttgacaatcaggaactactaaattctgctgatagccagtactccatgcataatgatattctggaagcacaacgtgctgtcggaaatgtgcaacaatgtcagtggccttcccagtattaatgcatccgcatttcaaacttttgcatctgttctgggttcatctatttcaaggaatgccacaccagattctcattatgtccctagggtccctagccctggccttccacctgtcggtgttaggatcaattctaatgagaagatgctgaattgctcatcatcattcaacactgcatctttcaaagccgtt

SEQ ID NO: 431959 - DNA, 441 bp, Oryza sativa
gtgcattgaactttgcaggctatgagctcgccaagaaagcaatgatccaaactgagagtgactccacagactctgtacatgagaagagaaccacagtgggttccagaggatgacagatccaaattcacctggttactctatatggtgtaaagaaaggacaagccatgcaacagaaatgtttttgcccttgttgcaaagaattagaaccattttttggcattgccttcgtgatacatgtaccaaatgttaggtccttttatatccttcacatcctccccaacagagggaaatttgtcgaattcccattaccataggcctttattataccactgtatagtagatgacagaactacaggagtagacgtgctgccctttcttgcacagttcacttcatctgttgttatttctttagtaatccagagccttgatgacatgtttatt

SEQ ID NO: 431960 - DNA, 219 bp, Oryza sativa
tttgtcatattcataacctgccgattgagaacaggtcatctgttctcccaatgcctcccaacacaatatctgaagcctttgctaataccaccaggtggtggccttcctgggatccaaggaggcagttcaactgctcgcaaacttgtatggcaagcgcacagcttacagagcgaatacgttgtggcccttgttgcaaaaaagatgtaccaactccacaag

SEQ ID NO: 431961 - DNA, 58 bp, Oryza sativa
acccacgcgcccggtatatgaacgaaattcagcagaaaatcacggcgcgtgagcttgc

SEQ ID NO: 431962 - DNA, 549 bp, Oryza sativa
  unsure (1)..(549): unsure at all n locations
gtttaaaattaaggcggcttaaaggtgaactctctatcgttaatatcctctaggatggcagctaccgtttggtcgatttggtgggtattcgggggatggcctttaaaaattttctcatttcgcattagccaaatgtgtcaccaagtcgtaactagggctcccatacttcttcttgcttgtgccttgtttgaggaggagcagatgttcgaggtccattcttgtatgttatcctgcatagaatggccggggattccttttattttgaaactcggtttgtttcgattatttggttttgtttccagtttttcttgtcggtctcctggaaattgttctgctgctgccggtgcattgctgctgcggctgattgatgcttaattcttttgcgcattccaaaacaaaaaaaaaatctgctgcggctggagagaacaccacaatgggcttgtttcttgaaaaaaaaataaatttctttttattgtttggngctggtttctgctgccgctggagggagcacagttaattttgattcttaccatagcacgatttgtttga

SEQ ID NO: 431963 - DNA, 279 bp, Oryza sativa
ctcttggatgccgctcgccgacgccttcgttggtgccggcagcagcggggacggggacggcgcggcggcgggggcggggggttgcgccttcgtccctagcgtggagcttctggacattgtgcaacacccgatctcgggctacggggtgcttgtggcgcttatctttagccccgacgaccgttcgatggtctttctgtacagtcccgacggtacgctttaccggaatgtgtacgtctttgaccccgtgcagaggcgccaggagctcctttttgggccccc

SEQ ID NO: 431964 - DNA, 176 bp, Oryza sativa
ttcctcacctggcgcgccgaagcttctctcctctctctcaactccggcgagaggaggaggcggcggtggggcgttcgtcgggagagagaccagggccggggggctagggttcggccgttcagagaggcggcggctgaggaggaggaggaggaggaggagggggtgaggtctgattt

SEQ ID NO: 431965 - DNA, 441 bp, Oryza sativa
gtgtttttttttttttttttctttttttttctttttttttttttttttttttttttttttttgggggtcaaaaagaaattttgaccgcattactactggttggacaaatggacaagaagtcaataagctggtttcagatgaaacttggtttggttttaaccatttcaacagggcccatggaaacttaaagagaagtttaacaattgccttgagggatttctttggggccttgattttttagatcataaaataaaagggggccactgaagggtttaacttccggacactgggacccgaccaaagattctatcccctgggggccttggggtgacaccaacttctttcaggaaggggggaagaattacccatctccgagggaactttggccttcctttcttggcactcaacaaatttttttaacgggggggtttttcaagggcc

SEQ ID NO: 431966 - DNA, 538 bp, Oryza sativa
tttgtttaccgccaccgccaccgccaccgtccgtccacatccgtcggcgccgatggcctcctccgccctcgccgtctccgtcgtcaagccagccgcgtctcctcccgtcgccgtcgccgcggtaaccccgcagcgttgcctcctcccgcagtgccggggcgtgcgcgctgccccggtcgtccggctccgttcgggacgcgcccgcggcgtgtcggtggtgtgcgccgcccagggccaggagacctccttccaagttcctgacgtgactaagtcaacatggcagtcacttgtggtggagagtgaacttccggttcttgttgagttctgggcttcgtggtgcgggccatgcaaaatgatagaccctgtcaattggccaactcttaaaagaatatgaagggaagctgaacctgctaccaggctaacactggtgaaaaccccggcatagcaccccagcttgggatagaagcattcccacaatgatgattttaaagaacggggagatgaaagatgctgggattggagctgtgcccgagagcac

SEQ ID NO: 431967 - DNA, 426 bp, Oryza sativa
acttctaccaccgccgcagccatggcgaccgggtgctatcgcggcggcggtggcgccagggaccacgctgaccagcccgacgacttctacgagttcgagcccacgctgtacggcggtggctacgacctctttatgacctttggacgtccgttctccgcccttcgactagacctgctacccttgctccgctccctacacctactactacgcctcgcactactgcgtcgacgagccctacccgtacgcccaccactacatgtcgcaggcagactacggtttccgacctcagcacgagcagcagcagcagccgtcctacgccttctccggctaccgttcccttcacgagcagaagctatcctacggctcctttggctacggatctaagcccaagcccgactatggttttcgtcccaggctgaggaggag

SEQ ID NO: 431968 - DNA, 523 bp, Oryza sativa
ttttgctctcctctttctctcttctccagtcctctcttctccagcggcggagcaacgcgagcggtggggcgaggggcgccgccagcggtcgggggtggagggcggtgggtacgaaaggcggtgggggcggagggcggcgcgggctgcggggcgatgcgagccgccgtgcggaggagaggcgagcagcgcaagcggctggccgacggtgggagcggaggggcggcgcgagcagcggagcgacaggagcggctggatctggccggagcgcggtttgtcggcgacgacggcatggcgtgcagcgctgcgcatattctctaccttcgctcctccatgccttgatccggattggggcgggagaaccagatggatgcggcggttacgggatggcgttaggagagagaaactccaaatctgccgattctttcttcggaatagcgcatgcgttatttttggaggcttcgatggcgcatctactggagcctgattttctccttccatgtgctatatttgagatggaagattg

SEQ ID NO: 431969 - DNA, 530 bp, Oryza sativa
ttttctacgtggtgccgctcgacaaggccaccgggatgacgcgcccgctcgtcgagatcctccgggacctcaacaagcgcgtccccgacaagatcatcgaccccgacaccaacaccgtcccctggtcagtgctgctccccatccccccttcgatctcttctcctgcccgttccgctcttgcgctgcagaatgatccggctgatgttgcaataggatttaggcacagcgaagttatcgaattgatagggtgaatgaatgcgcgacatgaatcattttggggattttgctggagcaattatcgcaattcaggaatttgggagtaaaggtggtgccattttttcacgtatcgcattggatggaagatttagctttgctttcaatagctaatgaattttccaccggcgcgaacaattcgatcggttttgccttgtgttaattacaaaatgttctacctctaccatccaagggccaaacagggggcacgttttatcaactatcgatgagtatgggtccactggatattaggatga

SEQ ID NO: 431970 - DNA, 487 bp, Oryza sativa
ttggtctttggttcagacaacagttgttccttatggaacattagatgaggaccttgttccttcttatttttctaaagaaagtggcagatatatcgaggattgtaaattgagggttgttcttgttagtgcatcttatccttttggagagcagtcaattaatggtattccaaacactgtggtagctgttgaggttccttcattaaaggacacgttgaacattaagaatgaaattccagttgcagagaaagaggttcattctcctctggaagaagacctagttgttattcctgcacccccttaccctgttaaggaggctccaatttttagagaagtttctgtgcatattccccctgtcaaggagactttattcctgagagaagtttctgtactcgtatccccagttatgggagacttcaatcctgagagaagtttctacacccattaaaggaaatcacctgtttttttgacagaatctccacccccttca

SEQ ID NO: 431971 - DNA, 100 bp, Oryza sativa
tttcttgagtccctccaggacacccgcgcaaggcaatatagtggaagccgatagcctggacacgcatgctatgagagaggaggcagcgaagatggctgac

SEQ ID NO: 431972 - DNA, 96 bp, Oryza sativa
gaggccctccagcgcccccgcgcggagtaatagagcggcagccgataggtcgggcaagcatgctccgagagaggaggcggcgaagatggctgacga

SEQ ID NO: 431973 - DNA, 308 bp, Oryza sativa
ctttttgaggccctccagcgcccccgcgcggggcaatagaggggaagccgaaagctccggcacgcatcctacgagagaggaggtggcgaagatggctgacgagtctctggagaagggggagatgtacgggatccgattatgcaacgtagggtaccagagcactatgaccttcaagcggttacgccgaaagatgatactgggccagagccccctatgcctcggccaaagagggaacgaaggatgccagatactgttcacaggctcaatgctgtgcatattacaggccctgaggatgatgacacatgtgg

SEQ ID NO: 431974 - DNA, 102 bp, Oryza sativa
ctctttgaggccctccagcgcccccgcgcggaccaatagaggggaagcctataggtcgggcacgcatcctccgagagaggaggtagcgaagatggatgacga

SEQ ID NO: 431975 - DNA, 197 bp, Oryza sativa
atttttgggcgcatgcaccttgtttgccattagctctggacgtaacctagagcgcaagcagcagcagcagctagattggttggttgccaatgatcccgggcatctcccccatgagggacggcgccgcgcctctgcttcccgagacgagccccgagagccgccagcaacgtgatccggacagggggaagaggcggacg

SEQ ID NO: 431976 - DNA, 344 bp, Oryza sativa
cattccacttgctaggagacaatgctgcctggtcaagcactgggactcggtcagtgaaagaatacaacttgtcggacaggaggggctggtacactacagaggcgactacatagggtggcccttatatggaaccttggctatcaggtctatttatgatggacgggaattacaatagttgcttgaaatatagaatattaacgtgttcaattactaaggatgccatatactttgcattgatgagaggataatttaagcgattcacctttgcgttgatggtggacaacaatcaggatcctaatggagtggatggatactctactacatgatcgggaaactgaacaggt

SEQ ID NO: 431977 - DNA, 80 bp, Oryza sativa
tggtgctgccgcggcggtactggttggtcccacgcggccgcttgttgtcttcaacctgtgtaagtaagtttgggcggttt

SEQ ID NO: 431978 - DNA, 524 bp, Oryza sativa
ctatttttcagcaactgcaaatactattagttattatagttatgtcagttagtagtattagatacagggatcaattatcccttatttaattctccctaatgatccttttctgtgttttgtttactttctctctggatatatggtgtgccattcacaaagtgattgacttgctttatttcattgaggattctttccaaccttgtttaggctctggcttgtttgcccgttgattgagttggtccaagaatcaggatatatgatattcatgacttactggaaagctgttaagcaacagcactaacactggtactaagctaggcatgttcttttaccagatcagataattttcatctgtttactttctgttatgtgaaaatgatccgagatttattgctgtggagagcacacacgctggaaggaaaagatgagtatgggtgccatttttgggcttggagggtggtccttttctctgctgtacatttgttttctacaggatccctgctgacaatggtagtagcttcttg

SEQ ID NO: 431979 - DNA, 75 bp, Oryza sativa
attgcggggacgaacaaggcggttgtgttgatgaacggcaagaaggaggttacgggccacctgtttaacaaggtg

SEQ ID NO: 431980 - DNA, 125 bp, Oryza sativa
gcttgtattcaccgcggctaccggtctggggggagagctctttttatccttgctcgggcgctgcgcccacttattatgatgaaaaaaaccagcacctgcttggctcttgccatcacagggagcac

SEQ ID NO: 431981 - DNA, 256 bp, Oryza sativa
tgtgtacgccaagaagcgaagtaagcggggcagggctttttggacatcgagccggggccacacccaactaaggtggtgggaacgctctccatggacatggaggagctgctgagatggggcacgaacgcggacaagatgtggaagagtgatctccacaaggagacaaaaatgttgacgcagatcgtagagaacttcgtcaagagcacaggacgaaactctgggtctgaaacaaggggcggccaccaacaaggacaag

SEQ ID NO: 431982 - DNA, 292 bp, Oryza sativa
tttgttttcttcaagcttagtaagtgttgcagtgtttttttaacatcgagttgacgctgcacccaattattgtggtgggaacgctctccatgggcatggaggaagtgctcagatagtgctcgaacgtggtcaagatgttgatgattaatcatcagatggagaatagtatgttggtgcagttggtagagatcttcgtaacgagacaggtggcaactctgggtgtgatgcatggggccgcccacaactaggtctaggttggtgtcctcagaacgaacctcttcgtagggtatga

SEQ ID NO: 431983 - DNA, 243 bp, Oryza sativa
gtggtctcccacgagctaagtaggcggtgcaaggctttttgaacatagaattgaagccacacccacttaatgaggtggatacgctctccatggacctggaggacccgctgacatggcgcacggacctgtgcgagatgttgaatatgcagctctaaaaggtgaacccaatgtttatgcagatcgttgagaacttcgttaagagacaggaggatactctgggactgaaaaaaggggctgccccca

SEQ ID NO: 431984 - DNA, 457 bp, Oryza sativa
ttattccatcgcatcaaccaccaaatcgaaggcacgtaggtgagcaccaacagctacatcggccatggctcgcgcgctcgttctcgtcgtgatcctcctcgccgctatcgcagtggcaccgttcgcggaagcctcgacagtcaccggtggctccagggtattgttggcctccgacgcgcccgctgagagcccggctgggcctgcggcggccccaggcccagcggaagagtccagcagcgaatctgctccatctccgagcgccgctgatgcctgatcgagtaataatgaagtccaagtgaataattcttcatcccaagaacattgatcaagcatatatgtcctacccttccttcataaaggctaacagagcctcatttttatttttatttttcacatgaacggatacctaatgtattttgagacggttgcaaagtatacaggactgaataatatgccg

SEQ ID NO: 431985 - DNA, 312 bp, Oryza sativa
  unsure (1)..(312): unsure at all n locations
ggcaggtaccgtncaattatttcttcgacccaccacgcgtttgatttttgctccagccgcgaacgattgggggggggggtttttgggcgntttttctggaccttccattagtcgccgtctcgccgtccagaagcaggcggatggccggatcggcggcgagcgagtgctcgccgacccgattctcgtctccgcgcctcagggtctacctcacgcgagccttccacgccatgaacaacgaattgaacacggtcttctctgaatcctgttccccttggatactagcacgggatggacactgcgaccaccgaatta

SEQ ID NO: 431986 - DNA, 510 bp, Oryza sativa
gtcatttggggcaaaatgttttctgtagtcaatggtacggcacatcacaaatgagctaagcttgtaaatcgttatgtgatttccatgtctgctcaggttaaattaacctgcgctttgctaacagctctggtttgctatgcttgctgatagttatgatttgtagcatttggttttctttataatttatagcccagaatcactgaatttgctgaatttctttgttgcaggcatttgaacaattgatcaacttaattgaaaaggggtatggctaattagcatcctgttggttttcaagttatgtttaggaatgatatgaagatattgtttcttgttatatcttagctgacaaacactgtttgtatttcatagtgttgctgttgaacaactatatcagatagatgagactgacatcacaaaaaacagtgaggatacttgatgattgctagactgtttttccctggtactcatctgtttcactgcatgatttttttttcccttgttaggtttacg

SEQ ID NO: 431987 - DNA, 475 bp, Oryza sativa
ttaaaataaagaatgaggttaactcatacacctctgcgaaggcactgcagaaagtaaagcgtttgccagcctcagcactgaaaaaggataatgctcctgatgtggctatgaaggaaagttctgatggtgcattggaaactcaaagtacaaaaccatccagcgatggtcagcagataaacaaagaaccaccatctgtggttgaggacaacaagcaggaggatgttgaaccaatgttatctgaatgtaatcctgagccgcaaagtgaatcaaggttgactgctggagggtcagatgagacgcaggaagctatatcgccaaagagtctaaaagacgctgtcaagccaaaacacaaaataaagaaaaaacaacacagcatgagttaaatttcatgtaacttataggcctgtcagcagtgttagatagcgcaatgtttgtgggcatggttggcaaaatccgttgttctcttgatggtgta

SEQ ID NO: 431988 - DNA, 466 bp, Oryza sativa
  unsure (1)..(466): unsure at all n locations
tgtgttagttgaaggtgaggtgagctagagtgttcttccttggcttggcctccattgttacatccccctccactccatctcttgcttcccttaacccctcccccaaaaatcccccccccccttgccttaaccccaaccccaaatccatccttccaagcttcaaccttctctggagctttgctgttgatacctggacaaggattaatgggcgaccatctggcattgcttgtggatcggctgctgacggagtccactctgcacgcggcaatcaagaagcaggtggccgatctgcaggcggagacggtggcgatccactactgctgcgaccgcgacggctatggctgctcggcgaggaagatggtggagtgcatgatttgccaagaagaggattgngataccagcatggaggcaccctgtgcttgctgtggcagcctcaagtatgcgcaccggatatgcattcaacgtt

SEQ ID NO: 431989 - DNA, 436 bp, Oryza sativa
gttctgcagatgccttctctggaatcaacttaggtggtgatggtagttttggtggaaacccagctggaagctttggtgatgctggaggttccactggcggtggtgatttctccggtgccggtggtgacagctttggaagccgcaagaacgatgagctcatggatgacctcttcaaggatgacgagcctgacaactatgccaacaagcagggctaattaatctacgtccttcgagcctcagtttgcagtctcttagtgatgaaccggctcacctgaatggtcatcacctgctcaagcatcaaattccagaacaatacacaatgactgggttttctttttcttctgttctttttcatagatgtggtgtaataacgtaaacatcactcaaggtactacttctagttatgttatgttgagatgacaatggaggtgttttt

SEQ ID NO: 431990 - DNA, 530 bp, Oryza sativa
ttccgccgcgcgcgactcctcccttccccatcctgcgctcgcttcctccacatcgcgcgctccatgtgcgggcccgacgccgaccgctcgcttccttccccaatcgcgcgcgccaggtgcgggcccaccgccggcagctctcgcatcctcgcgccgcttctcctccaaccctctccctcccggcgcttctctccacaccccccctccggcgcttctcctcccccttcccctcccccctcccctggcgctgctccgtttgctaaatatcgatgataaatatttagctttctcctgattccattcctcctcttcatgctaaatatcgatgctttctcccgatgctctgcgagtatcaagtatgcaggctttcaatcccggcgcggcgctcaccacgatatcttatcattatccagtactcatgcggattatcagggctttcatcaatttcccgtccaattcatctggtggctcatatggattatccgggcattgatatgatctttcgattcagaaaacattggtcgatcttg

SEQ ID NO: 431991 - DNA, 502 bp, Oryza sativa
aaatttcctgatgcaccatctagggtatcttctcttacaaatggacaccaaagcagacagtccgaggggtctgctgtggaaggccaacatactaaaccattacggtctatcacgggcacagataatggctttggtaggacaatatcaaggaagtcacttgacatggcaatcaagcatatggacattcgacaaaacctgggtggtattcgtggtgcatctctattcccgcctagcattcgctctgccggtgcgaaggtccggtcagctcgaatgtctgatcccgctcatctcagtttaaatggcgattgtcattttactgacaatggcagcatcaatggacacttctctggagattcgaacggaactctttcaaacaacggtggcagctcaactggttctccagacagggaaagcattggaactaaggagacactgagtgaactagatctgtataccactgcacggtatgaggcattgttgttgagggaggacataacgaaca

SEQ ID NO: 431992 - DNA, 510 bp, Oryza sativa
ttgtctaatccctgtcagactctcccacgcgccgccgccgccgtcgccttggctcctccgcgcggtaggctgcaacctgcagctcgtcgacgccggttttgattccgatcgtctcaccctctactatactcgccgcaccagatccgcatcggcatcgttggctaggcatggagaatggggagggaggaattgtactcgtgcctgtcggtgcctcggggtggagtaggattaatcagagtcggggggtgctcctcgtatcgttgtcggctactcggccctctgactttagcagttgaaggtgctgacggcggcgaggaggtcgaaacctactcggcggacaatgctccacttcaccacgcccagagatgcgcatctctaccgtgagggaggagggcacgccagctgaggagacaggaacggcgaccgcaacggccatactggtggaagtggtagcgtacgaaggagccgtgcagcaccatattctcactgagccttgagatacacacacga

SEQ ID NO: 431993 - DNA, 578 bp, Oryza sativa
  unsure (1)..(578): unsure at all n locations
gacccacgcgtccgttctgatcatgtcgacagatctagtgggcttcagcagatgtcacggtatgaaatactgaatcatcttcagaggccacagagtttgcatatagaaactgtacctccattgaggctttcaccaccagcgatatatcatgaaaagatacagaagagaacaaccacgatgggagaatccagcaagcattcagttagaactgaaaaaccccagagaatatggcaaatgaaggaaccaagatcaaaaagatcagggaaccgagttctgccaaagtcaagcatgtggagttctcagaataatcaagtgcgatagtgtaaatataatatggtatgaatttgacaattcttaaaatgtgtggttgtgctgctcttcctttgtactcaattctcatcttggagatgcattaatgctgtttggagtagtgcaattcttctcccacggtacttatgttgaaagctgggagatgaataccagatctcaaggcaaaagcgggagcggagaagggcaactagatcaggtgaccctgagaagctttacttagacacanaaaactatgcgatagaaatttt

SEQ ID NO: 431994 - DNA, 584 bp, Oryza sativa
  unsure (1)..(584): unsure at all n locations
tctttaattccacctcgatcagaaactctgtacgtcggggtccttcctcctctgttgctgggctgagtgatggctcaaatagggttgcatctaccaagaagttccggaagaaccgatctctgttgaggactggtaggcgtgaattctcaccttctaacagtgggctagttcatggttttggtcaagaccatggatctaatcccaatcatacaaacaagaggttcagggttagtaacaaggaaacctccaagaagcttaagcacactcaagaagatactgcagataatgacttctcttatgaaagtgatgtaccagcattaggacaaggngatgatcaatacgatgcggctcaacaagcaggaatttcacagatgtattatgaaggtgaagagcctgaaactgaaatgcaatgtgcatcaccctccagaagtgatcctgtagactgcagcaatgatatgagcagcgattctttgagtcccggaaataatgagacggcagatgatgttttgggtggaggctatagtgtagcaattggtgatccatgctctaatgagaaatctgcatatcatgcttatttccccacg

SEQ ID NO: 431995 - DNA, 516 bp, Oryza sativa
tcgttgttatttcatctatttcctatttaagttatttgtaaataatattcgttttcaaacactcgtttattaaatttttatcccggtttttcattaatcttgtgttgtttttatagtttttatttttatgacgaatttagttgttgataaattgtatacatgaactcatattttgatttttctaatttcgaaattttttatttattattctaattttaattaatctcgtattttgtactatgattgactattcttttcatattatactttttttatttttaaatttcagttatttctaaattggattcaagctttaactctgatttttatttacataatttcagaatttaattttaatttttagtctaaattttaattattctttagttgtgttctatatggagtcatattttaatattacttatttatcattcagaattgattaatttccggatttaatggattatttattttgaattttattaatacttatttaaatattccaactgttgattt

SEQ ID NO: 431996 - DNA, 542 bp, Oryza sativa
ttttcatcggatctaccgactgcacagtaatcaagctgagaaactaccctgatgattgggatgaaaaaaaagaaaggtgattatttgctcacactcgcagaagtaaaccacggagttcttaaagataagttgaagagtagggatgattttcattggccgtttgtgaagctgcctaagctggagcagaacttaccaccaatgttacagcaaattcttagtggggagagacagatgaaaagaaagttcgacgtgacattcttttgtgattatatcaacctcttgagaaactcctacaagaaattcaatgaattaccagaaaatgttaaggctttatgcataaaccaggatggcttcattaaactgatagatggggtggtctcctgagttttggaccaagatctacgagaaaattgggtggccagattataatatctggaagtggccttgtaaaaaatagctttagtgctttgcatttgaccagaacactgctcgatctcaatgatggcgatgcccgtgcccgcgctgacatctcaagacatatg

SEQ ID NO: 431997 - DNA, 291 bp, Oryza sativa
gttcactaccgctatgtctgtgtcatggccagcggtccccatggaggctgccgcgaaggtcgtcccaaagggacgcacaaccttgcgcacgtttgcatggagcgcaaagccagagccttcatgtacccagcagtacgtaacgactcttgagctgtacctgatgccgctctactctatgacatcgtactacctgatcaaaaagtttcgaagggactacggattgatacacgagttgggcatgttcaactgcctggtcactgataaccaagagacacgttagtctggaggtga

SEQ ID NO: 431998 - DNA, 404 bp, Oryza sativa
ttcctcttctcacatgcgctcgcgcctccctgctctcggctgccacagcaagaagacgacggtgacggcggacaaggcggcaacggcggacaaggcagcgacggcgacggcgaaagcgacgcgcacgaggtgcgcgcggggtggattagtccgtgggatgggcacgtccgggcctccccttgccctccagcgtcacgctgccaacctcctctccgactccaacttgtcccctgacctcctctacctcaccatcgccactccagctcgctccaccctccctcccccctcccattctgcctcccctgccgcaccgcgatgggaggcctagatctgggcggaggggagacgaccggcgggtggcggcgttcgtccacctctctcccctctccaccggcgagatcgat

SEQ ID NO: 431999 - DNA, 479 bp, Oryza sativa
tcgccggccggccggcggacgcgatccgctccgttgtcatcgctcgcgatacacgcagcgactaggcccagcaggtctgcacggcggtctcctccggctgctcctttcattccaggcacgccgggcacccccggttcgttcatcgcatctcaaagaaggtagggaagcatcgcatctcgccgggtattgccagttcgccgccatgccccaaccgaagtgcccaacggagcggaagaaggctgaccacctccaattgattccttgcggggccccggccgggtcttgcggggggtcttgctggataacaatgtgcaccaagattgatacatacaagaagaggcagaggggacaacagcaaatggactttgaattgaagacataccacaggaagaggcagaggcgaagggggcaccagcaaactgtagagttacccgatgagattgtgagggaaagcttgatctggctccctgtaaaatccc

SEQ ID NO: 432000 - DNA, 318 bp, Oryza sativa
ttgtttaaagagatggggtgtgtggatgaggactaattacaagcaggaacctacgctatggcgcaggaggaactgtgaaccgaatagcatggggcatgcaggtattgactctgagggcagaaaaaggttcggacattattccacaaaactctgaggcatactggaatagatggctgacgcagagatgcacaaggcaggatttggagggagttttgccggggacacgctcgtcaagagggtgtacaagtactggaagaaggccgtgccgtggtagtatcctcacgtggcgccggttccggaggcggtaaaggcgataga

SEQ ID NO: 432001 - DNA, 521 bp, Oryza sativa
gtggaatctcctcccgtcccatctcctctccaccggcgatgcagcagatgaggtccgccgccgccgccccctgctccctcgccgccatgctcctccgccgcttcgcctacacctcctactcctcctcctgtgggcccatccgccgtcacgccgccgttgccctctcctccaccaccaccaccaccaccaggttcgccgcctggtcccctcctcctccttcgggcggcgccaggagcagggggttcgctgcctgggcgtcggcgcccgggccggcggggtccacggattcccccgccatgcaggcgctggagaccaagatcaaggagcagctggaggcggacacggtcaccgtcgtcgacacatctggcgacggccgccatgtctgcatagatgtagtttccaaggtattcgaagggaagtctgccgtaaatcggcagagaatggtttacaaggctatatgggaggagctccaaagcaccgtgcatgctgtggaccaaatgacgaccaagacgccttctgag

SEQ ID NO: 432002 - DNA, 557 bp, Oryza sativa
  unsure (1)..(557): unsure at all n locations
tcgtttttctagatttctattctgtacttatttgggatgatttttttgttacttggaccaactagactctagagcgctgtgtgtgtcttttgatcaatgctgaacagtgcttataaaataagtgttgtaaacacagtgctgctttgatcatgtatttgagcctaacaatctctagatgcaccatgcaaaagtagttttttgttttgcccttatagctgttagacataagaatttccttactgttcgactaaaaagttctctttctacttcgataaaagaaaaacttgatgtgaccaggcaaacatgtcatcagtgcttcatataatagttgattctatgaatttttttttagtttcaggtataaaaacgacttggacttctatttcatggagtcatggttaggaataaggaatattctatgaatattccttattcccaaatttgaggactctagcatggacatcctaggagttcctacactggtgggtcgttctcaagaattcttcaagccgagntgtctctttctcttttttttcatctgactttatctcacatga

SEQ ID NO: 432003 - DNA, 348 bp, Oryza sativa
ttgttacggtgagggccatattgagacacacaaggcgtattttgagatactctgtgttgataggaaagatgtaaagcccaacataccaacattatcttcaggcaaaaaagcagaatcatttgatggccaggtcatccactccatggattactccaatatcggcaccaagacttataaggaaatgatcaaaggcaagcgtgtaacgatcgatggctatctcaaatgagtggtatacattgctgcacaatgtgcagaagtaaatggtactgagattccatgtacgatggtggtccgaacaaagcattggatcataccaaactattttgcatggggcgttcacattttaaa

SEQ ID NO: 432004 - DNA, 461 bp, Oryza sativa
gttgttatcatctgaagaatccaaacgtgttgaggatggagctgatctgtcatgtggtgatgataaattcttgatccctgatggcaatgctgcatgttttgtggatggagaatcatcagagggagctgtaagcattgagctggagatgccgttggccatccaggacagtgacgcgtctgacgatcatatcgcagatgccatttcgcctcctgaatgtgtgtacaaagctggtgaacagttacttgtggatgacatgtgtgatgatggatcaggaaatgagtgtgcaggttcagagaagaagagcactcagattgtgatggcctccgagaagcgtgaaaaatctgggcatggaactaaatcgaagagtttgtataatgtttcagtaaaaccgaaggtgaaagagacatcgactgcaacgcgaagcaatgcgtcaagccagaaaattgtaagaacattggatc

SEQ ID NO: 432005 - DNA, 326 bp, Oryza sativa
  unsure (1)..(326): unsure at all n locations
tttgttttttttattaacggggggaacattccttgtttattaactccatgcccatacacacaagggtccaaacacggatcccattaattaaacgcccatccaaacgactatgtataaaccctaaaacctaacaacctccgatacgcgagcatttctaagacgctcactagctacctatctttaacacttatcccacatccaaacttaacgggtccacacctggaggcctttcacctaatcaagtgatgatacttattggaaccatttttccttggaggtcccctcgctccttttgccntggccccccctttttacaagaaaaagca

SEQ ID NO: 432006 - DNA, 345 bp, Oryza sativa
tttgtttttttttttttttggggtttaacaggcaggaaactaatcactgtaactcagctgaaactctaaaccagaagtatctttgcatgtccagacataggagtgagtgattacaggcccagctgttctgaaaccaatagaactactgaagagcaaatcgaacacactgagcaaaaactggggcagcagttgagcatattgatatgggaggtctaagaatgaaacaaatgaagaagtaggttgtgcttacattacgcttaacacgacgatgggttcgacaaaaactaggataggggccccccccttcttctctggagtccttaaacaaatatgatcctcttgctg

SEQ ID NO: 432007 - DNA, 399 bp, Oryza sativa
cgacggcatgcgcacgcgcacaagcgcggggccccctgagcgggcgcccccttttttttggtggttttcaagacagcagggttctgcatcttttttctactgccgcattcattagtttgggagagggtgctgatacttgcttacaggctctgaccaacaaatacgggtaaatctacgacaacactccatctgcagatagaatcatgcaggcaaggggtaaaaaaccatcatgaagacaagttcgagcgataccgattacaggaaacatggatatctttcttattaacaatagtatcgcaagggagctttaaagagccttagatatatatatcaggaccgatccactccatacccggggccttctgtttgccggggggaggggctaccggattgcgcctg

SEQ ID NO: 432008 - DNA, 324 bp, Oryza sativa
tttgttttgtggcggttggaagtaggcaataaaacatggtacacacatacatgtagaagcatggcacacccttagcagcatgcccaccaacaaaatgtttatgatcaacaggaatagcaaactacaccaaatacatttccaaaaatagataatactaattcccaattccaattcaatcacacatttattgggtcacaaataatctcaatggtaagcccaaaggttctttggcgggccccttttcgctaaccccctccttggcgcgggctgttacttttcctgccgccaaataccgggcgccttctgtttgccggggggagggct

SEQ ID NO: 432009 - DNA, 338 bp, Oryza sativa
  unsure (1)..(338): unsure at all n locations
tgtggtttttttttttttggtttttttttttttttttttttttttttttttatttttaataaaaataaattaaaaaaaaaaaaaaaaaaaaaaaataaaaaaaattaaaaaaaaaaaaaaaaaaaaaaccttaaatgaaactattaacaaaaattaacaaaaaagaaaaaaaaaaaaaaaaaaaaaaacccaaaatacccccaacaaagtacaccgcaaacacaacaaaatcagacaaaaactggaaaaaaaattggagaaccttacaaaacctactaaaaaggttaaaattcattacaaacctgnttttttttttcccgcatgacataataaaaagg

SEQ ID NO: 432010 - DNA, 402 bp, Oryza sativa
ttctcatgttgctaccactgggacaagctccgggcctggctctggtctaagcatcctgatgtgatactccaagaaggccagcacaccgtcatctccattgcgtctccgagcaagacaacatctgatcacaagaacgagaaagcagagaaagagtgtggtttgcccgttattatgcctggggacaggatccccaaattcttcgccaggccgtgcccgcatgagaagtgtttgcctgcagcataggaggaggaagctgaggtgcaagtcaaatgttctgttccacaatctagttagtagctgtaaatgaagccatacagagtgggtgtatataagcttttattagaacctctaaaaaaaattccatttcctctatggtcctatgaaaatattcaatttcttcaa

SEQ ID NO: 432011 - DNA, 373 bp, Oryza sativa
  unsure (1)..(373): unsure at all n locations
tgttttttttttttttttttgttttttttttttttttttttttttttttttttttttttttttttttttttttttttttttttttttttttttttttttttttttttttttttttttttttttttttttttttttttttttttttttttttagaaaaaaaaaccccctttttaaaaaaaaaaccccaaaaaaaaggtttcaaaaagggggaaaaaaaagggggtttaaaaaaaaaacccaaaggtttttaaaaaaaaaaacccggggggggcaaatacaaatactaggatagggtagagctagagagccaccttggtccttttccaacgcgagccacttagggcttaaaccacgtcagnngagaagggtgtaa

SEQ ID NO: 432012 - DNA, 333 bp, Oryza sativa
tgttttttttttttttttttgttttttttttttttttttttttttttttttttttttttttttttttttttttttttttttttttttttttttttttttttttttttttttttttttgggggaaaaaaaaaaatattttttttggaggaaaaatcccaaaaaaaaaaaaaccccccccccaaaaaaaaaaaaaaaggaaaaaaagggggccccttaaaaaaaaaaaaaccccccaatcccccaatttttgggaaaaaaataaaaaaagggggaaaaaaaaagatttttaaaagtggatcacgccaacctcctaaaataccaaaattcttaaaa

SEQ ID NO: 432013 - DNA, 345 bp, Oryza sativa
caggacaaaatggatcgataacataataattatgcagcattcattgataaaagcagcatcacagaaccatgacccaaaacttgacaggaaatagaaacatccagacgcagcacaatccaaggatgacaaccggttcttaactattgtaaaacaaagtgcatcagacaagtccgagctagcaaagactctttttactccgccatcctaagcctctacgttcgcgactgatatatatatatatatcaccagatggccattgaacttcttttcttgcccacataccgggcgccttctgtttgccggggggaggggctaccggatttggcctggccccccttcgctcgg

SEQ ID NO: 432014 - DNA, 147 bp, Oryza sativa
accttgtgattccgaatcaacagcctcctaacccaggggagggggtaatttaaaggtagcgtggcggcaagcaccacggttacggccgccactcaaggcgccacggtgcacgaacatcaccaaacgctacagccactagtgtctgaa

SEQ ID NO: 432015 - DNA, 276 bp, Oryza sativa
ttggtttgtggcggttggaagtaggccataaaacatggtacacacattcttgttttttcttgggggacccgaatttgggggaatttctacaaaaatttagcttattttgaccaattgacaaaatcttggcaaaatttaacgacatttaagaaccttgccctttgggccttaacatccaaaccacctgtaggtgtgcgcctggccaacgcccaaatcctcttggccggggcccgttggcgcctagcccccttcttggcggcggctgtaacttttcct

SEQ ID NO: 432016 - DNA, 226 bp, Oryza sativa
ggcggttgcgagcgggtcatcggccaggcgcagcgccgtagcccctcccaccggcgagtaggaggctgcccgataggcggcgacggggatagttctaggctatggggagagggctcggcggatcatgagatggcgccgtagcaccgcccggcaaccttgtgggggtgacttgccgccgacgaccgtccagtgccctgcccgcccatcggccgtcgcgccgtgccgc

SEQ ID NO: 432017 - DNA, 398 bp, Oryza sativa
gaaggtttttatcatggcggaagacgatgaggcaagggtggaatgatgggtggatttgttttggggttttgaggtagtagcaaaattacccacaaaaaaattaggtgaaaaaaaaaaagaggagtagaaatggaggtgattcagagtctcctgtgtgcatagggtgtgtggaggtgaaggaagcacggaaggaagaagatcatggcggaagaagatggccggatttcggccgacgtctcggtggcggcccctgccctatttcagtgattgctgggggttcatcctctgttcaatagtaggtggatcatcgactagctgatgaagatcatcgatcgatttaaatcaagtccccccttcttgtggatttcctatttttgatgatgtaaccttttgctctg

SEQ ID NO: 432018 - DNA, 330 bp, Oryza sativa
gccgccgaggtgggggcttttaaggaggagacgccggcggcgccggccgaggctgtggccgaggaggcggcgcccgccgaggccgaggtggcggagaccaaggaggcggagccagctgcggccgagccggcggcggaggaggtgaaggaggccgagcccgagccggccgagccggaggccgagcctgccaaggaggaggtggcgccagagcccgccgccgccgccgaggcggaggccaaggaggccgagccggcggcgcatgtggccgaggaggtgaaggaggaggaggcagttgctggtcatcattttctgccagttaaggtggaggag

SEQ ID NO: 432019 - DNA, 354 bp, Oryza sativa
tttggggttgtttaattatttcttttttttctccattttttttttttttttcctttaatttctaattttcaactttgggggtcctcttaagccttttttttttttccccccaaaacaagggggaacaaaaaaaaaaaaagccccctaaaaagcccccccaacccccggaaaaaaaaacaactgcgggggggtttgccaccccgccccgtttttttccaagcccaaaataaaaaaagaagaaaaaaaaagggagaggaaatacggatgtcccacagggggctgggctcttgagatccgatcatcaggtccggaacttggagtccctttaagtgcagccgaacctgagagcccccc

SEQ ID NO: 432020 - DNA, 308 bp, Oryza sativa
tttgggtttttttttttttttttttttttttttttttttacagaaataaataattatgtgcatgtcacggcattcatcaaacgcaaccaacggagtgaattacagtttacaaatgcaaggctacaagcacattccacgatcgttcacacaaactcaaagtagtaccggcggggatcatcagctggatcatcattttagcaggtccacaagatcattggggtcgtgctctgctattttctgcaatttactgaagacgatcatgcgacgctgtcttgacttgagataaaaactcctggaatgtacgtacg

SEQ ID NO: 432021 - DNA, 344 bp, Oryza sativa
tttgtttttttttttttttttgagcgaatgtagctgaaccattctagtagctggttaacaagccaagcatgtcattggatacaaaaaaatgttggcaactgtatagaaatttacaagactctgaaatctgaatctagaaaagcatcaactcatttgggcatacaaaaagtgcagttcagaaaatgtgcaggactcccatgctaccatgatcactccgaacttccttccttgaacaccttgacccaattctcagcactgtcaattatttcaccagtcttgaccaggtaccgaaccttcgttccataggtgaaagtaccgcccgagccgccggtttcacaatccct

SEQ ID NO: 432022 - DNA, 51 bp, Oryza sativa
tgttcgtcatccactccctccctcccagatccgacgggatgatgggagaaa

SEQ ID NO: 432023 - DNA, 311 bp, Oryza sativa
ggctggaaatggatatattccccaagcgtgacaacaacttttgagtgccagtgtgtgtgtgtgttcccctcccctccctgcttaattacatcatctctaacgtaaatgattcgtgatcttcaacgggaggaaaatgacgctctcttcgacctccagagcggttttcctcccgagacaaaaagcacaaatccaaagctccccaaaaggctgtacaaaatggcaaaaagaaggaccctctcacttggaggaagtcccttccctaaggagctggctttcgcaggtgatcaatgaaacttgacgatctcttcctt

SEQ ID NO: 432024 - DNA, 355 bp, Oryza sativa
tgggtttttttttttttttgtgttttccccttttttcccctatttcttttatgggggcaaaaaaccctgcatttttgaacccaggaaaccttgtttaatttgatttgaacactgttttttttctactagttaaactccttttttgcaaaaaccccaagcctttcttacacttgacagttacataaccaactcctaacaatgatcccaattatatttcggtgggatctaagagaagctgagatagagattccgacaggatgaatttgcgctctcaaaagtcggtgtccctccggatcggacatcattgttgcatgtattaagggccccccaatttcccttggccccccctcgctcg

SEQ ID NO: 432025 - DNA, 182 bp, Oryza sativa
tgctgtcacaaggagaccgaaccccacgcagggggggggttgaattgaaaagcccgggtccaagccacacaaggcgcctgggaaccgtgagactgacagcgttcttggggagaccgcccgggcacaaaaccctgcagaacagtccagagataaggcaccctgcggtgggtatcgaggaggcc

SEQ ID NO: 432026 - DNA, 346 bp, Oryza sativa
  unsure (1)..(346): unsure at all n locations
aggacaatccacacccagtaatccatattaataccacaatataagagtttgggagagggtgtttcatacgttttacaggctctgagacctcatacgggtaaatctccgacaacactccatctgcagctagaatcatgcaggcaaggctaaacgatgatgatgatgatgatggtggggatacgttttacaggaaacatggatatctttcttattaacaatagtatcgcaagggtgaatcataagagccttatatatatatttctggacccgtccactgagcatcnggggnctttttgtttgccggggggaggggctacggtatttggcctggccccccctcgctcgg

SEQ ID NO: 432027 - DNA, 196 bp, Oryza sativa
tttggggttttttatattttgcctgtttttttttttttttttttttttttttgggggggaagagagcaaaaaaaagaggggggcaaagggacggaccaaaaagccaaacattgtaagggtgcaaagccgctcgcaacagagagaaaactacagggccaagacaaccaagagcccagccaaaaggtcaaaagggcaa

SEQ ID NO: 432028 - DNA, 373 bp, Oryza sativa
tttgtgttttttttttttttttttttttttttttttttttttttttttttttttttttttttttttttttttttttttttttttttttttttttttttttttttttttttttttttttattaaaaattttaaaaattagtgaaatattaaaaaaaaaaaaaaaaggcccaaaaaattttaaaaaaaatacaggcattttaaatttgaaaaaaaaacaacacaatatgttctttgtgtgaaaaaaagtatataacagaaaaatgttgcaaaaagccgggacataaggtaaaagaaatgggctattatcaaaacaaaacacgtaggtgattgcagcaatgcccacgtcggcttccgagtagagcaatagatagcc

SEQ ID NO: 432029 - DNA, 355 bp, Oryza sativa
  unsure (1)..(355): unsure at all n locations
ggaccagagtcaccgctattcattcattcattcattgcctcttggttggatacattgaagcccacatgttacatactgccagctgcccccacacaaacagttaccaaattcatctataatatgtccatacaattgaccgattgattatgaaaacatgcttctcagtaaccgagcaaaaaaactctggcattgccattgtgcttcacctcaaacacttatatattttcaggtgaccaaaaattatataacactaccatgtagtagaaagctggagcaggagggacaaagattacagcaactcggcacacggcgacggcagtggcngccnaaaaacattctttttgcccatctgcag

SEQ ID NO: 432030 - DNA, 304 bp, Oryza sativa
tttgtgttttttttttttttggttttttttttttttttttttttttttttttttgttttttttttttccccaagaacaacctttttttttcaaagaaaagggccctttctcaacctttaaaattttttttttttgaaacctccaagcttccaattttttttgaaggacggggttaattttttcccaccatttggatcaaaccccttcttgccaaaccggccggtcagccggtcgcgtggaaaaaagaaaaaattcttcactggctgaacatattagttggccaatgggcccaaccgtgtattat

SEQ ID NO: 432031 - DNA, 353 bp, Oryza sativa
  unsure (1)..(353): unsure at all n locations
ttgggggtttttttttttttttggttttctcttatttttttgtgtttttttttttggagtggattcttgttcaaattctacttttgagactgctcacaaaatttcatttcagttcaaggctagtcctgtgggggcaaaaaggggggggatcccccattgaatggcccccccgccaacacggggggccagatgctggataccggagaaaaaggaggccccccccacgaagggaatttcaggcttgatgatcaattctnnnggacccaacactctagttggggggaggcgacggcgtattggtgatcataacgcaaggaatttgtcgcccgggaggacgctggatccatggactt

SEQ ID NO: 432032 - DNA, 324 bp, Oryza sativa
ttggtgttttttttttttttttggtttgtccaccaaactgttgttttttttaaaggttgggcctcggggtcacctttgtttgggtgggtcagcctcccccagaattgatatgtgggttcaaggggttcctttcctcgagtaaccatggggttcacccaagaaacgttgctaaaggctgcaaggtgtcagccgctgctatgggacacctgtaccatatgtggccccaatccgccctgttaggaacttggggtacaaaaaaaaatcaaaatgatcgttcacattggaatccgaccgtgcagtggagccttataaactttggcgccc

SEQ ID NO: 432033 - DNA, 216 bp, Oryza sativa
gaaaataaagagaggccacgaagagagctcagctgcggcctggatctaactaaatgacaccggaggaggaggaggaggacaaccctgaaacacttgtccccaacgtaccaacaaaatcccacattagctgctgcatgcgaaagagaattctcgccagctcttgatggcaactgccgaaccccaaccgcggccaatgctcctcctgacaaggatggg

SEQ ID NO: 432034 - DNA, 440 bp, Oryza sativa
  unsure (1)..(440): unsure at all n locations
gaggatgcacgtttacgtattttaggacctcctcgagccgccccccttttttttggggtttttttagtttttggcgaccaaacattcaaaccatgcattgctattgtaattacacatgcatacattaagaattcctagatgccaagtggcatgaagctgtaaaaaaaaatctagagactactgtttatgcacagcagacataaatgaaccgagtcttttggcatgttaacactggagcaactacgttttagtcagcatcaagaagatgattccaagggtaagtggcagtgtgacacacgatagacacccgagtatatngttccattagccttcttgataggaaccaactttgagggacccccccctttcaaaaatttagggaaagaaaattgcagtcaagttaaacggcgtggatggtcacattttggatgcccacacca

SEQ ID NO: 432035 - DNA, 309 bp, Oryza sativa
ggaagccagcgggacggaaacattatggcaaacaatccaaggaaagcagtccaaagaaaaaaataaagaaaaggggccccaatgctgtgtggccattccggggcttggatttagaagctttgctgtaaccagcttgcagaatcccacttgtacaactccagcattcacagttggacagcacatgctcgcaagccgttccacacaggccaatccacagtggggattcccagggcctggatctaaggtcaacgaaatggggcaattcggttcaagtacacgtaggtgacgccgcccaggcggacatttcct

SEQ ID NO: 432036 - DNA, 426 bp, Oryza sativa
gtcagggggcagactatatcatcacctgagatgggggggtctattaacaaatcaggggaggggagatcaatggataaggaaatactgagcgataacatacatcagcaggggggacaggctacttttcaagagctgaagagacctatgggtttgggagcagtagggaattcaacatccgggggacagagagatttctttggaggggtttcaaataagtctgagaagatggagaaggctaaatcctatccagccttttactacccccagcttccacaatatagccctgaagttggggacgggtttcaatcaataaaccgaactatggcgggaacagcacagtctcctactggcgataaggagagggagctccagaaccctagaagacgtcaatctttcccaccttcccgggacataaggggtacacac

SEQ ID NO: 432037 - DNA, 336 bp, Oryza sativa
  unsure (1)..(336): unsure at all n locations
gcaacagtaattagaatagcttccttcactgttcttcgaaaaaaaaaagaaaaagaaaaaaaggagtcgaggacgagaagagagcacaccatcagttttattttattaagatagcagcgagagatgcatcaagcatcaatcatgaaaggtagagtagctacgatcaggtgtttgtaggaaatactctcaattggctagccacagaacatagccctgcggcatgtagtggcagatggcgtcgccacggcttgccttgaggagctcgaagtacgcactgtcccaggtggtggtgttgacgtgaagaccnncattgtccaaccctacttcntttcaaag

SEQ ID NO: 432038 - DNA, 355 bp, Oryza sativa
  unsure (1)..(355): unsure at all n locations
tgtgttttttttttttttttttttttgctagttatatcatatatattagatgaagtttagtctcccttgtatcacatcttacagtttcccaatcccaatacattgcagcttacgcctgtacgcgtgtatccaactatccatattgtaccaaaccagcgttgataacaaaactgaaaccgtctccgcttgctcctgcccaccggccatggcggcccggcccgaacaaattgattttcagtcttgatgatcannntnaatccactcaccactctttttggggtgaggcgacggcatcttggtgatcataacccacagcttttgtcgccnccggaggaccttacgatccataagtctt

SEQ ID NO: 432039 - DNA, 335 bp, Oryza sativa
  unsure (1)..(335): unsure at all n locations
aagatcaaacaaaaggtgaatatcataaatgtttggttccgtgatcaatatcttcgcttgctacagctacacaaattttcatttatgttctatgtttgttctttttctttattttgattgtggatctgccattgaatgtctcgattgtctcctcgctgtcaccagatcttggatctcgtattctcatctgtcgcaactgtatgattgattttcagtcttgatgannnnnntnaatccactcaacactctattttgtgggtgggcgacggcatcttggtgtatnttnnnnnaccaccttttgtcgctcccggaggggtttggaatccatggacttg

SEQ ID NO: 432040 - DNA, 210 bp, Oryza sativa
ttcggtctcaccaccggcgactgggacgcgaagaccggggttgcatctcaccgcggcgtcggactggatcacccccgtccctgcctcgtacaactcccagctggtcacgctcacgcaggagtccggcgggaagaccatgctcctctccaccgtgaacgacacctccctggcgatgctggagcggcccgagggcgccggcggtactgactc

SEQ ID NO: 432041 - DNA, 359 bp, Oryza sativa
tttgtggttttttttttttttttttttttttttttttttttttttttttttttttttttttttttaaaaaacggaaccacccccccattccggaagggctgctcaaacctgggcctggaagcccaaccccaagcctcgggggaaaaaaaggttttggttacccaaaggccccgggggcccagggggtttgttggcccccggggtttggaaaccaaagggggggggcccaatttttttccaaccccatttcccagggggtttggttttagccccccccctaaattttggggccggcccccctccgcaattgcaggacgaaagagtacaactactgtacaacttggcacgtttgcgttgga

SEQ ID NO: 432042 - DNA, 372 bp, Oryza sativa
tttttgtttttttttttttttttttttttttttttttttttttttttttttttttttttaaaacacaataggcttaaaccctttttactaattttgccttagcacaaggttaattggtccagagagacggtcaatgcccccataagggagaccggtttggatttcggggcattgcgaaggggaccaaaacgggggggtcaacccacacgggaagataacattgatattggatttgccaaagttcacacttgccggcgggggtttttcctttgtaggagaacaaaacaggggatgccccattttttgggccaggcaatgacctgcagcgacgtgctcaatgaggggtggttgtgggacagggttcttcctcat

SEQ ID NO: 432043 - DNA, 345 bp, Oryza sativa
tttggggtttttttttttttgggttttttttttttttttttttttttttttttttttttcattttaaaccaacccccccccttgggaatgcatttcatttttccaacccaaaaaaataccggcccgaaattttaccaaaggaagacttcccccattctttttattcaacaaaaaaaaaaccagctttgaaccttttaatacacttaatactcccaaggtggggtatccccccctggtgatgctctccaaaccttttggtcccatttttgcagggaaccccttgtacagggccgggtttgatgccctggggctcccaacaaaatgggacctaggcctatctgatgc

SEQ ID NO: 432044 - DNA, 389 bp, Oryza sativa
acccgcatctttgttctactcctccttgcctctcctcccccagggggaacttcttgaaaagctcccggggctgaccccaccaccgccgaggcagactacccgacggctgcggatactctggcgaagttccgcctctacgagacgcgcgcgaggtcctaccctctccgcaccgccccgagagaagcgccggtctccaggtgctcaagaacgaccgctcccagcgctccgagctcaaccacaacgaggaccccgtctggtacttcccagcaggaggtcaagaacctcctccagcgcatctccgagggcaaccgctccactggcggccctacctctcccaccaaggcctctggcatcgccggttccacaagccctcggagccataaatatct

SEQ ID NO: 432045 - DNA, 343 bp, Oryza sativa
tttgtgtttttttttttttttttttttttttttttttttttttttttttttttttttttttttttgttttttttttttttttttaaacgggggtccccacactttactaggggccctggggcaggggggccgggggacgggggccgcgcccgcaaggggggggggcaaggcccaggagggtggggggccccagacatcggggagaggatggaaacacagaggggggaactacggccagctcaccacaacaaaagcagcaggaattccttgtgaaactctcgagaaagaaaaacacgacgagctaaaacacaaaaggttccaagaagccagggcccccaccgcg

SEQ ID NO: 432046 - DNA, 517 bp, Oryza sativa
gtacttgcgatcatatggcattgactaatatttgatggggtgggtttatgtaggtcttacaacaaagatatgatctggtggtctactgaaggaaccattattcagtgttgcctacaaactgtaagtttgggtgtgatcaatactgaggattcctttgacaagggtttccaaaaagaatttcttcaatggaactccttgatttgatggacactatgtttcttctgttcttgtgtcctttgatcttctttgtagtttcattacttgctcttcttggtgggttgttatattatgtgataataaaaaaagaagaattagtaatagttataaattgatcaggaaactggtcttgtgtcctttgatcttctctgtagtttcattacttgctcttcttggttggttggtatattatgtgataataaaaaaaataaattagtaataggtataaattgatcaggaaactgggcagcattaggaaaggaatcaaacatgaggaggcgggtctattttttgacataat

SEQ ID NO: 432047 - DNA, 363 bp, Oryza sativa
  unsure (1)..(363): unsure at all n locations
tttttgtttttcttttgggagccgggcacaccacaaactgttcacggaactgcagctggttcaccaggaataactgtaacaccaagaagaataacagggtccaacagtgtgaagttcttacatatatatcctcagggcttcaatttgcacctcttggtaacacataatttaactttccaggaagaattttctagcagaatgtgggaaatttctatacataagctacctatgctcaagggtggctcancnggcataatccgaacccaccctttttttaacgagctcagcatattattctnnnatatgcaagctataccctagctccggagaaaatctacagccctctgcttttacaggttgccg

SEQ ID NO: 432048 - DNA, 188 bp, Oryza sativa
atcgctgtggttcgccacccacctcgccgccgctgctgctggacttgactcagatccgcgccgccgccccccgcgaatcccctctcctccccgaaccctagccccgctctcgggggttccccctcctcctccgccgcccgccgcgtgcgccacttccatcggaggtgatcgatcgagcgggggtgggg

SEQ ID NO: 432049 - DNA, 343 bp, Oryza sativa
gatggggaaaaggtgatcattatgctcataaacaaaatttaacgaagaattacacacaatgcaggaagaacaaattaatcatgagcagatttcattttggaactatttcatacacaaaaatacagttctaagttatcaaagccacttccataatttcataaccttcctccttatttttacttgtcaatgcagacttaggttgatggcatgcctacaccctttaaaaacaaaaattagaaatttccgctgtccggaacaatcaaaagtttttgtgtggatttctaaggaaagcgtctgaccgataagcttatcagattttttttgggccttgcagaatctacct

SEQ ID NO: 432050 - DNA, 367 bp, Oryza sativa
tttgttttttttttttttttttttttttttttttatctgaacaaaacaccttaagtacatagtcatattgtacaaattacaaaaggcgatctgctctcgataactttacgagattgattgattcgttcattcacaaggcaattaacaccttaaattttacaacaacaacatcatgagcaatagctgaaactttgaaagcagaactccagtctgtctgtataaccagcagcagcaggcagcaaagcaaactgttcgatcacattttgacagggaaccttttgtacaggtccgggttgtcgagcctgggcttggcgatgacctggaaaaacacacctattgatgctctttgtgggacacattttttttt

SEQ ID NO: 432051 - DNA, 362 bp, Oryza sativa
  unsure (1)..(362): unsure at all n locations
tggggatttcctttgggttgcggggcaccccaagtagggttattttgctgcaagtttttttccctctgaatcacagcaaaggacatttgcagttgacacaccgaaccatatgcacctagatcatcaccagattggaatgaatcccaacatacacaggtgaggctaaaaatccatgacatagataggacaccaaattaacaggaacttaagtataggcatgcctacacccatgccatagcccaaaccacaaaaaacttgggcccaaaaaggacggaaaaaatctgcagatatntaattttcattgcaaaaaacangctagctcaccaagaaaatactacggtgttcagatgtacagcagttgg

SEQ ID NO: 432052 - DNA, 135 bp, Oryza sativa
actcccggcccgacccacgccacccaaaagtgatttcactccacaggcagccaccaacgccggggggggggtgtattaaaaccagggggacctaaccccccaggaagaggggcagcaccggaggacatgggggag

SEQ ID NO: 432053 - DNA, 266 bp, Oryza sativa
attaaaatataaattaaaaaaaaaaaaaaccaaaaaaaaaaaaaaaaaaaaaaaataaaaaaacaaaaaaaaaaaaaaaaaaaaaaacaaaaaaaaaaaaaaaactaaaaaaaaaaaaagaaaaaaacaaacacaagtgggaaaaaaagcccaaaagaacaaaacaattttataccacaaaactttgcgcagcaagcaatccgcaaaaatggctgacacatcattggcgccaatggtggatccccaatatgagcgtctaacgtaaa

SEQ ID NO: 432054 - DNA, 386 bp, Oryza sativa
ttttgtgttttttaaaaaaaaatcatactacttcgcacccaatggcttaacaatggagtttaagatgcatttcctccgttttcaaacaattcaaagagttctctcggattacacttggtgagttggaatcataccaaaatggttgggtataggcttgcatgtgacatgccactatgaaacttcacttttgtcagctacctcttccatatgtgacttcattttcttacaacagaaaaggcgggaataagaaaaaaaaaatcagtcatctgggaagccaaaaaacttgttaatcagcgatacaactggtttggcatcccctggcacataagggttgggttgtctgtgaagacgcacatgccaccatgtgggatgggcgcctcctcgat

SEQ ID NO: 432055 - DNA, 325 bp, Oryza sativa
cttctttcgtttcctcctcgtgagctcgcccctgcgcggccggggccgatttaaatcccgcgagcgtgcaccagcgcccggcgctggcgccgtcgctcgtcctgttgcttccccccgcatcctggcgagcctccatccgctaccctacgcgcaccctcttcctcatctctctctggtctcttcccacgcacttcttctcgaatttgcgaagaaccctatggattctgttctagaaagctgccttaatctgactaactagtcacagtttgtttgttcccccaagtagtttggggcttcaattgaacccccctgtcagacccacgct

SEQ ID NO: 432056 - DNA, 364 bp, Oryza sativa
gtaccagacgctcaaatgcattcaattgatataggggcgaccccataatgttgcacaagcaagtgagatgagcaaaaccaggaaatttgtggcccctcccaacgacaataacgccttcctcctggtgtccaccctaacagctcaccatgacactccacatttttgcatccggcattttagtagaaggtgacggtggcaatggcagccgcgacaccggcaacggcagcgcaccttttgagagcaccggcaccggagaaatcggggtcagccgcattggcagggtcatgggccttcagcctgctgcactgccgtttctgccttgatcttgctcttggaaaaaacaagccgcaatgcaaactttttt

SEQ ID NO: 432057 - DNA, 366 bp, Oryza sativa
gtcgaatgcttgtgtgaattttgaaacaattaaatgtacacagttctggttaaggttcgtacaggattcaactaagcatcacactaaacaaacaatgatgaaacaactatacaaaaaaagagtagacgagaatccgtgtccataattaagaacccagggcctcaaggaagcgtcctccaaacaggagctgctaagcccatttttcagatccttaaaacagcagcagcagcaacaccaatggagctttgttagaccagcagttaggatgtttgctagtcctcgagctcaacaagctgagctcttctttcggcaggttttttttgaaccaatccatctttttgggccccaaaatcataggaggccccc

SEQ ID NO: 432058 - DNA, 316 bp, Oryza sativa
tttgggttttttccagattttccgctttttttggtcttttgtgccttctcccgttaatataaagtggggtttgcagcagtgaaacaaatttaccggcaaaaaaatattggccggatcatatggaaagcctcgagatggtacaggtagaacacaccaaaccactagtaggttggatgtgcgaataattgttcctcaatatgtggctgggttggccctagttgaaatcaggcttctcagggtaagtgcagccagaacgctggatgataatagggctcgcatacacatcggagggcctaattgccccttttttttttga

SEQ ID NO: 432059 - DNA, 232 bp, Oryza sativa
ggggggcatttcagcattcaattcgatgaggttctttttcacatatttttttcaacattttccaggaatgtgttatatcccagagggcccttaatccaatccaactttttgtagagaccctgaagcccttctgcttacaaagatgtgttttgttccctggcccccgggggtactcaatagacgcggtggagaataccaggatcgtgtcagtagtaggatatcccatccaccc

SEQ ID NO: 432060 - DNA, 283 bp, Oryza sativa
cggattcgttttgacaaaaaggggcgccccacgaaagggcgggggttgatataaaagggggggcgaaaactcacacaaggatgacgaggaaacacaagaaatgtggcagaagaagcgggagcaccaagaaaaagagggaagagaccagagaccaaccaggctctagctggagggatcctatgacgacaggaaacaaggcgaggaaaggggagaccaaacccccaaagctgaagacccgggagccgaacaaaacatatactcaaagggcgatgaagcctgccga

SEQ ID NO: 432061 - DNA, 290 bp, Oryza sativa
gctggtataaaacgcaccaacattactcggtttaagtagagtatttatcagcagaaacaatcttagacaaagagaagaaaatgatgaaaatcaactattagcagcacacagcatactgcatgagttttcaatctcaatacaccatcacgactgaatagactttatgagttaggcaaatgcttcatgctttacagccaacttattaatttttcccacgggtccagcaacaattaggccagggttgttaaaaaggctggctttttaagaaacctcacaagtcaatttgcaaa

SEQ ID NO: 432062 - DNA, 164 bp, Oryza sativa
cccacccgcactgttttttgtacatatggagaacacacggtctcgggggggtttataataaaaaagggcgccaattacaccacaattgttccaaattctgcctagaaggtcaatagctatgagcaagcatcaagtgaaaatatatggctttatcgggaacaaac

SEQ ID NO: 432063 - DNA, 353 bp, Oryza sativa
agactggttaaaaaatgttcagttttcacttttcagcgcatcactagttgagtagttgatccttgtaaacagtttatattcacatcaacaactatatcagagagggtcgatttgtgtgacctatccatgctatttcatcgagaatgaagtttgtctaatcagggtgtgctaaactgctaatatacttgacagaaatgcagacacccccccaaaaaagagaagaacagataactaatactggtatgtatggtcactatacatgtgtgctgtcatgttaagggcttgaagcatagcctctcctcgcttgtttaccgcacggtggccaacggcagtagcttgcttccacccgacga

SEQ ID NO: 432064 - DNA, 508 bp, Oryza sativa
ggaagttcaagagatgggctccgcttcgctggcgacggggtcttctttcagaggcgtgcctgccgtccctgcccgccggcggccgtctccgcctccgcctggctccaccaccccgcgctccgccgcgcctctgcaagcgcgccgggatctcattaccccttccagtttccctcttttttttcgtgtttggtctttgatttttttaaaaaaaattattgtttcaaatttgaagttgcttgcaattcgggcacttgttaccctcatatgcgtacgataagttgttgtagtgcaatttttttttcgttttctttccatatgggagcaaccttggaagtgaaatcatggttgataagggctttgaatttacatgggacaacattttgtatcatgacttcatgttcatgatcatctccttgaaatctctgaatggcagcagagcattcctaggaatttctcatcagcagtagtggttgtgacatggactataggcatttttaatttatttata

SEQ ID NO: 432065 - DNA, 386 bp, Oryza sativa
cagtgcagaaatttttctgaaacaaaatgagtacatcatcctcctctatcatctccctccttaattaaatcatcacagaataatcatatatttactccgtgatgcagtagtatagtgtgtgacgaaaagtcagagcagtaaataaataaatccaaaaggcgaatttacgaagcaagcaagcattagtggttattaatctccttcaattaaggcctcctcctccttaatcaacggcgagggtggtagtgctgcggcttggcggcggcgccgtcgccggcgggcttggcgtccatgacggtctcgaaggcgccgacgagcgccttcaccctgttgcaatggcatagctgcctttcagcgctcttggaagcacaagcgcaaggtttgcc

SEQ ID NO: 432066 - DNA, 370 bp, Oryza sativa
  unsure (1)..(370): unsure at all n locations
gaccaaaacaacacaccgattggcaattgtgccttataccgagaataaagtaaggtttgcagcagtgaaacaaatatcacggcaaaaaaatattggccggatcatatggaaagcctcgagatggtacaggtagaacacaccaaaccactagtaggttggatgtgcgaataattgttcctcaatatgtggctgggttggccctagttgaaatcaggcttctcagggtaagtttacagactgcctcatagagaaaagggtccaacatgggctggtggattaatatttgaacaaacaactgattttnntggagcagaaagaagattccctcaagaagtccagcacaatttgcacccatctatggcatctttac

SEQ ID NO: 432067 - DNA, 359 bp, Oryza sativa
  unsure (1)..(359): unsure at all n locations
tttttttttacaatctcattaacccgtgcatattgcactgagcataatatggtcttgatcaaggaacaatgtgaccaaggtacaaatcacattccaaagggcgtgaacaatgtaatgagcaacaatacatgcaacatgttagctctatttatgaaatggagccctttcaacagtgaaatttacatcatgataatttatacggggactagtgatataatcatagacgcggtgaacaattaggatctggaaacagaaaaacaggggccttgttntttccttaactcaccttcgggggaacngagagccgaggcttttttatgtcgtctttttgcagacttgcnnttttttcagcttcgtgg

SEQ ID NO: 432068 - DNA, 308 bp, Oryza sativa
  unsure (1)..(308): unsure at all n locations
tttgttttttttttttttttttttttttttttttttttttttttttttttttttttttttttttttttttttttttttttttccaaaatcgaaaaaaccaaaaaaaaagccctttttggaaggatttcccccccccaggggggtcaacccaacaaaggaaaggcccaaattgggggggatttgggggttcacccaagggaaaaacgaaagccccaaagcccaagggccaaggttttaaaatccaaggggtgttnaatatccctctgtgaaaaaaagaaactnnacgtcactagaaaaaaaaacttctt

SEQ ID NO: 432069 - DNA, 537 bp, Oryza sativa
tcttatctctcccccatggctctcgcgtgcgcggcggggcttctactcgccggcgccggaactccggcgagatccttccactcccagccctaccaagccaaggtcggcgtggtggagttcctcaacggggtcgggaagggggtggaaactcacgccgcgaaggtggaggaggcggtgggaggcgacctccagaggctcctcgagacccgcacgctgcggctcaagaagctcggcatcccctgcaagcataggaagacaatcttgagttgtgctcacaagtatcgtcttggtctttggaagccccaagcagaagcgaagaaagcgcattgaagttgagctgtcttgaagtgggtcactatgaaaactatcagctgtcattatacttaactgggaaaatgcaatgaagttattttctgattactcctgaagtgctctacttgcaaaatgatctgctatcgctggacttaagaacttgtgagacattgagcagatgcagtgcattttctatgcaacaatctgaactatgcccatgctttc

SEQ ID NO: 432070 - DNA, 407 bp, Oryza sativa
  unsure (1)..(407): unsure at all n locations
acaaaagactcaactaagactgggtattcattttctttacagactaacaccactaagtgaaaacagttaagttaatctagctaatgagacctagacaatgttagcatagaggtagttccgatataagccatgctatccaaaagagtaagtgaaatacacctgagaccaagaggaaaaaaaaaggaataaagatggcataaagatgtatatataaagagtacaagagacaggcaatatttaatttatgtctggaacaattatatattcttgcacatatcattcatagccaacccacgagattctagctaaaacctttgtaccacaggtgaataaatttgacgcaagncattaatgttcggggggatggnntttttagccacccgggcagtgcagctcgacattccccc

SEQ ID NO: 432071 - DNA, 292 bp, Oryza sativa
atagctaaccttcgcatggctgggcttggatgtatgctttaagaagtataacatgactgccatgtaaaacgcctgatgcactatgatcatatttcttgatgagttgggtcctgaagaaacatttttttcagttaaaatagccctccatgaaactttttttttgtttaagaaaataaactatggctgacaagatttccatgggcttaattgctttcagtggggagtgctttctgagctctaagactagtgttctcttaggctaggtggctacaggagggtaacatgctgtccg

SEQ ID NO: 432072 - DNA, 305 bp, Oryza sativa
tttttggttttttttttttttttgttttttttttttttttttttttttttttttttttttttttttttttttttttttgggaaaaccaaaattttattgggggggggttcaaaaatgctctggggattaatttacaaggggcccgggggttaggcggggattttggttttacgggccctggtttaccggccccgaaaaaaaaaccggtgggggggggggaccccttgcaacaaccggggggcggggcgaaagaactgttggatgacttcctcggcattacggcgtcccccctcggtggaaacccc

SEQ ID NO: 432073 - DNA, 368 bp, Oryza sativa
  unsure (1)..(368): unsure at all n locations
tttttgtttaaatcaaactgttgtttatcatagtaaatcttcccggagaatcagatgctcagaattcatagtgttcttcagcatcttacaacttacaagatggcgcagatatacaagcgcaactatcttaaagtaagctgtaggaggaaatggaaccatttctaacaacgggaaaaatataggttatagaaggaaaccatttgaacaaattaatagggaaataaattaggaggatcgtttccgtccgatccaccccccaagggaagggccaaatggggtacntttaaaaaacatattnncctcaatgtgtgtggatcngctatgcaaggttctnnnntaatgaccatgcagggncctatgttcccccc

SEQ ID NO: 432074 - DNA, 313 bp, Oryza sativa
  unsure (1)..(313): unsure at all n locations
tttgggtttttttttttttccctcttttccccttttctttttttttttttcctttcttttttttttttttcggagggggggaaccccggcaaacccccaatgaccccctggaaaaaaaccccccccccaattgccaaaaaccaaaggaaacgcattacttaccaaacccccccgcccgcaaaaccccaaaccttcggaaaaaagcaaaataaaaaacggggggccaatccaaaccaatttttacataaaagtaaccgcacaaaaaaatgtatgcaaaaanttttcccagccttcacgaagtggcagttgggag

SEQ ID NO: 432075 - DNA, 485 bp, Oryza sativa
  unsure (1)..(485): unsure at all n locations
ctttctccttcccctgctttgcggcgcgccagccaatgaccggattcccctcccagtcccagcgatggatcagcgcaagggcagcggcagcgacgccaacggcggcctggcggaggcgacggcgtctaggctgaggttcgaggaccccgacgagggcatggaggagaaccccgccgccgccgccgccaccgtcagggcggaggaggaagggggagaggngantanncaattcanataagatctttttgccatgctctctattttctatttaactactggagtataacgtctattttcccctgggccaaatacagatgatttgttctgcagagtgtaaaattgggcacacacacgctgagtaattgcaccatatatcaataaatcactaccgacttatacagattggagctgtgtattttccttccactcagcttcttgctgttggtgcaaatggacttgcaataaatcaaatgccctgtcatgag

SEQ ID NO: 432076 - DNA, 415 bp, Oryza sativa
catactgcagcaactaataaacgatggatcgtggcaagctctccttggacatgggggggcgactggcagtggcggcggtgactctgccggcgccgtcatggcagatcttcgacctatttctgcccggcgggcccagtcaccggtcctactgcggaggggctggcaagtgggtgctgatgaaccacaaggagtacgtcgagaagaagtcgctgtacgccatgaaggccgtctgcgacatccgcgggaagaccatcaacacgagcctctatgatgtagatgaggcccaggtgacctaggatggtgagcataacgcactagtccctggagaaaccatcatcaccaattggccaaatgtagttagggcatgctatgccaacaccatgaatgcaaacttattcctgagcgatctcaaccg

SEQ ID NO: 432077 - DNA, 394 bp, Oryza sativa
  unsure (1)..(394): unsure at all n locations
agtatgccaaccgcaaattttcatcttcgaatacattggtccgtaaaatccaaggacaaagtgtacaatcaaccagtagaaaccagaaagatcaagaaattgtgttcttgatctctaaagcctattatgcaaagggggcagaaattaacttaagacaggcaacaacagaaaaagatctcagcagatgctagcataagcttttcactcctgatccagctcgaatggaacttcttcttcttggacgtctacctcctcttcaatctcaacttccttggtgtcgtactcttcctcatcgtcactggccttcccgtctttgagcttcatcatgttctggatcgttttttacatcaatggaancgccaccagcgttgctgggcgtgttaactcctcggta

SEQ ID NO: 432078 - DNA, 469 bp, Oryza sativa
tttgaaggaaactttagtaacactaattcaaccgtggggggatgtactaacaaaggcaggggcattacccgttcttgcaagttctctccagattgcaatgagcaggaggcttggtattgaagaacctcagttaatgaagataattagaacaacacttcacacgcacagcgaatgggttaagcttcagatgtgcaaggaccgttttgagcactttttgaagattgattctctaaaagaggttgatccatctgcggggagtcacaatatgtccaagggtcttacagatgaatgtgctaatggatcttctcaaatcacaacatgctctagtggcaaggtgctagatgaaggtagtagccctcaggagtcatcagaagttacctgtgatgaaaacgccatactcaaggtcatggaatttcttgctttgccaaaggctgacgcgatcccactgcttatgcaatatgggggggat

SEQ ID NO: 432079 - DNA, 238 bp, Oryza sativa
  unsure (1)..(238): unsure at all n locations
gggaaaaaaatgccccaaaacatataaaaaaataaccggggagacaacccccccccctaggcaaatgggcaaagctagcatgtttttatcccttcgcaaggtccatgccaacaagaggaaattttctcagcccttccaagggtttgggccaaggaccagcccaatagctttaccaaaaaccccccctaaaaggaagnnntnnaaacttctattaaaatntnacagagtacggttagct

SEQ ID NO: 432080 - DNA, 290 bp, Oryza sativa
  unsure (1)..(290): unsure at all n locations
gaatgaaatgcacaaatgttctgttcactaagatgaatttaccgaacttactcccctgtatggacatgaatgtacaatcagagtatgcagacggtatgtctgataagttgtggcatgcatgtaggatcaactttatctacatgcttgccatatttacagttttaagtccaaatgggaaaccaagctgatatgttgtaaatgaaagaagtaggaccattccagcgctagctagagtatagaaactgcacanatnancatttgcggcatagcaacggaatggctctatgctg

SEQ ID NO: 432081 - DNA, 161 bp, Oryza sativa
agcagtttagtttctgcctccttctctgatcattcttggggacggatcaatttaagaaccaggtcggggggcaaggaggtggacgtgtccactctcgaggccggtggcgcccgggactacatcgacccgccgccggcgccgctgggcgacttacccccact

SEQ ID NO: 432082 - DNA, 403 bp, Oryza sativa
tttggtttttttttttttttttttttttttttttttttttttttttttttttttttttttttttttttttttttaacaggaaaaaccgggggttggttggaaaaatttaggaggaaggaaaaccttttttaaaaaaaaacaaaattactccatttttggggggaaaaactaaaaaggaaggttggaatggaaaaaaaaatccattccaaaaacttattttttatagaaaaaagccggggggagggggggccacaaattcctaggttgaaatggggggaacaaccccccccttgaggataccgggggggcccccttttttggtgggaaaaattggagccttttttttgggggacggggggaagaaaaatgggagggcccctacccgaaaaagggtgaagggggg

SEQ ID NO: 432083 - DNA, 385 bp, Oryza sativa
  unsure (1)..(385): unsure at all n locations
tttgggtttttttttttttttgttttttttttttttttttttttttttttttttttttttttttttttttttttttttttttttttttttttttttttttttttttttttttttttttaaaaaaaaagggggggttttttttttttgggtcaaggggggggggaaaaaaccgggggggggggggcaattttcctcacccggggggggggggcccccccctttttgaagggggggagggggggcccgagacaaaaatttgggggtcgggagaaaccgggggggggggacccttggggggctagggggcccccccccccggggggccggtgggcccccccgcatgngataaacccccaataaataaatttccacagaaaagtatagg

SEQ ID NO: 432084 - DNA, 461 bp, Oryza sativa
atggatactctgtaccagcggtggagctggctggaggggtggggtgggtattaaacgccgttcgagaaggacatccccgtcgcgcaccaatctccaagcagggacgccgccggcgccgccatgaacgacgacgaacgcccgccgccgtcggcggtgctccggtccaggtccagggccgacaggctcgcctgcgtcggcgacgacgacgacgacgccgacaggcagctcgggtactcggcgaggcggtcattcacccgcgccgggaggcgcacgccggcgagggacgactacggcggcggcgcggcggcgttcccggggtacatggcgtcgacggcgtcggccaaggccaagttccggtccatgagcacgcccaaggagcgctccggcgccggcgcgggggacgcctactcggagcagtgcttcccgttcgccgaccgccttctggtcgcgatcccctccat

SEQ ID NO: 432085 - DNA, 55 bp, Oryza sativa
ccggacctcaattaccgacccaccccacccgcccttttattttgcccaaccacac

SEQ ID NO: 432086 - DNA, 293 bp, Oryza sativa
tttttgtttttttttttttttttttttttttttttttttttttttttttttttttaacacggggagacgaacagtacatttactttttaccaaaaagccaactacgatgttttagttctgggggacacaatttaataccaagaaatccatacaatacccctaatcctaaaatttggaaggttaaatggaccctaaataccccctgttaatttttatccaggagcactcctttttcaaagggggggattcaaacaaatgcattaggggaacaacatttctgatactcgctgatc

SEQ ID NO: 432087 - DNA, 466 bp, Oryza sativa
gtacattaagtcgatttcagtgagaggaggaaaaggcgggaatgtttaatgaacattgcagatgatgccagcattccaatgtggacaccagaaaaagtaagggctggggtttcttcatatagcaaggatgagaatgaagacgatgccgaagatgaatccaccacaagtgttttgcaggggggcagttttacatggaagacccttagaaggaaaaggtcaagccacttctccaattcctcagattcaaaagggcgctcggcattctaatcttgggattcaggaatgttgttgccctgatgcatttgtttgaatcctctcctttgagaaaggagtgctcctggatagaaattaacagggggtatttagggtacatttaagcttacaaattttaggattagtggtattgtatggatttcttggtattaaattgtgtccatcagaactaaaacatcgaagttgggcttct

SEQ ID NO: 432088 - DNA, 369 bp, Oryza sativa
tgtggttttttttttttttgtttttttttttttttttttttttttttttttttttttttttttttttttttttttttttttttttttgggaaaaaaaaaaaaaaaccggggctccttggttaaaaaaaaaaaaaaaaaagttttttcccttttccgggggggacaacaaagttttttttcccaggggacccaataaaacaacaaaaattttttcttggaaaaaaaagacacaaggttgggttttaaaaagggccccaaggggggggggaggggccctttggacaccccccccgggcctgggataaccccaaatttttacttaaaaaaaacccgggggtttttcccggggaaccgggggaagaaatttgg

SEQ ID NO: 432089 - DNA, 414 bp, Oryza sativa
ttgttttttggttttttttttttttttttttttttttttttttttttttttttttttttttttttttaaaagaaggggcccccaaattcattgggggtatagcaggggcaatttataccccccacagcaggggaaaagaaccgaagagggaagacggtttcagtcgtcaacattggaaattcgttttgaatcacatgggggacatactaaaactggggccttccaaacctttattttggaacaacgttcattttgccaggctttgcctagggatgttggagatcccatttaactctgacatactggaatggggtgaacatgtttcttcagaaaacaaaggctaccgagacacttggtggttcaaaaggggggggggaaggaaacggtaattctttttttccaaaaagggaaata

SEQ ID NO: 432090 - DNA, 318 bp, Oryza sativa
gaaatttcccccctctcgccctcgccttctccggggtgggagcatatgcaccccggattttccttcagatttgcctagtttttctccctcgctcttgactcgcgatctcccgatctggttcgaaagatcgcacccttttctctctgttttttttaatctatctctcccccgagcgggcctcactcagatcacccaggaggagggcggttgcggcggtggtgtcgtttgcggattggattctttgtctgatctcgcctggagaggatcttgcctgaggatccacgactttctttggatcggaaagggggaatgctggca

SEQ ID NO: 432091 - DNA, 406 bp, Oryza sativa
ggtgtttttttaaatttttggggttttctttttttttttttttttccttttccttctttttttctttcacacaaaaccacccccaaatttaacggggttataacaccttcaacataaccaccccacagcagggttaaacaccccaaaagagaaaacggcttcaaactacaacatttaaaatttccactgaaccaccccggaaacctactaaaacctgaaccttccaaaccctcattttgcaccaacggtcattttcccagcttttccccaaggaatttttaaaccccaccccactgttacatactggacagcttccccacaatgttcctcacacctaaaaatctttccagaaaatacaccttctcagatatcaacagaaaagtcctggatctttgcatgaatccga

SEQ ID NO: 432092 - DNA, 517 bp, Oryza sativa
tattctaggccttcatctactgccactatcggggaaggggcaccttgaaatcctggacccgccagatcctcctgccaccgccatgtatctatgacagagcatacttgggcaggtacctggagatcagttcctatgctttgcttggggacgggtcgaacatctgcatctctgtaaaaggggtcggcacctattgtatggacatgcggagcttcacatggagccacctcggcaaatggatgctacccttcaccggcaaggttgagtatgtacctgagctcaagctctgggttggcatttctgccgacacccaagacttggctgctgctgatctctcatcgatgaattcccagccacagctactagctacttgtaaggagtttgaccagccagaggaatggaagcgatgcaaggattctcaacttgtcaaccttggctcgggcaagttctgcattgcaaggttctttcacaataagactccccaaggggacttccatgaattaattgggaagaacatact

SEQ ID NO: 432093 - DNA, 363 bp, Oryza sativa
  unsure (1)..(363): unsure at all n locations
tttgtttttttttttttttttttttagatacaacagcagaaaaggatatacctttgcttccccggttaccatatggaaagatttttacgttacagacatacaagttacagcacaagcagttttcatatgcttgaacatctaatgtcagcggtagcacattaaccaaaagtaaagtaaaaatcacatcttgggagcaagccccgtatcatgcttgggaacatcagctaatatcagtcttaaatcacatctcaggaaactgaccggcaaggcatcactgtgctgttgtaccttgaataaaaaaagaatcgcgcctcttttggcgnnnttatagattnngaagcccttctgcctcaaacagaatgg

SEQ ID NO: 432094 - DNA, 278 bp, Oryza sativa
aaatatttatggtattttaaagttttgggtgttaaaccttttttttttttttttttttttttttttttcttttttttttttttattatttttttttttttttggaggaaaaaaccaaaaaacaaacaaccaagaaaaaaggggggcaaaaaaaaaaaaatcggggggggtttaaataaaaaaaaacccccatggaagggggcaaaaaaccccaaaccaatttttttaaataaaaggggaaaaaaaaaaagggggacccctccttttttaaaacccccc

SEQ ID NO: 432095 - DNA, 340 bp, Oryza sativa
tttgtttttttaaattttttgggttttaatttttttttttttttttttttttttttttttttttttttttttttttttttttttaaaaaaaaagggtgtaaaccaatttcaaaaaaatttttcggttttaaaaaaaaaaaccccaaaaaaaaaaaaaatatttcctttaaaaaaaaaaaaaaaattttttcctttgggaaaaacttttaaaaaaaaaaaaaaaaccttaccagggggggcccaaaaaaaaaaaatttctgtttggggcggaaaaaaaaaaccacccccccccaaaaaaaatttttcccggaaaaaaaaaaaaaaaaccccccccccctct

SEQ ID NO: 432096 - DNA, 180 bp, Oryza sativa
ccgaaccccaatttccacctacacccaccgcggccattcactacacccccctggacaagacgaaacggggagggctcctttttaaattatgctggcgttcgcgagctagacttccacagtccgctccacacgcattgcccgatcgcccgcccgcccggccgagagcccgagcggctagag

SEQ ID NO: 432097 - DNA, 316 bp, Oryza sativa
ccgaattccggtcacccacctccggaacttctattcgttcttatagagcaggtacaaagacggtgggttgttctttgaaatagagatcggcaactccgccgtcgaaaatggctgaattctcttggctcacggcgctcggctccatgttcctcacgacgctcctcaccgtcatgttcagctataaagaccccgaactcatgccgcttggcatcaagatcgtcgtgtgggcgatggcaacggccacgacatgcggcggcttctatgccttcttcatccacgaagagaagcagccgcagtacatggccgtgccggcctc

SEQ ID NO: 432098 - DNA, 352 bp, Oryza sativa
  unsure (1)..(352): unsure at all n locations
tttgttttttttattttttggggttttactttttttttttttttttttttttttttttttggaacctccaaaatcaatttttcccttgggtgttacaaacactcaaaccggtttagctcacaggggcagctgatgcaatgcttgcccggcccccatacatattgaacccaacaacggccccggaaataacttaccgggaacaggagtcggccccccccattgggaaccacaactgggaaaccgacccctacccccctattgcaaggaacctcatcgccatcctcattctcgtcggactccaccttgcaacacccgccccaggaaattcggccttacttangatcctcggttt

SEQ ID NO: 432099 - DNA, 339 bp, Oryza sativa
  unsure (1)..(339): unsure at all n locations
tttgttttttacttccagtatcaaacaatagtttaacagcaagcaacaaaaatttgtgtagcagaaccaagctaccaacttgtccaagaatcacacaacattcaagtatacccaattttggttcaacaaactggtgaaaacacttgcagcaccacaaaaatcagcagcaaaaaattgctgaaccaaaaaatcagcagcaaaaaagttgctggtccaagttcaggttccccccaccagcaggacctgcagcacctgaaacgtgttgtttgattccagaagcaaaggaagttgtagtacccatgctaaaagattgctctgttcccccnanaggctctaggg

SEQ ID NO: 432100 - DNA, 117 bp, Oryza sativa
cgatgtccagtttcaggtcggcggcttgcaatctcggggcgggcattatttaaaaaaccccggccccttatcctccttcacccacctcctatcaactctcccatacccccccattaa

SEQ ID NO: 432101 - DNA, 326 bp, Oryza sativa
  unsure (1)..(326): unsure at all n locations
tttgggtttttttttttttttgttttttttttttttttttttttctttttttttttttttttttttttttttttttttttttttttttttttttttttttttttttttttttttttaaggagacctggaaaaaaaataaggataaaaaaaaggaggggaaccatacacaaaaattttggggcccaaacagggggaaaaaaataccttggtggtcctaatggcccaaacaaaaaaaaaaaaatggggggggccacctaagctggggacccgatgatgataatgaccaatctggccacctcgcccatgannaagacgtctttggagga

SEQ ID NO: 432102 - DNA, 361 bp, Oryza sativa
ttggtttttttttttttttgggttttttttttttttttttttttttttttttttttttttttttaaaaccaaaaacccgggggtttttttaaaagggcttattttaacatccataacaagcaaacgattgttgtttcccccccccacctttgaccattacggggcaactggccacccttgacttgaccaaaaatcccgggggccggataaaaaaaacatcaggggcgagcaaaaggaaccgtttaaaacttgaccccctttaacccattaaaaaaaaaaaggaagggtgggtcgggggctccccccctggaggagggaaacaccaagcccgcattattatgcgtggtttcaccaacaaaaa

SEQ ID NO: 432103 - DNA, 360 bp, Oryza sativa
  unsure (1)..(360): unsure at all n locations
tgggttttttttttttttttttttttttttttttttttttttttggagcttcacatcatcggtggttatcataactggaataacagggcagatggggcataaaccaagtatatttcggagttctaggttatttataatatcagaatcaccaactgggaaccatccacaggatgggcgggggactactgatcagaatctactcctttgagggggggatgggaaacacgggggagaccattaaatccacgccacatttgttggggacgttggagcccccgcagatcttgaagtcccatgcccatgcttatggctctnnntggcgatgagggagacctgtcacgatttggggccccctgagta

SEQ ID NO: 432104 - DNA, 321 bp, Oryza sativa
  unsure (1)..(321): unsure at all n locations
ttggttttgtgatagccaaatatggccaggcccgccgaattatgatgagtgctacgttaggtctttatgggacggggggtctatgataccagaacgaagataaaacacactgaatttcagcttcaggctttcaaacgcatatcaactctgaaactaactaattcaggggcctgaactgaatttcaggcaggttcataggaggcgatctgaagctccgcccaccacaggggcttctccctaggcgcctcctgctccggctactacccggggatgccccccaccagtctgtccannnnttnaccgggatgatcgaatttgcat

SEQ ID NO: 432105 - DNA, 308 bp, Oryza sativa
ctgcaggtccgtacaaccgcaatccgggggggccttttatcacctcttgcctggtgacactgcaatgcaaaaacccgtcattttgctgagaaaatgaatataaaccctctattctgcggcactatgttgctccattgccactcatgctggatacgtcgaactgaaacatgcagcagctcatacataatatagccagacttctgaatgtgatgctctggacagatagctcaagacacgccacggcagcatggaggcctgagtactgagcaaaatgaacattaatgtgactctttggaagagacgactat

SEQ ID NO: 432106 - DNA, 456 bp, Oryza sativa
tttgttttttttattttttttgttttttttttttttttttttttttttttttttttttttttttttttttttttttttttttttttattttttttttttttttttttttttaaaaccccccaaaaaaaaaaaaacaattaaaaaaaaaaaaaaaataaacaagcacaaaccccggggggggcaaacccagaaaaaaaaaaaaattttccccccccccacaaactgtgaggcccaaaaaaaaaaagcgggaaaaggttaaacccgcccccgcccctttaaaaaaaatattacccccgcttgacccacaaaagaccccaaccaaaatcccaaaaaaaaacccccccccaacaaaccaaaacccaatctttaaggggggcctcccaaaaaaaaacaaaaagctttttcttggggacccaaaaaacaccctttaaaaaaaaaaagctaaaaaaacccccc

SEQ ID NO: 432107 - DNA, 184 bp, Oryza sativa
ctaccacgtgttgcggtggcgcctgatcaacgactggctcgacggctgcggttgttgatgggcaccctagctctatgagcactggcgaggcacgggggacacagcgcacgggcctgtgacgaaatgggccacgctcccgaggctgagctactggtccagcgtctggccctacggtgaggcgtgc

SEQ ID NO: 432108 - DNA, 210 bp, Oryza sativa
  unsure (1)..(210): unsure at all n locations
ttcccggggggacccacgcggccggctaatatttgtccatcccggcaacaactggccacagggcggtgtggactactccagggccgcagatataccttggacccttaggcgnggagagcaccaccagatggcgagcacggggcgaccgatgctgctggcactgatcctattcacagtgacggtgtctatgctggagatgtactgggccaa

SEQ ID NO: 432109 - DNA, 395 bp, Oryza sativa
tttgttttttttttttttttttgttttttttttttttggttttttttttttttttttttttttttttttttttttttttttttttccaaaaaaaaaaaaaaaaacccaaacttaaaataataaaaaaacaacagggtggataccccttaaaaagaaaggacccccaggccccaaaagttggtttttgcaaccaaaagcccttttctttggggaaaaacaaaatgccgaaaaaaaagcctttgggttatcccttttcccgggggcctatcacccaagggaaccccaaatcccgaaggagcctctaccccaccccaagttgctaaaagcctaaaactgaaagaaactttattcaatttcaaggccttgtccgtggggaaaaaaaaaaccaacacttg

SEQ ID NO: 432110 - DNA, 425 bp, Oryza sativa
tttgtttttttaatttttttggttttttttttttttttttttttttttttttttttttttttttatttttttatttttttatttttaataaaaaaaaaaaaaaaaaaaaaaaaaaaaaaaaaaaaaaaaaataaaaaaaaaaaaaaaaaaaaaaaaaaaaaaaaaaaaaaaaaaaggggggccaaaaaagaaaaaagaggaaaaaaaaaaaaaaaaaaagggggggaaaaaacccggccaaaaaaaaaaaaaaaaaaaccccggggttaaaaaaaaaaaaagggaagaacccccggggcaaaaaaaggaaagggtaaaaaaaaaatggggaaaaaaaaaagggggaaaaaaaaaaaaaaaaaggggcaaaataaccccccaaaaagaagaaagattggaccatccccccatttgggggggaaaaa

SEQ ID NO: 432111 - DNA, 423 bp, Oryza sativa
  unsure (1)..(423): unsure at all n locations
tttgttttttttatttttttggttttttttttttttttttttttttttttttttttttttttttttttttttttttttttggggggaaaaaaaggggggttaaaaaacagcctaaaaaattttgaaacgaaaaaaggaaccccgataaaaaaattccacgggaaaatgggggacccttgaccaaaggggacaccattttttggttgaacaaaacaccccttgcacagggattaacgggnngacaaaattgaaaggggcccccaaaaaaaacttgatactggaggaaaaacacgcattttaattccgaccaaaaagggggaaaggggaatggtctttaattattggagccgggggaaccgcaaaaggaggggcctcaccaaatccaccccgaaaaccggcaagatccccgggggccctgaaaaa

SEQ ID NO: 432112 - DNA, 310 bp, Oryza sativa
tttgttttttttaattgcaagggttgcaactgttaggtcagatccaaccaagatgattattaacgcatatgtcatccggaatacagaagtgatcacaacctccgagtagaacacggtaagaacagacagaaagccttgagaccttcacgaggctaagcttaagaacatgctaacattaaagtggcattaccagcactcgataagctgatgcatgggacaagggaaacaacatccgttctttagaagccctgcaagaagaaggtaataaaaaccggtgctgccgactttgcactatatactgatcacacgg

SEQ ID NO: 432113 - DNA, 54 bp, Oryza sativa
attcccgcctcgacccacccctccggctattatttgtccatcccggcaacaatc

SEQ ID NO: 432114 - DNA, 492 bp, Oryza sativa
ttttgttaaaatccaatagggggtttcaccattattgattgcttagaatacatcagttcattgctccggccagtactcaactcttggctatgaacaatctaatgtctaggtaattgaacagatacttttccgatcaacgattttgagtttttgacgccttgtccctctaccaccgatccaaagtgatgaactgaacaaatttgagttcatcacttaagtacggggattacatatgagccggctgcagatatgatctctcatagaggcccatcacctgatcagccaccgcccacattatagcctgaccaggtggaatcctcataagcctcggaagcaaacctttccaaagggctctgagaccctcttcagtgtatattgtgcgtatcgcgtggaccatacccttgtacttgatgtcaccagttctcccctgggccatcagtctagtcttcacgacattcgaagggtccagtgcagatcggacctgcagttcct

SEQ ID NO: 432115 - DNA, 480 bp, Oryza sativa
ctgttgggatggttttttggcgaggggagggggaatggggatacattggttcatatgtgctccgctctgcgccttattgagaatgtctttcaaaggtgaattagtttgattagacggaacggcaggaatcgcttagttcttacgcgcttaagaaaggttgtctacaggaggtttaagtcatatctgtccatcatggaatgcaatgttcaatttgaggagcagcctgtaccgataaatggaccctgctttctaattgccccacatagtgatgaatttgtttcatgcaccaagttgagttgatagagaatagagaccatgttttagattcttgaagaaacatatatagcgtgcttgaatatattatatatatcctatttgggtgagctgcaagtctgcaactaccaatgtatgttgttgatctgttgctgccttgctattctgaataaatgaacctttatgaactcagccaatccctgattg

SEQ ID NO: 432116 - DNA, 304 bp, Oryza sativa
tttggttttttaattttttttggtttttcttttttttttttttttttttttttttttcccattacattaaacaacataccaacaaaccaacaaaaaaaccacaaaaaccccaaaaccaacaacaaaaaacaccccaaaacacaacaaaccaaaaaacacaaaaaaaaccaaaaacaaccccccaaaccccaaaaattaacccaaagaaccacgaaaacaaccacaacaaaaaaaacacacaccccccaccaaaaaacctaacaacagaacaccaaccaatcatattgtaaaacacaaacactaa

SEQ ID NO: 432117 - DNA, 509 bp, Oryza sativa
tttgttttatagatttttttgggtttttctttttttttttttttttttttttttttttttttttttttttttttatataaaaaaaaaaattttaataaaaaaaaaaaaaaaaaaactaaaaaaaaaagtaaaaaaaaaaggggggggaaaaaaaaaaaaaaaggggttaaaaaaaaaaaaaaaaaaccccccaagaaaaggggaaaaaaaaaaaaaaggaaaaacccacaaaacgggggggaggggaaaaaaaaaaaaagggccgggcgcaaaaggaaaaaaaaagggggacccccccgcccccaaaaggggaaaacccaaccccaaaaaagggcgcccggaaaaaaaaaaaaaaaaagggggggggagggcacaaatttgtcttccggaggggccacaaagggaaggaaaaaagatgtaaaaaaaaaccccccccctaaaaaaaaaaaaacctcggtgaaaaaaacaacagggggggggggggcccccaaaaaaaaaacacccaaaaa

SEQ ID NO: 432118 - DNA, 501 bp, Oryza sativa
  unsure (1)..(501): unsure at all n locations
ggaactctgtgaaatgcatgccccttgggaagaaaccaaaaaatctcatccatggtggcaagtagctgatgtcgatggtttggcttcccttgtcgctgaaagagcaatggaaaacattgtcaacaatgatctgccaagacccactcagacagtccgggttcatggacctcaagtgaagggccctgaaaacaaggatgattatgggatgtctgttgtttctgggggccaagagccagatcctgtacatgacactatggagtgcagctacagtgtttcaagcaccaccaatgacatgaattcttctgacgggggacgttggcagcaccacgaaagaaataatgtgtccggggatgcacggngttcttatagttccaccaacagtacaccgggcagcaagccaacatatcaggatgcttctgagagagccaagctgctagatgctctccggcactcgcaaacacgtgctagggaagccgagatagctgccaagaaagcgtatga

SEQ ID NO: 432119 - DNA, 463 bp, Oryza sativa
cttcttcaagtcccagattgccaaatcggatcgggggggtaccttgtgattttctgtattctgtgtacatgctggagcatgaaaacgttccaggccagagagcttgttacagaggagtagttggtacgacacgcagatagcgtgcgtagcgatctctcgttttgggcagttacgcataccaattaactgcgacggtgctggtcctggctcatcagtttgcaggaaatggagggcgttgacctcggatgatgaactgtggcgcaagctgttcaacgacaggtggggagcggacgccgcagcgttctacgcgccggagggatccaagtcttggaaggacgtcttagccgtgcaagaccggtgcgaccgatacggactgggtgtcaggatcatcagggaagggaaggactactacctgatctaccagggcgagatccagaggtacttgggcttccgccaggacaca

SEQ ID NO: 432120 - DNA, 430 bp, Oryza sativa
tttgttttttttttttttttgggtttttttttttttttttttttttttttttttttttttttttttttttttttttgttttttagggaagacccccgaacaggtttccggggaaaaaaaaaaaaccaagggggggacaaaggggaattttaacggccccggcgggggggggttaaaaaaaccgggggccccccctaaaaaaaagggcggggtacaaaaaccccccaaattttaaaaaaaaaaaaagacggcccgccccgccaaattttaaacaaaattaaaaaaccccggggagaggggaaaaaaaggcgccctcccacgagaacgggggggccaattgggctccgcccgaataaaccaaaaacacgggggggggggaccggcaaaaaacaaggccgaaaggccccccggaaattgttatgatggggggg

SEQ ID NO: 432121 - DNA, 451 bp, Oryza sativa
gttattctatgtcctgcatatagtagagactgtgagctgatattatgttttcagctaatcattaaggatgggaaatcttcatacaaattccatctctactgaccattcacttgctgcagcttttgtgatccttaagacggaacagataattgcttatttaaccacgttggcttctaacgtgtccattaggctttaagtttaacctgatgacatgccatatatttgggactttttagttgcccctatggcttatatgctgtgcctgtgggatgaacacgtcccaacattcacctcatttttttcactttgtcagctaatagccatacatgtttagctgattgttaagattgggaaatgtacgcttttcatactgtgttgtatatgctctgtttgcctgcttgaacatatcttgttttgagagtaaatacgttgccccgatggtggcaatggt

SEQ ID NO: 432122 - DNA, 427 bp, Oryza sativa
caaagtagtggtaatttggaattgccgctaactatttagtttaaggattaataattacaataaataaaaaactctgggcggacgaagaggtcgtcgacgtcaggggaccgagcagcactgtgaggaaccaggcatgggtagtcccgtaccagtttatccatcgtgcagagcttttgatccaataagaacccataggcactaaaatgcaaagcattctccgaacatatctaactccaatagagttttcacctatgggtaaactgacaaacaggtaccattgccatccctaatagcaaccagttacgaatccagaagtctgcccttcaggctactcacggagaaaaacacatcatgttatcatccttgtggtgtcaaccttctgaataatcaaaaggtggtgcatcaatcatcttcatcttcgtcatcc

SEQ ID NO: 432123 - DNA, 297 bp, Oryza sativa
atgtttcattacaggatagcaacataccaagctggggggcttgtatttctgcttagtgttttgtctgcgctaccgggcgccacgcacacaggagatagagagctgccctaagaacaggatcacaagggccgttccactgatgtttctggaaaggaggggaccgattgaggagatatgatgcctactaatgactatgggcgcttcgatccgactccagggtgatgcaaggacaactccaagcttatacccagctaatgacactcacacttgctgcatctacatgctcactacatggat

SEQ ID NO: 432124 - DNA, 187 bp, Oryza sativa
aggcaggccccaggagaagacaccggggggggttagattatgataggacgaaactcatacagacccgctggcttaccccataactgaaacaacagtggaaaacaattgcctacacaggaactgacaagacccactcaggcacaactgaaacatggtactgacaggaagggccgaggaaacactgacg

SEQ ID NO: 432125 - DNA, 204 bp, Oryza sativa
attgttttttgtagttctgaacatggaaacacaaagggggggcatttctgacggcccataacttttacagatacttcgtgatcccacactaactggatgagcaccgactaacattgctagccgtgatcctgcgagtacacactggacaggtacgcgtaaagttcctcaggtgaaagccagtgacactgatggtggatccactac

SEQ ID NO: 432126 - DNA, 430 bp, Oryza sativa
gtcacgctctacggcttcgacttctggttcatgggctgggggaggttctaggcgtccctgcaggagctggagaaggccgtcgcgcagtcgcagtcgcagtcgcggtcgcaatgacctgaggcgatccgccggccggcccggcgtttgttgtgctcctgtgtcgcctgcttcatctgtgttcatatgtagtagggtttcggttttcttgatgatggattgcttggcgttcttggcattggagcaagtccggtatacattgattatacaggagaacaaaaaatgggatattagattgattacgtgatcggtgatgctgagtaaatcttctacggcgccagcgtaaaagtgtcttcgatgaggtttacatgtaacatgtgtcatgaaaaccacaaatgcttgtgcgacgaaatagattgtggtaactgaactc

SEQ ID NO: 432127 - DNA, 432 bp, Oryza sativa
tttggttttttttttttttttgttttttttttttttttttttttttttttttttttttttttttttttttttttttttttttttttttttcccacccaaggggccccctttcctttggaggggaaaaaaaaaaaacccccttcaaaacccccttggggaaaagggaaccttaaaagacaaacctttgggccccggatcccccaaaaaaaaaaaaaaaacctttgggccccggggaaaacaaaacaaatttccttggataaatgtggcccaaaaaaaaaaagggggggcctgggccccaaaaagtttctcgccaactcccccccaattacaaacagggtcgggaggggggcttgggggaaacacaaaaggccggggggacaacccctccgtggaacccccaggaaacctttaaaacccccaaaaaggccccgg

SEQ ID NO: 432128 - DNA, 324 bp, Oryza sativa
tttggttttttttttttttttgtttttttttttttttttttaggacacaacataggctcttataacaggctcagggctgcacaacaacttttgatagcttacaagcttcataaactttgccgaaaaatggtttcacccacttggtacttacttaggaaaacaggtcactatcactggtttctggttgctaaacccccttgggagggtggacccccagattgggcaactttaagaactcaaacgaaacgcacagtttttcgcaagggtaagggcaaagccatttcatttgccgcaaaaaacattatgctgctagtaaggaccccc

SEQ ID NO: 432129 - DNA, 437 bp, Oryza sativa
atgacttttgccatggtcaaggacgtgatgtcgagagggaagttttaggatcggcgccagatctccgacaaggccaaagacatcaagaaactctccaacgagttagctgaacttcgtgccaagtacacggtaaggggcgtgggtgctgatctcgccgcgagcaccggcatcgacccccgtgtcatcaatctgtacaagaaagagacagatctcgttggcatcgaggagtcaagggacaaagccatcaggatgctgtctatggggaccaaagatgacgatgcgcatgaggctcatcaggatctaaagatagtgcctatagtcggggttggaggactaggacattcgagaagatgctattggaactcgatcgcgagtgtaaacaagttgacatggccagatgggatctagaacaatttataaatgaactggatgaattc

SEQ ID NO: 432130 - DNA, 486 bp, Oryza sativa
  unsure (1)..(486): unsure at all n locations
ctactgcagaggctgcagaggaaaaaatatccatacttgaggaaaatgaaacattactcaaggacaatgaacgactcaatgctgaaaatgattccttgatgaagagcagggaaggagctaatagtcaggttgccgctttaaggaagtctttggaagctgcacacaaggatataaaagacaaggaaaaaatgattcaagacttgaggcagtcactggatgtccagaggaaggagctgaatgactgcagagctgaaatcacagccctgaagatgtacatcgaagggactcaatcaatcaaacaattgtttgttggaactagtgatggtgtaaagtcgcattcctttgctaattctgtgggagcatcatcattgaataatgaagatgaagattcaaaaggatctgaagccataacatataagctagcatcagcagtaaatattactgatgatacgcagaaagatcgccangttctagaaagtagcgctg

SEQ ID NO: 432131 - DNA, 424 bp, Oryza sativa
tttgtttgttaagaaaagggaaaactcatataatgatatacccaggataaatacacatattgtatcccccaccatcagtttaattttacctaaacctcagatttacacttctgcggcatggcattggccagaaatctacaagtattcctctcccacctaaacctatcttgcaaactgaacccaaaaagaaaagtaacagtaatttatacctattgtttaaacaggctaatatacacatgggtgatccacttatccacttctaaatggctttgagttattgtagcccattcttccttccagaaattagttcctttggtttgactttgtcgaacttattcactttcccatgttctttaacttcacattctcatattgttcctttgctttgttaatgtcaaccgcgagttccatatactttttcagt

SEQ ID NO: 432132 - DNA, 423 bp, Oryza sativa
ttggtttttttattttttgggggttttttttatttttttttttttttgatattcaaaaattatacatgcaaacatcactccaatacaaagaaaaccccagaacaaaaggaacaacggaaaaaaaagggggggggaatgaaaagggccgtaaactatgcgagcccacgtggcgaaccaaaaccaaaaaaaaccgcgcccaaaaaaaagcaagacacaaaagaggggggggatgaagaaaaaaaagaggcccaaaaaaaggaagggggccaccaacacagggaggggggggccgcccccaaaagagaacctacggaagaccgccggagaggcaaaaaaagggggagaaaagcatgggggggacacatattgggggggggggacccccccaagaaagggggagccccccggggggggggggggggg

SEQ ID NO: 432133 - DNA, 416 bp, Oryza sativa
tttcttgaccttattcaccggtagccggactcgggggggatttcatgatctactcgggatgatataccagttacacgtgaaatatcaggcagtgctattggcttatcaatgcactaccctgatgcacacttctgcactgatgctaacggaaaatacatacagaccaacttgatatcctcgggacactgcatagtgatcagttgatcagaacagatcatatcaacgctgtaaccacagtcagggtccttggaccgctacaaccctacaggctgcactgccagtgattgcctccaaagttgcactcaccaccttaagggttcacgtgacgttgctccacatagaagtactggcttgagaagccttttactaggaggaaccgtctcaaagacaatgggagtgacgccttcgggaatatt

SEQ ID NO: 432134 - DNA, 137 bp, Oryza sativa
cccacttcgtctgcccacgcgttcgcgtggttgtagaggggggatttattaggatacccgaatcgcttgtttccacctggccaaggtcgcgcactgaatccccagtacgagatgtagattatgggaatagagtgccg

SEQ ID NO: 432135 - DNA, 461 bp, Oryza sativa
tttggtttttttttttttttttgtttttttttttttttttttttttttttttttttttttttttttttttttttttttcaaacaaaaaaccggaaccttatggccaccaaagttaatttatctaccagaaacccccctaggcccagggggaaaattccctttttaaagccccccatacccccaagggaaaggggggaaaacggaaaaattggtcaagcccccccccaaaaataacaggggaaaaacccgggggggggaaaaacgggcctggccaaacccaaaaaaaccccatggccgctggcaacaaaggcgaaattaagggcaaaaaggcttccctgggcccgcacccgaaagaggacaatggccctgggggaaacccaaaccctcgggcccccgccccgggaaaggggcaaactggggaccccgggaagggaccaaaaccccccctagccggggagggg

SEQ ID NO: 432136 - DNA, 350 bp, Oryza sativa
  unsure (1)..(350): unsure at all n locations
cttggtctttttgcatgtcaatcgccattgtttctgggggnggtttccatctatatttagggtttctttcttgctggccttttgagcgattgagtctgtgtatattgcattagcatgatctgcacacccttcccccacccaccccagaaaaaggaaacaactgcagtgagagtgagctactggtgaacagaacagaacagaagcgcatgcatccatggtgtgtccgtctgcaaaataattaagtggtggcctcgcaaccgaaccgacgaaggatttttgccataaccatatatatgatatgttggtggatgtatagtagtgcaccagcgtacatgaattaaacaaagttc

SEQ ID NO: 432137 - DNA, 391 bp, Oryza sativa
tttggttttttttttttttttgtttttttttttttttttttttttttttttttttttttttttttttttttttccgggcccccccaccaggggaaagaaagggggataaaaaaaacccaaaaaccccccggggtggggtcaaaagaccagcccggggggggggaaaaatggaaggggattccctttcccccacacagagaccccccccggggggacccccccccattagtcccccttacaggaaacaacaccccccccaagctttttgacggaccccgaaaaaaaaaaaatacctgacagtgggggcaacaagcggggaagggccccccaaagggggcccctgcccaaattagcccaactgggaaaaaaaaggcccccagggggggccggg

SEQ ID NO: 432138 - DNA, 414 bp, Oryza sativa
tttgtttttttttttttttttggttttacttttttggccatatttaccattttttttttattttgaccagagtcaataccaacagaggatcactcaaagtatcacagcatcatggaagacattctactgcttttacacaatatcattcaggataagcgggcatgcaagacaaactttaccaggtactaccacccagcaaagaaaagcaacatagaaggaaatatttcttatagcttaatcaaaagctagcactactgccacagggctctctacccattttaagctgaagcctatgaaaacccaagaaactagctcaataatgcatattgctgccagaagtgctcagttctaccaggcaataaccttcatgcccagaagttactgggcgaaggcgacaagggtcctgatctcgga

SEQ ID NO: 432139 - DNA, 472 bp, Oryza sativa
tcgcgatctagaaccgtcaatccccaaaccctcctcctcctctccggcgatccacccatcgatcggcgatgacgctggggagctccggcgccggatcgagcgtcgtcggtgagcgatcgatcgaatccccccttcccttcttcccttcccccccttttctcgcgagtgcctagggccttcggatcggaggaggctgaggaggagaatccacgcgggtttcgctccgttccgcgcctcgtaactttggcgctgtgtcccgccatggctgtgctgcgctcgatgtggttggtgatcaggcgagacgccgacgcgttggtttgtttgttggaattagcgatctgcggtttttgtaccatatgggttccatccatctggtgatttagcttggtttgcatgcgtgcagcggtcatgggatctctctagatggcctgggttgctcggtttgcgaatttatttacggcatgttgatgat

SEQ ID NO: 432140 - DNA, 289 bp, Oryza sativa
cccatttcgacgcggatgagcccaaagagcgagggagggggaaccaggaaacgagcggcgcaaggatgccgcaaacgcagctccgataccgggagcaccaagagggcccgcggacgcaccgaaagcagcgcgaagcacggcggaggcaagcgccgcaggaccgaggggggagacaagagcgcacaggggagcacggacaagagcaaggcccatggagggggcaagcgaagcgcctggagcaccggccgcgacaagtccgcgaggggaaggagaggccaatgcgcagcgc

SEQ ID NO: 432141 - DNA, 452 bp, Oryza sativa
tttgtttatgttgcaatttacagcgattatgatttcataacaaccttgcatatatattacacaaggtaaaaaaatgtaaaggttcatccgcaagcacaagtcttatgtcccgcgatctggatgcaaatgcttcagcgaacttcctgaagcacacagacctaccaaagatcatgaagcatcgctggatctcaggtggctccgaacaaacggcgtttctctctggacctgtcttcacagtgtatccaattcttcaacgaacatggagtgggctcattgagagccagatcctgacgcacaagtcgtggaagaagtttcatttacaacagcagcatggttgggggataccgtcctttgattatttgcgtctgaaggggagcaagcactatctgcaggaacagcagatggtccagtatcgtcctttgtttctagccgttccatcatgcgagataccg

SEQ ID NO: 432142 - DNA, 430 bp, Oryza sativa
tttgttttttttttttttttggttttttttttttttttttctttttttttttttttttttttttttttaaaaacacaacacactttgtaaaaccacaaggcttaggggaatggaatcccccaaaacctcgccccggataaacataaaaggggcaccctttttaacaagagagagggcacctgaaaaaaaaaagcaacctttataatgaaactaacctgcaatgaaggggccaaccgttggggccctggggcagggcccaaacaattggctccaagggcccctattgttaagccccccgcttgaaaaaagggtaaaccccttggggtgcccccacggaaaccaccccatttaaaggttttgggggcaaacccctattatctctgggggggaaaccataatccggggtccctcaacaaaaaagatttttccc

SEQ ID NO: 432143 - DNA, 436 bp, Oryza sativa
tttgtttgaacacacaagacagcatagggggctctcattgagatgctctgtttgttagatgggtcatgggattacaacacacattacactttacattcctccgctaactctgacgcgacaaaaaaaaaaaggtaaaaaataaatctaccgcccgcctccagcttctcactccaccctccttccagtcagactaacttcctaaacacacagagcccgctccaacactgcttatacaccaggcacccatcttcaggtgcccaggtgaaatgggccactacttcccgtatcctacaattggaaagtggtggccaaaaagaaaagagaaaatgaatatggataggacatcgccaattatactttacacaatctccgagccgcagatggagatatcagagggaagaaacgccccgggaagttatagtcattagccagaaag

SEQ ID NO: 432144 - DNA, 327 bp, Oryza sativa
tatattcctgccggagcagcttaaggacaggctggggggttttaaaaaaaagcaagcgggcttatccacaccaagaactatgtctatggcaagctcgcggggcacacaggccattctgtcgagaagatccatgaggacctgtctagggagcagcgcttcgacgccgatggggctatcgagaacgggagcatcgacacgtgcggcaggcacgctcggagcaagacagagggctccactgctcaaaggagggacatgcggaacctgggacttggctaatgacagacgaacgaaatcctgtggtatgagaagttcatgagcatggggatg

SEQ ID NO: 432145 - DNA, 393 bp, Oryza sativa
tttgttttttttttttttttgggtttttttttttttttttttttttttttttttttttttttttttttttttttttaaaagggggggggggcaaaaaaacccaaaaaggggccccccgcccaaaaaagggacggggggcccccccccaaaaatacagggggcaaaccgggacaaaaaaaaaagggggccgggggccccccttggggggaaaaaaaaaaacaagggccaaaggggggcccccaacctgaaaaaaacccccccaaagggccccccacatttttgcccggggttggggggggaaaaaatttttcgggggaaaaaccccaaaaaactttggcccgggcccccccccgggggagggggccccgggagggggggccccccggggacccc

SEQ ID NO: 432146 - DNA, 204 bp, Oryza sativa
tttgtttttttaattttttttggttttttttttttttttttttttttttttttttttataattcttaatttaccattgaactgaaagaaatatagacatgaaaaagacaaaataaaaaaaacgaaaaaaacccaaaaacaaaaaaaataagaaaaagaaaacaaaaaaaaaaaatacaaaaataaaaaaattaaaaaacaaaaa

SEQ ID NO: 432147 - DNA, 335 bp, Oryza sativa
ggcccgacccacccatccggcccgactctgctctaacccagacaccaagcccaaaggggggggcctttgaaaacaaaccgaccctgacacacccaatagaggcagcatatactaagaccaaaactaaggtcagcacattgcccctgcaacaactacccgacacaccagtgggcaggagctgaaacactcagctccaaagctaaagagaaccaaagaagcgaaaacgacaccggctcatcttcaaatgggaagccatcagaaaagcgaacaggcagccctgcataccaggcaaaccaatgccaaaaccagaagtgaaagggcaggactggtctagt

SEQ ID NO: 432148 - DNA, 519 bp, Oryza sativa
attaatttttatattaattaaaaaagtaaatttaaccgggaggggtttatttaaaattttatttaattagaaactcattggatttttttaaaaaaaaattaatttttttgtaccttttgtatcagggttagtttaaaaaaaatgaaataattttcgaattttcgaattaaaaagatctaaaaatttaataaattttattattttataaatataaaaaattaatttttagaaataaaatgtttttcgttttttaatatatctaatttttttagaaataaatttaatttagttttaatttatataattttttttatttaatcattatataattattaaaaaaataaaattagggattagcttaattttaaatataaaaattttacttataaaaattttaaatatagatttttaaataattaatatttttaataatattataatttataatttttattttattttaaaaatttaatattattattttataaaaattttttaaaaatattttataattattta

SEQ ID NO: 432149 - DNA, 484 bp, Oryza sativa
tgattttttttggatgagcctgtaaatgatctcccaacgggggtgttgtacaattcattgggatctgttatccacatgttgattggatcaagatatgctgtgcagcgaagtggaaatgtactgatgtcctttaacaacaaggaggcaagctctgcgatcccactattttcacctgtaattggtcctatggcacagagttttggccctatattctcccaattggcatcgtatccaacaatccgatttggggcagaagcagctattaagcagcttgagaatctaaacccacctgttggtaagcaacttctacctttactttaacaacttcctccgttgtatatggacctaataaaagggcgggaggacttcattccaaaaccagaaaagacacgccggctgataaaaacctactatggaatttctcggaatctttagtaaagttaaagatgatcaaattgatgaaacctctacccttgcacaagta

SEQ ID NO: 432150 - DNA, 316 bp, Oryza sativa
tttgttttttttattttttttgtttttttttttttatttttttttttttttttaatttattttatttattttttttatatttttaaatatataaaaaatttttaaaatattaaaaaaaaaaaaaaaaaaaataaaaaaaaaaaaaaaaaaaaaaaaaaatataaaaaaaagaaaaaaaaaaaaataaaaaataaaacccaaaaaaaaagataaataaaaaaaaaaaacacaaaaaaataacaaaaagttaaaaaacctaacaaaaaaaaaaaaaaaaagaaccccgaaacttaaaaaaaaaaaaaaaacgggggaa

SEQ ID NO: 432151 - DNA, 274 bp, Oryza sativa
atttgtataacaccactacagacttccagatgcgggggggatcatttctagggtatgttctgtaaccaccgccatcatagaggcacacaccagaaccgggaagtaactcaaagaccgaacttcgctcacacattgggcgtgacatgcacatacgacagcgccatgctagccacgcgatgtccggccaggagcgtgctaaactccgcgcttggggcaaggggactgactgagatcttgagggagatctacaacgagaaaggcaagggggtgctcc

SEQ ID NO: 432152 - DNA, 306 bp, Oryza sativa
tttggttttttttatattttgggtttttattttttttttttttttttaaaaatgtcatgttaatatatttgttggaaaggaaattcattctaataataagaaaagacataaaaaaaaaaaaaaaaaaaacgcaagaaatgggacatctgactgaaaatgcagtatgaaaaggaaaaaaaaagcataactacactgctatcaaaaaaagagagaattatcaagaaggacagagcaaaaggggacatttttacagaccaaggaaccaggaggaaaaaccacaaaaacgccgaggaggcaccaggcaac

SEQ ID NO: 432153 - DNA, 305 bp, Oryza sativa
gagggccatgaccaaaaacagcaccgggggggcttatttataagttggggagggttatcactcaagcttccccacacacaatacattatgggccagatgcactcgcatcacatacctgggattgagaggaatcctaccactttcgacgcggtaggactactacgcatgctcccaagccaccctggggtcacagcgataatgagaaacaatcaattgcaagtgagattgctcactgggaacacctctagtgtgaccgtaggcatccatccaaagtgaattatagggaacaaaatgatcatgggaca

SEQ ID NO: 432154 - DNA, 130 bp, Oryza sativa
tttgttttttaaaaaaatttggggagtgacccctcaaggccggcctaactggggacagactaaacccttaccactctgactgtgcctgtccttctggagatctatcatgcaatcttatagtcaacacaat

SEQ ID NO: 432155 - DNA, 390 bp, Oryza sativa
tttggttttttaattttttttggttttctctttttttattcctatcatttttattttttttttttttttttctacctctttttaaaggccaaaatccaaacatacaaaccccccccaaatttggcccaacccaaccagcgacaaccccaggggcaacggcataacccccacccccaaaaaaccctcgacctaacccaaaaaaggggccattcccccaaaaccggtcccaaccccaaaaatttcccaaccttttgtccccaaaccggcaaacctccaaccctttttaacccccttaatctaaccatggccccccacacaaaaaaaaccccccccccaaacccccatttaaaaaaaccccgttccatttccccccccccccccaagtcccag

SEQ ID NO: 432156 - DNA, 339 bp, Oryza sativa
gcggttagttggagaagccgacggagctcctccacggggggggcgttttgagcagctggatggctgttatcaaagcattctgcagggactatgccaggaagaaaggaagaacaactgtgagggaagatgaccccatccatgaccccgccccccaaggaagagcatcagcgcctgactcggcgaagacagaactcctgccacgtatccggtcctccatggataccaccactccggaagtcattaatcgagacggccggagctacatgtaccatcgcacaaacactgggaggccgatcttgccggggaccaagggcgccggcactatgagcatgatcaggc

SEQ ID NO: 432157 - DNA, 53 bp, Oryza sativa
tttctttttccctcacggcaccacctctaccccagggggggttatttaaaaac

SEQ ID NO: 432158 - DNA, 119 bp, Oryza sativa
gtacatttgctctgttgggatggctttttggcgaggggaggttttataggggataaattggatcttatcccctctgcctgctgcctcattcaaaacggcttccaacgccgaatcagatc

SEQ ID NO: 432159 - DNA, 212 bp, Oryza sativa
gctagcccggaggaagttgttactggggggggggttttatatatactagccatggattagcaaccggatgagaacacctggatagtggagccgtggatggacaaatcgggctatccatacgaagcggggaactagccgaccgctatgtagactgcctggttccgatattagactgcgctcgtatgggcttatgcatgggacatggccatgtg

SEQ ID NO: 432160 - DNA, 422 bp, Oryza sativa
tttggttttttaaatttttttgtttttttttttttttttttttttttttttttttttttttttttttttgcttgttccaaaacacccataaacttctgtaccaaccgtttattgcccaccaaacggtgtttacatggcagcccaaaaaaaaacaatttccctaaaaaagattccttcaaaaaagtaaaaactaatcctaaatcctccctggcaatattggctatccccctggctctctcttttaaaccttgtcagctaaaccatgttccaaaaaatagttaccttttcaacaaagacaaatttattaaaaaaatatatttaattattggctgggggaaaccaatttaggattataaaaattaccatttttggctttaaacccaggtcaacccaaaaaaggtggacttttatcaaaaacaaaa

SEQ ID NO: 432161 - DNA, 246 bp, Oryza sativa
gcgatttctttgcgcccatgcacgagatggtggccggggagggtctttttaactgggcggcgcctgttgagacgccgctctggaacctccgcatcaacggcaagcacaaccacgcgctcatcgacggcgccttccgcgacctcctcgacggccttgccacgagcagcgcaggcccttccttcgccaccaccgtaaccacgacgaccacaaccacgacgggatgctgctgcagcagcaccttcagca

SEQ ID NO: 432162 - DNA, 435 bp, Oryza sativa
cgcagtttcaaccaatcagcctgcaccattatccaatgggcttctactctatgttgactcgcaacctgatgagcttcttatctcatcccctgatgggcctgctcaattcaacagggcttgacatgaactggtttgagacacttaacagaattaaaaacatcccggtcaagcaaacatccgaagataacttggagactgctgttacgttaatgaagagcacttataacttttatcgggagagcccttgtggaacatttccttcaggtatcaatctctacacggttacaccatcacaagctcctattgaagggctaccgccaaccgctgctgtagttgagacgctcgacttaagtattccaagaaaactccttctgtgggtatacactctggctgattggtcggcactcaaatatatccttccgtagcaaaggattg

SEQ ID NO: 432163 - DNA, 392 bp, Oryza sativa
tttgtttttttaattttttttgtttttatttttttttttttttttttttttattttttttaatttttttaatttattttttttaaaaaaaaaaaaaaaaaaataaaaataaaaaaaaaaaaaaaaaaaaaacaaagaacgaaaaaaaaaaaaaaaaaaaaaaaaaaattaaattaaaaaaaaaaaaaaaaaaaaaaaaaaaaatagaaaaaaaaaaaaactaaacccacgaaaaaaaaataaaaataagcccaaaaaaaaaaaaaaaacaaaaccccccaccagtaaaaaaaaaaacccaaaaccaataaaccccaaataatatttcaggcccccccttaaaaaaaagaaaaaacataacccaaacttttcatgcaaaaaaataaaaaaata

SEQ ID NO: 432164 - DNA, 440 bp, Oryza sativa
  unsure (1)..(440): unsure at all n locations
gattgaacagatttttatcaacaagaacacaagaaaataccgacactttccctaaaaaaacaaaaaaaatgccgacacaggaaggggagggtgccgccgtcgccgtcgggccgccgctggctcccctcccgctggatccggcgaggggagggcgccgccgccgttgggacgccgtccgccgggtcgccaccgcctctcctcccatcccctcccctcacgctggatccgggatgcccggccgccgccccttccctcccgctggatccggcggaggggagggcaccgtccctgcccaccgtcttcctacccgccggaagggccggcgccgcagtctgccaccgtccgccaccgtcgagccctcccgtggcattatggcaagggagaggaggtgaggggcggaaaggcgccnacgcacgttgccgctcgcgggaggagagagc

SEQ ID NO: 432165 - DNA, 356 bp, Oryza sativa
tttggtttttttatttttttgggtttttctactttttttttccacaaaccacgagcttgaaggataaagagggcacacaaacagaacaaggcaccaaagcaaaaccaaaaaagaaaggctacacgcacacagagcaacacccaaagggaggaaaaaaacaaagcaggcacacacagcgaaaacaaaaagacccccccggcaaaacaaagagcaacagccggcaataagcctggccaaggccccaggcaagaacacagaacctagcaagtacgctgagcccacaaaaaggagcacgccaccaacgaaatagcggacggccgggccaagccgcaacaaccgaccgcgaggaccttgcg

SEQ ID NO: 432166 - DNA, 412 bp, Oryza sativa
cttcttgtgggctcgaagcttgcactcttgtagggggggttttttaaaagcggaggcgcgagaggccacgaagacgaagagcagcactctgttggggatcctagcactccaggcccttccgctatctgcggccggggccaaaggacctgcagggccgacgacgaacaagcagtgctggcgcggcgagcgcaccagctgctccggcgtggggacctgagacgacctcctcaccaagtgcgcggccacctgcaagaactgcgtccccgtgtccacggacaagggcgccaccaagcacaggtgccgtgactttcttcccaaaaactgtggctgcaagatccactacagactcatccaaggccaccatggccgcgcgccacagcggaacagccgatggatccttccatatgcatgc

SEQ ID NO: 432167 - DNA, 204 bp, Oryza sativa
tttggtttttttaaatatttgggttttaactttttttttttttttttgggcaacaccggttttttttttcttattttttatttcttattttttaaaacatagccaaaaaaatagcgggcaaaatcaagaatctaccagaggtaacccgtacacaactatttttttcccccccccaaaaaatataaccaaaataacccccccggg

SEQ ID NO: 432168 - DNA, 414 bp, Oryza sativa
tttgggtatttaaaaaaatggggtgttaaccaccttttttttcatagttttttatgggtttacgtttaatgattgcagttttttgaatgcagccggacccggggcccgcccggggaaacgggggccggaaccggcggggcccccgggagccccaaacgggggggcccaaaacactaggggaaaaccgggacaaggccgccgggagggggaaagggtacacggaggaaaacacccaacaagaaaaggcgcgaaagaaaaaagggtaaaggggggggggcccaaggggggaggcaaccaacacaaaccgggtttacctgacgggggcattacaagaggggaagccggccagaccaggacacaaactgaaccggccaccccgggggaaggggcggtcaggagaccgggcccccgggg

SEQ ID NO: 432169 - DNA, 107 bp, Oryza sativa
cgcggcgccttttgtgacggggaacgctggtgttgatctcggggagggggtgttgaatatgaaggggctgatggacgacggctcagacctctcgtcgaggggtgtct

SEQ ID NO: 432170 - DNA, 210 bp, Oryza sativa
tttattagtggttcaaggacgcgggcgccaccgggagggtcttttttgaggcgcacggcatgttcccatggagcttgacaaataacgacgcctccgaacaacaagaccttgaacaaccggtgcacggaagacagaaacctcgccatggacacgcttctgagagagcccccgggccgagggtatatcccgcgggcttggttcgcttgggga

SEQ ID NO: 432171 - DNA, 284 bp, Oryza sativa
tttgtttaataaaaaaaacaggggaatcttaaaccctttatccatatccctagaatgcaaacgctctactgaggaatccaacaataagcaacttgaactcaaaagcgaaggagaaccgctgatacccttgctcctaaaccgcaccaacgctttgactatctgggtgccgagaattgcgtaaatatatctagttagcctgaaacatgcccgaccatcatataggcattacctggcatactgctttgacaagataatcaccgatctaatatagtgctgagatcacc

SEQ ID NO: 432172 - DNA, 436 bp, Oryza sativa
ttttgtttaagaaataaaacaggagttacttaccttctagatccaggacccaagaggttaaaggatctacagagcatgctatatggaacatgcctcaatgctaaagctgactagaagcgctaatacactgacaacttattcacaccgatacattgacaatctgggggtagagatatgcatgaatgattctggtcagcccaggctggggccgaccatcatgtactcattgcttgtgctatggctttgacactataatcacggttctaatcgcatgctgagaacagtatgtactcacgcttgcaagaacaactcgtttgactgatacatagccatggattccggcatccaacatctacgactgatgcctgttaacagacccacaaagaacttacctggcatacgcttacacacttgaaacagagcatcattcacctgg

SEQ ID NO: 432173 - DNA, 493 bp, Oryza sativa
gtgaaccctccgatctttcagcatgttattcttgagggggctggttttgcattcttcactacctatgcactgttagcgcttttctgggccgagatactttaccaagcacgtggaataatgactgatcgacttcgatcaggtttctacatcattaattgtgttgtttatgcattgcaggtaaagcatgatctttctatttactaagtctagtgctaactcactttgtataaatttttcatgcattgtcggtgtctgtttgctgaacggcattaacatttttaatttctttgtatatggtgctattccacattattagaggcctttcttttaagaaaagacattattagaagccaattggaattgtagaagaattcattactttggcatagcgagaaaaaaatatttctgatatttaaaactctaatgtcaaaatatagatgcttactaactcaaatataaagtagttagcagcagatcaagatagtgcacagag

SEQ ID NO: 432174 - DNA, 369 bp, Oryza sativa
tttggttaataaaaatggcaggagacacttaaactctacatggagttccctgggatgcaaaggctctactgagaaatccaccagtaagcaaagggaacgtaagcgcgccggaggcccgctgataacctggatactaatacggaacaacgcactgacaacctgggtgctgagaatggcaaaaatatgtctagagagcctggaatatggcggaccaagcagatgggatttggctgagctacggctgtgacagaataatcaccgatctaacggcgaactgagcacaccatgaacggccacatgcgacgacacaccgttagactgagaaactgcagggtcgcaggctctgaacatgaacgactctggggtgtt

SEQ ID NO: 432175 - DNA, 425 bp, Oryza sativa
cttgtgttccatgatggcctcatatttgcctggcggggggttattgaaataaaaaacttgtggaataccacaaaaaggagaaaacagagatgtgggtcgcctctgcatccagaatatatgctttctcagcttagtcataaagacatggactgtgaaactcctggagaatcacatggcaagaaacggtcaaatgagtgctcaaaagaaaaggttgttgatgtgcaagaacttgtggatgagctaattgtatttgagcaccttgactatggtaaggatacagtgtttccaaccagacctttgaaatgccatgcatctactagtagtgtgcaaattcctggtgccatcgagaaaaccttttgtcccactgatttgaaactatgtaatgacaaagaatcagtcggtgcatgttggtagtgccattggca

SEQ ID NO: 432176 - DNA, 381 bp, Oryza sativa
attgcttataccccaatcaacaaaagtccaattggggggagtgaactcaatggacatgattcgatcagtgccatgagtttccttgacccggctggtggtctggcacatcagtcctttatcactgatgatgctctggatcaagtattctctcctgtattgatggaatcttcgttgttccatgatgcagatgaggatctacttgcacccttgtcagagactgacgcagcattaatggaatattaagcttcacatgtgcactatgtaatattttgaccactgcagacgcagcctggaggttattgtggcttatgttcgtcttattgactattcggctagctgcttgcgagttgcaaccatgttgagatacagatggcttatcag

SEQ ID NO: 432177 - DNA, 343 bp, Oryza sativa
ttttgtttttcttttttgtttggttttttttttttttttttttttttttttttttttttttttttttttttttttttttttttctttttttttttcttttttaaaaaaaaggggtttaggggtacccctattggcgttgaacaaaacccccgcccgaaactataaccacgggcctgtatccgggcagaggccacagagatggctagggcgggttgttctacaaaatagggggcttcaggggcacaaagttgccctgggggaagcctaaatacccttacaaagccaaacaaccattgatgccatggcgttaaattgaacacccgggcgtccataagggcgagac

SEQ ID NO: 432178 - DNA, 320 bp, Oryza sativa
cttatactgcaatgctgcatccactgagacattgagcggcgggtttaattaaaaaaaggcgttggtcaaccacaataaaaaaaaaaactaacaacagcttaattttactatctacttacatctaatattattgatactcaaaaaaattaacggccgtccccttaaggggatccaattttacttcccctgctctccatcgtaaaccttcttttatagcgtcaccaaaataaaactcacttgccctccgttcacaacttatctacctggaaaacccttggcgtaccccaactaaatcctcttttcttaaactccccttttcc

SEQ ID NO: 432179 - DNA, 303 bp, Oryza sativa
cccccaaaaaaaaaattcaatttttttcagaggccgggcgggccaattcaaaatggcaaacctaacaaaggggaaaaaaagaaaacaccccccctggaaaccattccacacacttaaaggcccctttaggggggggaaaaaaagggaagcccccgcgatttttgaacaaagggggggaaaaaacagggcccccacactttactttttatccagggaaaaaaagatttgaatccgaagccgggccggggggtcaaaaaatccggggctatgccaaaacccaaaggcgtttcacgggcccccaaa

SEQ ID NO: 432180 - DNA, 377 bp, Oryza sativa
gtgttatttatgccgtactaaagaagcctctggcggcgggtattggttacaacaaccggaaggctcaaaaggaggccatcaccattaagacggctaagaatgacaagacgacgaacaagaggcacgaggaagatggcagtgtatgcaattggggtgtgtcggttgatacagacaaagaacctggtgctgtgatcctagaggactcacatgagcatcaggggattttgggggacagagagagggcaccggatgttggaatagctcctgaaagccatgacaacctaaccggcgactgacacagagctgcatataggtagctatgactagatagggattggctgcttgttgagaaaccaaaaatttgtgcaataccctgc

SEQ ID NO: 432181 - DNA, 472 bp, Oryza sativa
  unsure (1)..(472): unsure at all n locations
gccgccctttttttttttttttttttttttttttttggtttttttttttttttttttttttttttttttttttttttttttttttttttttttttttttttttttttttttttttaaaaagaaaaaaaaattttcccaattaaaccccccccaaaaaaacctgggtcaaggaccccccgggttttaaaggaacactaaaaagggggccccccccaaaattttttaaaaaaaaggccccaaggcattttaattttggaaaaaaaagggaaaaggggttttaaaaaccccgggggccccccccacgggggaaaaaaaaaaatcccaaaaaacccccctaaaaggttttcccccctttccaaaaaaaaaaaaaggcccccaaaaaacctttaaaaaaagggccgggcccaaccaaaatnnncggcttgccctgggggcaaaatttttggggaaaaagggcccccctaaaaggggg

SEQ ID NO: 432182 - DNA, 94 bp, Oryza sativa
tctttctctctccactccactctcgcgttcttgtggagtttttctccactccgggaaggaaggagtgggtgggtaggtgagtggagtggagcgt

SEQ ID NO: 432183 - DNA, 425 bp, Oryza sativa
tttgtttgtagtggaggggctccaatatttcattcattccagaggtggcataaccgcataagctacagcagtgcacaaaggtctcgatcacaatacatacacgactacagcagtgcacaagggtctcgatcacaatacagacacggccagaacgttgcagtgcaggataaggtaacaatagaactagatattgttcgttgtcagatgattcgtttccccagttcagcttggtgaaaaaacgaaaacggtcgcagtgggtgaaaagaattctagtgcttgaagacgatcagcacggcagtgcagttgtccttgcaacgcctctcacgaacagcttccttcacgagccgccgcactgccagagtcgctgacgaggtctccttcaattgattctgcacaaattcaacagcatcacctggtccaaatac

SEQ ID NO: 432184 - DNA, 492 bp, Oryza sativa
aaattttaaaaatatttgaaaaatatcacatgtgggtaaggtgatattagacaatcatacaaaatatcaagatgaaactcctctccatctatgagataggaaatcgagaaacagtgaaaaacaaaataacaaaaaaacaggtatagtgtttcttcattgccattgttaattttatatctcacaaacgaagtctgaatttgttgttaaaaattttgtatggttgtctaattacatcttccctacatttgtgattttccttatatattttctgaacttccatgcaaaagtttccagctaagttgtaggttccactacatattttcccatatctccattactcttctgcaatatccaattcgtgtggaaaagttggcctgcacatttaccatagacctctgctttacagtcacctctgacccaatatagtgtttatggcccagataagaataatatctggccattctactatattggctgaaaattgtattgcaa

SEQ ID NO: 432185 - DNA, 260 bp, Oryza sativa
tttgttttctaatcatattgagagtattttcacgatgtattcatgcattacaaataatcgtgcgaataaacaaatatgagcaaatagttagagaagctgacagcctgtctaaccactatagtaaccaaatacgaacacgagcagttaagcaacaactcggcacgcgtaaaccgccacaaacgacggcgtagccaccggccccgtacccggcgatgccgtacctgactgcgtcggagtcaacgggctttacgagaatggtg

SEQ ID NO: 432186 - DNA, 133 bp, Oryza sativa
ctctagccatggcgagagcggcagtggctcggcagggcttctttacgccggcgttggaggaggcgccaccgccttcctcacccaggccgtggcggtgatctagtccgacgaccaatccgtggtcgtggaagct

SEQ ID NO: 432187 - DNA, 148 bp, Oryza sativa
ttttgttttttttttttttttttttttttttttttttttttttttttttatttttttttataaattgttgcttaagccagtttcaggtcacctgatggcaagctcacaagaacagacaggcacgcacacacatacaaaactataaaac

SEQ ID NO: 432188 - DNA, 352 bp, Oryza sativa
agaatatcgatcacaagctctaatgcttcaattcttagacgattacacagagataccaccagtaatttgttttctttggaagaaaatactactagtacaagataattgagcaaaataaatacctactgggcgccgtcctcggggaagcgcgtgtcgaccccgccgtggccgtgctgccccgcaacgccggaagccgcagccgcggcgccgcccccgccgccgggacccgcggcggaggcacctccggcgccgtgctggagctcgatgacgagccagcggacggccttgctcatctgctcgaggcggacggcgctgatgggcttgatgccgggggcggccagcgccgcggagg

SEQ ID NO: 432189 - DNA, 172 bp, Oryza sativa
gttgtgtgtgtgaatctaggcggcggaggcggtggagcgtgtcttggagaagccgtcggctgcgaggggagatggaggctacggtggacgagctgagcgaggcgtaccaggagttcgtggtggcggcggcggcggtggtggaggcgcgggggcagtcggggggagagaagat

SEQ ID NO: 432190 - DNA, 384 bp, Oryza sativa
agtgccaaccgtgcctgccatgccttgttctgggtattacgcacggcggctttacggattcctacatgccaagtgcggtgacagtgcaaaaagaaatctactaacttctgcgtctgtgcagcggacattgatgaaccaagtgtttgggtttgttatcactggaccccctaccatttaccaaggagtaatattaaaattccaagggtaagtggtaccttgtcgctcaattaacacccgggtgtgtaggtactttttgtactgcggccggcacccgcttaaaaagactagggaccatgaccttgggatgggcccggaaccgttttaccaagtgtgagtgcagttgcctcattagataaatcaaagacaccatgttgaatgttcttg

SEQ ID NO: 432191 - DNA, 101 bp, Oryza sativa
tttgggttttttttttttttttgtttttttttttttttttttttttttttttttttttttatattattttaatatgcaaaataattaaaacaaaaataaat

SEQ ID NO: 432192 - DNA, 345 bp, Oryza sativa
gggaaggggcaagggtccttttattccaaaaggcaaacaaaattttgaagccccccgaaaatgtttcccggaacaattaatcaaccaagtggggcatcatcaggggaatttttaccccaccgacatgggacgtttcactaatccgttgccaatcccttaggaacacgccaggctaaaaaaacccctgcaacttttcaaacgaaaaaataggccaagccaccccaaaatttaaaccaaattcaaaaacccttgtaagaacgcataaatagccgccctactacgggaacgagagagccaattagcatccggccggttataccccacacactgggggggaggacgggc

SEQ ID NO: 432193 - DNA, 384 bp, Oryza sativa
ttttgttttttttttttttttttttttttgagataatgtacaagaaggagccttgaggattgattttgggagctattgggttgaaaaggacctcccagaaagttgttattctcccaaaccccttataactaaatggaaggtgcggtcccactgaggacgacctgtcttttgagcataccctataggccggctggttaagaacaaactaaacagagcgtgcgaagacaaaaactatcattgacccggataatattgctcgcaaagaaactataatgaagggggtggggggatggtgcctaagatggtcgtttagaaccactaaatctcgttgaggcacccggtggcaggggccttgttattcttgcagacggccatggccttgaa

SEQ ID NO: 432194 - DNA, 174 bp, Oryza sativa
agatgagtagagagggagccaaagaaagctctcggggggcttttattaaactccatctcgtgcgtgtcttcttcttcttcctctcctcctcctcctcgcttggaccccggattttttgcaagggggtcaggaggcgggaggagatggtccggcctccccccctccctcttctct

SEQ ID NO: 432195 - DNA, 437 bp, Oryza sativa
ttggggtttttttttttttttgggctgttctttgtttttgttctttttttattatcttatttttattaaagcatgttgttttattcttaaaacaagcaagaccagacgagcaaaacccaacatacgggcccgcagccaaaaggacaaaaaatccataggggagaaaaacgaaataatgaacaaggcgcaggaacggacccatgaaagcaagaccaaaaaccaagctgggctccaacggcttggcaccccaggcgccggggataccattatcatgcgaaccaggtgccgaaggaatgccgacccaggagcatgcgaaagtgagcccgagaacagcgctccaagaacggcccccaccccgggacaccatgctgggtcacactgaggctgggcaacctgaagccaccatgccggaaatgtgcaagccagtaggccctcaa

SEQ ID NO: 432196 - DNA, 392 bp, Oryza sativa
tttttgttttttttttttttaggcatcaatggattcagcaattcagctgatgcatcctctcttttttttttttaggtttctcgttttttggttcccccactccaactacatttgggacatgaggcttaggtttctcaatggcctatgtgccaataccaaggcccaaagtaaacgaaccacggagctttccatcaaaaagaaaaataaaggggaaaaaaaagcccggagaaccacctcaagaacaagctaatatacaatggggaccctcatcatatcctccaatggtgatcataagaatttctaccatctgtcggattataacggtcttgctttccatgatgatgactccattggctcgatgcctcagggtttagactttgatgacctgaatt

SEQ ID NO: 432197 - DNA, 246 bp, Oryza sativa
gaaagctgaacccctgggttgaccaaaccataatacctccatctacccacccctacggatttttttcccacaaatccacaacacacccacgcggtcgttttaaaaaacaaaatccccccctccaccccacccacaatacaccaacttaaaccatcacccaaaccagcgcatcaacacatccacaaccaaactacaaccccaaacctttaaaaccctaaaatccacgcccatcacagtcacaacccc

SEQ ID NO: 432198 - DNA, 420 bp, Oryza sativa
ggccaatctgagctgtaggtataagcagaagcaagagtaagcaactacatggacttatatacaatctatgaagctgctgaggaattctttcagcacaacaaaattcaaggcaagtgctcatatgaaagaaattgcttcctacagatttgctactggcattgaaatgccatgctctgaacaacaaattgacagatgctccacagaatctgtgacaatgtcctccaacacttcactggcaatctgctcagggatctcatctgtttccattggcaatagcttaatccaacccttcccttccacctcctcctgcataattctttccaagattattccagcattgtcgtccttgtttgccgcaaagctcccatctccataaagccaatcgctcacgatgttccatacttcttcacccaaggtttc

SEQ ID NO: 432199 - DNA, 410 bp, Oryza sativa
gtacgatgaaaatgggaagagctctccaaggagatgagcaaaatcaaaatctgtcccagtgtcttcatctatatttgacaacgtagcagtgaatgctcaatctgcaaattctgaagggactccgaaggtgtttacaaagtcaggtagagcaaaattatctttcacggggaaaatatcaagttttttcttcccaggcaataaaaggccaacaaaagagaaaacttccctctcatctgatagctcaggcgagatatttggatgtatcgggcacatggtgccgcagtctgatcacaatcttggtcctgatgaacaaatggctttttgcaaggatgaagctgataattccaccaatcatgctccctgttctacaaaagatgctggttccatagaaagacctgtatcttctgact

SEQ ID NO: 432200 - DNA, 370 bp, Oryza sativa
gggaaaaagcccaaacccctttgggtttatttaatcatcaattgaaatatttttacatttgtctcccggaattttgggaaaaacgacataccaaatcaatcactgggaagttttaaacttcaacaaagggaaacaacttaaaggggaaagggaataaacctgacaatgtaatgcagggctggccgttgggggaaaaccattaataatggccccgctcggccatgatgaaggaacaaatggggggggcctacaaaaaataaacatgcttgtttcgggggttgaatataagcgacgactttataaaggaataccttggccttcttagcattaggtttgcaactttttggacactttttggttggggggggat

SEQ ID NO: 432201 - DNA, 366 bp, Oryza sativa
aaaaattgggggatcccatcaaaaaagcatttactactacttggccatttgatcattaagatcgaacaaacccccaatacaataaaaatcctaataataataaggaccgccttaaaactcaaatttaatttaatgggccccacaccaaactttacctaagcattattaatcaagctaccatttattactggatcacaagctaaagaagccttttgttttacgcgccggggccggaaaattgatcggccggggggagctttcgccggggagcgcttcgggggggggggggccgccgccgcccttcaaaaaggggttgccgaaaatgtgccccgccctcgggttcggcccgcgggagaagacccaggg

SEQ ID NO: 432202 - DNA, 363 bp, Oryza sativa
ttggttttttttttttttttttttttttttttttttttttttttttttttttttttttttttttttttgttctttgtttctgttcttttgcgctgtttttttttcttcagagagaaacggaaacatgtgaaaacagaaggaaaaaggggccggccctttgcgccgggttaagcccccacggaaaggagaaaagggcgggggagaagtccttgcacatgggggggccaaaaaacccggggggctgggccctttttgggccggggggggggggtttaacgcacacccccccgggggggaccccccccgggggggcccaaaaggcggggggggcccccctgtccccgaccgggggaaaaccccccc

SEQ ID NO: 432203 - DNA, 315 bp, Oryza sativa
gggaaaaaaaaaacgaaaaaaattttgagggggggaaaatttcccataaacggccatttatccccccgggggtaaattagtatagaaaaggaattaaaacctccccggccggaaagggccatttttaaagcatggtggggcccttcttgggggggccccccggggggggggggccacccccctttaagggggcaaagggaaggttggggtcacaaacggggggaaaaccggcaacctggggggggggggcccaaggactccaggggggcaccaagttggagcccaaggtccggatccactggggggggccaacaa

SEQ ID NO: 432204 - DNA, 342 bp, Oryza sativa
tgggttttttacaagaaggggcgaaacctccaccttaaaaatttgagtaccatggaaagtcccgatatatcacccaccccgtaagacaccaaaactgaaacgtgccctcatttctcgaattgaaagaaatccccttggaagattaattaaaaagggaaagtccggttttaacaacacattgaaacagcttggatataaacactaaacgcaccgttcatgcagatgatccttaacaaatatggagaatcaaaaaaccatccctagccaaccgatacagaactacggtgtggaaagcagcttacaaatgcaaacctatcaccactttcttggaggcaacccctc

SEQ ID NO: 432205 - DNA, 376 bp, Oryza sativa
agagaaaataattaaaagggtcatctgaaaataatctggacagggacccaggagttacatgaaccctttttatggggatgctttttaacaaatattatggtacattacccaccattggttccccaaaaatcaaaatttgaaagaaaaaaggggagagaactttttaatcgggtcatacccaatcagattcattcatcccccgaatcctttgaatgccaaatggccaatacccccttacctactggggaggctgatctacccgcacgacgaggcccaattaaatccacggggatcaccgggggccggtgccggaggaggggtcggaggaacaatcccatttggccggggggggctccaccttttgcctggggaagct

SEQ ID NO: 432206 - DNA, 183 bp, Oryza sativa
ttgtgtttttttaaccccccccgccggccttacccttttagggtggagataatttattttattttgtatttacatatcctatagccgggtttgcctataaactgtatgaaacgatcaattaggattgccccaagttggtctatattaaactcaaatttggtaattttgcaaaatcaaatacaa

SEQ ID NO: 432207 - DNA, 486 bp, Oryza sativa
acactcctcatccccaaccaaatctcatcaccatcgctggcatcaatcgacacccatgggcgtcgccgactccgactccgactcccccgccgccgccgccgctcgccaccacgacgaccccaccctccccgcattcgcctccttctcgctctccctctccctccgcacccccgcctccccctccccggcggcgctcgcctccgtcccttccaccatccacctccccacccaaatctccacgctcgccgtctgcctccacccctccgcctccgcctccgcgtcaccctcctcccgccgacgcctcaacgccgccgccgccgcgtcgtcgctcctcgccccgctcccggcctccacgccgggcctctcccgctccttcccttcgggcgcgcccgcggcggccgggcggcgccgcacgctcgtgtggttccgcgccgacctccgcctccacgaccacgagcccctccacgccgccgtcggggcgtcgcc

SEQ ID NO: 432208 - DNA, 416 bp, Oryza sativa
atcaataaattgcatgatctgcactttttatcagtaaaatcaactacaaaaatcacaaatgccaacaacacttttgcaggaagacagagcatgtgcaaccagtgttattgttaatggaaggagacttctcgtctgtatcacaagaccattctgttgtagcaacaagagactcgctgatcattaataaataaacaactcccaacaccagaattgtgacctaaaagaccaagtagcaacccgcggcaatgcttcttccagccgttcttgttttcccagttgaaagcctatgtgttgagaaccttggaatccttttcgcgcacctgcaatcaggacaacaatgaataagcaaattaagctggaggatgcattacaacaaaggccatggagttaaacaggttatacaataaagcagtagt

SEQ ID NO: 432209 - DNA, 487 bp, Oryza sativa
ctttttgtaggtaacaagcctgccgccaggcctgggttgcagtctttgccgacaatgccggtgccaccatccaccaccaccggattggaaccgtgcctgggcaccaccaccttcgtgccgcctttgtgaaccaatttcttcacattctttgcagctcatgaatgcctcatttcaaaacaaaaaaaacattatctattataccataagagctcccctttagcaattggttatatcttcagtaatgacatttgaacatggacagatagaggtacaaattatatgccctaagagcatgcaattactaaatttggtatggagtagggcaagtatatatatataaattagttgtacggagtagaacaggtatataatggaattcgtgtttaccatgcaaatttgaattggtgatgaaatttcataggttttatatgtgcgaggttatcactgctgctgctgatgttatagtaaatgaggaccaccttgttat

SEQ ID NO: 432210 - DNA, 97 bp, Oryza sativa
ctctcctttcttcgcgattctccacgccagagggggaggggtggttatgagcacgcggcggggtggcaacctagcacggcggggtgacaaccatgat

SEQ ID NO: 432211 - DNA, 447 bp, Oryza sativa
tttgttttgtttggtaggtgttaaagaatactttctccaagcacaaccctctttatattcctttacaaccccttctgttggtttgcttcgaaaactgtatgaaacgagcacttgatttgccccaagttgggcgccacaaaactcaaatatggcaaatgtacaaaatcaaatacaaacgcagtacacatcaaatcaatcgtacattggggatttagggttgttagtgcatcatctggccgtcgggcgtcggatcgataggaaggccatcggcacggtcactcgatttttccttggctttgactggattctttatgacgaaattgacgtattggtagcctccactggtagggccggccgccgctgcgtcggccttgtttgttggggattcctttgccgcggcggatgcctcggccttacctgccgcggatttctcagccatggcgggtg

SEQ ID NO: 432212 - DNA, 451 bp, Oryza sativa
tgtggctaagaaatccctagccggtaaggctggcagacttgatacgggtaagggatgcgccgttaccaaggctgacgcagccacggtggctaagaaatctccagccgataagacgggtaaggaatctgtcgttgccaaggccgacacggctacggtgacaaagaaatccacagctggcaagaccggcaagaaggttgcggcaaaggaatcccccgcatcccacaagaccagcatggaggccgcaacaaagaaatccactgctaacaagaccggcacggagaccgcagcaaaggaatccacggtatccggcaagaccgacacagaaaccgcggcaaaagaatctacagcgcccggcaagaccgacacgacggccgcggtcaaggaatctacagtcggcaaaggcgatgcacccgccatggctgaaaaatccgcggcaggtaaggccgaggca

SEQ ID NO: 432213 - DNA, 427 bp, Oryza sativa
ctgctacaggggtctccaccttgcattgcagtgcactgagcacctcatctacacattctctaaccctcaaggaaaagaaaacacaaattatgcactcttggctctcatatagttctcctgtggcactcttagctggttatgcatatttgcttctctaatataatacagagccttatttgcaactagaaaataaaatctatcaagttgactatccaattatacaaacagaaaaaatatagttttgatccaaatatcttctacaaagctactgcaataatgctcagaaacaaggctataaaaaggagataagaaagcttgccactgccttgtatggcttgcacaaggcttccctagacggcagtcacggcaccttactccatggagcactgcaagtgtgtgggataagtggttaaatgcctcatcaaat

SEQ ID NO: 432214 - DNA, 363 bp, Oryza sativa
atataataataaaatataaatgaaaaaaaaaaaaaaaaaaaaaaaaaaaaaaaaaaaaaaaaaaaaaaagaaaaaaaaaaaaaaaaaaagcatataaaattgtctaaaaaaaaacaaaaacaaaaaagcaacaagaaaaggaaggggaccaaaaaaaacatccaattatacaaacagaaaaaagataggttggagccaaataacttctacaaaggtactgcaaaaatgctaagaaacaaggctataaaaaggagataagaaagcttgaaactgccttgaatgagttgcacaaggcttccctagacggcagtcacggaacccaactcgaaggagcactgaaagggggtgggataaaagaggtaa

SEQ ID NO: 432215 - DNA, 148 bp, Oryza sativa
ccgacaccgagcccctcctcctcgacctcgccgcaaatcctccgccgctcctccgccgctagggcataaccgcccgcctctcgccggcatccgcatctcccggggaagggaagggaagggaagggaaggaaggaaggtgagggcggat

SEQ ID NO: 432216 - DNA, 154 bp, Oryza sativa
tttgtgttttttttttttttggggttttttctttttttttttttttttttttttttttttttttttttttttttttttttttttttttttttttttccccggaaacccaacttttttttttttttcgggaaatttttggggcccccgggggccc

SEQ ID NO: 432217 - DNA, 510 bp, Oryza sativa
caataatctgccgaataatgataataagcccgcatgcacgttttaataaaaaaaaccgtcccctaaaaacccccccaaaaaaaacaaaaaaaacaacaaccaaacccccaacacataccaccccaccccaccccccaaccccacacgggcccccccctctagaggacccaggccaccccccccccccacgccacccccaacccctcccaaggggccccccaacaccaatcccccgcccccccttaaccaccccccgccccggaaaaccccggccgcccccccaccaacacccccggcccccccacccccctttccccaccgggccaacccccaaaaaggccccccccaccccccctccccaccaagtcccccccccccaatgcccacaggaccccccccccccccccccccccatacccccctccctctcccccccccccccccactcaccccaccccccccacccctccccctcccccccccctccccccccccccacaccccctcccc

SEQ ID NO: 432218 - DNA, 247 bp, Oryza sativa
ccataactataaccgaagcttccccatctcgcgtgaactggtgagcattggaagaacaaggcgccgtgccggatttagccccgcccccctctccggggtatcccccctcctctcctctgggtttgattggagtgaggtgaatcggtgaggttgtggctcggttggcgtccggatcacacggctgcacatgcctcttctcttcttaactcctctttttctgatcttcctcgtgggggaatctacttac

SEQ ID NO: 432219 - DNA, 364 bp, Oryza sativa
ttggttttttttttttttttggtttttttttttttttttttttttttttttttttttttgtatttttttttgtgatttattaatgctaatcctgaggcagaatggaaacaacaaaaagcaaacaacaaagactatactatgagaacgaagaacgcaaaacaagaagggacacaaagggaggcagaaacgccaggaaaagggaacaggaaacctcgaaaagaaaaaggcatcccgcagccattgctggaccttggaacgtcaaaggggaaaaaggcgcctcctactgggaaaacgggcacggggatgggaaaccaccaaaagggggcgccaaggggaacccccaattacgggcaccgaaacaagg

SEQ ID NO: 432220 - DNA, 349 bp, Oryza sativa
aaacacaacgacgggtcaaaccctttttttattcgccggggaaaaacctttcaaaaaaaaaaaagggggggagagaaaagacatgggggcccactaatcctagagggccttaaaaaaaaaaaaaagttggtggggggggggtagcaaaatcatcccccctccccctttttatagggggtttagatcctcgggaaaaaccaatttaccaacatacaaaaagggggccaccccgtgacaaagggtcataccctttatttattggaggccccacacccggaaaaaacttttgggtaattaaattcaactcgaaaatttttatgcaatattgtaagcgggtgggaaaagcctt

SEQ ID NO: 432221 - DNA, 432 bp, Oryza sativa
ttggtttttttttttttttttttttttttttttttttttttttttttttttttttttttttttttttaggaaccaaggccaactttgctccgtgcttttgaaaaaacgggtgcaaccagtgctattgttaatgaaggggaattttttttttgtatcacaagaccattctgttgtagcaacaagagactcgctgatcattaatgaatgaacaactcccaacaccataattgtgacctaaaagaccaagtagcaacccgcggcaatgcttcttccagccgttcttgttttcccagttgaaagcctatgtgttgagaaccttggaatccttttcgcgcacctgccttcaggacaacaatgaataagcaaattaagctggaggatgcattacaacaaaggccatggagttaaacaggttatacaataaagcagtag

SEQ ID NO: 432222 - DNA, 418 bp, Oryza sativa
ttttgtttttttttttttttttttttttttttttttttttttttttttttttttttttattgcagtttagtattggaccaatccggccttctgccctcaaacaaacaacagaaaggggaaagcaaacatggccaggggtacagacagcaacaaggagcaaaaaaggggggaagggcataacaagacacaactaaaaaaacaaaaaccacaaaaaacagcagaggtgaaagaaggcaccaagaatcccgaaggccgccggcccccgggaaccacgattgattaacctaacccttaaccccactcggccgtactggtacgcgatgccggggccccacgttgcaccccggggggggggggcaacaaacaacaaacatgagccgaacgcaaaacggccggagaacggacaatggagggcgga

SEQ ID NO: 432223 - DNA, 368 bp, Oryza sativa
ttttgtttttaaagatccacaacatctcaaatatctttaactcatactcatgtttaatatgtccctaacaaaaggaacacactaaacactttcatccaagcacatgatatctcaacatagggagttctaagttctaagttttagttaggatcatacaacttataacttaaatacacatggccgattggctgaatagatagggtcgcggaagcatcttctacccaaaagaactttcatgccaccgacttggattgacccttataagaaccatcctggaagaaagaaacttccccaaccaaatcatccttcacaagagtgaactcacctgcaaccaaattttggtctttcactccttggttaaatacaaa

SEQ ID NO: 432224 - DNA, 511 bp, Oryza sativa
gcggaagaaccgaggtaccccgcctcggattcgcggggagcggaggcgccatctccggcgccggcgagataagtcctcgactccgtcgcaatccgccaatctccgggaacgtgaccgcgtcaaatcggaacaccgtcgcgctctggacgccgctgcttcgcctttgctcgtcgcccggcttccatagttcgttacaggctgagccacttcgtcacgagcttcatcaacacctgtagatcaagaatcccgaaggaatcgacgcgaggtggaccacagtgggagatcctcttcttcttccccaatcccagccgccgacgccattcctttctttctccttctctgtagaagcctggggatacgccgtcgacgacgaccgtagcagccgcgctgtcgccgaaccagtacaccggcgccaagacttcgctgagctgcgtttgcttcttgacgattcgcagcccagtctcgaggaggcctactttgtagctgagcaaggaggggaagagcaagaaat

SEQ ID NO: 432225 - DNA, 410 bp, Oryza sativa
ttttgttttttttttttttttttttttttttttttttttttttttttttttttttttttttttttttttataataaatataatataatttagaaaaaaaaaaaaaaaaaaaaaaaaaaaaaaaaaaaaaaaaaaaaaaaaaaaaaaaaaaaaaaaaaaaaaaaaaaaaaaaaaacaaaaaaaacaagcccaataaaaaaaaacaaaaaaacaactaaaaaaaaaaaaaaccaaaaagaattaaaaagggaaagcccctttaaagaataaagctgaaaaaaagaaacatttaaaaaaaaaggcccccataaaaaagaaaacaaacttaaaaccaaaactgaaaaaagcaaaaattgggaaaaacaaaaaaggcaaaccaaaaaaaaagaagaaaatgaacccaaagaaaat

SEQ ID NO: 432226 - DNA, 131 bp, Oryza sativa
tgtgttttttaaaaattggggggcaaacctcaaccctattgtgttttccatgtggtttaagcaaactactcacaaatcccggagaacacaagggcaagataattacggaggggggtaacaaacagcatgga

SEQ ID NO: 432227 - DNA, 435 bp, Oryza sativa
ttggtttttttaagaaagcaggcgtatttcacattgtaagaagaaagatatgatcttccaaagaagcagaagaacatacaagaggatgagctcctactatacttacaaggaggcaatagatgatcagagacgtttttcgttattccttaggaaaagtaaaaaaaaatgaaaaaaaaagttttgacttgaaagggctcaatgctaattgagctcattcccaggccaaatacttgtctaatctctatagagtagtataggtttacaagagtagtcatcaccagaaaataacttttggtgggaaactctcttgtactaaaagttactaaccattttgcgttcacactgcacgctatgcaagccattcaatccgaccatctctgctccatggttaccccgggaagctcttccggccgccgttgcggcgccgccttcttg

SEQ ID NO: 432228 - DNA, 210 bp, Oryza sativa
ttttgtgttttttttttttgggtgtttttttttttttttttatggacacttatttccatcatgctttagcactttaaccaaacaagaaaccggaggcaaactgcagtgcaatttagtttgctttttactttcactggggcccaaaaatcttgtgcttgccgtacttgccatgcttgaaatttcttttttacaattgctcaccatgggggc

SEQ ID NO: 432229 - DNA, 444 bp, Oryza sativa
cttttctctcctctcctcttctgcttctcctcccaggtctgtttgcaacaccccaccggcgccagcgacgcgaggcgggatcaggccatggacggcggcggcggcggaggaggaggcgggttctgactgggcggtctccagtggacggcggaggaggcgtcgacgatcgggggcatcgcgacggtgtcgctgctgcactccttcatccccacgcactggctccccttctccatcgtcgcccgcgcccagcggtggccgctctcccgcaccctcctcgtcactgcatttggaggcgtccttcatgttgtttccactgctcttcttgggataactgctgttactatggcaaatactatagcaggcgaggaaacagtgcataaacttgcatcactgttgctgattgttcttgggggaagttatatcctgctgtttgcactgcgaaaa

SEQ ID NO: 432230 - DNA, 476 bp, Oryza sativa
ggccgcccttttttttttttgttttttttgttttttttgttttttttttttttttttttttttttttttttttttttttttttttttttttttttttttttttttttttttttttttttttttttttttttttaaaaaaaaaggggggttttttttttttaaaaaaaatgggggggggccctttttttttttaaaacccccctccaaatggttttttttttggggggggaaatgtttccaattttttcccccccccggggattgggggggaaccccatttttttttttcgggggggccccccgttttttcccccccccccatgggaaaaaaggggcctttttcttggttgggggggggccccttaaggggggggtttttttttgggaacttccaatctggggggctttttgaaacccaagcttccctttttttttggtttgggccccccaaaaaatcccgcctttttgggcccccc

SEQ ID NO: 432231 - DNA, 360 bp, Oryza sativa
ttttgttttttttttttttttgggtttttttttttttttttttttttttttttttttttttttttttttttaaaaaaaaatgggccatcaagggcctttagggggaaaaaaaaaccgaacaaaagggttaaggccgggttaaagggaaaaaccccggccccgggggccgcccccggaaggccggccccggcccccggggggccccccctttccccttggggggccccttgaagagccccgcggaatcccgggaaaaagggggtccccgggggaaaggcgtaatccgcggacactttcccccaaaaggcaaacccggggcctaaaaagtaaaccccggggggcccaaggggggggctaccc

SEQ ID NO: 432232 - DNA, 379 bp, Oryza sativa
gttactattttattaatcagaactatataatattattatgttttatattacaactaaatgccattgatagccaattttttattaaaaaaaaaaaaaaaaaaaaaaaaaaaaaaaaaaaaaaaaaaaaaaaaaaaaaaaaaaaaaaaaaaaaaaaaaaaaaaaggggggccgtttaaaaggatcacaagattaaaaacggttgcatgttaaagaaaaacaattttttataaggccacccaaaattaaaataaattggccgtttatataaacaacttaatgtaatggaaaaatgcctggcggttaaccaaatttaaatcctctggaaaaaccatcccctttcaaaaagttaggcgaaataagcaaaaaaggcccttaactg

SEQ ID NO: 432233 - DNA, 417 bp, Oryza sativa
tttgtttttttttttttttgtggtttttttttttttttttttttttttttttttttttttttttttttttttttttttttttttttttttttttttaccccccccccctaaaatttttgaaaaatggcgaaaaaaaaaggggaactttttttccacgggttaggtgggtttccccagggggggaaaacaggggtttttttggggggaaactgggaaacccccctttggggggaaaaaaaatgcttttgggggtgaaaaaggggaagggaaaggggggccatttttaaaacgctttttttttaaaaattttgggggggaccccttgacccaagggggcaacttttggggggttttttttcccccgcatttggaacccaaaaagtttttcccaaagggaaaagttttcgcccccccccc

SEQ ID NO: 432234 - DNA, 329 bp, Oryza sativa
tttgtttattaataaaatttgcgttacacttgggccataggcaaaaacagttctacacccatggacatatggagaaagagggccatggacaacaaaagcataactggtgtcgccttaaaaccaacatatcataattaacagtacaggtatttgcacaacaatgcgcacctggcctgcgacacgacacactacacagcttgaaagctgacagggaaataaaaccagaccatcaggacggaggttggatcaacatatgccaatagtacctacccacatatattacgacacaatatcaatgattcggccaattgttgaaccaagccatgcta

SEQ ID NO: 432235 - DNA, 349 bp, Oryza sativa
ttggttttttttttttttttttttttttttttttttttttttttttttttttttttttttttttttttttattcagaaaaaacaataaatattaaaaaaaaaaataaacacaaaaaaaaaaaaaaaaaaaaaaaaaaaaaaacaaaggcttagaaaaaaaagaaaaacgggcaagaggggtttatccaaagcgactggctcaacaaaaccacagaggaccaagatccaaaggacccaaagtaatcacactcaaagaagtaggacccgcaaaaactcgcaaccggaatgagaacactgattaatcaatgtccgcacttggagctggctacccggcttcaaatgagcccgg

SEQ ID NO: 432236 - DNA, 406 bp, Oryza sativa
aagtatatctgcttcaggccagaaacgtcgttcaaggaccagtgaagcggagcagggtggttcaagcactagcacacacaatcagcatgcaccagttggtgaggtttcaggccgggcccacactttaaaatctgagaaggactcccggcattctggaccaggtagcaaggaacagttcacggatagcgcagggctgttcaggcaccctacagatatgttcatagttaagatgaagagagatcgaagcccgagcctggggtctccatccagttcaggccgaactggaccgctctccccgaccaacgccgggcggatgggaccggcgccatcacctagaggtgccaggacgcccttccaaagagatccacactcttctcagcattctatgcattcaggtggatggggt

SEQ ID NO: 432237 - DNA, 350 bp, Oryza sativa
cgactagcccaaacgcaccgacctggcctccgaccggaattccgatcgccacccgggggttctgctctcgccggccgaacaacgcgtgctcacgctcgccgccgccggtcgccgcctccaaatcgtcgccagagaatccgcgtcctccccagatgacgctgcgcacgggagaagcaacgccgcctccccaggcgcatgccgaggaggagccggggcgggggaagcgccggcgcgtcgtcgcccgtgagacgaggctgcagcaggaggaggaggaggagggagggcacctcatccgagctggacaccagaccgggctggtcgacgggcacccccgtcaatggataagtttc

SEQ ID NO: 432238 - DNA, 420 bp, Oryza sativa
ttttatttgtgtggagtacgtacgttgcaacgagggtgaatttggacggtggagctgcgtaccctaggtggtatcttgatgacaatgtaatttctttttgcaacttcgatcgatcttttgcgagcgagcatggtgttatcttgttgacgacgtccacctgcaaaagatcgacgtacgtagcagccgtgcactcatctcatcttaattaatgggtccgttaagttggtacgtgttaagttagttggttcataaattctaagcaattcgtggggtttgaaatttggatggcgatgacaaaggcaaaaggcaatatgtatatcaatagagaaaggtcgacagatgggtggtggatattaataaacctatagctaggtatcttatactctgtccggacataattaattgacattttcaaacaac

SEQ ID NO: 432239 - DNA, 392 bp, Oryza sativa
agctttgctaagaattaaacatgtgtaatggaagtgtcaggaattcagaatggtagttggcgcatatggaatggatttgatgactgaaaattgtgtaccctgtgaagaattcattgctggttttaagttttaacttcataccgttatcatttcaaggaaagaaggtcttgcaatcgatcttctgaagagctgagaaaggggtgtctcgaggggaacaaccagaattttggccaagccaaggatagacattgaccccactggaaaaagcacaaagaacattgtatatcgagatgttttattctgaacagattgtctaaggttgattagagagtaccatgttcagattcttctgaaggcccagttctttatattattcattggactgttgagct

SEQ ID NO: 432240 - DNA, 336 bp, Oryza sativa
catttgcaagcgccccgaatagccggcgccggaggcggaggcggaggaggcggagctcaacttgatcttactccgcaagatggggatggggtgcacaaatatgctgtcgcagtcgcagctctcgaagataaagatgttggcgtcgcggcccgatatctgcaagaggaacagccacctgaagctctgttacaacctccgcaatcgcaatgtcttcgtccccaacaccaacaagccacagctaggccccctccacaccaacaagccacagctaggctccctccagtacaagaaagggaaggaacatgtgtatgatgtgtcagggcagaccccaacatg

SEQ ID NO: 432241 - DNA, 392 bp, Oryza sativa
aatttggcgtgtttcatatgacctaagtagcaaaaagataggcattagtacaattagacatggcttgtgggtaataaggcttagctatatggtcattaacttagctataaagttgttacttgaccagatcagctatctggcagaactaagacttacaactggcacatcacttcagagaacatacttgcttagacctgcaacttgcatgtaccatattcttcagatacgttggttgcccatataaaatggggtcttaattcctttacgtgcaataattcataaagtctgaattcatcttcaacagtgctttggtcacaaccaattgaaagctgtagatatttcttaccacacacattccttatggtagggttcaaataaaataaatttactct

SEQ ID NO: 432242 - DNA, 321 bp, Oryza sativa
cctgttcgtaactaatcatgcgatcacactggaggggcctaactttactcacggcggcgcttggcctctagagcttccatccggacgacaactaccacgccaccgtcagctgccacgacatggaggacgtcggggtcaacaccagcgcggtcgactttctgaacccgtcgtgcaagaggctcgaccacgttctcctgagcagcatcaagaaaagcgtatgccacaacaacgacaacaaccatgacgtcgtgatggtgcatgtgaggaccaggatcgcgagggcgttcccggcaacgatatctgtgatgggcaagggcaggc

SEQ ID NO: 432243 - DNA, 399 bp, Oryza sativa
gacttggaggagggggttagggtttccatcggccgcgacccgactctggatcgagaggaagaagaggacaagtatgacagagaggcatttggtagagaggatgcttttgaccgtgtatacatgaatgaaatcatggatgatggcattaacatgagcatcaacactgtggtgcctgacatccttgatgattccgttgaggagatccaccgcttctcaagggatcccagagcagatatgggtgcggcatccgcaagactcaaggagtacgatagttcagctaaaggtggcacgtgttctctagctcagccaaatgaattcccaagtggcaggatacaagcaatgaaaaccgatgatgctaacgtgaaacctatactgaagcggaaggaggagcaaggcgat

SEQ ID NO: 432244 - DNA, 344 bp, Oryza sativa
attttatcatactggaagaaatgctcctgctgggggggaaaatacggtcaatccagacattccaattccatgtcatgaggacttgtcagctgttgaagtggtaactgaggagcagttgccacctgctgaaataacagatgttattttacctcaaaaggtacatagctcctcaagcactcctgaagttgcaagatcagatcaactaaaggacgcagcggcttcacaaacccctaaatgttcaattcaagctgtgccatattcaacacctatatcttcaccacaaccactaggccgtcagataatagcagaagaagaacgggctcaattgttgttcggttcatttg

SEQ ID NO: 432245 - DNA, 336 bp, Oryza sativa
caaagcccacagatgtagatacaaatagggtttgcttagataacaaagggggactcaggccctgacttgataaatctagcgaacgatgccgtcgtatgcccagctgggcgggttctcatacagcttgggttccgatctctctcttcccctttaagtgcacagatagcatcgtcccttgttttgagtactgatcaactgaaagtcaaagactatgaccctttacgcgcacagggggctcagatccaatactgccatctgtagaatcacttactctatcacattttatccggcattgcaaaccctgagatcgttgggttgtacatcgtggcctgcgag

SEQ ID NO: 432246 - DNA, 310 bp, Oryza sativa
aacacacccgaacgagcgaacgaggcggcgccgcggcgcttcttcttcctcttcctcgataacaaacgcagccaacctccgctggagcccgcccgacctccgcctgtcctaccttctccggcacaggaaccgaccgccagccgtcgaccggtcggagggctccgcctcgtccagatctggccgctgcttccctcggcggctcgtcggatcctgctgaatctcgcgtcggcgtcggcgtcagcggagggaactcaggaggggatcggtgcttcgcgtattgggggggcctcgatggtcttccttcccaacg

SEQ ID NO: 432247 - DNA, 342 bp, Oryza sativa
ctcttaccatactttgccgactagaactgctggtggggaagttgcagtgcatctgggctcctaaatgacataggaagtggtcaaagaggttatcatagtctcaactcccgaatcatctaaatcgacaagcggcgatttcccggtgaatcctcttgaaaatgtggatgtcagcagcgcgccatctgacctgaagaggaaggagaagtcagtgccacattacctgagagcatccactggttcttgccatgacagctgcaaatttggggcacatcattcccctgaacccaagaagtactggcctgttcgtcgcaagcgacatcatgaccgtgccaatgccgggtg

SEQ ID NO: 432248 - DNA, 108 bp, Oryza sativa
ccctctcatccgccctttttttttatgctggacgggactagattacaccacccgggggtaggtaaacctaaacaaaaaaaacacaaaaaactacaaaaaataaagccc

SEQ ID NO: 432249 - DNA, 432 bp, Oryza sativa
caagttgtggcgtcgccagagattgtggcgagagaaataatcgccacagctgtggcggaaataagcatgcaaatgaactagcaaaaagtgtggctgccacaactcacgtattaaccaaacatcagtcaaactgtcgtggcagccgcatgtttggcgaggcaatgtgtggcagggatccaaacaccccctcagtaacaaccatgtacattgcaagctgcacagtgtgttgaaatcttagttgcatctgtgtgagctcgtttgtaaatctggacggctagttatccaggacggtagagttcaagaactcgacttcctcagaaggattttgtttctgccatttgtatatttattatctgatcttgcatggaccatggcaaggggcgggttgatttgatgcatcaactgatatctcttcgtgcccctgatgtgatt

SEQ ID NO: 432250 - DNA, 246 bp, Oryza sativa
cacttttcaactagcagatcacctagctcgatagctgcctctatcacagtatatacgctccctgcaacttgctgctgctgcaatagctagcagctgcagctagtaagcaaaactatcaaccttaagggttttttgcaagatcgatggccagacgtggcaacgacaggcaccatcttgcggctgagaggattgtggccgacgtgctggacacattcctacggagcaccaaactaacggtcacctatg

SEQ ID NO: 432251 - DNA, 373 bp, Oryza sativa
cattttgtggcgcatgcagaaattgccctaggcgagggatttagcacaattgtggtggtaggctatcagcgaatcaggggacacataggctgggtactgcgaaacaccattccacatggcataataaaacattgcaaatttaacagaaaagcagcgaggatgtgaataggctggatctgaacaccgattagatagacatgtacagtgttgagcggacgggacctcaaagaccacttcaaaatagactggctcgtttgaactgctggagtgtaaacgacacacaacggacacagtaaggacatgctaaaaagctactggaacaggataagaaaccaattatattgaatacttgatattgtagcgaatatactac

SEQ ID NO: 432252 - DNA, 385 bp, Oryza sativa
cgcttccgccgccgagcaccactcgtcgccggccatggagacctccgccgccgcgggtggcgcacacttgatctacgtatcctccgacgacgaggaggacgaaacacgcgtcctccttgccgaatcctacagcgccgaggagatccagatccagcaggccatcctcctctcgctcgacccctccagcgacgcggacgccgcccattcctccgcctcctcctcccgcccctccggcgccgcctccacctccgacgaaccctcctcccttcccgaccgcaagggcaagcgcaagctatcatcggaagaagatggccctatcgaatccacgaggaaaaagcggcggaagcgcggccgattcaagtgcagcgtctgcatggagaagcta

SEQ ID NO: 432253 - DNA, 163 bp, Oryza sativa
cttttcccgctgttggaaagagacgaaagccagcggggagctctatacggtgatccgaggctcgcctaccggcgagagcttgcctgtctcgggaggttctcaggtcgatctgacatcacagggatccactggggaggggagccaacggggtggcactctcata

SEQ ID NO: 432254 - DNA, 427 bp, Oryza sativa
  unsure (1)..(427): unsure at all n locations
gtttattggactatgtggatgcagcatactactcggcctttcttaacttggcacaggggtcggcctctgctggatcaaaaggatacatatgctttagaaactagaacatatgatgtggaatttggagtatttgatcccatggctaatactcgggctagccgatataaggcatttatttatcttgccttggattcctcagctgtgatctctctttggatgtcatcactatagatgtggacttactcctttcttgaattatttatgttcttgctgctcacacgtgagattgtgcctgaaaactcaatatgaagcgcttatcatctgtctgctgattaattgaaaactagaccttctagagtcctttcaatgattgcactgaggggtntgggtatattccagtgaaaaacatatggaagcttagagatca

SEQ ID NO: 432255 - DNA, 331 bp, Oryza sativa
gccttcgtcttccacctccaccatttcattgccgggctcctcctgaccatcttctgggcctcaccttcatcctcttctccaacctcgccgcgatctccatttccatcctcttccccagcctcaacttcgtcgccttctccgacctcagcggcggcggcgctctttttaccaatctcagcaccaccagcaccggcggtggcatcggcgagaagcgcctcctcgacgagggtgagagcctccatggcgccgtagacctcggcgtccaagtcggcggggaggccgggcttcctcctggcggcggcgctcattcgtcagtacctcgccggacccc

SEQ ID NO: 432256 - DNA, 204 bp, Oryza sativa
gttttctccccgacacgaaagcctgagaccaacggggcgattttaacacatcaccggggtgctccccggcttgacttaaaggataccctcccgccggcaactgacaaattgggagggcgagcgaggtgatagtgactccaacgaagaggacgagggatgaccgacacttgggcgaagaaagcgaggctaggagagaagaggtgg

SEQ ID NO: 432257 - DNA, 291 bp, Oryza sativa
  unsure (1)..(291): unsure at all n locations
catttttgcatgctcagcatacaccantttcgttgggggttcttaacattcataagccagcagccaactagcgagcatcacacacatatatcacaggacatttctatatacctaattaagctatatactccatatagctcgctaaacacaggaggagcggaggaaggacatgctagctgacctagctatctgcagtgagcagtcataacgatggcataagataggctgtatgcataacggatcataaaatactctaagggcaagagcatgcacattactggagcaactggc

SEQ ID NO: 432258 - DNA, 303 bp, Oryza sativa
  unsure (1)..(303): unsure at all n locations
ccctgcagcgtacacgaaacacgaggcaatgcggcgcagccgccgccgccacccgctgccgccgctggcacctggccttctactgatcctcctcctccacgccttggcgccgccgccggctgccgcggcggtgggcgtgaactggggcttctcctcctcccaccctctcccggcggcgcaggtggtgcgcggcctcctcctccccaactccgtcccccgcgtccgcctcgccgncgncttccccgacgcgctcgcggcgctctcgggcaccggggtcgcggtcaccgtcggggtccccaacga

SEQ ID NO: 432259 - DNA, 264 bp, Oryza sativa
aaattatattataggaaataaaaaataatttcctggttagaataaacacatttttagaggaaaccaagaaaagattttcctcttctgttacattccttcttccttctccggccaccggagccgtagccgaattgtgcctcttctcccgccaggggagaaggagagagggggtgtgagttttgctcctttcggcgagggggcgtctccccgcgcgggtgaggagaacctttgggacattcgggttggggcggcgtgcatgatggg

SEQ ID NO: 432260 - DNA, 473 bp, Oryza sativa
agatttcgtatttttggaaatgtgggcgaaataatggatttcaataatctggtgaggaggctgaaaagaaaagagcctaattgaatgaaaaattttagaagtactaaaaaatttctgacgaaaaaaactgaacaaaatttggccgaatttaaacatgttgtgctgtttccaaaacaaattgtgtaaatcaaaaacatttcagaggcctgtataatggatcttcccccgcaaaagttttagcaaaatttggctgaattcatacttatttcgtaattaagaaatgtgtgttttttttaggaagcatatcctacctggtggccaaaagaccaaaaatttcggaaatgtcagtttaaattatagaacccgaacttataacttggcatgggggtagaacgccatttccaaaattttgtcatcagttaagccagaaatcttgaaataatgccatcagtggtttagcaaagacacatttt

SEQ ID NO: 432261 - DNA, 381 bp, Oryza sativa
attgttctgttgaagtctggagagcggaagatattgaagtaaggatgttatgccaggtagcattcggtacaagagtgagacggaggtagctccgtagaagaaagtagttttgcaaagaagcttgttcttcggagtagattggcactacggcactactagcttttgaacagaagaaagagtttgttttctcgtcataagtgccaccaatctcgttcaggcactaaactagtttcggggaggatggatggttgtcccttcttctcaatagaatccgatagacaagaatcgaaagctgcagatttttttattccttaagtaagtcaagtgatgattcaattccatcaaagatggcaagagccgggcatctagatcgatcggttt

SEQ ID NO: 432262 - DNA, 325 bp, Oryza sativa
  unsure (1)..(325): unsure at all n locations
accttatacgagtcggacacggagcgagcaagtcggcggagttcttggtccaactggggataagagcagccggccggaagttggaccacacgctccactccaatccaactcgtcgtcgtacgtctccctcctctcgcaccgaaccaaatccccatcgcgccgcggcggtggcgaggcgtgcgtacgtacgtgatgccgggaccgggggcgcacctgctgtacgcgctgtcaggcggggcggcgctgtcgcggatggccggggcggcgcggttcgggcccgaccactgcgccgtntacgccgccaacgcctttctcgggccggacc

SEQ ID NO: 432263 - DNA, 379 bp, Oryza sativa
  unsure (1)..(379): unsure at all n locations
ggcatcgcacgcgcacccgctctccctcgccgtccgcccgtcgtccccggctcaggcgacgccgctgccgctcttcctgaggtacgctgctctccgtcgcggtgggagatgcggcggagcgacgaggccgctgcggctcacgaggctgcgccgcggccgagcggcggtggcggcggcgggggaagttgacgcgcccatggagcagaccgaggccatgatgagggtggcggcggatgacnacagcgtcaccgccaccgtggtgtccgtgctcctgaccgtcgcgttcgtcgggctctccatcctcaccatcggggtgatctacctgtcgggtaccgacttcctggagaagagggagagggagaagtttgagagggaggag

SEQ ID NO: 432264 - DNA, 148 bp, Oryza sativa
cgctcgcacgcacgcgcaccacgaaccagcacgcgcgccacccaatggcggacgacgcgtacgacgacctcccaatggccggcgcggaggaggaggtggacgacgtgatgaaggacgagctcgacgaggagggggaggaggattattc

SEQ ID NO: 432265 - DNA, 523 bp, Oryza sativa
  unsure (1)..(523): unsure at all n locations
ggctaggaacagagagaggggggaaagcgaaacgtgcaagttcaaaatcactccccagtgtcccccgaataattccaccgtcgcctaaagccagtttcatcgggaacgcctcgaattttccgatccctangcgggcgggcgggggaggtggagtgcccgcggcgcggcgcggcggtggttagggtttggggctcgtcggcgtcggcgagggcggaggggggggggggantggatnccngagcannacgttccttgcgggtgcaccgcgcggcttgtccgggatggctggtcgtagcttgctcaacgccgcggatcccgcctcgcgcttcgagtaccctctatcctcgccgggcgccggtcgcgctctatctgcctgctcgtcgttcatgcacaccaactttcgtgcagcagccctggctgttcaagcgagttttctggggatgaatttggagaagcgcaacttgtccaaatcaagataatcagtgggggactatgggtcagcanaggtgcatcctacattatg

SEQ ID NO: 432266 - DNA, 439 bp, Oryza sativa
ttcaatatccccaaaatccatcggtgcacgaggggaggttcacaaggcgagtcgggtggtaaggtttggtgcgctcccgattgatgcggccatgacgatacggaacctgccggatgcctccagtggatcgtacgacgcgcgaggaggactaccggcaggaggcgaggggccggggccatatcggacgcaggcgcgaggtggtcaccttcgcgcggattagggctaaacgctcgctccaaggcgcccgcgcgagggtgctgttttacccgactctgctctacaacgtcctacggaaccggtttgagtttgagttctcgttgtgggatcgcatcgaccactatgttttgctacggcgctgctcctgtctatattgatgtacagcatcttaagcaacttggagtaaggggcgttgtcacactgaatgaatagtatgaaaatc

SEQ ID NO: 432267 - DNA, 519 bp, Oryza sativa
  unsure (1)..(519): unsure at all n locations
atgtcttatataggagtcgagttcacattaatcaagattgttgctctgtccagacaacaagaaagtggaacattgtactccataagttgcgcattgtcatggtctgaatttctcagccatagtaacttgtgttgaatggggttaatcacaagggcagaaaacccaattttctggtgtcgaataaaccacagattttatggaaataagcgatgccaaaactggaacaagctagaacgtgggataggagttgcaatatggccactcaacaaatgataattggataaatcatcaatagcacacagattacagtgcaagattcatgatgtacagatacaataccctttgctcatcttaaaggtaaatatatgttctttctagcaacatgcgttgtcttctgactgtaaatgcagaatcactttgtttgccctgcactaacaatatgcaaggtcttctgactgtatatgcaaaaacattntattttttttcagttggcactgctgataccttgcagccactgac

SEQ ID NO: 432268 - DNA, 493 bp, Oryza sativa
  unsure (1)..(493): unsure at all n locations
gtggtcgttgtcctcctcctcggtctcctcgccccggtcgaccccccactgacaagtgggcccaccccaccatcccccccggctgcgtccgcggcgagcagcggaggcctccacctcgccggcggcggcatgagcgggttcttggcggtggtggggaaggtcgggaccttcctgctgtggctgctcttcctcgtgctgcagacggccaccaagatcgtcggcagcctcctcgccgcggggccaccaccggctgacgcccaggaagccgcggcggcggcggctgcgcggcgcaggtcgccgccggcgtcgccgcacagcggtggcggtgccacggacccgtaccagcctccgcagctgtgggacccgccgccgccgtcgtctccgtactcggctggccacgcggcggacgaatactcctcgtcctccagctaccggcggcgcggngcgagcgcgccgccggccgaggacgtggtggtttncttcagctactcgc

SEQ ID NO: 432269 - DNA, 259 bp, Oryza sativa
gatcacagcaatcgacctccaggggatcggttctattaatcatcgacgcgggttaaaaaacggggagatatgccaccgccaacagcatgatgatccttgctagcaggcggatcatttatggggatgacacaaccacgtcatggactactactaggacgggtaccgtcgccggagctgcctccaggactactacgaatcctacgatgacgcactacatccccacttcgacggcgattgccacttatacgccggtaccggg

SEQ ID NO: 432270 - DNA, 392 bp, Oryza sativa
tcgccgtcacctattctcgccttggccatgggaggatcgcgattcacgagctggagctggagctcgagcagtcaacagaagaagggaggaaaggaatcctccctcaccccacccgagcaggtattgggctcggaatctgaaggggaattggaagcggaagcggaagcggagccgattctgatgatctgatctgatcgaggccaggggactaatatcttgttgtaaggaacctagtggagtagtatttgatttgcctgctgcatcgacaccaatcaatctccccactactatggcttcttcgcgcgctatcgaggaggaactcgaaactgtaggagatgacaggatcagcgcgcttcctgacgatattctgctgcaaatccttgagagacttg

SEQ ID NO: 432271 - DNA, 320 bp, Oryza sativa
  unsure (1)..(320): unsure at all n locations
ctatctatcttaattacctagctactcgatcgatgatcagtctatatatggcggctttgaacggtaaggtggtggtggcggtgatggtggtggcgatggtggtggcggcncctggaaaccccacgaaggaccaccggccgcaggtagggccagtgttcaggactgcacttttaaaagatgaattccaggcacttgatcctcacatgaaaacatcatgggacgtgttcaggtgtcgcaccacgcacgtaccaacataatctgatgctccgattgccgtctgtaaaagatggagtgatagggccatacatatggaaatcata

SEQ ID NO: 432272 - DNA, 310 bp, Oryza sativa
gtctttatactcccggtcgctctgcctcaggagcgatgcgggtgtgaaacaagccgcgttgtccccgaccctctgctgcgactcccacgcgtcgccacacgccgaggaagctgatcggatgcacagacaggacgggcaggcctctgtctgtccaccgttcacaagggaactggacagggctgccattaaggcccctacgaccaggaagaacccatacgggaccagatccggcgccaggatgcacggacccagtacccccatggccggatctgctgctccggacagatggagcctagtcgcatacataaga

SEQ ID NO: 432273 - DNA, 485 bp, Oryza sativa
ctccgtcgtatccgaccaaatccagcgcaaaatccatcatgcgcctcccccccctcgcggcggtcgtcgtcttcgcgtcgttctctcggagccccccctcgcttagattggataggatcgcgccaatcgcggtctcgtcctccatggcatctgcccccccccccctagatttccgtaggaggtagctatctagcttgctgccgcccgtcgcatgaccacgaccctcggatcgtggtggccgttggctccccgattagcttctcccattgccgctcctgtaggctgtagccccagccgatatgcttgcgttgattttgattctgtgccgcctagcgacccgcctctcttcatctagggttcaaccttcgagccggcttctcagttgctgcaagtggaggcggcaagctagagacagcaactgcatatcttgcaagaaaatcggttttatggccataccgatgattttcttgcaagctgtgcagttg

SEQ ID NO: 432274 - DNA, 401 bp, Oryza sativa
tcgttttcggcgggggtgcccactcacctactggccgggcggaccgcaccaggaggaatatttccacccccacactactagcgccggagcccctcccttcccctacatgctccatccgtttgaacttgccctctgaatactactgcaactaccagacagactcgccaactgaaacagctgacgatgccgaggaccagagcactcacactattacggatccttccgatcgccatacgcgatcaggccaatccgtaataacggctttgctacaaagcaaatcaaacgagcgcactgtagacgcaagggttatccgacttacactaaaaatgtaagatctatttgtcagcagcattgataagataccctatgacactagtgggcatcagcaccaaacagatgag

SEQ ID NO: 432275 - DNA, 427 bp, Oryza sativa
gattccatttgagcatagctcatccagagatggcacgcaggagtggggaacatctgatgctaacatcgcagagacagtgcaagtgatcgactacctctcattcaggtacgcaaagagcccaagcctgctggcagtggagctgatgaatgaacacgttgcacctcgtgccaccttggagagtctgatgaagtactaccatgatggatacaacgccgtgaggaaatactcatctacgggttacatcatcatgtgaaaccgtctgtgaccggatgatccaacttagttacttcaattggccaacggatttccccgtgccagaatagatgtgcactactacacggtgttcaatgacctgctcaataacctgactgtgcagtagaacattgattttatcaaattatacttcttaagtgagctagaaaatgtc

SEQ ID NO: 432276 - DNA, 570 bp, Oryza sativa
  unsure (1)..(570): unsure at all n locations
tcgattttgtgacatcgagtagtctatatgaaacagacgagttacttgtttttgtgttattcatgcgtagatgagattgtacactgttaacacacatacatcgtgtttccagcaatttttactaggagtaatatctacttttatttttactaggtatcagctagattacagaaggacaataggttctgatggaattgtcgaaatctgccaccaatgtgttttgatttttctggttgatacaggggagggagatgagatgcataaactgcatcttgtcactgtttactagtactggttcaccaaaatttatctgacacaccaatatttttcccagtttacatggcactggggatactagtgtagtataaacatatattttgcacacaacatatacaactctgaagcattgcacaagaggaagctgttaaaatgaagcgataattgtacattatataactntatgtatcgataaatatatattntctggttgataccatgggaggagtggcatctactgatttttttaactaaatttgaacatgttcactatatctgacatacagtaacatg

SEQ ID NO: 432277 - DNA, 295 bp, Oryza sativa
tgcaaacccacccaccaacccaacccaatcccatcgagaggaggggacgcggcggcggcggctgatcggcggcgggggaaggaaggggatgggcggcggaggcggggagtaggacggcttccttctgtaactgtatctgatgaatgaaccgtttgcacttcttgccaccttggcgagtcttatgaagtactaccatgatagatactacgccttcttttaatactcatttatggcttacttcatcatgttcaaccttttgttaccgtttgatccaactttttttttttatttgtca

SEQ ID NO: 432278 - DNA, 485 bp, Oryza sativa
  unsure (1)..(485): unsure at all n locations
gctttccttctgcgcggcgccgcctgccgccgccttctacgcgcccaccgctcgcctactgcgcgcccgccggcgccactccgctcgcgcgcggctgcactcgccgccgcctcctcccgcctgagccgctgcgcccaccgccgccgcctcctgcccaaaccgcctgcttccctgctcgcgccgcgacggagaggaaggagagtttgtgctgctggttctccattcaaggtggcttgggtgtgcgttctgatcgatttggcgttctgatcgatttggtgtgacgtgtttgtttcagcagggaaggactgcaaggagcaccccaacgtcaagcagttcaagtccatgcctgatgctgtgtcactttgctcactgaaaaaaaaagagaacatttataggttttttttgctgcttgtgagaggatgctgccgaatngaattaagacagccttcagaatctggtatatctaatggtctgaaaattttaca

SEQ ID NO: 432279 - DNA, 540 bp, Oryza sativa
gattatacattagaagctcaaaataaggagtttgagaggagggctgttgctacagaaactgcattaaagagggttcgatggaattattctgctgctgtggagcgtctacagaaagatcttgagttactgtcctttcaggttctctctatgtatgaatcaaatgaaactcttgcgaagcaatccattgtagaagattttgagagttcccctgaagaacagtctgcagtagcagatttaggtgctaacaaggaacgtagcctgtacatgtctgatcatgaatcccaagcattttcagcagaaaatggcagaccagataatctcacttacaaaatggatggccagaaaagtcttcttcgggcccttaaaatggaagagatccgtaatagatctgaatttcaagttcgaagtaatactaatctacaggttgactactccaaacttgacaagctagaacaaaccccttcaacaacggaatctgaggttttagaaacatatatggccaacatagagtggcaagtattctctgatgtgctacgtgag

SEQ ID NO: 432280 - DNA, 109 bp, Oryza sativa
  unsure (1)..(109): unsure at all n locations
gtccccgaattcgagctcccgcttcctccgccactttttatccccacccccggatcgaaaccctaggccgcgagccattcctgccccatcnccctcacnaaaccaccat

SEQ ID NO: 432281 - DNA, 408 bp, Oryza sativa
tcggatgtgagggcaaaggtcgtcgccgccgccgccgcggccttgggcggcgtttggtctcgtcgccttccggaccacccgcactagcccttctcgctcctggcgcgcgcacgcgccacacggccgacgacgactagcaggattggagggccgacgccgacgcggccggtcttcttacgggtgccgtcgtgtctgcggcggctgtgccgatatccatctcacgagcagagcaggagtagggagcaggagcaggggaggggggcgccgtcgtctggcgtgagtcccgaactctagcacatgatgtgctagagaagagatacatatgctagcgctgaactctgatctgagatggaggaagattctggtagatcaatatcaacgactgtgactattagaagaggctctagc

SEQ ID NO: 432282 - DNA, 185 bp, Oryza sativa
  unsure (1)..(185): unsure at all n locations
tcctgaattccctttcgacccacgcctccgcattttttttaccagaccccatttaccctcctgggggggttttaaattaaaattgcctttgtaaacattttnatttttttccttattctgctgctgtggagcgtctattctttctctcaattcatttttcttatcttatccaaccttctcattta

SEQ ID NO: 432283 - DNA, 343 bp, Oryza sativa
cggaccggaactgaatgttcggctcagacccacccgttttattttacgttcattaacactgttaaggatggctatgatgagacacatgcacagcgttgagaccaggcattatttcttgagcttttatgctaaatgctaaagatcaggagctcattagaacattgtgctgtttctatatcacgggagctagatgttgatgatcacacgactagatctgcactgctgtatatcatattaggaagtgaagaagcatacatctcaggcagcataatataaagcgagtcgcatatccagactgacaacctatatgttgtggattatagatgcaacattgactttcaat

SEQ ID NO: 432284 - DNA, 384 bp, Oryza sativa
  unsure (1)..(384): unsure at all n locations
gcttctactgtgttcgaggggaagctccccgggtggaacaagtccgtgccggacttcaaggcctgcctcgacaactgcagcgtgacggtgtcgagcgccatgaaggagatccacggcgccgccgccgcgctcaaggccggcgacgacgaggacgacaagacgctcgtgcttctcgccatcaacgacgtcaccatgtgaacgtacagctgcagggagctcaaccgcgacatggcggtcatcctggagcacagcctcgtccagttccagaagatgatgaggatcgccgtcaacttcatcagcaagatgaagaagtcaccgcttcctcctcctacttgntctactacttctgctccttctactcctcatcggctgcactgaatatgc

SEQ ID NO: 432285 - DNA, 606 bp, Oryza sativa
  unsure (1)..(606): unsure at all n locations
gttttagcttgacgggaaaggcgacgacgggaccggagaagagagaggctggtgcggcgagaggagaggagcgacgaagagggagaggaagacatgagggaggagagggaggcgacggagagcgagaggagcttgaggtcgaggccgcgccaccgaggtcgatccggagccggcgggggaggcgacggagagggagaggacctcccgagattagcagctcggtgccaccaccgttccgccgccacgccaccgtcgtccacggcttccgcccctcgcggacctcgcacgtcgcccgctgccgtgccaccgactccgctgaactcgccgacctcacccgtccctcgctcccactccgctgaccccgccgctgcttcgggggaggagagaggggtggatctggcgagcaccgacgccttccttcgcctgctgactcagtctgctagtggggaatggattagaggagagagagagagggggggagttagaagtaaaaaagatagtactagtgcacccatctattatctatctatctatgctctatcttctatctatctatctaatatatactaaaagtccattaaacatnctacaaacgttctcaagccg

SEQ ID NO: 432286 - DNA, 435 bp, Oryza sativa
tttgagtctcaccacacagaggataggagaggagagagggaccgtatcaagaggagtaggggtagaggagagcagagagccgaggacttggccaggagagagaaggggtagggggagaccgggagagaggttgcagcagaggcagagccaactgcacaaggcaaggggcacgcagccacgcagtgctcctgcttgccctgcccctgcccacccccacctcctcgctgttctactgctgctctactctggctggcaacgcatcgcgtcgcgcgcccaagcaaaggctccatcaaacacacaccaagaaagaagaagaaaaaaaaatcccccgccacgccgggctgctccagatctctcagccgcgcgcgcgattatgtgggattaggtagatgagggcggcgctgttcggtgccgagaggagcggggtagttgacc

SEQ ID NO: 432287 - DNA, 149 bp, Oryza sativa
ctttttgtttgaccggggcctactcgccgtcgcccgcggggagccaaatctgtgctcgctcggcgctgtggagatgtaccgctcttcaccgacgccggtctccccgagatcgccgccgggtgcacctcgctggagcgcctgcacatcac

SEQ ID NO: 432288 - DNA, 395 bp, Oryza sativa
tttggttgtcgtcgcaaacatacaccaccatcgcgcgggtttaaggagtatggggcgggggcccctcccgggcgaagctcgcgctattaatattgctgactacaatgctactcctcgccggggacctgtccctcaccggcaccgcggcgaaccgatgggtgcggttccaatacctgcattagatccgcaacagcggcggaggtggcggtggtggcgggttctgtgtccgccgccaagaggccaataacaacgagctttcttggctctcagtgccagacccgtccaacttcacagaggaactaactgaacggcgtctgacgcccggtgagactgcgtgccgtgactcctggacggagaacatctccatcccttgtcttgactaccccgcccccggc

SEQ ID NO: 432289 - DNA, 522 bp, Oryza sativa
gcgttggttgtggcggcggaaacgccggggtcgtgggcgcgggtctcatcaagagaggctgggggaatccctctccgcccgcgggtggtgcttccgtgaccccagcaacgagatcatccaggagctactccacgcctccccctcgccgtcgccggaggccgtggagaccgagctcgtcgacgtggacctgaggctcttcggcggcaagtcgctccctgaccgcgccgccgccgtcgccacggggaggcggctttcctacctccatggccccatcgtcctacaggtagtatcagtaagagatatatatagaagcatcattgatgcgtcctttaagaacccacagcaacaccgccttctgcgctttgttctgactgatggaatttctgaagcagtagcgatagagtttttcccaatcccgtttatcattgaagatattgctccaggtactaagatttgtcttgagaacaagattccaatacataatggcatattgggctaacgtgcgaagaatataagtatcat

SEQ ID NO: 432290 - DNA, 377 bp, Oryza sativa
  unsure (1)..(377): unsure at all n locations
tgtgttatgagggaggtgaggacaaangacgagcaggggctgtttgaggagagggtggtggatagcccgctggggagcgcacgggggagcccggaggcggagatcgggatgagggtggaggacatctgggacagcctggaccagccgcagctgagcgaccgggaccggctcaacagctgcttcgacgccatccaggaggcgtcgataccacacactttcgacggcgcgcatgtggtcgagatcccctccgacgccacgcttgtcgaggccggcgacattctgtcgcgccaccggatcatcaccgcccccgtgctgaactgtcacgcctccgacgacgctcgctggatcgaccggtacatcggggttgtttagttcac

SEQ ID NO: 432291 - DNA, 441 bp, Oryza sativa
cgttgcctttatatcacatgcttatgatacatgcggaatgggttagatgacaaaacatttggggtttcacaaggcactctgtgttatgatgggatggaattggcatgttgctcctgacactaccaaaacctatcattccatgccagatgaggaagtaaatgccatgaaggatgatctcatgttgtggccaccagttgtcataatacataacagctccattgcaaccaaggcaaaggctaccgatgcaaagattgtgtcgaaagaagaaattgaaggtgtgctgacagaaattggggttgcatgtgacaaggcaaagattatccatggcagaccagccaatcagagcgtgttcctagtgaagtttcttccaatgatatctggatttcaggaggcgatgagaatccacgagcatttcaccgtcaaaagccacgggaaggaaga

SEQ ID NO: 432292 - DNA, 392 bp, Oryza sativa
taccggacctgaattcccgacccaacccacccgtcttgtttttacaccaccacccttccaaaaccgagctgggttgacatcaaaccccggggcagggaaaccacccccctatgaccggtgacacaccgcccttcgaacattacccccctaatactcggactcgacgttgtgatggcgcatgctcccattgctaactaagattctaacttagatgctatattcataaaacgcgacacgctacatctagaccactgtctattctacaaagcgcaataaacaaatgattcaatcaacgccaactatcttactactgtgaattaccattatggaaatgatactattaggactaaactcacatctcatactacaacttaaagacaaccacatttcct

SEQ ID NO: 432293 - DNA, 508 bp, Oryza sativa
atttctttttgtcatctgcatcaattgttctcttgtgtcgtttgctagtatcctaagtcattggctagtatatcaatgtcatctacaaatcaatttcctatgtttcctatcaagtccatcaaagtccatcggttcgtcgaagtcatgcttgtcaatcattatcactatctcgctcgctccatgtcgaagttagccttctatcatcaccagaagctccacgtcggagctgatctttgtcatatcaccagctccccatcggagttgacatcatcatcaatcattgaagggccgaagaacagtttgtgaaggtccttcatctcgtcatcatcaccgtctctgaatcagtgaagagccaaagaacagtttgtgaaggcttttggtactaagggctgaagaacagtttgtgaaggctcgaggtctacttcattgaggataggatgggttttctcttttttaattcattcaagagcaatgcttcgacacatcttaaacatggactttgatttat

SEQ ID NO: 432294 - DNA, 253 bp, Oryza sativa
ttggtatggggaggggtggggaaggtgaagggggggggttgattcaaaatggggggggctttcaacaacactgtgggtacatgtggcggcggggagcactatacttatctcccactatactcccaccccatcaaagaggctctgggacacaaccagaatgcgctcaccatgctctgcgtctccaacgacttctgccagaacgcggggctcgtaccttgggtagttctccaacccccttccaccgtggctcatc

SEQ ID NO: 432295 - DNA, 460 bp, Oryza sativa
tcgggtgtctcttcagcaattggatcccttgacgtttgcagataattcattagttaaggaattctcaagaaaagtgagaacttattcaagaaaatctgagaacgattcaagctgtgaatcttcctgatggtatggatgagcaattgtattcttttcattctcttttcaggcgtgttgatatggtcatgctgatcttttggcaggttggctggaacctgcttaattttgcatctcttgatgaatgatactaaatcacaatgcgacatctctttcttttctgcaggatatgctatgataatctcactgagagggtagattctagacatggaggaacacttagataaagagatgcgtggttcatagttcatacttgaccacagaatcggagcacccgggtgaatgttgtacataaaatctgccccggttgccgtgcaacttttgtatctaaactaaagaaaat

SEQ ID NO: 432296 - DNA, 347 bp, Oryza sativa
gtgtgtgtgtgacagtgagtgatggattgatgtgggatgcctcactagctgagccccccctcctcctcctccttcctttgtggcaaatctcatcagcaacaggggcctcttggtgtgactactttgtttacatggtgggtctctccttttcttcttctcagcgtcgccgtcgtcttctttctccttcattcattcagacttcatcagagtagtagtagtaggaaggagatagtgtagacaacaagtgtgtgtgtgtgtgagagagagaggtagagggatggagagggggaacgaacccccttcttgcttttcttcataggtggtgggcttcaacctttcggcaagat

SEQ ID NO: 432297 - DNA, 99 bp, Oryza sativa
gtttaccatagtacgcaactccgaacatcactcccacgcgtgctctttaaaatacaggaccgggttccaaaacacaccccaacatgcatattggtagct

SEQ ID NO: 432298 - DNA, 421 bp, Oryza sativa
tttatatcaagtaagccaagttatcttatactagcagggacccatattttcatgggttggttccaaaatgtcttctcctggcatatgcgtgggtcatgatcattattttgcattggttagtcaagggtgatggcctgttctgtgttagtgatgtttttgcaattgtcaggacttctcagggtgtcatcaaggaagcaatttgcatgtgtttgatgaatagtatgacactaatagacaacatgttgatgtgaaggcagcacatggtctgaagaacctgaacagggaaggtgtcatggccatcatcttcagtaaacttaccaaattattgctgagaggcagcttatttcttattttcagtatactcctactaactttgaatcaagtttatttctgtattgccagatccaaagaaagctgtatc

SEQ ID NO: 432299 - DNA, 246 bp, Oryza sativa
ggttgatatagttaacaagcaatgggcacaccagggccgggtgaatttaataagtcgtcgcgtttaaacacaaccgggaaaaacttaaacgcactggtcgagctaacacagggcaggggggaggcctacacaagctccaacgcaaaatcaactgaccaagcgagagtgctgaatgataacaacagtgaccaacattgagaacaaaagcatcgccttagaggcgcaccacatcctcacacaagaaaa

SEQ ID NO: 432300 - DNA, 320 bp, Oryza sativa
ttgcttttggggactttgcttttaactgcacggcctgcggaagatgaaacaatcgatggcctaactaaccaccagcattattgtgaaggacggcttcatgagacatatgattcactgctggacgataaggacatacaagcaatcataaatgtattggctacaggatgggataggtcattatctgcaaaggcggatggacacgaacaaagcgggaagagattatgttaagaacacctgaatggtagacaatagaaatttataccatgaacagcctgctggtatcacggataaaagtcaatccaataatgcagaggactggc

SEQ ID NO: 432301 - DNA, 485 bp, Oryza sativa
gtttctagttcaaatcaatcagctctaaatcatagaggggttcttaacaatacaagatatcagcctggggcacaatccgtggatctgaactacgatgccgtgggatctggtcaagcctcagctgagcactatagccagcgtattaaccaaggctactctgttcggggacaagcatttaacaggctggaatcaagacctagttcttccagccatttctcaccgaataatcttgatcagagtggaactgttgatgcacaacctctctcgaaacaatatatggtatgcttacttcacttcgatggtgcatcgaaaggaaatccaggaaaagcgggtgctggggctgtgcttatgactgaagatgggagagtgatatctcgacttcgcgagggtcttggtattgttaccaataatgttgctgaatactcgggcctgatcttaggatagagatatgctattaggcatgggttcaagaaaatcatagtata

SEQ ID NO: 432302 - DNA, 428 bp, Oryza sativa
aaaaaaaaaaaaactcacgagaggcgcatcggcgggggggctgccacagggccaccggtcgccgtcgccggcgatctgcagggtcaagcactcaagcccccgcagcctgcttcccgccggaggtcctataaaagttggatgccaatgccaatggagcatctatgagctaagagtgttcagaagggaggccctggtttggatcaatctcctgaacagattctcagctccgctctctaggccaacgatgcccaactctaatgcctgcaattgcacctcctcgcatgaaactttggccttctggaacgatttggagataagagaccacttgcttggattgcaggtggagatttgcttcgacaggagctctagggcagatttcaggaccgaggcagtgatccctctcgctgttgtcaacagactgacaagcc

SEQ ID NO: 432303 - DNA, 325 bp, Oryza sativa
tcgatttggcggccaactccatctctatctccgcagggtctccttcaaatcgccgaccaaatcactcccccatcgccgcaaaaaagccacgcgatctccctgcgccggcggcggcaacgacctgcggcatggcgcagacgccgaaccctagccggaggtcgttggtgggggccgtcaccacaccctttcctgactccgcgggcggagcggttccagctggagctgtgctggtaggacgggggctcgcagagctcctcgcgccgcaacgggggcgggttaaccagaggaggcagcagcattggctgccttagccagatgaaagact

SEQ ID NO: 432304 - DNA, 391 bp, Oryza sativa
ctttcatttctgcctatatatccacgaggccacgggtggggtgaggtcacttcagaattttactgctgcagacctttgccatgggggagctatgctacctcacccgtcaatctgttgcacggagacaaggcgtgacgcatgctaaaagaggttacaagttgatacctgcgcgcatcatgttctcgacaccttgatctcgaagcggctttcgcccctttcaacccccgtgcaaagattggcactaaaggtggtacttagtcaatcgctcgactggtagccatgcattagcgactctaaaggcccataatgaactacagccttgatagaggcctgtctatgctgctcggtacactgagaccggccattagtattgattacctctaacttccac

SEQ ID NO: 432305 - DNA, 337 bp, Oryza sativa
  unsure (1)..(337): unsure at all n locations
ttggtttgttcaaacatgaacccagacnatggactcggaaagcttaaggaccgattcgcgacatggaagaaagactacaagtctcggttgaaggagaccaaggtaaatcttcagaaggttggtgaggagaaatcccggaaaagatggtgggggaagaagagctcaaagtgaatgcattcaatctgaatccaagtgcatttccctacattccctgctactgcatccaagaagagacaatggaagagactgggaggtgaaaaacaaggcttcgaggttctctcctcttcatcgcaagcctgacgagatgatggtgatgatgttgatgaccatgatgagc

SEQ ID NO: 432306 - DNA, 536 bp, Oryza sativa
  unsure (1)..(536): unsure at all n locations
gtttatctctcctccgccgccggcaatggcgtctccgcggcggcgctccctgccgctgccgctcctcctcctcgtcttcccggtctccctcttcgtcgtccttctcctccaccaccgctcctcgatccccgcggcggagctcctctccggccccgggccggacccgcgccgcttctccctcctcatcaaggtcctcgcctacgaccgcccggggccgctccgccgctgcctccgctcgctcgcagcggcggactacgccggggaccgcgtggcgctccacgtcctcgtcgaccacccgcgccccaacgcatccctcgatgcgtcgcgcgagatcctcgccgaggccgacgccctccggtggccgcacggngagaagcgcgtgcactaccgcgccgncaacgcggggctccaggcgcagtggatcgaggcgtggtggcccggctccgacgacgagttcgccttcgtcgtcgaggacgacctcgaggtgtcgccgctctactatcggntcctcaagccgctggtcatggcgactacta

SEQ ID NO: 432307 - DNA, 317 bp, Oryza sativa
cttattattattcatccatactcgttgcttctctgtttcgtttccttgaaacatacgtagggcgactgacccggacgctgctccgtcttctgcggggctaccggagataatggatggccgccgccagccaccgactgaacgctgggtccgccaaggagaagaccaggttgtctgacaagaagatggagctgtcttagccggagaagggctgtcctgcacgccaagaccaattgtgatatcatgcgccgactggcgggtgtgccgcgtcgatgaccatcctactggagccacgcgaggtgctgacctcacgggcatcg

SEQ ID NO: 432308 - DNA, 387 bp, Oryza sativa
ttgggtgatcacgagaaccaaaccccaaccggggggactcgaatggcaagcaaaacccccacacttcccggcggaggaggcggcggtgacggaggcagcgatggagacggtggagacggctggtggcgcacatgcagggcctatccgggagcggggaggagctggcctacctccacaacgctcctccacaagcgacgacgggggagaaccttgcgcgacaactccgtcgcccatacttcccttgctcgacaaggtccacccgagcgcccactagctcggcttcctctacctcatggaggcgatcgcgtcttttgctttcaacctgagggcgcacggcggtggcgactgcctggtcaccaaggccaattatctcgggatctgctaggc

SEQ ID NO: 432309 - DNA, 451 bp, Oryza sativa
tttgtttcttcttctccttcccctcgtctcgctcgtaatttgcacaggcgacctcgacacaccacttcaccctcgctcggtcggagcaatcttgcctgcgacgccgccgccgccctcgatctcggatcgtccgctacgcccctgcctccaaaccttgccgcggcgatcggagaggggaatacccaaaccctaacgttttcggcccctccccgccgtcagagctgcgccgtgcggttctgcttcttttctgggcctcgtcacctagggttccgagatgggcgatcataaggccgtcttcatctcccttcaggagctattccctcaggttgatcctcgcatactgaaggctgttgccattgagcaccacaatgatgttgattctgctgtagtcgcaatccttgatgaagtcatgccgtctgttacatctacaagtccacctacagtttcgtct

SEQ ID NO: 432310 - DNA, 391 bp, Oryza sativa
ctttcaattatgttcaaatcatatcagctccagggcccgggtacaattaacaagcgagatgcgtctgagccagcatccaaccagggtacatcatgaggactcaacgaatcctcctcgccgtacgagagtacatggtagtttcctcaacgatgctggccgttgtctcctgcgcgcgggagaggaagaactacgtggttcatctcgacccgagggaggacggcggcgtcgccgactcggacgagctgtggcaccgctcgttcttgccggaggccacaccggacgcggcgggggatgatggcccgaggatcatttactcctacagccacgtgctgtacgggttcgccgcgcagctcaccgacaacgaggctgatgcgatgaggaaaaaggagga

SEQ ID NO: 432311 - DNA, 412 bp, Oryza sativa
ctctattgtatcctcttcaattgcccccaaattggcgcctggtttcgtgccttcaatcctcgggaacggacgcgccaagtccggtcgctttccatggccgtcggccgccattcccgccgccgttccgacctcccccgtggccggctccctcttctctcatataaaatgggatcctcatcccccgttctctcgttttagccccctcccgagcctccccgtggtccctagccatctccccgccgccctcctctctctcccacgccgccggccgcctccagccgcctgtgccgcctcgaccgtgcgccggccggccgcgccgtcgcctcctccagcgtcgccgacaccttcttcaccccggcctgccctccgtttcgcgcggtgaccgccggaggcgcgttcccgccgtcgccct

SEQ ID NO: 432312 - DNA, 351 bp, Oryza sativa
atctgttatggaggaaagtacatgaggacaaggggcgcgtttgattaaatatagagggcctctgtccacagcagacagcagtgcatccgatgttacacgggcccaaacatactgaacatccagggcacgcccaggctctaccgcatgataatctctgctttggggaccgaggagcaagcaaacatgcacatgtacaaagagcaggacgcatgaccattcactggcctgatgataccagagccaggacccgttgcttacaccccctccggaggctcaggtgggtcatgctcggtgggagccgagaatattgggagcctgggaaagaatgatatcaagcgcatatggaacact

SEQ ID NO: 432313 - DNA, 287 bp, Oryza sativa
  unsure (1)..(287): unsure at all n locations
tcgcgtactcgcgtcgccctcccccgggcgaggggggatgcagattccgtcgccggtctcctcctcctcacgtnaactacccccggctaacgggcgcctgagcgggcaccttgaaagccttgcgcccacaggctaggacaggggcggtggggcctcatatcgcctccacgcgctcggaggttggggggatgccttgagtggcgggggtggtgacgagatccgtgccaggcacaggcggatctagaagaggggctggtggctccacaggctcaaggacacggctgcga

SEQ ID NO: 432314 - DNA, 458 bp, Oryza sativa
tttgtttcttcatattcttctgccaagtcatgtggcgtgccaacaatggttctggaccctactgatattacgtggctttttcacttgattaattggggcaaatcatcactccttgtaatcattagacattggaagcagtgcatgctatctctaattaaaatattaaaaggttcacttggtggtactgttcaacactacattgaagatcttggtagtatcatttcacatgatgcagtcaatatcgatgaactcagcgagaaaatttcagatctcaaacttgcattgtccaaggaggcttctgcaaaatcggaaaggagagtggtagctggtgtatcaatgttcacagaaccaattgctggtattccttctccagctactcagacggctcaggagagaaatactggcagggacaatgttgaaaccatgaagtcttctcgatcgacatgtactgaacatat

SEQ ID NO: 432315 - DNA, 510 bp, Oryza sativa
atcagtttatccccaaaatatggggttggtgccgataataacatgttagaggaagataatttttcgacctctacaaagcaacaggatgtatttgattcaagggagcaagtcatcaaggaagaatcacctaaacaaagtgcaaatgcaccaggcaaagaacgagcggaacttaagtcacgtgaatcattatctcaaaaggaacagcctgagatatgttctactcatactgcaataggagacgcatgtgagaataaattagaatgcatagatggcacacataatcaaagtcttgtttccagttgtgtgcatgctgacaggacaactaatcaggcagaagattctagtgcctctgtttctgtgggagtaaattctcatcagcagccgaataattctaccaggcctagccaatctaagagtagatttagtcctatgcttacatttcataggcgagttaaaaacaaaataggtttggaagagcctgcagcaggaagttgttcaagagataatgac

SEQ ID NO: 432316 - DNA, 353 bp, Oryza sativa
tccttcacaagcttgcaatagaggaccggtggggggccttgttcctccggagccccgtatcacatctcacacgcgtgggagcgaacagtcgaaggtgtagagcagtgcatggctcttcctttcgttgccgatcggaagcagtgcgctgcggcggtagcggaagcaggactagacgtaggagcggatcctgatgggagcggagtgcaagtacgaggaggcgcacgtggcgtacgtcatgctcgagctggacgcgatgaagcaccccggcgtcgacgtgaacgggatcctcgaagggcgtctcctggacggggtcggctccgacgacgacgtcgagtttcatcgacgacgccgag

SEQ ID NO: 432317 - DNA, 492 bp, Oryza sativa
tcgatttgtctgggtccggctctgcgccgccggtggggggctattcatatacggtgagccagacccgagcgcgcggctgatcggcgtctacatcgggctgaagcggacgcgagactacgccgccgccgccgccgacgaagacggcggcggcgaggatcaggccgagcacggcggcgcggacgtgaagccggaggcggcggatccgcatcccgccggcggcggcggcggaagcagcacggaggcgtcgccggagtcgcacccgtggcccatataccggccaacccccatgtaccacgcggacaggcccacttgcaacgggccggacagggccgggtccgaccaagacgggtccagctccaggtgagttggcccccccaaccctgtagaagcttttagacccctatattacttaattgcccctaccctacactattatacgcaactaattatgattagtacgtaattagcggcgaaataatattactaccacta

SEQ ID NO: 432318 - DNA, 337 bp, Oryza sativa
cttaatttctcctccacctctccacccctcctggccggccgtacacccccccccccctcctactcctcctccgccgccgccggatcaggggcctcgccgcgtcgcgctgtcgctgctgaatccgtggttcttggtggtggtgcggtgctcccccccctaccatgctgcggggctgggtgccctcccgaccttgacgcctcccgctccccgacgaccacccgctcgacgccgtcttctccttcctcttcatccccacataagcgttgtgctgtcgtctcccgctccgatcggtgttcctggatcttggatcgatgagcgaggaggtgcaaaggtatgg

SEQ ID NO: 432319 - DNA, 510 bp, Oryza sativa
cttcgttgccctcttgtaaatagcattcagacagagaaggagaacaaccgaactctcccagtcaaaattccagatctagcatgtcaaaatcttttcctcaggtgtttcacaaggtttgattctttttaacctagataatgttgaaaatggaagtgtatcaattatcaaatgtcaggatatgatagatcacatgaactgtgtatattcacaagttcatgaagaactagctgttcagcacaatatctttttcgtatgaatactaaatcataagttaaatctggattgaagtgttgttttgcaagcaattggaggagtggattgtgatgtcttttgaataggcctactattcttgctgaatttaagaaatattgtgcatctgttctgtcttttacgactgaagaacaaacaatcactaaaaataaaacgataattttaattatttgtttcaagcatttttcaaaagatgtaaaaaccagaaaactggagcataaaacataactacattctagt

SEQ ID NO: 432320 - DNA, 520 bp, Oryza sativa
tcggttaaggcaaacagcgcaacgcagcacacaacacaagcactagctgctcgatctcgtgaggctcgtagtaagcacactagctgcagatcgagcgaacagccatgaggaagtcaagcatcaacggcgtccatgtcatcggagtcccggtgaccgccaaggcgtttggcatagaggaggaggtgtcgttggccaggggccagtcgttcaggaaggccgacggcgatcaccttgcggtctcgttgtcgcaccccagcccttatacgtctttcggctataagcacagcagcaagggtcaggttatccactgggtgagcaagctgagcagaagggcacagggcttcagggagcatgtgaccttggggccaaagctgtcggagacggtgaaggggaagctgagcctgggcgcgaaaatcctgcaggccggcgggatcgagcgcgtgttccggaaggcgttctcggcggagaaaggcgagcggctggtgaaagcgctgcagtgctacctgtacaccaccggcgg

SEQ ID NO: 432321 - DNA, 511 bp, Oryza sativa
gttaatggaccctgacctccggagatcgggaatttttcctcgcgcgatccgccgccgcttctctctcgcgcggagtctcttctctcgcacgcgaccaatgttgggcgccgccgcgcctcctcctccggcgagacgcgccaccgccgggactcctccggcgagacaccaccagcgctgccaccatactaggcttctctagaacagccaccgtcaatcttgctcccacctgaagcaacacgacgcgctctctccagtggcagtgcgccagtgccccatcccccaggtcaacctcgatagccaccaagagcggttctccagtggccgtcactaagcatcgccagcaccgtgactcagttcgactggttcatatgctttaacacataagctacgaggtaaattaaacaacattgattaagaagggaacacgcgcgttcactgcttcgacagatcaactacaagaattgtcaaagaatcatttttgctggagttattaggaacattttatgtttag

SEQ ID NO: 432322 - DNA, 472 bp, Oryza sativa
tgttttggcacgaatagatgctgcagacccatgcacagtacctggagtgtacaaacgcttcatgtcagaccaatatgttgatatagaggcaaggggacccatgactggcattgcggactacatctggatgaggagcgggacctacgtgctccgatactagactttgcaacctacggactacgctgacattgtggataggcaagataattgcctcttttggcattaatatatcatggcctgggacatgcacattgtgagcgcgacgaggaggaaattatcatgagaaccatcacactggttgagtttgggcaaaaccaacacagcgtgcagtaatgataggcagatgcaactgacctggataacttgagctgacaaccgtgattctacgatgacaagctaccagtacttatacttttgtatactgcaagactgctgagatcctcttggaataagtggatgaagctgcttatgt

SEQ ID NO: 432323 - DNA, 329 bp, Oryza sativa
ttcctttgccgcgcttgctcggcacggcaacccacgcgaaatcggagattccttcgattcacgagatcaccacgagtccaccaccctcctcctctcgctggattcgatgggcgctcggtgagatccgaatcccccacggtggtcgccggagatgaagccgccgcggaggtggatgtacgggcggggcggcgggaaggggaagccggcggggctgctgctgctgggggtgttcctctgcttgtcggtggtgctgctgctgctgctgcacggctcgtccccgtcgctggagggcgaggggaggaagcctgaagcggtggaggcggcggggg

SEQ ID NO: 432324 - DNA, 87 bp, Oryza sativa
aacggtctttttacgacagaggaaggggaacaggggggggagccagcgacaaacacgggggcggacaaaaacgaggaaagcaaaaac

SEQ ID NO: 432325 - DNA, 396 bp, Oryza sativa
attaattaaaaaaaggaaaatcgtgtctcgtctcgtggcgtcttcgtctcccccgattcccgagcagcttctcgaaaccctcgcggcctcgattccggcgatggcggagcccaacccgcaagtggagagggaggtggaggtggaggaggtgaggacgcccaatcttgtgtactgggagtttgtgcaggaggctgcagcgtaggcgatgtatttgcctatcgggggtgttggcgcttgtcatggaccactccggtgcgttccgtcccggagtttaccccgtcaagttttccgtgaagggtttctggccgctaactttacggtcggttccatggcttatcactctacgttactgcacttcgtcgaccggcaggatggatgacaataatgctagaagct

SEQ ID NO: 432326 - DNA, 303 bp, Oryza sativa
gaatacgccgccagcaaggacagcgaccaccgacggggcctaataaacaaagagctcctcttaactagcgcacgcccgcggcaaaccagacgccggggggcagaacatatctaccgaccccggcggcaccaaccaatacgcaccaacgagggcaaccgatgttcacgccgactctctactacccagtcctgcagctaggcgagccgcaccagcagatacgagggggggggcacgcggggcgaccagcgggccccgcgcctgaccgggcagggcgatgacgcgcatgagaggcacaacgccgag

SEQ ID NO: 432327 - DNA, 272 bp, Oryza sativa
tagttggggtacttaaaaacacacctgccttttactcctcgaatcgtaatggcattgatcccaattacgacccttttaagaagtacatcaacctcgccgacgccgtcgacatgctattctggcctccccgagcgaacggagaagccaggtggctggctcgattaggcgggctggatccctcactaccaattagacgccattcctaacaaggacctccaggacggcgcgcagatgcagctcaaggctcgaggcggcagatgcccacctaacct

SEQ ID NO: 432328 - DNA, 390 bp, Oryza sativa
  unsure (1)..(390): unsure at all n locations
gcgagtgaatgccggtagagccggaccgcaggagggcgcccaggctgtgactgcaatagtggatggctcgaccggcagctcgccgcggcgcaaggcgcagccgcgcccgcggcctcctgctcctcgccgccgccgacactcgagtgcgtgaggggatggccgtgatgcactgcacccttgaggaggggcagcaccaatcaaatatgactggcaacggcagggactggagagggcagcctcactggtcatggcaccggaaacggctaatggtgcgcgtgctacaaccacgcgagccacatgatctgccgcatgaatctcacctactagtgctaaaaccacacacagcttngatcgtatgatgagatcaaaggcgccagatgggtttgtgct

SEQ ID NO: 432329 - DNA, 168 bp, Oryza sativa
ctttacttttacctctacaaccaaggtcgttgcgatgggcctctttgactgacccgcggtgtaaaaaacaggactagacccatgtgacggccgttagtttaaaatgaagagaggcatgctcactatgcctccagtgaactatggcacgacatgcatggaatgatcttg

SEQ ID NO: 432330 - DNA, 235 bp, Oryza sativa
attcgtatctcctcctctcctctccctctccgggggggcaaatttacccaaagccccctatcccaatgccctcccaggcccatccctagcttgttccaccccaaaccctcacccccacccatggcccattactgtcgcgccggagagcttcctcacatatcccttctctacccttcgaccccgtgtgtgcctacgaccgtcaccgccggccccgtactcactgcgcctggaacga

SEQ ID NO: 432331 - DNA, 158 bp, Oryza sativa
tctaatgagggcgtcaacatctccatggtatgaggagggaccttatatacacttgtggagaggttgatcaaccacccgatactcttagccaagggagggattgacaggggacccatgggcctgagaagaaggtggaggagtactttacggggctgggc

SEQ ID NO: 432332 - DNA, 497 bp, Oryza sativa
cgacccacgcgaccgataaaatagaacaagcaaggcaccaaaaccccgcaccatggaacaccgacaccaccacctcgaccaccaacaaaactaccaggcggtggacgaaaccaaagaacacgaaaaggagagaactataaactaccaaggagaaaacaattaaaaaaaaataaaattaaaactacatattatacaataaaaaattaataaaaaaagaaaaaaacaaaatatacaaaataaaaaataactttataaaaattataataaaaaataaaaataaaaatataaaaattatcaaataaaataaaaaatatattaaatgatatcaaaataataataaaaaaaaataaaaagaaaaaaaaaaaaaaaaaaaaactataataaaaatgaataaaaaaaaataaaaataatataataaacataaaaaaatataataaaaaaaaaaaaaaaaattaatatacaaataaaaataaaaatataaaacataaaaatataaa

SEQ ID NO: 432333 - DNA, 447 bp, Oryza sativa
gttctagtttgagttaactgatggcttaatatgtgtatttacctttcaaaatccccttgccttcttattctgagcaaaagtgggaaatgaccagttaaatttggtccttacctctcactagtctgtctggaacgctggacatagtatagaacctttatgttttattcaaattgaagaccaattctacctccaacaatatatgaaactgttattaatagatgctagtactatatcctgctatgaagggctgtaaaatgaaatcacaattcgggtatgctaagttatgcacatcatcgatttggtctcaggtgggacgtcttaagctagaccaaacccaaatactgtctagctactcagcgaacatgtggaataacatgatgcattgcacattacttatgatcttgatcaatttcacttaccgctgtttatactttatataacagaaga

SEQ ID NO: 432334 - DNA, 482 bp, Oryza sativa
ttatctccatcctcaagcaagctacaagcgcggctactctcctcctcgcgtcgcctgctcatcccgcgtcggagaaatcggtttcgttttttcttttccgctgtggtgtgtttttctccccgttcttggtgggcgcgtctgctgcgtgagagatttttttgggtttctgctggttgggttggttagctgctgcgcttgctgaggtttctagttgttctttggccggattgtgtgactgcgtccccatttcgtgttcttgacttcttgttgggggaggggagcttttcgccgagcccctttcgtgcggttcgggctgttgtggtctggggaggggtcgcgtctatcctgttggttagctgtcttgttcgataacctgattctttgcccatctcttatcctcttttatctttttttcatcgttgtttttattctctttccttttttcttgactctttttttttttttctttttttttctctttt

SEQ ID NO: 432335 - DNA, 348 bp, Oryza sativa
tcgattctttattacattcaataccatctccacaggagtaccatacaaggacgcgtcgaggctccaaggacgactacatagacagcagctgtttgatctcaatagccagcacgccatgcagccattacaggcaggatgtcagcaactgctggtacaacttcagcgtgcctggcaatcctatcctatcacctggaactatacatactactcacaaagagtctggatagatggaaggaggcatatccaaacactaataccatggcagatatcatgccgggctctaacatatgtgactagactgaatacggggattcatagcctttaagatgactggacctaagaaattgt

SEQ ID NO: 432336 - DNA, 222 bp, Oryza sativa
ttacatatgctccaacagaaacagcagagagggaatgcagggtttacgcccgctcaggggtgctcccaaccacgcaccacagctaacatagccgtaacccataacctagagttaaacctcataatcttgcctcacacctccctacttagcctgttgattatgtactctactatcaagcactctaatcaaaacccatccatgtcccagaaaaggaagccgcag

SEQ ID NO: 432337 - DNA, 375 bp, Oryza sativa
ttattgtttcgatccaaatggcatcccagataccgattttctttgtttggaatgctggaattttctgcagattcctgcaagatttgaattgtttggtgtaaaattctgccatgccatggatgtgctaattaacttggacatggtttgattattatccccagggtctccaattgaggcgggcggtggcaggtcaaggtggcgattgacaaggcgggaggggatccatcggttggccggccggtcgtcgacgccatggcggtgagccagagcgcgcagctcggcatggccaccgcgttcttcggggcgctgtccttcctcttcgcgatcctcggcgagctcaacaagtcgccgcacgggacgccgatcaggggcagg

SEQ ID NO: 432338 - DNA, 226 bp, Oryza sativa
gtactctcgtgctccgtagagtcgccgccgcgcgcacttagttcgccgccgccgccggccgtcttcagccacgccgcgccgtcgcttgcgtcgtcgccgccgcttgccgccgccgccgttaggtgcgccgtggtgaggagaacctcggccgcccgtcccccttcgccgccgaccaccggagctccgtcgtcgccgacaagtcgagccgtcgtcgctcgtctttttg

SEQ ID NO: 432339 - DNA, 292 bp, Oryza sativa
tttcctctttgcccagatcgagcgaatccaatccaccggcgaatcgaatccgcgatggcgacccacccggcctccccggtcgccggcggcgagaaggccacgccgccctccacgccgccgccggtgcgcctggcggggggtgcggcggcggtgatccagtccaactcgccgcggttttctatctcctatgtgtgggcatgctaccatggaagctttttgtcttttccgacgtattgtcattagctatgccacggtatacttagagattaatggtcatctactcagtggtctt

SEQ ID NO: 432340 - DNA, 463 bp, Oryza sativa
tcgattaaatcatccatcgccgcttgcgactgcgagcggcgcctccgccggcaccaccgccgtctgccaccgccaccgccgccgtctgccaccgcgcctccgccgtcgccctctgttgtcgacgttctactcccttggatctacacacacctttctgtttcgctcctgatccatgcccaaatcttgtatattacttgcgcctcaaacatgtttgggttgacgtcttggtttggttccattctttttgttattttttttttcttcttttttttttttttttttttcttttttttttgccatgtctttttcttttctttttgtattatttttctttttttatttgtttttattgttttttgctttctcatttttttttttcttttatcttctttctttctcttttcttttttctttttttttttgttatttttcttctttttttctccttattttatattttact

SEQ ID NO: 432341 - DNA, 94 bp, Oryza sativa
tcgatacaagccagctccagccacacgagcctagtgcaggtagatacaatggcgtccaccgcctctttcatgctcgccgtcttgctggcggagg

SEQ ID NO: 432342 - DNA, 109 bp, Oryza sativa
gtccgccgctctcctccgcgccgccacccgccggcgaatattactctcccgggccaccgaccgacgcgtactatgcagatcggcggcgagaaaggcacgcatcctttaa

SEQ ID NO: 432343 - DNA, 352 bp, Oryza sativa
gttcttcctcctctcgcaggagaaaatttcgctggttgaatcggagggaggcagcaatggccgctcgagctcggtggcgaatcctcgcgctgccgctcgctcttctcctagcggacgggtcgtctcttgccctcttttggcggtcctttcttctttgagttcctgtcttattttccttctctatctttctcaccccatatacttacttctctctttgcttttcctttttgtcctcattactcttttttcactccctctctgttacttactgtcttgtattggttttttctctctttcctccttcttgcccctttttctaactttttctattcccttctcctccctttttctt

SEQ ID NO: 432344 - DNA, 146 bp, Oryza sativa
taagatcgcgagcggccgcgcacagtgctttttttatttttcgtcttctgccttgccatttgtgagctctgagcctcgatcgaggtgtgggctggagtgttgggcgggagcaagaatgaatgcggcctgcgtgcggagagaggaga

SEQ ID NO: 432345 - DNA, 152 bp, Oryza sativa
catttataatccccacggccacatcctaccgtggggccggctacgccaacgactaccctgtgccgccgctacgtttcctactcctcctcatccatcttgacggattatcgcggttaggtctatccatatctccaaaatctaacataattcta

SEQ ID NO: 432346 - DNA, 159 bp, Oryza sativa
tttcgcctcttctccccctctcctctcctctcctctcctctctgcgtgtgcatctctcgattccgatgccgccgccgctcgaagcgcgagactacatcgggctcgcggcgtccccggcctcgtcctcctcctcctgctgcgcgtcgacccccgtcgccg

SEQ ID NO: 432347 - DNA, 460 bp, Oryza sativa
ttttcggtagaacaccgcatcagcagtagtaagcagctaattgcgtacgtacgcacattgtggcccggggcgagatggcgcagttttatttgtttttttttgactattttatcttttccttttttttattttttattattttttttattctttttttttttttttctttttttttttttttttttttttttattcttatttttttttttttttttttttttttttttttttttctttttcttttttttttttctttttttttttttttttatattttttttttttttatttttttttatttatttttttatttttttttttatctttatttctttttttttttttttatcatctttcttttcttatttttttatcatttatttttattatttttatttttattttttttttttttcttttttattcttctttattaatttttttattttttatatttttt

SEQ ID NO: 432348 - DNA, 491 bp, Oryza sativa
ttgattttctcgtgctgcacccgctctgctcgcggcccttcaccgccggccgaggaagcgtacgatgaagttgacaagagccgaaggacgacggcgacgatcaagcggcagcggcggccggtcacggaggtgagctcgagacagacatggaaccccttctccggcgccgtcagccgctacaaggtgcacgtggctttgacggaagcctttgtgtacgagttcgggaggaggcggtggttcggcttcggccagacgagacggttgttggtcgcggagacgacgacgacgacgacggcggcgaaggggagagtacggcgagcaggcgcaccggcaggtcatcggggaaggatccggagcaaacctagcgacggcggtggcacggctgccgcggtcgtcgacggccgagaggaggagagcaccaatgtacacttacacctcctcgtggaggacgagatcaggatgtcgtcgtcgccgcctgcgctgccggcggt

SEQ ID NO: 432349 - DNA, 419 bp, Oryza sativa
ttcctgttttgctgcacttggcttgtgctctgttatgatttctttgcgacgatgggcaggcacagcttgcctggggcaacgagggaggtggtctgggtgtgcactaccatcgtcagagaccgatgtggaagcgcacaaatacaatgcggagaacaattacatggacttgatcacggacaccggcatcctgggcaccaaagggaggccgacccagatcaccttcacccagcctacctacaggcagacctacttctgcttggctacctgccgttgcatgctacctgtcggctcatcggagactttctggcgagcaccataggactgccggttctgccttctcagagcactacgagcgcctacattaataagggagcgaacatgcttatcactgcagccgcctgcagggacgccaactaatt

SEQ ID NO: 432350 - DNA, 449 bp, Oryza sativa
tttcaaactgttggacccccgtacccaacgcgaagctgcagtgatggctcaagagagtcttggtctgaagtggacgatggcacgtgacctatggcatgatggcacctgatgacatatccagtgttgaccgctgttcatgagcgagaacaaattggcagagcactgaatactacataatggttcatgttccagggttgaagaaagccttgatatcgttgacctggagaggatgctggtgggtagcagagctcgagctctttcataacacctgcaagacgttagactatcacatctgataggctgtgcacacagaacgtcatatggctgactgagatgatcaccagcctaggagctatgagagattatcacccaagaccgatggatgatagcatgtacagcgagagcattgaccatgatcactagtacgtggaccatgcttagactgcata

SEQ ID NO: 432351 - DNA, 492 bp, Oryza sativa
gtccgttttcgactccctcgctcgcgccgccgcccgggcctcgccgtcgccgccgcctccgcccccgccacgccgcacggtgtcatggctcgacatcaccgacgccgccaccgccgacaacgacaacgacaagagcaaggatgactcctcgctcgacgccctcctcaagccgcccaggccggcgagcggcggcgccaccgtgaagcggagcgcgagcttctgcctcaagagctcgacgtcgctgctgctctgcaccgaggggctcgggtcggagagcaccgtggacgccgacgacatggtcaaggacggcgacggcagcggcgccgtcgtcgacagcgggatggacgtggacgacgacgccagcgacgtcgccgccgccgtggcgggcgacgacgccttcggcgccggagggaaggagaatcggccgccgacgccgccgccgtcgttcccgccgccgatacggacgatcgggcgcggcgggaagccgagtgt

SEQ ID NO: 432352 - DNA, 487 bp, Oryza sativa
  unsure (1)..(487): unsure at all n locations
tttctttggacttgaattgaatggaacgaagaagttgataactaggaaacaaagtaaaatctgaacaattcgacttagatctaacggttagatagatttgtgtgatttggtgagatgaaatgtattgagtgacacatacatggttcctttctataatacaagtgtgtactcgatatcataaaaatactataattgagatttcaaatgagcacagcttgttaattaatatctatgtggcccacatagataatgttatttttgatggaaattattgtcaggctttgcccaacagtatagcttttataaaagaaaaatatttacatcatacaaagaggacacagaaagatctgaagaatattacaaagtttgtaaccaaacaaacaatagttgtttaagggggtccttcattctacacatttgccanaactatcatctggaagaagttgagattggagctccaactgatacccaagtgctgccaacattc

SEQ ID NO: 432353 - DNA, 313 bp, Oryza sativa
cttaatgttgctgctgctaatcgcaactactgccgtggaccatggccggtgagactggggtcctaaagggcggtatgacatgccaagggagtgctagagccggacggggaggtctcacaaaaatggaaggtgaggagacctttgacatacacatggaacatgcataaggtgacagtaaagggcactgataagcccgaagacgttattgagacggactccacgacagggaagatgaccttctattgtgaggctgcaaaagccgattctgattctgcagctgcagatgcttctgcttgtgcttccgcaacagaag

SEQ ID NO: 432354 - DNA, 469 bp, Oryza sativa
tttttattatgatcgaagtaaacaaagtgacactgaaaatttaaaggtcgcatcgataattcaaacgcatggcaaaaaacactcttgatgccacgctatatatacatatggtgatcataacactcccctatcaatttcttcatgtatacataagtaacataactcaagaaaattaagctaaacaaccccctaaaaagacagaaaaaaaaaatcaaaaggaagcctcgtatcaactcaaaaacttttggcgccatcactcttccttggctgcttgacacactcatcatcagtaaccactactatagctatctagctaattaattactacttagaaaactactcattccatcctaaaatataagatatttagactggatttcaattacctaagatatatccaatccgatcaaaaatccttatattctgtgacgagtaggagtattaataagatcgagatggtgttgcatgt

SEQ ID NO: 432355 - DNA, 474 bp, Oryza sativa
  unsure (1)..(474): unsure at all n locations
acgaccttcgcgagtagagcaagtaagctcgcaccgcaccgaaaccgcagtgcgttctccttttctagtgttcgcccgccgccatccacacgccgtgccgcagatcctatctcccgtccgcggcggccgaagcaatcggacgaattcgtccccccctgcttcgcctcctcttcgctgtgtagtttgtgagcgatgcgagcggatcgtctgatggcggaggggggcaagcggatcgacctgggggcgccgctccggtcggtgcgccacgccgacgcgctgccctaccacaaggccgacctcaactccggccccgtccgccaccccggcgcggtgcccttcgtctgggagcagcggcccgggcagccaaggagcgttcgcacccgccgcgcgccgncgtcgcccacaaccgcgttccatcctcaaccgctggagcacggcgtggaggattagaaccacnggagcccataccacgac

SEQ ID NO: 432356 - DNA, 465 bp, Oryza sativa
gttagaggagacagggagagaagagagagagagagagagagagagagcggaggagagaggcggctcgccggctcgagctcgactgctccccactcgcggccgggagggagggagggggagagaaaggagagaggtgattcgatggaggcgaagggggagaatgacgcgcgggcgccgctcctggcggagcggcggcgcaactcggtcgggtcgatgcgcggggagttcgtgtcgcggctgcccaagaaggtgctcgacgccgtcgaccccgagaggccgtcccacgtcgacttctcccgctccaagggcctccgcgaaggagagaaagaatactatgagaaacaatttgccaccttgagatcctttgaggaagttgattcaatagaagaatccaatgtaatgagtgaagaagatgatattgcgggcaaaagcagagtgagtttgccatgaagatatcaaactatg

SEQ ID NO: 432357 - DNA, 493 bp, Oryza sativa
ggaaaatcctcgcttcttctcttccacggggtggttctcctccaatcctttcccctctccctctcctcctcctcctcctccctgcgccttccacttgcagcgattcctcctccccgcccgctcttctcgaaccttctggaaccttcccccatcccccacaagaagcagcagatgggcatcgtcgtcgtcgtcgtcaaccaatcctaggcgacgagcgctgcggcggcgcgcgccatctgctcccctccgccgtgctccggtgctccccgatctgcgcctcccgctccggttggtcggctgtcggaacacgcagctgcaaaaccctagccgagctgcggcgatctcaacgctggcggcgaggccctcctcttcgtcggcgtcgacggaaaaatatggcgcatgttttatttacttccccttgctgtcactgaacacatttcctaaagtcaaggacaagacatggtgttgcagaagaggttggactatggatccc

SEQ ID NO: 432358 - DNA, 491 bp, Oryza sativa
gtacagagaaagtactagctagtatattcatgcaaaatcctacctacagtatttattgggttattctctgtccagtgtataagtagaagtgatatggatggatagggtgatgaaggagaggaatcgaagttgggcatgcgtgcgtggagatccatgatgcagtgcacccccgtagtttgttagtaataattaattatgatggcaagtgcatggcatggaaggggccggtccattgataattcgacatgatccagctaataatctgcatgctacacccacacatatgacatgatatgatgcatcaatttcacctactagtgctaaaaccacacacagctcgatcgatagatgagatcaaaggggtaagatgggttgtactaactagtagtaatatacgtaagtgagcgagcgagtatacgttggaaatcaaaagttgtaaaaagtaaaagcaaagctaacactgcaatccaaaacaaagaagaaagaaaaat

SEQ ID NO: 432359 - DNA, 66 bp, Oryza sativa
tgtttaaacaaaccacctctaactcccagatactctggtgctgccactagcccactaccatggatt

SEQ ID NO: 432360 - DNA, 100 bp, Oryza sativa
tcgatttctccatctcctccttccacccataattgttttgagaaattgaatgacaatgcttaccaattcaatgttccggaaggtttcatagaacatcttc

SEQ ID NO: 432361 - DNA, 117 bp, Oryza sativa
tcttatttgtcttcctctcgccgctgattcgatccgatccgaaccgaaccaaggggtggggaagcaatgacgacgaataggagcgtggggactctggatgaggcggatttgaggtgg

SEQ ID NO: 432362 - DNA, 91 bp, Oryza sativa
ttggttgcagccggggccggatggggggacatggtgcctatgaagaggacgatgttggtttacagcttttttggctgtatatttatttata

SEQ ID NO: 432363 - DNA, 128 bp, Oryza sativa
acgcttaccaccacgtctagggttccgtcgctcctccggccgtcgacgacgtcgtcgccgactctcctcgatctcctttccgagtcgtcataattggttgtggttgtttaggaattatgcattctttt

SEQ ID NO: 432364 - DNA, 231 bp, Oryza sativa
attccccgagcgccgcgcgcctcgacctcccctggctccctccacgagccggtgccccccggatggactcggctcgctcgcttcacgctcgtggatgatatgaacctagactcagcttgacctcctggagcacgctcggaaggatgacctacccagatccggatcgccatgacgaggaatacgggctggagcagtgtaataggtaaatttggatgaaaagggacctgagag

SEQ ID NO: 432365 - DNA, 110 bp, Oryza sativa
ttgtttgatacatggacgctataacaggatttagtgaactagttgctactctgattgtatcaaacataaacattgacatatatgtaaatggatgagttgtgtataaattt

SEQ ID NO: 432366 - DNA, 91 bp, Oryza sativa
tttatgctcgatttctccccctctcccacgaaagatggcgtcttacattgttggttacccttgcatggtccccaagagggagttcaagtat

SEQ ID NO: 432367 - DNA, 398 bp, Oryza sativa
cgacacgacagatcggcatcggcgggcagggtagagtgagatggccgccgccaccgccgcggtttatgcgctgttgatggcgtcggcgctcgctggggctgcggccggcggcgacatcgttcaccacgacgacgaggcccccaagattccaggatgctccaacgactttatcctggtcaaagtgcaaagttgggtcaacggcaaagaggatgatgaggatgttggtgttggtgctcggtttggcctcgaaaaatgtgtcccaaggagaaacatgcaaatcgaactagacttatgttggcagatcctattgattgtggcactttttccaaaagaaaaggttttttggagatattccttttagtccaaagaggggaaatgcaagttcacgaaaaaaagca

SEQ ID NO: 432368 - DNA, 90 bp, Oryza sativa
atcgccggcgaatcggcggcggcgactactaggacgactaggaggccatagggttgtggaggaggggtgggggacctgtctttgatgctc

SEQ ID NO: 432369 - DNA, 251 bp, Oryza sativa
tttagatctcctactcctcctcctcctcgccgccggcgatggccaacgaccctctcgacccgtcgtcggagccgcagtctcatacactgccggcggtagcagtcgcgaccccgttccccgacccctcagccggtccttctccgccaccgtcgcgaggcctttgagcacggcactcttccccatccccaagctcattttccccgagggcacgcttgcgcacactcttgctcaggtcaaaggacaagctcgcc

SEQ ID NO: 432370 - DNA, 325 bp, Oryza sativa
ttcttgccctcgccgccgcgggcgccgccgaatagcctactccgactccgccgccgtcgcggtgctagcggcagcggacgacggcgccaagatgaagggcctcttcaagtccaagccgtggacgccggcagacgtcgtgcggcagacgcgggagctccttatcttccttgacctacactccggatcacgcggtggagacgccaaacgcgaggagaagatggctgaattaagcaaaaaatattcaggagttgaaagtcaattctttatggcaatggtgaatctgaacctgtgactgaggcttgggtgctattgacccaagaatttt

SEQ ID NO: 432371 - DNA, 372 bp, Oryza sativa
gtgaggtcaatttgagcttccatctcgcatctctctcaggctcaccgtcaactcctcccttaatctctcatgcttatgctcatggcagccgacgtctccattcacacgccgcctctctgctctctgctctccctccacacctactgattcttcttccccttcccttctccgctttccctgccttgcaaatccgccaaagggctcatcttagtgttcctcttgcgtgattccgagctaaaggtgccgtcttttctcccaaaccaccaccattcatttagtgttccgggggtgatccagtgcaacaaattggggagtaattttgtcggtttttggagattgctcaattttggggcaaaatttgagaagaggatg

SEQ ID NO: 432372 - DNA, 105 bp, Oryza sativa
accactcaggaaaagcaaagccgccaccccggaccggaccggaacaccaggcccgacccacgcgtcctattcaattaagaagagacgagacgagtgaaagaagga

SEQ ID NO: 432373 - DNA, 126 bp, Oryza sativa
ttgataagtaccacattggagcaccaccgttttcaaggtgtttgatggaattgatatggatatcacccagccaagcaagaggctacatgtctgttaatgaaatactcataagcaaaatctgtaatg

SEQ ID NO: 432374 - DNA, 457 bp, Oryza sativa
tcgttaaaactagtgaagcgtcactgtttcaggccatatagtttttgcaggtgaagggcacacacagatagtttcttttctttgctaatgttagaggtttccgcctttgctaattgctattgacaccatgctgatcgttatgagcgtatctctacatgagcagaccatcttttttcaaggaattccttcagtactccacctgaagaaaaccatgtaaattttaacaaaaaggggaacattaggctatgttttggttacaacccagataccactctagatgggcctatgcaggccttagcaactctattggactaaaaaccctttctttaaccaaaatgatcatcctgaagttactgtctttgaaccctcaagtgttacctattatacttggggggacagttaacccatcagtatacacatgggactgttatgtaactccttgaatcctgataagcca

SEQ ID NO: 432375 - DNA, 221 bp, Oryza sativa
tcgtttcgaattcccatatcagaatccgagggcttggggctcttctacgatcccccgcctccttctcctacttcatacgggatatttctcggtggcatctcgaaatcctcatccggtttttggtgaaggtttccgtggcgaggattaaggggtggtgtgttctttggagaggaaagaaaccggatcgtacgggtttgaattacaggggtaacaggaaactt

SEQ ID NO: 432376 - DNA, 100 bp, Oryza sativa
acgattagttagaagcataggcaagaacacataaatggcggacgagaagctagccaggctgagagaagccgttgtctgttattgcagaacatagaaaacg

SEQ ID NO: 432377 - DNA, 291 bp, Oryza sativa
tcgtttcgcctataaaactatcaaccccgccattcggagaaggaggagcaagagctccaagaagagctcccccccctccaccaccaccaccaccgatctctcctccaatccgcggctcatcctcccatccccgtgttgcgggatctttccgggcggagcaacggtggtcgggtcgccggatttgggggtgatccgggtttcatggggtcgccggagggggaggaggcggtggtggccacggcggccgtcgtggaggacgggctgcgggggaacggggatggtggtggaggt

SEQ ID NO: 432378 - DNA, 103 bp, Oryza sativa
atcgataatcgcgtgagcgccatcatctctgtagacagaataaaaaaaaatcaaaagggggaggaagcctagggaggtttcagctgagaaggatatgggtagg

SEQ ID NO: 432379 - DNA, 484 bp, Oryza sativa
tcggtctacaaatcgcaattccccaatccatattcccttcccttcctttcctcctcctccatctccaccctcccgccgccgccgccgccgccgtcgccgcggcacactccccgggaccagcagaggccgccgccaacgccgcgggggcaggtaaaaaggcgcgcgagacgcccgcctctgcccgctgacctagatcgctgcggataaggttgcttgaagcagtggaagatttcctggatggcttgtgctgcagcaactgatgattctgctgcgagcacggctgggatgagggacgaggatcgtagcctgtctggcgagtcgttgtccgagtggcggtcctgcgagcaggtggagagcgagagcccttcgacgtccccgcccttttgggacactgacggtgatgacgatgatcctggccccaaaccttcagatatatttgggcggtatacttggagaattgaaaattcttcaaaggagaagaaga

SEQ ID NO: 432380 - DNA, 386 bp, Oryza sativa
tcgattcacgccaaaatattgccgcacccaaagccggctccgctcctccgcgtgcgccgccgccgactcgatcgaattcgatcgctttcgcctccttcaccacctcgacgcccgtcttccgccggggggggggggagctcccaaatcctagggtaggctaaggcccccaacaatcaaccacagaaacccacgggggtcttcctttccttcaattccaccgcctctcatcgggccgcgggaagaaattggtcggaatcccctccgcccgcgctgccgccgggaggtccttagctttaaaggtctagctggagtatcctgaatggatttgaatgcttcaccatcgcctgaggaagatgaccagtcttatgaagagcatgctgattttt

SEQ ID NO: 432381 - DNA, 222 bp, Oryza sativa
tttcgatttcatgagacagaccgaactacaatttcatgagagtgtcagaacgttttgggcatactcttatgcaggaacccggaatggcctgggtgggcgtgcgttggacaggaccttctcaaggcggactgcgggcatatcgaaacacccgtattcaagatcaactatccgaggctccgggtctggagcgcctagagagggctggcccaactgctatgggga

SEQ ID NO: 432382 - DNA, 106 bp, Oryza sativa
tcgctttgatcctgtgctcctcagatagctatgcgattcttggaaatccttaggctacccaccatagtaacataaaatcctacgtaattacatggttaggattctt

SEQ ID NO: 432383 - DNA, 410 bp, Oryza sativa
tcggttggctcgtttgcgcggcgccgcgttgaagcgatctgttgatctcgcgcggtggatcaccgaggccgccttccctctcatcgcgacgacgatgggaggggaccgagggaagaagccggtggataccccggcggacatgcttctttccagccgcaaaaggtggctcggggacggaggttcggatcgcgctcacggcggctgcctgttttacgaaactactccttcgtccttcacgcatgggtcttcttcctcttcccccaatcgcccgctgcacgataggatggaggtggatacaaaggaatcagagataccaatacagaggacagaaaatgaccgaaagattagtgccccggatcaaaagaagtcattaagcttgcaggaggcaacggttccagggccaggaagac

SEQ ID NO: 432384 - DNA, 386 bp, Oryza sativa
tcggttgaaccacatccacactgcagtccctggaggcgagccaccaacaacaaggatttgcgacttcaggttgggaattcaattgaaatgttcataaattagttttgaattgagacttatctgattcatgctctgcgtgttgttctatataatattactgcccctcaatgcatgtaatgttatttttatcatgatgactctcagttctgcttaattattgaaaaactatggtgtcaagagtagcatgcttgagtgcttagtaacaactgatgtcaagagtagcatgcttgagtgcttaggaatagaacaatatttttagatgaaagatatgaaggctcaaaaatcattaagttttacaaatgcagaacttccttttttttcttcaa

SEQ ID NO: 432385 - DNA, 131 bp, Oryza sativa
gacatgtacacatattcggtattgacccacttgagtgagtatattcaaaatctccagaagactgggttgctggaagaaaaggaaatggcccatctagatgatgctttgctgacagactagtagaagttcat

SEQ ID NO: 432386 - DNA, 507 bp, Oryza sativa
tttctattggttatgacttactgactcacactgccaaacccttaattgtggggctgactgctattttctatatcatgtgggggccttattaaaaaatatacaagctgtcaaccaacaactaaagcaaaaccacaaaaaaaataattctgaacaattgaatcgttaaatgagcaaattttcagaggttctcaaaaaaaaaaactcagatgtagacacttgggttacccaaaaccataaaatatatggactaagttacaaagatcttaagaagagtaatcaattgagtccaacaaacagcattgatcaagcatttttcattttaccaaacgaaataacaaatgcagagggatccatcacaaatcttattaaacacgtggtcacaattagcatagaagaacttgcaataatcaaatcatttaaatgcatccccaaattatcactaatcacccccttaaaagtcactaatttacaatttacaaatcgtccattttcacatcaccattacca

SEQ ID NO: 432387 - DNA, 154 bp, Oryza sativa
tgggctctttcttgattactagtttagctgcattaagctaagtattactttggttcattcgttgtgtttacgcgagctattttgtttgcaggtttaggggagtaaagggaaatggatgtggagtatattatttaaaagggatagggttttttta

SEQ ID NO: 432388 - DNA, 147 bp, Oryza sativa
tgtgtcctccacggtaaggttcgttccatccaagggcctttttatttctcctttctctgtgtctcgctcgtttccattgagcctttgctctcgcgtctctcgtgtctcgtggtgtttttggtcttggccttcctctcgccatggacc

SEQ ID NO: 432389 - DNA, 96 bp, Oryza sativa
tcgtcaactgtggcttctaatcaaggtggagctggatttgggggaagctcgaccatgtcgatggcttgttacaagcttgccgccgtgttcctcgcc

SEQ ID NO: 432390 - DNA, 121 bp, Oryza sativa
cagcgccagatgtagagtgcggctgctttaaagtggagcgggctgttttaaataataacatgagggggccttagtaataacatttcaagctggcaaccaacaactaaagctaaaccacaaa

SEQ ID NO: 432391 - DNA, 484 bp, Oryza sativa
gtcagagacaaggatatgcagcttcaaactgtgtgggcaaaacttaggcgtaatgaagttcataaagatgatttcttgagagttatcaggaacatcgttggagatcaaatgctaaagcaagcagcccataaagtttttgcacagatgcaagcccaggcacagagaagtggccaggcaaatgcaaatcagcaggctaatgcaaatcagtattctttacaatcccaagtatcttccagcggttcagctcaattacatgatcagcaagttcacgtgtccaccacacctaatcagggccaaaaaaaccaagcattgtcttcatcccaaacctttgtgcaatctggcactcaggtgcagagcagtatgactgctcatgataattccatccaacggccagatgcaaagggaatgcatgttacgccgaaccgaccttctgttatgaactcagcaattctgcacaacaatgaacaaacagcagcaacccaca

SEQ ID NO: 432392 - DNA, 76 bp, Oryza sativa
gcggcggctgcggcggagggcacgggggggactattcgtgcggacggtgcttttgcgcacaagaaaagcgatcgat

SEQ ID NO: 432393 - DNA, 576 bp, Oryza sativa
ttattaccaccagtgcaagaacccttctaggttatggtcttttaggaggaggtggagtttattattatttttaatttttatttattttttttcatatatttttttttttctttttctttattttccttatttttttactttttttcttcttttttttatttatttttttttttttattatctcttttatatatattctttattttctctttttttctattttttttttactttatttattattttctattttttatctatctttttttctatttttttattttttatttttattattttattatttttctattttatctctttcttcttttttttttttttttatttttctttttactttttttatttcatcttatttattttttctttatttttatttatttatattattattttttattttattttttaatatattttttctatttatatattactttttttaatctttttcttttttttactattctctatttatttgtttttatattttatactcacttttacttattttattattttttattactaacttatattatctatctttttttat

SEQ ID NO: 432394 - DNA, 455 bp, Oryza sativa
gtttcatccttggcacggttgcaccagcagggaatcatgaaccctaaacaaggggagaaccctgcagcgaactttcaggctatgaagacttctcagaacactgctattgggttacatggaagcccgacaccgtcaaacattcagcagcagaattactctttactccatcaaatgcaagccatgagacacgtggatgttgatccggcaaatatagctggaaagaagcttaaatcacctgaaacaggttctgatgcttcacaggttgactggaaatctggtcagaggtttgcgcatggaaccaataactcggtcagatcgtctgtagataacattggcaatgcaaatgtcccagggccatcccctgctgacatgaagatgcttagctttgctccaaggaacaatgaagatagagcgtctcagcataccctttcaatttcttcaggagttccttcctt

SEQ ID NO: 432395 - DNA, 267 bp, Oryza sativa
tctcttcttcctacttcgtcttcttgctggtgtgttctaggaggaggaggaggaggagaagctagcgtcgtttgcgtctttggtctctagctgtctgttgttctctatttctctttctctttttttcttcttttttttctagttttctctctttctttcttttcttcttactcttttctttttttattttctttcctttctctttctcttttcttccctttttctttcttttttctctttctttttctttcttttttttttcctctt

SEQ ID NO: 432396 - DNA, 175 bp, Oryza sativa
tcggtcgcgcccccacacctcgcctcctcctcggcttggatctcgccgcatcatctgccgccgacgacgacgaagaggaagacgaccgccatggggacggcgagcggggaccagccggcgggggcgttttttgacaagctgcggcacgtggagtccatgtaggagctgccctacg

SEQ ID NO: 432397 - DNA, 188 bp, Oryza sativa
tcgttcgcacaacgaatccagagagattctggcacgagtgatgcatctatacgtagccagatccagaatgaatcagctcagctgggagtagcactgcagcatttgggtgcaatgtttttggagcttggtcgaacaatgatgatgcatctgatggggccatcccctgctgatgcttttgttaatgctgg

SEQ ID NO: 432398 - DNA, 331 bp, Oryza sativa
ttctgctcgcctgtcgtccgcaacgagcgcttgcttggattgcatcgacgcggagcttgcgcgggcgcaggaggagcgcaagaagatggaggaggccctggccgccggcgcgcccatggccgtctcctccgtcaccttcgacactgatctttacggcggcggcggctccgaccccaaccgctttgccggctacgacaccttcattcccgcctccgaggacgactcgcccgaggactaatccgaggcggccgttaaccccgtcgtccgtcgcctcgcctactacaccggccacgccgtcgccgtccccgacattcctcgcgccgtctaggac

SEQ ID NO: 432399 - DNA, 122 bp, Oryza sativa
gttaagaggagcagttgtcaatgctggattcaggtgacttaaaagttagactttttatggcaaccgaacttgatgacaggcacctgaaatatattttcgtagatgaaaaaattaacttaaaa

SEQ ID NO: 432400 - DNA, 198 bp, Oryza sativa
aataggtgatgctctagcaaaaaagaagtctaagatagcctacaaagccaaattgccacctggtgcttcaaggactaccatcgaggatatgttgatgcatgtgaatgaaatgcagtctcgcgtctatgttgtccatgtaaaccctgactctggcctggcagttttttttacttaatattttttgttatttattttttc

SEQ ID NO: 432401 - DNA, 265 bp, Oryza sativa
ttgatgctactccagcatagaacattcaggctcccgttaaaggttgtggaaaagatggttttcgctccatcaattctctccgatgacccctatttccccttcatcaattcctcttttcatctcattcctcttcctctattttttttcctatctctccccatctcttttcttttccctttccctttcttctctttcttattccttctttcttctctccctctttcttttccttctctctcctttctccctcctttttcctcctttt

SEQ ID NO: 432402 - DNA, 365 bp, Oryza sativa
tcgtttgaacatcctctactactaatcgtccgggagcatagcttaataccatctcctccttctccccccatggcgagtcaaggcggcggcgctcttctcctccccattcgagtgcttcaggcgcctttcctgccccgcggtgtctctccgctcccgttcgtcgtggttgcttgatctgaagttatgttgcctatgttattcttcaatttattttcttcttttcttgtttctttcccttattctttttcttattctatttcactttttttctcttttatttttttccattttttttctttttttttctttttcttcttctatttttttttctttctatcctcgtactttttctttttttttttttt

SEQ ID NO: 432403 - DNA, 477 bp, Oryza sativa
tgttgacattgtcctctgggctactggagaccgagccaacatgaaaacggtcgcggtgctgctactggcggtggtggcggatacactcacggcgccgacatggcagttcttcgacctattcctccccgccggccccagccaccgctcctccggcggagggtttggcaagtgggtgctgatgaaccacgaggagtacgtcgagaagaagtcgctgtacgccatgaaggccgccggcgacatcggcgggaagaccatcgacgcgagcctctcggcggcggaggaggccaaggtgacgtgggtggttgaccccaaggggacgccgggcgacaccaccttcaccaccatcgcggcggcgctcgagaaggtccccgaggggaacaccaagcgcgtcatcctcgacctcaagcccggcgccgagttccgggagaagctccttctcaacatcactaagccctacattaccttcaagtccgaccc

SEQ ID NO: 432404 - DNA, 434 bp, Oryza sativa
tttttattcagcccgacggccattgacaagggagctatgaggccggcggaccgtggagagctaccacgcccgggtcgcgcatcaggctcgggccctagcgggaccgcgcggctatcgacattactcagcgaccggctggatgcgacgcactgtctagctaacgatggatgctgactgagcggctggtatgcatagtgccgcgcaccacacggtgggccaccatggctgtgaaagcaaccctgatgaccattggcgagaatcaaccgaacgtgcagtactagggggagatcactaaggaggacggccatcaggtacggatatctaacctggctacgacggtctacgctgaactcacggttcatatcggtcggtggtcaggagaactcttgctgagctctgattcacaacgaccggatgagcctatgtcgagggat

SEQ ID NO: 432405 - DNA, 491 bp, Oryza sativa
ttgtatctaggcagagatactaagcctcttgggcatgattatccatattcaagtggatatcgtggctcagatgatattggccctattgacagctatgcaagttatggcagctcccaggtctctggaggaggttatggggcttatggtggatatagtggtcgttctggcacgcagggggttatctggccctagttcattatcctatggaacgcgacatggttattaggacttagattgacaaatgcaacaggtatggctcatccaccttgtcttgaaatgaacagaatgatcatgctatcaagacttgctccttattgcatctgtgcctactaaacacatggaaccgacctcagctatcttctgacggacctgatctattcacctttgccccatgcccacctgccttactaaaaacagccaagacagaagaatgccaagaccaatgaagtatggagcctgcttatcggagccccttaccaaaccagatgacc

SEQ ID NO: 432406 - DNA, 518 bp, Oryza sativa
ttctacttttctttacgttttactcctccttttcgcctcttcctcttccctcttccctctcttcgcttccactcctccccacccacgcctcctcctcctcgcttccccgaccatcgcatcgcggcgcagcgcagcggaggaaaccctagcgcagcagcaagccaccgccgccgcatggcgtccccggcgcggcccgccgcagcctccgtctccggcgccttcggcctctccgccgacccggcgcggtgctcctttgaccagacgctccgccgagaggatttccaggacaaccggctgctgaggtcacttgttaatatccatgaacaagaaacttattccagagaaataataacggaagctatagagagctgcatgaagaaacaagcagacaacttggtgaatacactggatgtcatcagtgggaggctatcacagttggagctgtattgctataagctggaaaggtcaattggagaattacgaagtgatgtgatggattaccatggtgaagcaaatat

SEQ ID NO: 432407 - DNA, 516 bp, Oryza sativa
tttgtttttgctgtacttctttttcacactgttttgcagttgagtagttatctttcatgcatgctttggtgtagattgagatgtccaacttgatgtgatgatctggaaaagaagaagcaatctgaaggttgtccaacttaaggtttgatgccttagatcaaatggcccagcatctgtacctaacctagatgatatgacctaaaacctgcaacgagctgtctgaatgtctgatcgagaagcaatctgaagcctcttcttttttcagatactataatgccattgacctgactcttcaggttgtgctatctccaggcaccatgtcctctcaaggcccatttagaaaggccaatccacacggtccaagaaatggcccattaagggtcttgatgcagaggatgaagatgaacagtgatcgatatgctcaaatgcataagggagcccgattgattctctgattaaaaaaatatccaacgacttggatttaagccatgttatatttactggattattgaaaaa

SEQ ID NO: 432408 - DNA, 391 bp, Oryza sativa
gccttcacgacgtggtggacgtcgacgctgacggcgacgaggtgaggtgctaccggagcgcggtggtcgggccggaattccacagggagctcggcgtcgacccgaccaagacgccgtcgggctactcggtgctcgacttccgcaagatgctccgcggcgcgttcgggctggaccgcgccacagcgacgccgagcggcgaccggtgggacatccgccgccgaccccgcctcctgatcatctcccgccgcgccgcccgtggccgcgcgttcatgaacgagcgcgccatggcggacatggcggcgagcctgggcttcgacgtgcgtgtcggggagcccgacgcgtccacggacaccttcaagtttgctcgcctcgtcaactcctgcgatgtcat

SEQ ID NO: 432409 - DNA, 470 bp, Oryza sativa
tactatacagggaagggcaattggaggaagagagcggctgttgttacgcctaaagcattattcacgctcggcgagatggcaataatccatgtcatccaccttctgtgactatcaaccgatcactgaaccgcgacatgaaaagaggcaacagcttgatctcgggcgcgttaaggtggcgatcactgccttgtttgccattcttatcatcatgattcatagggcggcgcgaacattttctacaccacgagcttcaactatggtgacagcgcttcctcctccagttcactttcagaccgccggtcacaccccagcacttactgcgtgggcaagaatatcaaggccatgtgcgcgcacaccgactagactgacgcttacgagacgagcctcgtccaagccggcggcaaccccagcgcgggctcgtcacgtggtcgcccaggacgtagcgcacgcataacggcctgcatcggtta

SEQ ID NO: 432410 - DNA, 490 bp, Oryza sativa
gtaagctttctaagggagggattaactttgttggatcattatctggctggacggccacacttctcttcatgtggatgccagttgcgcagatgtggacaaattacctcaacccaagtaacatcaaagggttgtcagctttcactatgttgcttgcaatgattggaaatggacttatgattcctcgtgctgtatttatcagagatctcatgtggttcactggttctgcctgggcatctttcctacagggttggggtaacttggcctgcatgtactgcttcgatagcatcagcagagaatctttcttggcaacaacatttggacttcttctgtggctaggatttactctctggagagataccattgcccatggcaacagctcacccgtgacttctttgaaggaacttcttttcggaaagtgaatagaactccattatgtccatattcagcagcaaactgctgccaggcaggaagctctcctacaataataatg

SEQ ID NO: 432411 - DNA, 267 bp, Oryza sativa
ggaatttcggatgcggtccacccgcagatctccgaccatcagcctaacccacggtttccccgcccttcacaccccaacctcgtacgctccgtcgccgacgacgactgcctcctaccccatgtatataacccccgccactcctctcgatgttgaggtaaatcgagtgagtccgcaagtcgttcgcgattcttgatcgagatctgtcagggtgataaaggtttagaacggtgctgagtttgttaatcttgggagaaaagggaaactgct

SEQ ID NO: 432412 - DNA, 68 bp, Oryza sativa
gggggccggaactccctgctcgacccaccccacccggccgttttctatcaccccaacacccccccacc

SEQ ID NO: 432413 - DNA, 388 bp, Oryza sativa
ctcacttaatctttcgccgtctccgaggcttgcacaggggttcttcctcatcttccgccgtgggcggcgacagcagcggccgcggccatggcggcggcggagcagagcgcggagcacttcagggtgcccttatctaatgggagaccagcccgtaattactcatacttgagcgctaacaccccgggaagagcagctggtgtgcaaaggaagctggagttggatcaccaggtgaatatgaattcttgtcacgctccagagggtaaccataaactgacaaaggcagagggaatgaatcaggcttgggccagaccaccaccagcagcagcagcagtaaggagcaatggaaattacttcactaaagaccagggtccttgtgcgcctgacattg

SEQ ID NO: 432414 - DNA, 130 bp, Oryza sativa
tttattgtgtgaccaaatcggctagcgagtgagggaggaggtatttttgacaggggcagtttcacgctgacagcagtgtccatagcagagcgcgaagggtatagggctcatttaggaggatgagtggctg

SEQ ID NO: 432415 - DNA, 485 bp, Oryza sativa
ctccttgcttcggctctcaccaaccaaaccaacaacctcgctccgatggccgcgccaacgtcgtcgcagccggtggcgcgcttcctcccccgcggcggcggcggcgggttccgcgcctttccggagtccgccccggcttccctccgcttctccgtcggccgacgccgcgccgctcgactaggtccgcctattggaatcgtttcgcccccccttgtctgggtccgttcggtggaattcgggtagagtttgcttcctgcgcggctacggggcagttgggaattgcttggctggcctctctcggctttgagttttgtctggtcatctactcgtgggtgaagagggttgccactcgttgtctggctaagaaagaatcttaccatttttttagcattgttttatgccatgattgtgtctattgtatagggtaatttgaaaggagagaaaaacggctgcttcgttctatcctagcattaagagtttgttta

SEQ ID NO: 432416 - DNA, 388 bp, Oryza sativa
tctacttatattatagataaataacgtcaataaaaagggccaagctaaactaattaaaagggacagaggaaaaggttgtacacttacattactttttttttcttggattactaactttaatgggttatttcggtcctgggaatacgactgaatgaaagcagtgttttcagctacatggttttcaactgagagagagagatagagagagacagaaagtttggctgaggctctcctttcacaagatgcttcttattcaacaagttttcaggatttggcagacctcctgatatagacccaagggtgatgacttgctagggaaaaaagtattttttttttgggggaacaaattgcttgcttgggtttatttgatccctgagagggttcacaa

SEQ ID NO: 432417 - DNA, 388 bp, Oryza sativa
gttaccaaaaatcgtggacaacaccactaatcgatcatgggaattaacaacaagtataataaataaaataaatgtacttccacttagtaggtagctagagagcatgcatggaaggctatatatatagctggattattaaagctttatgtgattaatgagggagctagctgtgtcgaaagtatatccaagggttttctgggcggggagatcatcgctataagtgaacaggtaacctatctcgcaaccggatgctttcccgatcccaccgttgtagggtttctccacccctttgatccacttttgcgcattctccagatcctccttgctgcgcttgccatttccggcggtggcgaggcggccgaggctctgcagcgccttcctggtgatg

SEQ ID NO: 432418 - DNA, 448 bp, Oryza sativa
caacattgtgttaaaggatgaaagggatatcttctatctctctccgattttcaatgggcagaattgtctgtagtatttgtttctaaatcaaacaaaatgctgtgaagtcttcttttttgtaaagaacaaagatcagttattctgtcaagtctttttttttgcagcaaacaaaaataacttcttgtttttgtcaaacagtattcatagcactctcattttcaagttgggcaatacattcactgttttgtgtgtaagcatgcatctgctgtctgcttctcaataatgatgttggttgcattttgctaaaccaaggagaaaaccaccgaatcatgttctcaaattatctaaataacacttttatcttgtattgacatgtattggtttgggtggttcggacagtcttttctttgatatccatttctaaacatgtgggctctgttgatgtact

SEQ ID NO: 432419 - DNA, 410 bp, Oryza sativa
ggcggtggtttggcttgctcacaccacgacgctatgggggggggagaattcatagtgttggttattcatcaaatgctcatgactggaagatcctaatatgtgacattgagccttattcgaataccagttagaaggcaaggcgctcattgagcctgtaaacgacaaaaagctgaaacatcgcgcgggcctgttgatggttggcgtgcgtcacgaatcttgagggaagggcccatctgtacattaccacaagcaccagacaacctggggggaagtatcgatgcttaggcttgtattgatagagtcgtctatactaagcctgcaagcgatcttacacgcgagcattgagtggcacgaattcctgcaatattcggatgacactgactaatggtatgttcttggcaggccccgcc

SEQ ID NO: 432420 - DNA, 235 bp, Oryza sativa
ccatatgcattcccccccccctacagcaccacctcctcctgcggcttcgttctcgaacccgatgggctcccgcgccgccggcgccccacgagggctgctgctgcgcggaggagttggtatcgacggcgagcaatagttctcctggggctcgccaccatggaccacaacctagccctaaacattgccgagaagggcttcccgatcttcgtgtacaaccggaccgtcgccaaggacg

SEQ ID NO: 432421 - DNA, 286 bp, Oryza sativa
gcgttcgtttggtctaagtaactctagagcgcctgcaagggggtggcgtgatttgagcccttgagcgacaacagttacatatcgacgcctggtgcctctgggcatcgttgataggaggacatgcatcatcacgatggttcaacccactgtgctatcataagtgtgacggcaacatccacttttgtctgaccctgttgatgctgctaacgggcgccctacatcggcacatctcgcattgtaggatgacacgtgctggaccacaaggagctacatgacccacggcctt

SEQ ID NO: 432422 - DNA, 509 bp, Oryza sativa
tgaagatctccccttggagggaaccccgcccaagaatggcgggtctcggcggcggatggggcggcgggtacgacgacgacgacgactgggggctgagcgcggagcagctcgaccagctcgagcgggacgcctaccgcaagctcgccgagcgcaaggcctcctcctccgccgcctccaccgccacctcgccgctcccctccgcggcctactcgccggtcaagaacagccaccaccacccggcatccagggtttcccaggagtcttgcttcggcaaggtagaatcactttctccttctcggcttagtcaaccaaatgcatcgggaaatgcagttaataatagtcagggcaatatgtctaaggtatcagtacatcttttccttcattctactggtgtgatcgcagcgaagttccagtaccaccagaaacttgtggatgcagttcacaagatccccaagccagctggaacgggaggagagggtatgatgttccacactcatcatatcagagca

SEQ ID NO: 432423 - DNA, 408 bp, Oryza sativa
ttgctgctctcccttctcctctcctcaattaccacgccgcagccgcagccccccaaccctagctagtacggcgggcgacctgagggggtagctgcctacctctatacctgctatctccgttcgatccgggtcgggctcgtgctgctgggggcgggggcaatcaatcggcgagctcggtgatccatggccgtggctgtggggtggctgtgagggtgcccccggcggcgctcccctccgcgcctgccggcgagggggctcggactgaagggatctaggcgagctgaaaattgaagtgcaggcaaggagataagagcagcgtccaaattgtgagtacttcattagcaggaggtagtggttgggcttgctttgcttctttgcaatttggctttggcgaggtaacaatggctg

SEQ ID NO: 432424 - DNA, 557 bp, Oryza sativa
  unsure (1)..(557): unsure at all n locations
tttatgtgtttggtaatgatcatgaagaaaagagtaacagcttccttgattgtgactggggtaatatcggagattttgatgattttgaccgcttatttagcaatggtgactccatatttggtaatgagatggttgctgatggcagtaattttctctcagcatcttcagatctggtggatactactgtacaatcaatcccctttccacatataccactgaataaacaactatcttctgatcatggatcttcgcttctgattaatgaaacatctggtggaactaccgaacaagaaagcaagggagatgtgcagaagaagtcagtgaggtcacggagaagaacagaagaaagaggcaaaagtaaaatgtccaatagtacaagtggcttctcccagaaccaaggacagcatcgaccagccagttcgcattcattggccaaagcccctgcgcaaccccttcagactcctcaatacttgctattacatgataacangaacatgggacaacttcagcaggctaatcaagttattttccctgactatggatatccttcatatcaa

SEQ ID NO: 432425 - DNA, 232 bp, Oryza sativa
gtatgttcgagagagggaggaagggaggcggcgccggcacccttttacttctaccgtgacagggaggacgcggcgccgccgacattcggccccgggggaggcggtgccatggcggtgtacgacttcagctacgtgacggactcggtgaagacatacgtgatcaacctataccgtcacatccgagaccgcagcgtgtacgagacgcaccatatgtacgagggcgggttcaccc

SEQ ID NO: 432426 - DNA, 374 bp, Oryza sativa
cgagctctcgccccaacgagatttcctctttttcgggaggattttcctctacccggatccggttgctggtgccatagatcgacgcgccgtcttctcctgatcgcggtggtgttttttttttttgttttggatttccggtgctgggagtggagagattcgctcggattggatctgtgtgtgctgatccgtgtgggtggtggatctgacggagaatcggaggagaggaagaggagagtctggttgggtggtggagactacgatttctgtggaggattcgacttgcgcatcggctgcagatctggaaagggctttgggtgacctactgctccaaggtgcctaagtatatcgcgaagtgtctagctttcacgcccacc

SEQ ID NO: 432427 - DNA, 121 bp, Oryza sativa
cccacccgtccgggtattatccgatatccgcagcgagggacacatgggaggggacacctgaccagccccgtatgcccaagcatgatatcgaggcggagcggtacgaggggagcccgggccg

SEQ ID NO: 432428 - DNA, 520 bp, Oryza sativa
cgccattcgtttccctcctccgcacctccacctccttggagaggggcctgtgccgccgcatgctgctgcctccgcgcggccgtctcccggcggcgggcagccgcgcagctgctctccgccgccggattcttgatcgccgtctcgccgccttcgctagccgcgcggaggggccgcatggtcgtgtcgctggaggactacgtcacttcacctgatggcctgaagtactatgatcttgttgaagggaagggtccaactgctgaaaagggctcaactgtgcaggtccattttgattgcatataccgtggcatcaccgctgtgtcaagccgcgaagccaaactactggcagggaaccggagtattgcgcagccttatgagttcagtgtcggatcgctgcccgggaaagagcgaacgcgggaatttgtagacagtgccaatgggttatactcagcacaggcgtcaccgaaacctcctgccggatgtacacaaaactgaaaggatgaaagtgggggaaagaggaagt

SEQ ID NO: 432429 - DNA, 154 bp, Oryza sativa
ggtttgtttttagctcgcacagacggcaacgcaactctgataatacttccataaaaagagaaagccacagaaatctatccacgatctgatagcacgctaagcccatagggaactaccgaatgagacatctcgaacaaaatggcggtgagcccag

SEQ ID NO: 432430 - DNA, 270 bp, Oryza sativa
  unsure (1)..(270): unsure at all n locations
gttttcctttaatcggaagccgccgaaccctcnctgctgggggacgcttagcggccagccggccaccttccactgcctagagctcctctccttctccgggttggtgtggcgtggagatccatcctggccgacctctttcgctagtttatgaaatttacttacaaaaacaagataaaagtggagtactcgaatatcttccccttgcgccatctagcggttgaacaggggaggggcgccaatctccatcttgcgagcaggggaggggagggg

SEQ ID NO: 432431 - DNA, 209 bp, Oryza sativa
tttgactacttttgctagtactgtgcgcctgcgggtcgtgtttatattacctcctccatggcgccgcacccgcacagcaccacaccacctgcctagcgccaagctccaacagaagccgctagcttgacgcaagtccaaggaaggggggaagaggcaggaggatgggatcccccaagaagggcaagagcgccatgaatcacggcatctgg

SEQ ID NO: 432432 - DNA, 186 bp, Oryza sativa
gcgatggccgccgccacctccatcaacgccggcccgtgctccgctggtcggccgaagcggaggagccagcgccgcggcgcctctacagtcgccgtgcgcgcgtccggcgacgctagcaccgtgacgctgcttgactacggcgcgggcaacgtgcgcagcgtgcgcaacgccatccgacacctcggc

SEQ ID NO: 432433 - DNA, 231 bp, Oryza sativa
gggtgacatagctccagaatttaatctgttggattctgggggtttcttaaactaccatggcgttttttcaaccccggcaatcagctgaacatgcaccacgtcctcgtctgcgtggcgtccgtcgtcggcgcggttgacaatttacacgacccgtgcaccctgacacttgtgcccaaggagtgcattcagtcgctgacgaccaactctgatagccggacaactattatgcga

SEQ ID NO: 432434 - DNA, 252 bp, Oryza sativa
ttgccttaggcgtgaccgaatcggctagctagtgagaggggaggttcagttcacaggtgcagttccacgctcacagcagtgtccatagcagagcgcgaagggaagagggcgcatagaggaggaggagaggcagtcatgggcgaggaggagaaggtgaaggaggaggcggcggcggagaatgggaaggaggcggcggtagcggaggagaggaaggcctaatcatgttctgctgaatacaaattcttccaggga

SEQ ID NO: 432435 - DNA, 386 bp, Oryza sativa
ggttaccttaactttattgaacatagcataaactcactcaggaatggcaaagaaggtgtgatgtttattcaggaaatcgctagcaacctaagagaactgcgagcaattgctggtagtaaataacacgcacaacttctttttagttttttacacaacttatttgtatagcagatacccatccatcttgtaaattgtatacttggcaatctgttctagtttgagggaaattgcatagaaaaagcttgtattaaacacaaggcagacataattgtaagctgtgcatgtttttcatttttttgagctttgggtttgctcataatttttttaattgtattactccaagacagatttgttcacaacaaaaataataagaaaaagtataattg

SEQ ID NO: 432436 - DNA, 225 bp, Oryza sativa
tttgttggattgcctagctttgctgctttgcttgcttgctgtggtgtggtgtggtgtgaattttgttgattggtcggagcttgcagttgtgtatggtggtggtggtgctggagctacattatgctagctgatagattgtcagatcggcgacgacataaatggtaagagcagcgcacggtatctggccgaaaaaattaatcaccagggattttatacgtggctgca

SEQ ID NO: 432437 - DNA, 541 bp, Oryza sativa
tctcacaaagtgggagagagagagagagagaggggatggaaatggcggatgagctggggcacttgctggtgttcgggttcctcttcaacctgggcgtttacatggtggcgccggcgatgaccgacgtgaccatggacgccctctgccccggccaggacgagtgctccctcgccatctacctcaccggcctccagcaagccgtaagctacctaccttagctagctcatcatccatgcatatcatgattcatcatctgttcaatttcgatctcttcagctgtaaatgatccatgatatgcatccataatccatctatccatccatccatccatatcatcattttagaagttaagctcaaatcaatcgataattttttttaaggaaaaacagcatgagactgtgctttttcattatatatagcgagagaaaaataccgcccctaagagcaagaaaggggaaaagctctatagtgtgaggcaaaaggtcacgtaaacgctttgcagatcaattgatatttgctcgtgttgacatgatcatatata

SEQ ID NO: 432438 - DNA, 548 bp, Oryza sativa
  unsure (1)..(548): unsure at all n locations
tcggttttgtccggcgaccgtacactcggcggaggccgcagagcggcagcggcaggcggcggtgccgccgagggcagtcggctcggctcccgcggcaaagcgggaacgggagagagagcagggcggcacacgcgcgcgctgaggctgcgcgcggtgggcgcggcgtccggcgatgcccgggcaagagctataggaaggcgaagtcgtgggctacagccccagtccccagtgctaaggcagtttctgattacccaagtgtagatgtgatggacacccatcacagcgatcaatatgcaaagagcagcctgcagctgcaattcagggacacctctgtttcctttgaaaacaacaattctgttttggataagcatgatattacaagccctcaagttggcatgacttttgagacagccgatttggcatatcggttctacttagaatatggctaccgtgcagggttcggggtctcaaagaggacttnccatagtgttgatggggtgaaataccgcgcaacatttgtttgttacaaaggcggcattgctaggatc

SEQ ID NO: 432439 - DNA, 541 bp, Oryza sativa
  unsure (1)..(541): unsure at all n locations
tcgctttccggacctcgtgcgctcccaccaccaccaccccgcggtttcgctcgcgccaccgccactgattcgccggagagttgctgttcccttcgtgatttcgtcggcggtggcggcggcgggggtggtctcctgttgctgtacagaccagcatcgttggggggaatcggatgagatgagatgagatgagatgcgggggtggtggtgatggaggcgctctcccggaccgagcgtgtaggaggaggaggtggagccatggttgaagtggccttcgcttcgtccgccggatcctccgtcgcggccccgcgccgtcttcgtggggagctcgtcgtcagggacgctattccgtatgccggggtggctcctccgtcgcccgcgctgtcgctgccgcagccgcagctgcagccgcaggtgcaggctactacgagtggnggcggcggccgtgggaagattagccccgcggtgctggtcatcatcgggattctcgcggtggagttgttcatttccggcttgctcaccttctggtgcggctacttatgaa

SEQ ID NO: 432440 - DNA, 509 bp, Oryza sativa
aaggaacctcgatctccatctccatctccgcccggaaaccctaacacacacacgccgactctccaaaccctacaccccccccaacccccaaccccgccgatccccccgctcgccgccgatgggtcgcaagaagaacgtcgccatcgatgacgatgagtactccttcccgcaggaggacgccgcccccgcccccgccgccgacaaggacaagtccatcaagaagggcggcggcaagaagggcaagaagggcgccaaggccgccctgcccgacgacgacgactacgagccccccgcgcccccgcccccgcccggggacgacgacgacgacgaggagcccatcaacctcgtcttgaccggtaagaagaagaagaagaagggcggcggcggcgccgtgagctccttcagcgccttcgacgccctcgcggccgacgaggaccagggagcttcgggtccgaggaggaggaggacgaggaggacggcggcggcggcggccagggggagggggaggg

SEQ ID NO: 432441 - DNA, 252 bp, Oryza sativa
  unsure (1)..(252): unsure at all n locations
acgattttgccattcccgncgtgccatgcccgcgagacccctccgcggcgacggccatggcgaacagcaagagcctgctcctctgctggtgctcgctcctcctcctcctcctcgccgncgcagcgccgcacgccctcgccctcccgttctggaccgactacagggcgccggtgccgctgaacgggacgacgctgggcttctgcngccggggggggagccggaagcataactgctgcggcgccgcggatgatg

SEQ ID NO: 432442 - DNA, 481 bp, Oryza sativa
aataaaacaatagagaggacgggttttatgaacaaagcgacatggtgcttacattgtaaacacatatgtgaattataactgaatagacatgtgttctaaaaaaaataactgaatagacatacaaaggtctacttatgagtaaagaaaatgaatttaatcctgttaaaccaatggtgttttaatcgacaaagccttggcctttgctttgactatatcactattctatacagactaacactacatcatttctaggagaaatgactaccggtacgatctggaatcgcacatcccactggattgttatacatggttcgtcgggttctcgccttatcaatcatgcatcatgtgctgcctttggatctcaccaatatatgatgtcaaagaagatccagaagaattggccgtcctattattgacactggattgcaacaattgttgctgaagattctggatgggcttatttaatagccgaatcattttt

SEQ ID NO: 432443 - DNA, 54 bp, Oryza sativa
ctataggttaagctcctgcgcctggggtaccgattcccaatttccagctacacc

SEQ ID NO: 432444 - DNA, 251 bp, Oryza sativa
ttgcttttaaggattaattacttctcgtctccaccggaggagatatccagcggcgatggcgagcccgatgaaccgctgccgcggtggaggcggatgacgccgccgcagcgtgatgaaaaggatgggcctttttcgtgtgcagtactactgcgtgatgggcttcgtcgccgcacgcgtcgtgctcgccacgctccgatacatgcctgcccccgacaccgcgccccccaccgtagacggaggcggcgcaaccg

SEQ ID NO: 432445 - DNA, 220 bp, Oryza sativa
tttcttgtctagctagatcctctgcagctgagaccggggtggattggaagagctcgtgagtgtctgatcactgacagctgtgcatatttttttgctgtatgcgtacatgcactatatgatgctaacacgcgtatcactagcggacatcgactggtactagtgtcacgactgagatgttcggcatatgttcttttgtcatgtaaatatgaagaaatcaagt

SEQ ID NO: 432446 - DNA, 423 bp, Oryza sativa
ttgtgttacatggcatgctgcggcggcgtaagggggggggtggaggaactgacggagtcctttgcctacctggagggagaggcgcttagggaagcccgggaactggtggccgagctgtgccggctcttctactgacacgggtgggtctccgaagcgggcagcctcttcaccatgaaggacaacgacccggggctgcccgtcaacaagagctcatcgttatgtacacgtatggtgtgtaaaaggtgaggatggtggtacaggacatgtacgcgctggctgcagatgggatggtgctctctttacctgcgtcaaaagcatggccacacatgcctgaaaaggactgactgtgcacgtctgcttatgaaggcttatctgatcataggacctgcggctgataattatagccgtcagagggaaacttgc

SEQ ID NO: 432447 - DNA, 243 bp, Oryza sativa
  unsure (1)..(243): unsure at all n locations
gttactgacggtacgtgcgcccgcatgttgtgtacgcacgcaacgtctactgacgtgctcagccatggcggcaacatggccgtcgtcgtgtctcgcgtcctctctctcgcgcgtaaccgggagcgcattccanagctacaacgcgatatacaactttggcgactgcatcaccgacaccggcaacctctgcacccgctgttgcccctagtggctaaataccgggcaggctcggtacggcaacac

SEQ ID NO: 432448 - DNA, 517 bp, Oryza sativa
ttttgatcttcgtatcttctcctgctgctgaggggaaggtctattacagcagccagattacaaatgttaatactacaaggatttatatgggatatcagcctttagcatgccaaaataatggtcacacatatccatggtctgaagacacttttcaggttgatgttggtccaccacctatgggtttcactactaattcttcgaaggtggaacgattcttttcccatgaaacaatcactaccaaaatctatagatgatgatgtgcctattacggagacaggggcgatggctgatagcacatcatatggttatcatatcacagccacaggtagtaggaattcaacctctgtaactggccatggaaatcagctcatgggagatcctttcgacagtggtactgctgataagttcaatgcgaactcagtacgtggattgccttttgacttcattggtagtagtccaatccctgacatcggggtattgctagacgacgatgatataatgccatatctgggaacat

SEQ ID NO: 432449 - DNA, 185 bp, Oryza sativa
atctttactttagagagccaaagcaacagcaacggggggggtttcaattaaaccaccatcatcatcaaatcgcggggctgcctaggtacccacccatggagaacccacacgacaaacgggcttgcgccgccaacatcgccaccggcgagagatgcaatactacgggtccgcttccgcacgactcc

SEQ ID NO: 432450 - DNA, 129 bp, Oryza sativa
acccggagatggagcgggcaccagcccacacccaacggaccctaaagcgcgacctaataccccggctaaccacagccagccaggccacccgccaaggcatcaactacgcccagcccgccaacccccctc

SEQ ID NO: 432451 - DNA, 483 bp, Oryza sativa
  unsure (1)..(483): unsure at all n locations
gcctttttctgtgggggcggccgatctactactgccggagggctatcgtactgccctgtctcgctttgctggtcaggcttcttgtgcgctcgcgcactcgatgagaggctgctgcaccttggaaactggatgagtcaagtcggcatggctcatcatatgcgggaagcagccagcaacacctgcgactgcgataaatagtgtgcatcaatactgccagttgttgtctgggctgtttctgaaaaggagcacattccgacatctgacgcttatcatgacacgaatggcgatgaacctcatggaggacatgcctctggaaaggaaaacacggtggcngcagacccgtgtgtttcagatgagagagcacctacccactcgaatgctgcatgtggccatggggtgatcttgactagagcggaagctgctgctgcatacgacaagggtcgcatgcatactatggaagatgcaggctgctgctcctgatgc

SEQ ID NO: 432452 - DNA, 429 bp, Oryza sativa
caagcgccgccattgcaggacgagcgatgccctaaagatcgacaccgtcacggcggcggaagggggaggagcgtcgtggcgacccgctgctccccgtgcccgtccgctccaactctccataaaccctagatgttcgacaattgcgaggtcactataatcgtctctggagcgatgcatagtgctaaaaaggcaaaggtggaaccatcatctgcgttgaggtcagacatattcagcatcctacctcaagagataaaggtcaccatcctctccaagctgaattccttagatgctattagagccagcatcctatacagtgcttgatggactgcctggactactttgccccaactatatcgatgagacctgcatatcaactgggggtactctgagacgacacaccgctccaactgtattacgctcgtagatctg

SEQ ID NO: 432453 - DNA, 490 bp, Oryza sativa
ttttatcttatctgcagtaaaacctatgagtgaacggaacatgaaggattcctctgctcaaaggaataaaacatttgaagctactaatatgatagcagctgaaaaagctgcttccagaccagcagatcaatctgagcacattgtgaaatgtggtccttctcacaacccaatgtgtaggcctaaagatcttttatccacctcatttggccatgtaaagaagccctcacaattgtacgggcaaaccaatgagcaggatatgagaaacacttcgagcaacaaagcttccacagatggtagcaagttgaaacccaatgagtgccagactgtatcagtcaagacaggaagattagttgatggcagcttaactatgccagatgctctgatggacaaatcttcaactgttccagagttggatttcatatggcaaggtggttttgagctgcagaggactggaagatctcctgagctatgtgatggttttcaagctcac

SEQ ID NO: 432454 - DNA, 303 bp, Oryza sativa
ccaaggcgagtttttggccctacattaaagccttcctttacaaaaaatactgggggttacaacagacaaagggggaatttgtccattttcccttggattttactccttccaatagggggcactgccaagcaacgcgacattgtatacaagggctttttgctaatccgtttaggggtagtcctttctagctgttacaggggggaactaccggaccctataattgtttgcacccacaaagaatgcattggcatttggcaaacccctaaacaaataggggcacatcagcagcttttcacatgcaaa

SEQ ID NO: 432455 - DNA, 519 bp, Oryza sativa
gctatcacccctgctcgctcccaatccccaccggccaccacccctatgtggctatgttccccacaccgcgaaccctaacgaaacaaaggaggaggcggccatcacttggccctgcaccggcgcggcggcggcggtgacgacggactcctcccctcctctcttcctgttcccgcggtgggattcctgcgcatctgatcggcgtgcatttggcccacgctctagccgctagcattgcgactccgccacgcccgcgaaggcacggccctgttgttgacgtcctctcttccgacggtatcaccacttcaccactctgacggtggtcctgccttgtgccaccattgcaaggggctctcacaatcagagaggaaattgagctgatgatggagcagagaaaagaatccaagagatgaactggcaacgacaagattgtggtggtctaatctgtagagattcacactgatcatctaaaaacctcaacaaccaattcacagcgttagaatgctgaacagggacaccact

SEQ ID NO: 432456 - DNA, 518 bp, Oryza sativa
  unsure (1)..(518): unsure at all n locations
tgttttgtgtggcctgcgtctcgtgttatctcttctgttcttcccaccccctctctctctccttctcctcccttgcgccttcatcatcggcggcaaaccccttcttccatccacttgccccaccgaattcgcgcgcgcgcgccccgtggctgcggcggaggggaaggtgaggacggcggcgggcacggccacggcctccgagccgccgatgagattgcgcgccaccgcgacatgcaacccccgacgggcgccgtgtcagggtcgtcgtcgtcgtcgctggagtgcgtgagctcgtgcaggacgtcgtggaggggcggagggaggccgtacgaatgcagcgtgctctcgtgcgcctggaacgcgccgcgggcgctcacgggggcgctcgccagcaccaccgcgcagtgctcctcctgcagccacgccgaggctggggcagggtggaggcggcggngccagtcgcagcggagtaacaattcgttactgcacataacctgggcagaaggcatcaacagggg

SEQ ID NO: 432457 - DNA, 461 bp, Oryza sativa
atttctctttcctccaccacctaaaccgcaccgaaccccgctcgcactttcgcagaaacacccctcaccgaccccgtatttacattaaagttacctacctttcctctttattggattttttgcggagagccccctggtaagtttgtgattatcgcatcggtgcccttcgccggagctgtgggtggtgccctctatgaatggtcaaaccccgatggggctcgccgccgccgccgcagtcgtagtgaggccgtgccgccggaggctgctgtcgtcggccacggcggtggcggcggtggcgaccgtcgccaccgcgaccccgctgttccccagatgcccccacccgtaccaccagctgcacggtcgacgtctggcctttctcgcatccgcggcgtcgcagcagcagcagcagtccgggcagaccgccgtctcgacggcgaccccacctataccctgcgatcccc

SEQ ID NO: 432458 - DNA, 491 bp, Oryza sativa
ggctctgagcgcgcgcgagcgcgacatgcaccccacgttcgcgcgcggtttaaattaggcaagaggcgcgccacggtcgcgccttctttgtctctcccttgttttttttaaaatttttttataagctgcgaggccgcgtcgtccgccattctcttcttcttcttgttgcacaccgccggccggccgtgcgtagtgcgtggcatgtccgtgttccccctagcagctgattgatttgatttggtttttttctttgcttgattacttccttcgatcttgccctggttggttggtggtggtggtgggttctttgctatctctgcgtgcgtgttccggccgtgtcggcggcggtgagcgaagctcgaggcggtgggctgggtgatggtgcggttcctccggcgccatagcctcgacaagaacagcgcgcagttccatcgccagctgagccacgacagcagcagcagcagcagcgacaccgccgacatgcacgagcc

SEQ ID NO: 432459 - DNA, 548 bp, Oryza sativa
tgtctgtggcggctatcttcgtgtccctctccctcctcctccccctctcctagggtttatccaccaccacctatcgcctctacctaccacaagaattttttttaccatctatattccacccctgccttctttgccccccgtacctcctggaattttcgccttcttgggatccaatccgcgaggagggaaagaaggcgggtttagatcgaactgggacggagggaggaggaggaggaggaaccatggcggccgctgctcctggcgctggcgaccaggctactgacatgatgcagaagctgtcgttggagagcaagaaggaaggcgccacccctgacgctaccaagaagcctgccgggatgccctatggatctgcaagcgccggcgatgcgcagaatgcggcgtcgacggtggacaggtcgatcactcccctgctccaggaggccgtgaatgccaacatcttgtatcagaccaatggatatggaccctcagcatattactatcctactggttatgacggctcagccaatgaatgggactgcagatatgct

SEQ ID NO: 432460 - DNA, 326 bp, Oryza sativa
ttgattttcctgcgatagctatatgaaactcacattggcgcacatatcaaccctgagaggtggcgctcacctgctaggcgttcataggctctcctgtggaccctctagaattggcgtagatgatgagaaacccggtggacccgaattctataacgactgtcgctgcacaccgccggtcgatcgtgcgtagtgcgaaggatgtcctcgctctccttaggagatagacgatcccacctgggcaataaaattagattgagtactacctctaatcctgcgctgcatgggggctgttaatgacggccttggtttgaccattgaaccgacac

SEQ ID NO: 432461 - DNA, 348 bp, Oryza sativa
caaattgcgtgagagatctctcccgagctcgatccggtccaccgcgactcgacgacaaccatggcgatggctcgctcccagcttgccgtcgtgttcctcgccgtcctcgtttcggtggcgccgctcgccggcgcggcggacaacctgcaagacgcgtgcaaccggacgctgttccccaaggtgtgcatccaggcgctgacgactaacccggagagccggacggcgaacgcgcggcggctggcggagctgtcggtgtacgtggcggcggaggtgggcacggcggtcaaggcagttcttcaccacctgctagacacgttgaagggggacaccctggtaactgcctggaca

SEQ ID NO: 432462 - DNA, 349 bp, Oryza sativa
gtcttttgttgcacaggctgctgaaacagaaacggagtggactagcctgcgtgccactggcgcatataacccaatgcttctagcgacgccacaacccggcgcgctctacgcctaatcacgcgccatctgcttgatatgaacaaacggatgatataggacagggacgggcgtgtacaagacgaccgctggaatgatcaaggtgcatgcctgtggttgggcgcctgtaccgcttgacacgcttgacgaaaccgtagacgtggtggagctgagggctactgcaatatagtaataacttgacgctggactggagagggctaaggagttctcaaaagcaaagaataaaagaggg

SEQ ID NO: 432463 - DNA, 215 bp, Oryza sativa
gttctgttttttgcaacaggctcggcggactagtggggagggttattttagaccgcggtgcgtgcaccagcacatgacggagttgtgcgcatagcctgtcggtgacaccggggtgaccacgttcaccgtgaaccacgaggccacggatattaccagccttgcgcgactcgaccgcctgctgccgtccctgcttgagaccgccgacccgacccaca

SEQ ID NO: 432464 - DNA, 505 bp, Oryza sativa
tggatgatccagctgaagctttagaagtgaaagagctggaaacttcaaaagaggttgctactttgacaaaagatttacctgaaactttggatgccgaagacccatcttctgatgtggctaaggatgaatcagtaacttctaaggatatagacccattaccagatgattcaaacacagctccatttactcctatgaagggagaaatggtgcttgcattgttccgctgcgacaattcatggaacagagccatgattataggtgagtgtcagggagttgaaggacctgagtttgaagtattttacattgactatggaaaccaagaacttgttcctcacagttgcctgagacctatcaatctatccatttcctctattcctccccttgcaaagctgtgcagccttgcctttgtgaaggtgcccagtctaaatgactatcttgggcaagaggcagctatgtatctgaacagtatcttgcttgacaatgggagagaatttgaggctattgt

SEQ ID NO: 432465 - DNA, 361 bp, Oryza sativa
tcccttctcgacccacccatccgttttcattcatttcgctgattccatcccatacggggggggtatatttaaactctagcggggttctcaaaccccaccatatccactgcttgtcctacatgatgcttattatctatccgtgagagcttattctttcttctacacataccttcttactcatgatatcttgctctgtggcctgcccgtttctgatctatgtgatactatactctctacatataaaaaagttgcattacttaacagcctttttggaacccgtttctatgcacatttacagggctatcgggcgagtatcatgcatctttgtgaccttaagtctaattgttgatcctgatcactt

SEQ ID NO: 432466 - DNA, 375 bp, Oryza sativa
tggtgctctccacacggaggcgaagacggcggggggggtgattaactttctcgtgagggtcgacaaccagacgccctacacggtcacccaatgcctccagggcacgagctggcttctgcccgaggcggtgcacctgatctacatggacagctaggccacccttgcggcacatccggccccatcgccggctgctgcagcagacgccacggcagcggctgcggcagcagttgacgaggaggcggacacgactaggatacctgaccccactcttgctatactgagcgatggaatgctacagggacttggggtggaagaggaagcgcggggaccagtacgcacaaagcggtagagtctctgctgcgatgcccccatggg

SEQ ID NO: 432467 - DNA, 390 bp, Oryza sativa
  unsure (1)..(390): unsure at all n locations
ttgctttgccaatggtgatgtcaaccacacaggggggggttgaatgaataatcagggggtacagaagaggagaaataggagtgggggaagaatagaagagctagggatagattccggccatgtcatcggcgttcggcgacttcagcccgctcaccgagcggggccgcgccgagaatgcgcggcatcagcgcatgcgcatcatgatcgccctcggcacggtgtccatcatcattatcctcatcgtcatgggcgccccctccatcacgtacagcgggaagaaatccgaggaggacgaaggctgctccaagggctcgtctaaggggaaatctaaaggcggcngantgtggagactaccaagacggttgctgcggcggcggcaaagcggacctg

SEQ ID NO: 432468 - DNA, 285 bp, Oryza sativa
cggatgcttgggaaataaaaggctaaatccggtggcgacgatataaaagaatccgcgggcaacaacccataaacctacaaggaaagattttggtcggaaagtcgcagacacatatgaaaagcttggactagcagacgagaaaaaggagtggcttgggaaacacaatgcattgtttgacaagccatcaagtaaagagataaagaacgggcgggagatcaaacaggctgtgatgaacacgaacaccgggtagacatcgcatgatgcctccacctataaaatctacag

SEQ ID NO: 432469 - DNA, 291 bp, Oryza sativa
agttatatctatagagaaatccatctcctctcctatgttcccgtaaccttggtttgacgtcgacggcgtcggccgctgcctcgcgcgcgcgatggcagggggtggtgcgcggcgttgctcctgcctgcccgctgaaaccctagcaagcaagccgtagatctcgcgcggcggcgcggcgcggggcgggggcggtcggatccagggggtggcagggggggggacgcgcggtgggatgccaagcgcgcgggaatggaggagatcggggagctcgacgagaagctgagggacttc

SEQ ID NO: 432470 - DNA, 446 bp, Oryza sativa
atttgtaataatactagatttttttatttggctggagatatatttccaatccccaacctcccaataatccgatctctcccagatctgttcggatcaaggctgtgtcgatcgcaaaaaagaaaaaaaaaagcatgttccttgtggggggggtcatctgatgatcacttctttgtttcccgcgctttgttggggattcggttttcgggttaagattttctacacgagggcctcgaacttggctcatagcgccgcggtggcagcgcgcttcgcgaccgtcggtgatgcgcggagagctgcttaagtggtcgacatgccgtcgtcctcctcatccaacactacgagcctgatgatgaagactcaggcggcttgctagccggtggcgagcacggacggggccacgaccatgacttgcgctgccgcaagctacaggaggaacagattcccat

SEQ ID NO: 432471 - DNA, 536 bp, Oryza sativa
gtttgcctactccatgttcatcattcagctcgagatctgaaagaaactactccaatttatactaatagtatgtgtgtagataggaaaatgatggagtactcgttgttgggataggcttatggcttgcatgccccaggagctgcatcaaccctacatggaccctctttggattgaagggagctctgcatcttttgtcaccctcgagcagctttactgttctggatttccatcgttctcctcttgagtcttcttgacttagcgctttttttttctttttttaaaagaaaaaataacttttttttcaggattgtgctccatgcgtatgagcatggtggtgatgatgtatgttgccagatagcagtagtattaatattgttgcaggtgtggtggagggtactaggaatttaggtggtagcagtacatacttggtcaccagtatctagtgcccttttctttgtgggaaaaagttgcttctatcgccatgcttatccttcctctttcggctcttctttgcacagcagctctagatcttttgg

SEQ ID NO: 432472 - DNA, 336 bp, Oryza sativa
tttatttctcaacaactagattccattccttggggggggttggataaatgcgccctgcccacatggcctgcaggcgctctgtatgatgacattggcagggctgcgatctgcctctccctgaggggagggggactggcactgcatccgacatgcggtgctacacgtccacaagagttgtgcactgggacacgatgatgaccatcgtagacagcgctctagcacggtctgtaagaggtgccaccttcggggtggagggcacggacttatgcacccacaaagcggaacctgccatttactgaggctctgatgcgactgccacatacagcatggagctga

SEQ ID NO: 432473 - DNA, 387 bp, Oryza sativa
cggccggaatgcccggccgacccacgcgcccgggtgattctccacgcctcggcccatctcccggggggtttgttaagacagtgatgcctttacgccctccccccctctggatggggcgctgacctcggcgctcccctaccggtcctcccctcgtcaccaccttcacctgcacgacgccgacgggtgcggcggtggcggcggccaggagggcggcgccccggtgcgactactccacgggggagagggtgcggaacgccccggtcccgctgcgcagcgggacgggccggacgtccgacatcacgggcggctagaagcgcaaggcggacgggcggtccgacacgggggacctgcactggcggaggcgccccctcggtactggcggttgcg

SEQ ID NO: 432474 - DNA, 505 bp, Oryza sativa
cgtttctaacactactgctgcagacggtgatcagggggagatttagagtatggcggcgctggcacaagcgctggtgctcctgccggagtggggctccggccacctcatgtccatgctcgagtcctgcaagcgcgtgctcctcgccggcgccggcggcggcagggagttctccatcacgctgctcgtcatgcgcccgcccaccgacgaggcgggctccgaggtcgaggcgcacgtccgccgcgaggccgcgtcgggcctcgacatccgcttccaccgcctccccgccgtcgacccgcccgccgacgccgccggcgtggaggagttcatcgcgcggtacatacacctgcacgcgccgacgtagggacgccgtcgacgggatggggcgccccgtcgccgcgctcgtgctcgacatgttcgccgcgcccatggtcgacgtggcgcgcgacctcggcgtgccgtcctacgacttcatgtagtacaccggcgccatgctcgcgctcatgct

SEQ ID NO: 432475 - DNA, 445 bp, Oryza sativa
attatatgttactagttatgcttaaaattttgatatgaattagcatacatcttactaattacagatgttattgcaagtaacaccagttaattgtaaaacactattactcaatacacacactgttgctaataatgaatgctggtattataacatctttaataaacaaaattcccaaaagtaagcacattaagtttgatactagcatgctcaactttcacattggttgctgctttctccattgaaaaatgtctggactactgatcattgctgatggaaatttgctgtacttccctccacatttactgtaggcttattaataagagtttaaaattttaagttagcatgcatttggtggttccagtgttgtgattttttgcttggaatcaaatggccacccaatcacagcctaatgcatttgtgtaccaattccacctttaactgatct

SEQ ID NO: 432476 - DNA, 482 bp, Oryza sativa
cgctcgccgccaccgccccacctcgccggcgccgccgctggacaacgacgacctcctctccgagatcctcctccgcctcccgccgctgccatcctccctcccccgcgcctccctcgtctgcacccgctggcgccgcctcgtctccgaccgcggcttcctccgccgcttccgcgcccgccaccgcaagcctcccctcctcggcgtcatccaggtctgcgcctaccccatcttcgcccccgcgctggacccgccggaccggatccccgccgcgcgcttctcctggcggctcgacaaccgccacgacctcaacgacttgctgggagtccgccacggccgcgcccttgtccacgtcaacacctgccgctattctcagcgcaggctcatcgtgtgggacccccgtcgtcggcgaccgtcgcgccgtggctattcccggcgggttccgtgacagggggtgggtcgtccgcgccgagaggtgcgctgcg

SEQ ID NO: 432477 - DNA, 280 bp, Oryza sativa
tcacccaccatcgttttttgtataccttttactcctccaggggggacttattgacttatgggggggttacaacacccaccggcggtaaccacccgccaccgggagcgaacacccctatataaaccgtcacgccacgccacggccaccaactccaaacacaacatggggccctctctcctcaccaccccgtcccatgccctggccctctcccccggcgccgcccccatccgcatcttcatcactaccacaatgtcctatcggcttatcttctccatctggc

SEQ ID NO: 432478 - DNA, 360 bp, Oryza sativa
gtctttttgacctcaagacgggctacctgacgggggggtatgttagcaccgggttgatgatcaaagcgatctgcacggcgctgggatgcgtcgtcaaccccaccgtgttctgggtgttctacagggtgtacaagatgggcagcggcgacatgggcgacatgccctacgccaagctctaccgcggcttcgccatgctcagcgtcggcgacggcgagcaaggcctgcccaggcacagcatgctcctcttcaaggtcttcttcgtgctcgccctggcgctcagcgtgttccgggaggtggcgagcccgaaggagtggcgcatcctgcgctacatcccgagcaccatcggcatgggcatcacct

SEQ ID NO: 432479 - DNA, 437 bp, Oryza sativa
tgctccgcaaggtgtggggctccgtgctggggggggctgtattaaaggcggcgccgtctaaaaccttcaccgtcgacgcctacccgcgccgcccgaatgccgacgtggagtacggctcgctgggcgcgctcgacgttctcccgatcgacgtgctcgcgcagatcctgcgcctgctatgccccgccgacgacgcgcggtacaccggacgatgccgcgcctggcgcctgctcatctccgacaatggactgtgggccttcttactacagctgggccccgatccgggggagctcgtggtcttcgacgagacccacctaggtgctggaccggactagcaccccgggctgtactacgatagatggccacagctttaatacaagcatgtgtacacccgtcgagcggagggtcctggatcgattatagatatggtggatcgggat

SEQ ID NO: 432480 - DNA, 430 bp, Oryza sativa
  unsure (1)..(430): unsure at all n locations
tttttatttcgtcaagcaaaatctgaataagcggggtaaatcctatgaaaagggggcaaaactcgcctctcagccatcagtccaactggtcaaggcccctcctcttctttcttctctcctctgcttcctcctgaagcggatgacgtcagcaatggcgatgagcttcctctccaccaccggccgctcctcctcccaggcacccctacccggccgccggctccctgngccgaatccctccctccccttccctctcagaccaccacaccgcctgtctcccttctccgctccccctcccgagccccatcgcctcacctaccgaacccactccacctcctcctgttccaggacacccacacgcgccggcctcctctctccggtcatctccacctggagaaccctcatcttcctccttggcgcctccctcctctcc

SEQ ID NO: 432481 - DNA, 473 bp, Oryza sativa
tcttcttctggccttccaatttatgttacaaagaggggggctggatccactttggtggggacttagatccagctcaacttagttcttggaaagaaaggttggattattactctgaacaaagcgaaaggtaaaaccgtctattttgtaatgcagcactttatgtatattttggcgtactttcacttatttcgtttgatcagatgtggcaatgggcgggagcggaacgattatctccatttaccctgatgatcttacttttctatgccagtccacaggactccttgagaatatctaatgatgttaacatttaccgatggatagcacttaacccatttttgttggttctttactccattaaattatgaggtgtagaatagctggataaagctcagctaatgcaatctcaaagaggagaacaacagctaggatcatgcgtcattcaacgaccatggtctccctttcatgaccatatt

SEQ ID NO: 432482 - DNA, 314 bp, Oryza sativa
cttacttgtcccttcccccaaaatgtgatgaatggggcggtttttggtgctccatggggccctatgaattcagaggagtctggagcaatgagatcttcagcgcagcagcatcagatgaacgggatccgggcagtcgcctcacctgaaagagaacgccctgcaaggggcagcaacatcatcaacaacaatggaggtccgccgacctccccagatgacaagaaggggtcgtcgtcagggagctaggggtcgacttggcccaaatttgcagtcgccctgacgaacaaagagacagaagaggacttctgggtgttcaa

SEQ ID NO: 432483 - DNA, 394 bp, Oryza sativa
tcctcagagctcttcttcttccacgcgccagggtggtccaaactcatcgacggggggctcctcctcctcctacccccacagggaaggatcgacgcaaccaagcaagaattgagaacttgtgttgttctatgtctcgttcttgctgcgatttgaagtaatcggggatcaaaaatcgttgtcaagactgaagaatcttgattttttttttcagtgcataggaggaagaagaggagaagctgggacgttgctcctcacgcgggtgatctcgcaccggcatggtctttgcctcgccgggaggaagaaggcgtcctcgcggcggggatggtccatagggcggcggacgtggtcatcggggtcaccgccggcgtcgccccggcggtggccccggcggcgc

SEQ ID NO: 432484 - DNA, 206 bp, Oryza sativa
  unsure (1)..(206): unsure at all n locations
ctcctctccctcaatctactccccggngggcttttttaaaaacctcgggggatccccaaacatccccaacctttctctccccacttccttctactcccacttcttcttcccatttttataaagaacctactaccatcatcatctctacactttctttacattaataacatcttcacctatcaccaaaactttaatgtatctcttcc

SEQ ID NO: 432485 - DNA, 285 bp, Oryza sativa
ctctaatacacacacactcaacttaactttcctttggggtctccttcacccctcctggggtttttaaacatccctttaacttcaatcctattacacaacaacaccttcctgtacttcttttgcatttttatccttaattaccgacaccaaattactacatttcaataacattcaaaatcatttttccaggtcaacatccttcataccattcttctttttcaacttttcccactgctcttaattcttctgcaactttcattcctcaaccaaccctccactacatta

SEQ ID NO: 432486 - DNA, 189 bp, Oryza sativa
ttctttttatctactacatcacttctaccaaagggggggcttttatataaaatacgagggggtctcccaccaaatctgaagatgcttcttcccgcccttcttaacgtcgccggaaactactttagccatctcgaattgcaactcccacgagaaccaccacatgtcaactaccaacccaatgacgaacaa

SEQ ID NO: 432487 - DNA, 353 bp, Oryza sativa
tctttttaatgcacagggaagcaacttactggggggggattatttgaacaccgagggcgaacaaacggaaccatctttgtctggccactggctcggggattctgcaacccacgtgatctgatacatgctaaatcctgcatgatgggagtcaataagcctgtatactaagaaaccgtacaacaccacttaaggctgcacacccgtgaaatgatactggggatgaacagctaggatctcgacaggtcacgttgtcgacacatcgttcattaggacaaatactatggacacacaagctcttttgagagctctgatctagagctccatcacagaccttaactgcaagagtcgacact

SEQ ID NO: 432488 - DNA, 302 bp, Oryza sativa
tcttttaaatacaacctaaaacaactcaaccgggggggtttttttaaaacaccggggggcacacacaaaacctacctatctaatccactcaacatggaaaaaccagccaacgtgatctaataagccaaaaacaccatcacgccaatccagataccactattctgaccagccataccacaccatttaaggctgcaaacccgctaaatgatcctcggaatgaacaccaggctacaacaagtaccgttaactatctagttcaatttaacaatactaccccttaaaactcgtttagaaactcttac

SEQ ID NO: 432489 - DNA, 405 bp, Oryza sativa
gtttacttcgggcgacaccttcggggccacacggaaacttcgggtcataggccatattcccacatgaagatggctatcccgggttacagcatcacatgggcagagatcgacgagttctggaggagaaaggagatggaagacgaggagcacagcctcaccgacgacaatgaagctgcaggaatcaaagccaccacactaatggtcagcacttattattattgatcaaatcgtaatctgttgcattaccaatcactatctggcactctgatctcattgaccagctgagggttaagctggttatcagtaaaaacaaagtacatgatggggttcagcataaggaatcaatggacctatgtaacgcagttaatatcttggatgcaaatacaggccacattatcctaccat

SEQ ID NO: 432490 - DNA, 309 bp, Oryza sativa
gtttatttacacaaaccttacacaactccagggggggttttattaaaaacatggggttcttcaacaacatcactatccggggaaaccaatcttccatcaacaccctcaacgacctagcaagtatcaacaagcccaagagcccctataataccaacacagttaattatccatctaatcgattgctctacaccacccttatagtaaacctaccgctaatatacgtgaaaccacttaactacctaacaaaggaattgcttgaacaactcctataggaccaccatgacagttatcttcaacccagagacatcc

SEQ ID NO: 432491 - DNA, 111 bp, Oryza sativa
  unsure (1)..(111): unsure at all n locations
tttaatcctctttcacaccttacaattcaatcacngggtctcttcaaaccccatgggggtatcataaccgttcataaaccgcgctcccccttgaacataataccttctatc

SEQ ID NO: 432492 - DNA, 58 bp, Oryza sativa
tctatctcactcaccatcatcttactatacaggggcaatttaaaacatacacgggatt

SEQ ID NO: 432493 - DNA, 213 bp, Oryza sativa
tatttatctaactgcagcgatggcctccaggggggcttttaataacatgcgcggtcctcaccaatggaaaggcactcctcgttaaccgcctccaacgcgcatggcaccaagcaaccattgcaccaaaaagcaaccctaaatgacaagcaaccagagctcaacaaactaccatgaagctgcaacagccaacatcaaaccactgacacaccaact

SEQ ID NO: 432494 - DNA, 113 bp, Oryza sativa
tctttaacacaatgcaaaacaaccaaactggggggtcttttttaatatccggggtgatcaaacccataacatcactaacaagtgattctaatcacccaaaactactattcgcc

SEQ ID NO: 432495 - DNA, 305 bp, Oryza sativa
ctatattaatgctgctcccctgggggacctctcctcaattccctgctcgacccacccctccgttttatctccctcccccctcctaccctccccgggggggtttttttaacaaccctggtggtttacaaaacctcctttcccctaccaccatcttctttctaaacccttaccttcctcttcctgatgcactacacctctcctcacctaatttccttcttttacctctactacatccatatgatcttcatccagaactatccctttattctccctaatgccctcccctataccatccacttttacct

SEQ ID NO: 432496 - DNA, 352 bp, Oryza sativa
tcttttactcgcatctggcgctctttgtggggggctatttaagaagccttgggggcaaaaataccgtataaagatcaagagaggaagctctttctcatccaagatattcaggttgttgcgattcacaattggcaataccatccagcaatccaaacacatggtatggtctgagaagcgatgattggtatcacacaggaacttctaactgagctctacaggatccgaagccccgttctacctctaccacgctcaactggacatctacggtcagagcactctggggatactgattattcaccgagactttccccactaccatgacagctgaccattaatgacatatacctgtggc

SEQ ID NO: 432497 - DNA, 131 bp, Oryza sativa
tacttacacaatgcaacacaaccaaatcgggggatctttattaccacacgtgcgcaacacacccataacaggcctgaacaggcgattcaaatagtcaaaaactaccatgcgcacggcgccacatagagaac

SEQ ID NO: 432498 - DNA, 275 bp, Oryza sativa
tcttatactcaactcaaaccaaccaaattggaggggtttatttaacatactcggggacacaaccaacacctgcccaaacatctgctcaccaatctcaaaaactacataacgcaacgcgtacatctgttactaacatcgcacccgaaatagaaccaccaaactcactactcctaccacaatatttcaagactctaacaattctatcaacacttgaaatgaaacatttcatccatctgcccgatttcacgatgctattgttgactcttcaaaaacta

SEQ ID NO: 432499 - DNA, 397 bp, Oryza sativa
gtttatgtaacacacactagctacttagccataatgcttatggccacacagcctctagggccagtgctatcccctagccatggcggcccttcttccttctccagctcggtctcgctaggaggccagtgggcgcctcgccgccccgctgtctcctccaaagtaagctgcacccgcatcggcttgtccgaggtcgataatagaaaagtagtaggccatatagacgtcgatgaagaagaacagaccatgcaggtacagggcataaccacggtgacggccactgtggcggtgcgcttgaaagaggggatatccactccccagaaggtggccaacatggttaaccgaaactggcttttccttgatttctttagcttgagtacagagaggcacacggagcccc

SEQ ID NO: 432500 - DNA, 352 bp, Oryza sativa
gtttatctcacaaaaacttgcaacaactgtataatgctcatgaccccacacgtggtgcgctcgttgccattcattaaccgaggagaacattaatccttctgcactttaaacgggctagcaggcattagcaggcacaagagccaccatgataccaacaaggtaaattctgcagcaaaggggttgtacgaggccaaccatagtattataactacgccatatatacgtggagccactagactacataatgcatgaactacacgataacaccaggagcgccactgtggcactttgcttgaacgcagggatatccactaccaagacggagccgtacatgatgcaactaaagtggata

SEQ ID NO: 432501 - DNA, 138 bp, Oryza sativa
  unsure (1)..(138): unsure at all n locations
tcccctccnggacctctcctcaattccctcctcgacccacccctccttttatatttccaccaccccccccccctccanggngggattttttaacccccccgggggttccacaaccacctctccctactcactctctcc

SEQ ID NO: 432502 - DNA, 354 bp, Oryza sativa
caacaccccctccaccaaatacatggtggtctttattaacactacgggggggttaaaaaaaacccccacccaatcaagctcattaccctacaacaacaacaaatctgtaccaaacccatggacactctgcccctctcgatttcccactctcttaccttcttctatgacgccaacttctccaggcatctgactgtcatatacccacctcctccacccgtgatacccctacaccaccaccatcatatgcttcgcctcgccacccaaagaaccacttcgcatactctcactctattcactaatgtactacccttacaaatagaacccgatcatgtaccacacccttatacaccgcgg

SEQ ID NO: 432503 - DNA, 224 bp, Oryza sativa
ctctttttctaacccgcctccaccacccacatcgtgggcttctttacaccacctgtggggcttccaaaatatcccttccccttccatcccctttgcccaaaagctactctatcctattctcctccaccatcccattctgaccccaactagttacctctaccttcaatacatccaaatcaccattccacagaactatgacaagatacctccatactaccttcacc

SEQ ID NO: 432504 - DNA, 70 bp, Oryza sativa
gtcatatgcaaaacggcctacttaacctgggggctttttaacacacagcgggtgcaacaattgctataca

SEQ ID NO: 432505 - DNA, 240 bp, Oryza sativa
tttgataaacacaaagcaacacaacccaacggggggatctttaataccacatgggggccacaaacgcaaaaaacgcacgaggaaagcgaatacaaatcaccaaaaaccaccatacgccagcgatacatgaagaacgagaagtgcaaccgacacggcaccaccaagctcaactaccctacacaggcactgaataacaccccaacgctagagacaccacgaataggactcctgatcccactg

SEQ ID NO: 432506 - DNA, 233 bp, Oryza sativa
tctcaaacacaaaccaacacaacccaacccgagggggttcattaacacccttgggggacaacccaaaacacgcctcaaaatacccaacaaatcacccaaaaccaccatacgccagctctacatggagaacgacaactgcaacctacactgcaccaccaagctcaactaccccacaccagcagtccaccactctacgatacatatcaccccacgacaagcacacctgatcccac

SEQ ID NO: 432507 - DNA, 133 bp, Oryza sativa
ctttatctctacatcgcctccataaacaccagggtgggctttttcaaaaacgtggtgcgttacctacccttccctaccagaagacatccatttatcctccaacaccttcagccggcttctactgcatgatcaa

SEQ ID NO: 432508 - DNA, 53 bp, Oryza sativa
ctttatctctacatcacctcccacaactccatggtgggcttttttaaaaaccc

SEQ ID NO: 432509 - DNA, 52 bp, Oryza sativa
ctcacctacctccctcaaatccataggggggtttttttaacatccggggggt

SEQ ID NO: 432510 - DNA, 215 bp, Oryza sativa
gaaccggctcgaccgacccacgcgtccttgtacggacaaggcacgcacgcacagaatgggggccctttaataggcgacgaggggtatatctctattccactcaggcggggagatcacgatgaggaagacgacaggggggaagggacgaagggctattgacaatcgccggccccaggccataaccagggtaaaatgccccgcaccggggttagacc

SEQ ID NO: 432511 - DNA, 228 bp, Oryza sativa
tcttatccgggcagggcacgcacgcacagatccgtgccgttttctagctgcccatcgctgtatctgtgttaccgtcgacacggcgagatcaggatgaggaggaggacagggtggaagggaggaaggggccgctacaaccgctcgccgcatgccacctggcgcgccaaggttgtccggagggaggaggcggcgcccgatgcggaatgtggctccctcggcgactacccc

SEQ ID NO: 432512 - DNA, 230 bp, Oryza sativa
tatatacgcaatgtaacacaacccaatcggggggtcttttttaacacccgggcgctacaagcgcaaaaaaatccttaaaaagcgaaacaaattatccaaaaccaccgtacgccagtgctacatggagaacgaccagtgcacccgacatggtaccaccaagttcaactatgcggcacaggcggtgatccacactacgatgcttgtgacacctcgactagcgcacctgatcc

SEQ ID NO: 432513 - DNA, 503 bp, Oryza sativa
  unsure (1)..(503): unsure at all n locations
ccttctccgaatcccctcttcagatccgcccaggggtctttctccgatcctcggggcgttcccagttcctctcctgattcatcagcctcgccgatctgccccgctgcttcttctgatcgatcgatcaagatgccgatgcacatcgacatcgtgcaccgcctctgtggtggccagcttgttgatctcaacagggtgaatgcaggccctgaccataaccgcggggtgccagccaatggtgcccagcagtttaactggtcagggttcagtctcatgcttggtgcagcccagataatggttttggcttggcaagtgatacatgtgccgtggcctctgctgcctcaggctatatggttttcaaatcgcttttcctgtatattatcattggcacggtgacaacaacaaccaaggtgcagcagcaccagcaagtgcaggagcangacgtgatggtgaataatgctgtggaggagaacaccattccggatgggggcagtctagcctggagc

SEQ ID NO: 432514 - DNA, 428 bp, Oryza sativa
gttgctgcaacctccccgccgccgccgccggcggcattcctccccccgcccgggggaaccaccaccgccgcgccatgcccatctcctccttgttcttcttcttcctcctcctgcagcaggaggacccctactagattcttcttctccctcttttgtcttctttcttggtacggcggcggaggaggagccgatgggcagcctttgctccaaggacagcgtcgccgaggagctcacgccgcagccgccgcctgctgcggcagcggcggcggcgcccgtggggaggctgcagaagacggagagccagtcgttgaagcagctcatcacgctcaccgccaaggaggacgccgcggtggtcgcccccgtcgtgcacgccgtcatcacccgggcggagtccaacgccaaggccaagtccaacgccaaggccaagt

SEQ ID NO: 432515 - DNA, 425 bp, Oryza sativa
gttgtttttactgttgctgtccaccggtgaatatggggatcctcaaaatcatcgtggggccccggtgacttggctcctaacaggaccatgatcatgttgcgaaggttctgcttgagcatggagctgatcccaacagagtatcgaaccatgttctttgatcactcatgggagatcgctgcagccactccttgaaatgcatgaacttactgatcaaggctattgctgatgggaatgattgaagttgtactgtaccataaacgaccattttagtggtgagccatgatgatggatcagccgatgtcgtcacaatcttgctagaggtctgagctgaccctaacattcgtgacgaggatgggacgattactatcatgacggcagcaactagcggtcaactagtgcttgttgaaattgtgtttcctacgaca

SEQ ID NO: 432516 - DNA, 481 bp, Oryza sativa
aatgccatctcgccctgcgttgcgagatccccgtgaaccgtcgcggccgggcggtggtaatcgtggcaaggacggatgcagcacaaatggaaggtcgtggagggcggcgccggtgccggtgccggcggcggcgggggagatcagcgccggcggtgcgtgacggcgtcgttgtccatgctgatcgcggccaccctggcgtttcttgcctacgtcgccttcttcccgtatgacggcgcgtgcggtctgtaccggtggtggagatgcgagggttgcggcgacgcagaggtcgggttcgccttcgacgaggcggccatggcgcaaggaccttacgctggtggcgcccgccgccgctcgccgacgacgctgtcgcacatcgtgttcggcgtcagcgcctcggcgcggacgtgggacatgcggcgcgggtacgcggagctgtggtggcgccccggggagatgcgcggtcacgtctggctcgacgagc

SEQ ID NO: 432517 - DNA, 51 bp, Oryza sativa
ctttatctctacacaactcccataaattcaatagtggtgttttttaaaaac

SEQ ID NO: 432518 - DNA, 65 bp, Oryza sativa
tcatatttgctatctagctcccgtcaatgggggggtctttttcaccccccgggggctgcaaatgc

SEQ ID NO: 432519 - DNA, 308 bp, Oryza sativa
atttcatgcaactcttggtcagagatgtggggggggtttatggcatggatgtgagtgacacatacgggaaagctaccgatgaatgtgctgcacagctgtctagaaaggtaggcgaagctgggcctatccttgatgcgttggctgttgacctggataacatttcaagaactacacctgttgcccggcccactattgctgcaacatatcgcacagctcaaataattgcatacattgccaaatggtgatataccatagcaaagacatttactgaggcgttgattcactaattgctttctgcaatggactat

SEQ ID NO: 432520 - DNA, 337 bp, Oryza sativa
tctctctctccacatcacaagtcgccttccgggtgcgcccccgaaatcccctggggaaccaaagaaacctgaggcaccaccatcaccaccaccgtctccggctccggctccggctcctgcgcgcgcggcgaattcgggggaccctcgcgctcacgtggggtgtgggtggggggtagatccagacgtcgccgtcgccgggggggggggagggagctcgggttcaaccagcgggggaggggggggcccgcgtgtgccttatagggggggggctgcggagacccctgccgtcctggagtccgagagcgaagctccaactctggcgcgggaggcccagcac

SEQ ID NO: 432521 - DNA, 151 bp, Oryza sativa
cggtcgctggggcggacgcgtgggcggactcttgggcggacacgtggagttctagatcgcgagcatccgcccttttttttaataggatacagattgagctcaaggatctgcaaaatgatcaccctacatcatccaatgcatgtcctagttg

SEQ ID NO: 432522 - DNA, 392 bp, Oryza sativa
gtattcattaaatggaagcccttacgttagtcctgggagttcatgtttactttaatccccatgcttattttatgtagacatacaaggttcaccaataagcttataagcacaacttttgtcaagcttagcggctttgtagtttaagcgtttcatttttcaatgccattctttctccttttatcttttataatctctggaaattaaatttcatttttttagaaaaaatgaatattacacctatcatgtttccacattttaatttcttcttttgtgtgtccctgtgtaaattgtgtacttttacttgctaaggagtattctttagtgaccggcttctagtggactaagctacgcactgttcaggttgcttttttttgtgttgggggggggggggc

SEQ ID NO: 432523 - DNA, 97 bp, Oryza sativa
gacgataattcaagaactcgaacctcgctaatgggggggctttttttaatctgggaagggttctactgcgggattctgattcaggacttgcccaact

SEQ ID NO: 432524 - DNA, 166 bp, Oryza sativa
atcctcgtggcggcccggcggccggcgaggccccacgcgcgctcgcgcgctcgtgccttcctcgtcacgacacccctaggttcatcctaggaggaggggaattcggattttggattttggggcatcgtgttaatggcggtgcggccggggtgggcggtggcggtgg

SEQ ID NO: 432525 - DNA, 533 bp, Oryza sativa
catatgttcgcccacaagacgctgcggattccggggcccggtaggcacccacccgccgccaccgccaccgccaccgcgccatcccatcctcctccctcctcttcccctgccgccacccatcgtcccagagaatgggctacgcggcgccctccgaaaaattctgccttggatccactcctgaaaccaccgcagagcacagttgcaccatccatggacctcttgcagaactactatggccttgctcgacctccaaagggggacccagaaaatgaaggcactgaaatggcgacatacagtataggtcagcatacgaaagctagaagcttatcaacgggcttttctcttgtaaatggtgaggttgacgatgctgaaaagccaataagacgccgccagaaatctgatgctgagttctcaacaagggagggcaacagtggtggtgtactgatgaaggccggcccgggcttgcgctgaggccaaaatctggcagtcgaccggaaataaacaacagccagcaagatcttgtagcaaccgca

SEQ ID NO: 432526 - DNA, 313 bp, Oryza sativa
cgcttgataggttcacggctggacttctcggatctggggggactttatgaatcatccggggctgtctcctaggtatcatggcgaaggaggttggtgtaaacatgctctctgttgccgacgacggctactccgtggcggcggcgttcatggacgttggattgtccaattgcgccaactgcaccaggaagaacatgaaagctgaggccgctttcaagggtgttcgcgtggcgatcaagtgcaagaacagcaacggctagtactagactaaggccaccggcgaggtcggcaagtttggcgcgttcgccgtgcccct

SEQ ID NO: 432527 - DNA, 89 bp, Oryza sativa
gcatcgatatcgattcgcttcgtattcgttctcgctgttgatttgttcgtgagatttgaattctagcaatggctcctctcggtgacgga

SEQ ID NO: 432528 - DNA, 100 bp, Oryza sativa
ccctcgctaccgctctacccacccaccctctcgccgggggatattcgatccaggaagagctcgccgccgccgctgccatggtgctctccgtggagaagac

SEQ ID NO: 432529 - DNA, 272 bp, Oryza sativa
cacttttcccctttcccaccctcccgtgcgaacacacccgcggtgcggagcccagatcgggatcgcgacggatcggcggcggcggcggcgatgggaggcgaggcgggggagcggcggctggggagggcgatgagcttcgggatcccggacgtggcgctgcggatgatgatggggattgcgggtaaagaatattgcatgctggtcttatattttgttcttggagcgggttactcttgtgcggcgacgaccaggggcaatgggcggcgcggcgg

SEQ ID NO: 432530 - DNA, 151 bp, Oryza sativa
gagtggctgcagctaatactagcgcgaaacttctttgacccgaagaaacatccccaactggcagctaggtatcatggtgaaggaggaggagatcatcacagaggcagcaggagcaagaggctacatggagatgcttggccttggagaggag

SEQ ID NO: 432531 - DNA, 605 bp, Oryza sativa
tttcttgctagctgcggcgttggcctccagagcggcggcggttgccgtccttctcctcgtcgtggcggtggtgtcgctttttgctctttttagttttcattttcttgtctttctttttttttttttttttttttttctttgtttctttttttttttttctttttttttttttggtctttttcttttttttttgttctctcgcttttttttttttctttttttttctttttttctttcttttctttctttttttttttttctttttctctttctttttttttctctttttttttcttttcttttttttttatttttttttctctttcttcttttttttttttttttcgtctttcttttttctctttcctgtttttttttttcttttctcttttttgtcttttttttttttcttttctcttgtttgtttttctttttctttctttcgtttttctcttctttgtttatttcttttctttttttttctttttttttttttcctttttttttttctttttttttgtttttttttttcttattcatttttttattcttttattcttttattttttttttttttctctattttttttttttattttattttt

SEQ ID NO: 432532 - DNA, 169 bp, Oryza sativa
gatgtagatgatggtatcgaatcaaactaattaaaccggacagttgttgttgatgatgatataccatcgagcaggagcagctgaggattagcacagaatccatatattggtagctacgagcctacgacctcgctgcctcgtatcgtgaaatgagatactagctagaaag

SEQ ID NO: 432533 - DNA, 53 bp, Oryza sativa
ataatcaacacgaccatgcactctcctggggacattataaaatgctgcgcttt

SEQ ID NO: 432534 - DNA, 93 bp, Oryza sativa
tgctctctctttgtacacacaaaccaagatggggaatggagggcgatgcatggtggaggtgagctacccacggcggtggcggctgcgatggga

SEQ ID NO: 432535 - DNA, 293 bp, Oryza sativa
tgttattctgctccatcagtgagcgcgagagctcggcctcctcttcctcctcctcgcatgcccacctcagaatcatctctggttgtggtgaaaccgatggtgatgatgatggtacgagcactgtagcttcgatccaggtctagaatcgcatgttcttcccccacgctttcttggattgcggccaagaatcgatgcgagcggcgccaagatttcgttcttggagcgggtcactctagtgcggcgacgaccaggggcaatgggcggcgcggcggcggcggtggtggtgttggtgg

SEQ ID NO: 432536 - DNA, 456 bp, Oryza sativa
gcgttcgccatacttgaccttgcagagctctgtcggtgtctctcgctctgattgaagtgttctgctgccatctctctcccgcttctgtctccgtgtgcgcatatatatatgctgtattggggacgttgcggcagcggttcttgggtacatggcctactcctcacggtcttgtgatcagtgcagtcacggataaatttgagggccaccaagatttgactgaccctgactgcgcctgcgtgccccgtcaatcggaggtagaattgaaaaaggaaaagaagataacgctgtgattagcacggtgtagagaggggccatgttagcaacgcaagcaatttcgtgtggcgttttgtccctgtgcttcttgatcttgttcaatgcagagaggagatccggcttcatgaagtggctctgcgctatcctgaaggggacgaacgacggttaggccaaccgacggcg

SEQ ID NO: 432537 - DNA, 282 bp, Oryza sativa
cccttattatccccataacacggcaagaacaaaggggggggtttcataaaaatatcgggggggaacaccacccacccctaacattcgaaccttaggaatagaattttggagacaacacaaaaaaacaagaaccgaaaaaaaagccccacgaagacaagaagacacccaccgcgaagacagggccaccgaagaacaacacaacaccccaaggaccctctccacgccagcgggtacacaccgctgaaaaacccgcggcacaacaagggcttggcccacccagaa

SEQ ID NO: 432538 - DNA, 461 bp, Oryza sativa
ctttattttgccgcccttttttttttttttttttgtggggtttttttttttaaatcacaggacagagcaatctcaggtgtattaaaagggaagaaattaaagggtgatcacacgatacaactgcaggggttgggggtggtggtccagcactttatcctcggccaaacggaaccacttgtgtacagtaacttgttagctgaaaagacgcaatcacggacccgccattgctggcccagtgggaacatcacgtcaagcatggcattgtgcacactgacctccacacaagaatgatgctccattccacagtaacatagtacatttttacaacatcactgatcactctggtacaacggggttactgtactttaggataccatttaccgtctcaacgaacaaaacgtagggtcgcatttgcatcttgataacggttacaaaagagcgtctagctgagactggaggtc

SEQ ID NO: 432539 - DNA, 542 bp, Oryza sativa
gattgcttaagaaatctggcatggcgccaccggcaccggccgctctcctcctcccctccaaccattcctatcgcccgctcctgcctcgcccaatcctgcaccacgccaccggcttcgcctgcgcctcggcctcgccctcgccgccccctcgccttcgccttcgccttcggcatgccgccccgctccgtgccgccgccctgccggccatcgccatcgcccccggcgaccactggggcaactgggccttcctcctctccgccgccgccttcggcacctggtcggaggagtccacgtcgtggggcgccgcgctcagcggctcgctcgtcagcatcatggccggcctggccgccacggccacgggtctcgtcacggccggcgcgccggcgcaagacgccgtcatggactacctgctgccggccaccgtcccgctcctgcttctcggcgccgacctccgccgcgtcgtcagcaccaccggcgacctcctcaaggccttcctcatcggatcagttgcaactacaattggcacaacgattagccttctg

SEQ ID NO: 432540 - DNA, 340 bp, Oryza sativa
gcccgtcctgaccggctcgacccacccacgcggttttatattgccctcgcacgccacgatggcggggggggttattattgcatgtggggggggttcaccccaatgcccgcctgggctactcacaacgcgttctgctcaatatcggatacatagggcttgagggccaactgcctgatgaactgataggcaacaacaatactggagcacatatacaaacagatccagcacatatgggacggggacccctcatcggagaggtcacaaggggtagaaaaacatgttcaattcgggactgcggttaagacagcacaagaacacgtacacactgaggcatgtggtg

SEQ ID NO: 432541 - DNA, 535 bp, Oryza sativa
atcgaacctttcccctcgtccgactggtctacccagagaaaccctaatactcgcagatccccttcgccttcatacacctccatccacagctgatggctaccatggggtctgcaccttcctatgtcgtgctggaccgcgtggttcatctggacatggaagccgtcaaggaagaatcggtgtgggcgatcatggagtgtagagatcggaagacctacctgcgcaacgaccacgtcggcgacgaggtggtgtatggcttgtcactcctagtgcagatcgccgagccgccggatctctccaagctgtccatccgcctcagcgaaccccccgtgcaagtcgccgcccgaccagaggagatcctcgacgatggctcctccgtcttgcagctcttggacttgcctaaacgggccctcaacctgcacacctccgtccagtccgtcgccgacgacctcatcgtcttcaccttctggcctcgcaatcgcacccaccgctacctagtctacgacgccatcggcaggtcaactctcatgatcccttg

SEQ ID NO: 432542 - DNA, 299 bp, Oryza sativa
aatgacaggcgatttttggacgggggaagcatcgagtgctgagaatgtgttcatggcgaagaccgtcgagcgggctgagcgacgccaggaaatggcaccaccaatggcaacagcgccgaagaccactgaggcatgtgagctcaccgctgctgcggcggccctgcttgctgtggctcaacgagcgtgattggtgctccacgggcacatcggaggagcacctctggtattgaagataagggggacagccgagggactgaggcatatggagcttaaacaactgggccccacatatcgggtgt

SEQ ID NO: 432543 - DNA, 342 bp, Oryza sativa
ttgtggagcagtcatctaacggttcatccgggcggctgtcgttgcggcggcggggggtgcagcggccaataatcagcatggtaggagggtcacggacaacatgctgtcatcgcggatgctgccgaggggaatgccgctgcgagagaggactttagcgcttgggagtcaactgagtagcgacaccagcgagggggcacctctatagaggtgacaaaacgacttggtcctggtgggccactcggcaggagcgtgttgtttgttgaccaggccgaggacaacgcggggacccaagctgctgatgggatgttgactacaaagcttgtccagcatgatggacctact

SEQ ID NO: 432544 - DNA, 426 bp, Oryza sativa
aaactcccccaaaccctagccgccgccgccgccgccgcagtcgtcgccgtcgtcgcagcagcagcggcagcgtcaccaccgcgaccggcggctgcagcgatgtactctatccttcgccgcgcggcgccgctccggcggcgcgccgtttccgccctggccgccgcggttctccggcgggaggaggcggcggcggaggtggtcgtgtcgcggcgggcgacgatcccggcggcgtggttccactcctccccggcgtggctggggttccgggagacgggggccgcgggggcggcggcgaggccgcagtacgcggcggatgaggggttgttctacgaggaggataagaggggggcgaaagcgggtggagttgctgcgggcggcgcggaggaagggttggaggtggccaagctcgggatctcgcccaagatc

SEQ ID NO: 432545 - DNA, 132 bp, Oryza sativa
atgcgttttttttacacctgtaaggacgcccccataatcgtgaggtatatcgctgtcgtgggcaggagcctatagtccgagaagctattccgcgtcaccctcgacctcatcacctgggcctgcggctccatg

SEQ ID NO: 432546 - DNA, 137 bp, Oryza sativa
atgcggcctatattttgctagggagcacctggctacctgctgtgaaggactgtatgaccgtggtagggatgatgctaatgctacgccaggtatacgtgcattgcttggctgcggggaacgcacatggccaaagttac

SEQ ID NO: 432547 - DNA, 549 bp, Oryza sativa
acattcttggctatttagccatcgcgctgcaactgggaaccgggggaaaaccttgggaaatgaaaatttcccatcgtctctcccgggcaagggtacgttctattcgagtcctggaaataattctcgatttgagtttggagaatcgtcggggaggtttgggtcatcgcattatgttcatcaccatgggggatctgtgcgggtagattgcccttcgtttgacggcgataatcctagggcatggaagcttaagtgcgaaacctattttcgagtcagtggagtctattttgatcattgggtgggagtagcagctttgcagtttatgggggcagcgcttacttggctacaatccactgatgctcatattgagtgtgtgtgttgggaggattttccggaagtagtgtgtcagaagtttgggagagaggagtttcagggattaaataggcagtttaatcagttaaggcaaaccggaactgtgactagctatgcagagaggtttagtgagttgattcatcaattgcagctcatcattcatcatggaacccaagtttc

SEQ ID NO: 432548 - DNA, 482 bp, Oryza sativa
ttatccttcacgacaatagaatcggctgagggggcgaccgccgccacctcagtggaaaccgccgagagcaccaccgccgcccgcgacgtttcccctcctcccgccgccggccccgccgcccgcgacgtttcccctcccgccgccgcctccgtcgcacgcgacgtttcccctcctcctgccgcgacgtttcccctccctccgccgcacacgacgtttcccctcccgccgctgtctccgcccctcctcctgccgtcgaccccgctgctgcgcgcgacgctccccctcccgccgtcgacatggcggcggagatggaagtcgactacgtccacgtgcatgaggtccccgaatgcatagcatcgatgatcgaccgcggcagcgtggagagccacacgctgttcctggcgcgccggacggcgatggagatgctccgtgaccgtgggcacagcgtgccggaggccgatatcggccgcaccctacctgag

SEQ ID NO: 432549 - DNA, 384 bp, Oryza sativa
gtgttgtttctcgccacctgccgatctgcctcgccgtcgactagaggagtgagctggccgccggcgacccaggccaacccagccgtctcctcctgcttctgccactcgccatgccaggctctccgatccaaacgccccctccagaacccaaaccccaccgccgtcgtcgcctactctgggtgccggctctcctcgccgacgccgtcgccgtcctcctcgccacctcccccaatcctctcccccgactcctgcgatccctcctcgggccaaatacctccctcctccgctcgaaagagagaggtcctccgtacggcacctcgcccgacgcgcgacgcccaccatgtgttctatggatggcccctctcgcctccggcggcggctact

SEQ ID NO: 432550 - DNA, 352 bp, Oryza sativa
gccccggacttactggccgacccacgcatccggcttatggttcatctacttctccccttcctccggaggcgattcccaaatcccatgggggagcacccatatccgtgccaatccatggattggatgcctcctccgaagcccacctggccgtgctcccctcctctgctctgggactgggccgacgccgccgtgccgggctcctcctccagcgaggtatccgccgcctccgccgccgccgctgctcatccgggaaggcggccgaaggagaagctaggcatggcggaggaaggacgaggtggtggtgtgaggcctactgctttatgagccaggtacaatttggtaggtagcttca

SEQ ID NO: 432551 - DNA, 502 bp, Oryza sativa
  unsure (1)..(502): unsure at all n locations
ggatactttccgttttaggcgccgtcttcctccggggtgtgcaatgccccggcagcgtcccaagaagggggagcgccggatcgacgccgccatcgaccacttcacccccatgggctacgccaccgccgacgtccgtgccgtcgtcaaggaactcctccaggtgtacggggggaacgacgggtggccgttcctggaggaagactcgtaccgcgtcgtgcaggaggcgctcttcgagaagcaggagcaggaggatcaccaacagcagcctcaccctcatccacagcaattggaggaggcaccattggaagacaagagcatgtcaatcatagaggtgcacaatgtgatgcctgctgagactgaacaacaagtcgaggacgcggaccccatgcttgttgacctgcctgcagttgaagcaactctgccccttcctgaagccaaagtaacatatggcacanggaggccctgttatgggtggatcgaagagtacgaaagtgaatccgat

SEQ ID NO: 432552 - DNA, 508 bp, Oryza sativa
ttctgtctccccctccctcacggcctcacctgttggccctccaaattctccatccccggatccccctctcctcctcctcctccgccgctcgtcggagccggaggcgcggcggccttctcccgcgcccttcgtctcctcacacccgcggcggccggcgagaaggcccagaggcaaaggcgtgaagcggcctcctcccccggcgcggcaccctcggacgcacggcggccggtgagcaggagcaggttcggagggggcgacgcggccgggctccttccaccggccagcatcctggctcgagtcgaattttgaaggaagcatgaaggttgatgatggtcctggcgtcaatggcagtaggtgggccaaaatgatgagcacagattcgtggaggtggtgttaggattgatttacatggatgctgctgcgagtatatggattgctgcacgctacattgttcagtctgttggggatgagggggttcttcattcttgattacctacatatgcaattc

SEQ ID NO: 432553 - DNA, 388 bp, Oryza sativa
ttcttagctcccgaaaatggtgcggtaacgggagcgatcgcataagaggactggaggagatcgattccccattgaggacgtgaaattggattctgtggcagaagaaagatcgatcgatctggtttggtctggtctcctgtaaaagaattctcccatggcgccgccggccacctcgctcatcggcggcggcgtcggcggcgtcgcctatgtcgttctgctcttgttcctcgccaacgcctgcgtctcggatgctgggttcgaggtatccagccgtgttctgatgtcagatgagcaaggaagaagtgggttgctggctacatggaggcgattgatcgtcgagacaccgtcgccgggagccggtgctgacgctgctcatccaggaaccaaa

SEQ ID NO: 432554 - DNA, 402 bp, Oryza sativa
ttgatcatatacccggtgtgctcaagtacaggggggagttaatcacacatgggtggtgatggattatatcatcatgtataacagctggatgaagaagacttaagtattggactctggctctgctgctgcctgtgccaaatgccaggaatttacctaagtgtgctgaggctacctcggatgggaatatgcatgctagctctaagaattaatctttcatgtaggtcaactactaaactaagtaatgcttgtataggaaaagaatcaccatcttttaatcaattattatacactgcgtgcttgtgcttgcggtaaaaagtaaatagtagaggtgcacaatgggatgccctgttagactgaacaacaagtttaggacgcggtccccatgctttgtgacctgcctga

SEQ ID NO: 432555 - DNA, 251 bp, Oryza sativa
gccggtgacttagtacattgaccggatcagcatccggtccgcgctggtcaaccgcgcgttcggcgagtccctcaagaggatgtcgtctacgacgccgtcgtcagaggcagtggtagaggtgggatgctaagtttgtcaattttaggctttttctgaacattacatatcaagttatctaatgtgtgtaggaatgggctgctgctgacactgatagactgcatcacttagatgatttcatttttacccttctt

SEQ ID NO: 432556 - DNA, 348 bp, Oryza sativa
atggttagtgtggtcctgcttcttcttcctcctcccgctcctggttgcggcgctcgcggggagcccggtggtcacggcccagcggaatgcgctgccggcggcggcggcggcggcggctagcgtccgggtcggggtgatcctgaacttgacgtcggcggtcggggtgaggcggcgggtcggtgtccacagggcgcgcggaggactactgccctccagaacccgggcccggtgacgaggaatagggtccaggtgtagtactctgacagggatgggcccgctttcaagaggcttcacactggagttaacaagctttgctgaccttgctggagttacactgctaccaaatgg

SEQ ID NO: 432557 - DNA, 166 bp, Oryza sativa
caacttgatagggcctcgccgccattgccgcctcgctcctcgtctcgcgtgaacgccgctcggcgcttacatcatgtctttaacaatcggtgactcttcttcgtatgacataatggttgctgcaatcggcattgtattacacaagtagctattttttctatcttct

SEQ ID NO: 432558 - DNA, 114 bp, Oryza sativa
tgcggtgccggcagggacgacgacgacgtgcgccgttactccgatcatttcgggaggctggaaggagcaggagcccattccggcgaccttctggaaggtggtggtcactaccac

SEQ ID NO: 432559 - DNA, 229 bp, Oryza sativa
tttgtatatctatccccagtgccccatttcagatttggcgagaccagccatggcgatggcgatgacgaacacagcattggctttcttcctcctcgtcgccgccgcatccctcctctcgctgccgccgccgtcgctcgccgtcacgtcgccgtacgtgcgccccaagccgagggccacgctgtctctgctcaaggacgacgaccactgccggaagcccgcgcaggcgcac

SEQ ID NO: 432560 - DNA, 243 bp, Oryza sativa
ttccatccgcgagagccgaacagatgacgcggggcggctgtcgcagtattccgcggtacgcccttgccggaagtgtgcacggcctgttgcggttctctcgcacagaacaaatgcacggcatgaaagctgacacggtttataaagagcgtggattactactctttcactactccagcggattaacttgatgccctggagccctttattagcttgagggccggcgagcttcacgggggcaacggt

SEQ ID NO: 432561 - DNA, 452 bp, Oryza sativa
ctcacagggccgagccaagccacccgtcctgttttttgaggagaaaggcaaactcaaacccgagctggttactttaaacagaatggcggatagcgaacgcagggacgcgggccaatctggctggtgtgccatgcttaagggcagagggcaccttctacgcagacaggatgggtgaaagcatggttgagaccaccgttacagcggacgtgatcagagaacgcctcgttgtcggcaactagagcgcaacggacacaggattgcaatgattcaattccactcgacatgacaggatgaaaactgttaaaatttgggcgggagagcttcctctttttgctataaaacagtgtgaaaaaaagaatgtttggcatttttttgataaaagttggattaggtcctattaggtcgttgatttacacgcaacaatgatgaagcttggtcaaggcggaaccccc

SEQ ID NO: 432562 - DNA, 424 bp, Oryza sativa
catgttttttattcgaactagaaagattttacttattgatggactagcttttatgcagataaaaacatggtgagtgaaataatattccgagtttttaatacagaataaaaaaaaaataaaaaaaaatagcaaaaagaaacttaaaaaaaaaaaaaaaaaacaaaaaaaaaacaaaaaaaaaaaaaaaaaaaaaaaaaaaaaaggggggggcccttttaaaggatcaaagtttccttccccggggatgcaaaggaataatttttttttgggggcaccaaaattaaattaatgggccggggttttaaaacccccggaattggaaaaaccttggtgttcccaaactaaatggctttgaaaaaaatcccctttttcccagttgggtaaaaaaaaaaaaggcccgacccaatcgcctttcctaaaaatt

SEQ ID NO: 432563 - DNA, 317 bp, Oryza sativa
ttaattttgttttaaaaaattatatcaattcatattggaagtttttaaatcaatatttagattaatcacgtattaataggtaacattgttttcaggcggctcccgaactcagccgaaaggatcagcagatgaagcatgtggggcatgagctcccgtacttaaacccaacaaacaaaccgaggataggaggagatgcaaatcaaaatctcaaagccagcgaggcgcattgctgtcagtgtgagtgacactagctcttggtggtggagacagcgcacgagaggaggggagtctgcctgtgagacagcgagttgacttgg

SEQ ID NO: 432564 - DNA, 338 bp, Oryza sativa
gtacttggtatcgactactacctctcgactcgatcgccatggctgtcaacaacaaggcggccaggcctgcgcccgacgctgttcacggctcctctccgccggcttgtgcctccgatacatgagctccccacggggcggcgcccccccggtgtgcgagggggtctggaaaccggcggaatttgtgcgctcgccgccggagtccggcacgggtggaggaggaccgcgaaccccttttttcttaacgaaattgtttcctcttctctcaagctgagcctaactttactggcattttagcttcccaagcgccgcgaattggacagactttttgcgggaggcgc

SEQ ID NO: 432565 - DNA, 667 bp, Oryza sativa
gcgtccgatctttcttttcagccgcatcctcctcctccttctccgacgagttgaggaggagagggatttcttttggtagtttgttttttctttttttttttttttttttttttttttttttttttttttatttttttttttttattatttttttttttcttttttttttttttttttttttttctttttttttttcttttttctttttttttttttttttttttttttttttttattttttttcttttttttttttttttttttttttttttccttttttctttattttttttttttttttttttttctttctttttttatttatctttttttttttttttctcttctcttcttttctttttcttcttttttttattctttattttgtttttttatctttcttttttttttttctttttatttctttctctttttcttttttttcatattttttttcttatattttttctttctcctttttttttttttttttttttttatttttttttttcttttcttcttttttttcttctatcttttatttttttttctttacctttttctttactcattttttctttttttttttttattcctttttttttttttttcttctcttttcttttttttttttcttctttttttctttacttttttttttttttct

SEQ ID NO: 432566 - DNA, 93 bp, Oryza sativa
gatttctttgtaaggagacggtctatgtggacaacagcgggcctcgtaggggatccgggacgagtgccgggtaaccaggatgggacgatggac

SEQ ID NO: 432567 - DNA, 252 bp, Oryza sativa
tgtgttgtacggccgctgccgccttctggaacattcgcttgcctccgccaaaaaaaaaaaaaaaaaatccctcctcccctctcccctcgagtggggcgcagccgcctcgctcgtcttccttcctcctccaccgccgcgcgtgcgcgagtgcgcagccgccatcgccgtgcgcttctctgcctcccgatctgcggtgcgaccggtgtgatcgcggagcggcggccgaccagaaggatttctttgagggagggg

SEQ ID NO: 432568 - DNA, 314 bp, Oryza sativa
tttattcaccggatagaacagcgcccccaccaggaggaggagcacgagcaacgccgttgcatggtcttgctggtggcagcagcgcattagcgctgggctggtttgcgtcgggcggggcccttctagccaccttacatgatcccggcgcgagcgacggagggcagttgcttggacgtcggcgacatggtgatgatggacaggttccgcgcttgggagggagcttacaaccggtcgtacccgagcgcaaaaaaagcgctgtagcggttcaatgtggtccgccccaacgcagagtttattcaagccgataaaattgt

SEQ ID NO: 432569 - DNA, 417 bp, Oryza sativa
gaatttaattttcctccttttccccgtcttcccatcgctcgccggcgaccgacatgaactccggcgagcctactgcctcggcctccctcggcaatgccggagaggaggaggaggaggacgacttctactgggacgcccaggcggaggccgatctgcaagccatcgaggccgcctacgccgccgccaagcgccgccgactgcccgactgggcaagccccaacccggtcaccgcatccgcatacgcatacgcatccgggggttgatcccccgcgccgacatgggctccctctcctgccgctttccgaggtaatgtgaaggcaaggtaccaaccaagaatgttcaatggcagcatactgtactgcaggaccccttcagaagtggagaaagccaccagggacattttatgcaaaattgaaa

SEQ ID NO: 432570 - DNA, 460 bp, Oryza sativa
cggttttcgtgggctgtggcaaaagcgatgactgattgcctggtctaccactggagacatgcgaggttatggacgacgcgagatgcgatgatctgactatcatgggtaagaacaaccttccattcatggggaaaaacgtagaagctgggaccagcaataatattgtgaggcgcaaagaactagagaatggcgcgagggagattaaatgggaactacctacccttagtgtcggggacatgggaaggatacccttcctaactagatctgaaagtgcactggagtctcgcagagatgaatattaggacccaactacagaaagcacgagcagtgaatcactttctgaggcatgcctcaacatgagctcgggaacttgctagtcatggaaacaatgtggaggctgctgcaactgcggagagaccgatgctatcaccaacatcaggattatctgaaggaggagagc

SEQ ID NO: 432571 - DNA, 428 bp, Oryza sativa
tggttattgtacgttgccaacgattgaaggaaatgctcatcatagctgttaacaatcagctagataatgttatatggcttgtgttgttatagccacgttaacttgatcaatattgtcactctaaatcttctgtaaactcttaagatatattccatcaagtactcccttcgtcccaaaatataactttgaacaatgcataattcatcccaagatataacatctaacattcaaaacttatctcaaatataacagcttggcttacattctcttatcaaccaatcacaaccttgcactattcaaattctacacctatttactcttaaccgaccacaactttgccccattatacccatgtacaaccctaaaactccttatattttgggacagagatagtaagtcttttccatagctgcatttgatcatagaca

SEQ ID NO: 432572 - DNA, 342 bp, Oryza sativa
tctgtttctctcattcaagcgagacgaagctctgcattcagacatttgcccgccagctcttcctgccgacgacgaagcggacgtggagcagccgcagctgaagcagtcagagggatggtggcatgtccaataacgggagctgcgcgaagcggacacatctcccggactgaggcgtctatcgtcgcgtctgctggggtagattaagagtcgtactcgaacgacgcgctgattgctaggtcgacaccggggtcggtgctcgctgcggagatctcgcagtgtaagctggaggccgcgctcctggggctggagcacagagagcccaacgacaaggagctggacacc

SEQ ID NO: 432573 - DNA, 482 bp, Oryza sativa
cgcctatcaccaccacggcttgcagctctggccgtagcagcagcagcgcgcgcgcgggtgcctgtgcccgccgctgctcacggctactcgccgccggctagtgcctccgatacgggagctccccacggtgcggcgccccgacggtgtgcgagggggtctggaaaccggcggatctcgggcgctcgccgtcggagaccggcacgggtggaggagtaccgcgacccgcttttttcttagcgaattggtttcctctgctctgaggctgagcctaattatactgccattgtagctccccaagcgccgtgaattggtaagacttttgtgggaggcgcttgattctgctctactcacaacaagtttctaaagactacgaagcaattgattgtgaagtatttctttcaagacggcttgacatccaagtagctgactgggtgcagcatatgctattcttaacgatgggcgaatgatgcaccccacaatgt

SEQ ID NO: 432574 - DNA, 384 bp, Oryza sativa
accacaccactccctccgcccctccggatgggtttctccgccgccacccccatggccaccaccaccaccacttcctgctcctcctacaattcccaaaaccctaaccccttcaacctaccgccatggctccgcagcctccgctgccccttcaccttcctctgcccgacctcaccggaggggcgcacccattctactacagggtgacccgcgcctcccccgctggacggggggtccacgatcactcggcggatgccaccggcgctgaggcggacccccgtcatccacagctatgacgtctcaacttcgcacagggggataggcgcctaccatggcggtgacggcagactgagaatgagggtccgatcccccagagggagcctgaga

SEQ ID NO: 432575 - DNA, 220 bp, Oryza sativa
ttttgtttatctacgggcggcaaccacccgaagttgtggggtgattctcgaaatgtgtatgaataaacaccccaaattccaggcagtaattttttcggagtgaaagataccaccaccaccagcagcttaaagcaagcccatggccaagtcgacgcccgctgcggcagcaggagtcgccgaagagggtatccttggctttcttcctccatttcatgcgccg

SEQ ID NO: 432576 - DNA, 269 bp, Oryza sativa
cagttgtgttttgcgatgataccgcctcctcagcgggcgcgctgggttaccacaaggcaatagcaaacccgaagctcaccgacaccacagacaagatggggcgaaaaccataccgatccgtggatctgagagggagctcacgcgcacgggaaggacattttgcggagctgtggctgacaccagaacgatgcccggggggaagcacaatggctccaagacggaccaggcccccgaacaggacagagagggcagccgggacccacacgcta

SEQ ID NO: 432577 - DNA, 533 bp, Oryza sativa
tttctttgctcgggtactgcctgcaccacggtcggctcgccgacgccggcgacatgtgcgaggcctgcctgtcttcttccaaggaggagagcataaaagatgcaggggaggagagcgccacggtgtgctcttgctgctacgccgttgtgaaaacctcctcgcgcgagctgccggataaaggacaaggccaatcggaggagaagacaaccgaagaagacagaaaccaagggtatgttccattggctcaagaggagcacggcgaagaagaagaccaaggatatgttattttggctcaagaggagcacgacgaggaagacgaagaagagcatggagaatttcaggaggaagagcggcaagaagaggtggacgataaagacgagcaagaggagaagatggccgccgtccaggacgagtccttggaagtcatggctgtcggagaagagatcgagctcgacggccagcgcttggtgtcggtggcagccatcgatgagatgacaatcgccgacgagtcacgcttgcatcaggcgtgctgt

SEQ ID NO: 432578 - DNA, 513 bp, Oryza sativa
ttaagttattcattatatcttgtcatcatgattcatgagcgattttttaaatattctctcataagtatggataagtttgtaaaaatgcatggaagaaatattatagctatttttttgtcaggaatgaggcagatggttctgtgtttcttcttcgttcgcacttcaaatatgatcttaatatttcttcatttttttctctcttcaaagatgtttgtagcattcgtgtggcagaatcttatttatcatctagttagaaacttagaatagtgaacctaagtggtacagtatcccgttagaagttaattcacacaaatgcatatgaactgctttgcgaataatggaattcttcctgttcatgcttatgttatacatcatgacatcttttctgtttcaaacaaactatggatagtttgtaattttggttctgctttttttcttggtttcatgtaaacgtaacacaagggttaacattgttttggttgtctgtgatctttgtgactatattaacatcat

SEQ ID NO: 432579 - DNA, 352 bp, Oryza sativa
tcaatgccagagccttcccgtcgccgcccgtcctccgcactccagcggcagcggcagcggcagcggcggctcgcatcgcggcgccagcggcggagggagcggaggaggtggtggtggtggaggtgattctaacaaccttaaagatgcacatatatactcagagcatgttctctacgtactgctgtctctagagggtatcgttggacaagttttttgagctatattttaaggcgttttatgagatacgagagctcgaaaatttcttcagggaagagaccccgatgaggtagataggtcctgtgccgatttcaataatcttgtccatgatggtggcaaagaactgaccaaactt

SEQ ID NO: 432580 - DNA, 423 bp, Oryza sativa
ggcggcggtttaggccgacctgctcccccgccgcctctcctgctcctcctcctcgcgcgcgcgccgccggcgaacggccgccgtatacttacccgcggtgcggacgggctcctcttatctcctcccccgaccgcatactaccccctctctctcccttgtgagccctcctcggcgcgcacggcccccgccgccggcgagcaggctcggaaccagggggggtgggggactcgacgcgacgagccctcgttccatcggcctctgtctccgttgagtcgaattgaagtataatggcataccatggacagctggatggacgccaagcttcacgtttgatgcgtgatggcgccttccctgcagccagcctttctggccgccaacctttggatcgcgctgccaccgctctggagatcttggaaaagaaac

SEQ ID NO: 432581 - DNA, 502 bp, Oryza sativa
  unsure (1)..(502): unsure at all n locations
attcctcctcttcctcatttcctcccaccgaaaaaaagctggggtttggagctgtgcgccgctgctcgtcgccgcccccatcctccgtcgcggggcgtcggcacgggctccctcctttccgtcggctggccgccaagaaaatctagggtttgggctgtgcgaggcagcgccggggaagcagggaagcggcgaggcggcaggcaggccggcaggggcaaggccagatccgccgcgcgcagcggcctcgacgggccggtggcaacgagggctcgctggctcgtcagatccagtgccccttttctccctccctccccctcctcgatttggtttgctgggggtgctcgccaaaagcttcgggattggagtatgattttgaggatctgaataaaagaagtcagtaaaatcatttgtctctcacgatggagaagatacaatctgattgcccttatcctggatgtttcttctgtgttatgaaagaggcanaccctagtaaacgaagagc

SEQ ID NO: 432582 - DNA, 452 bp, Oryza sativa
ggagtagattaacattaagaaggggggagaagtggaggaggaggtggcgcgcaagggagaggagaggaaggaggaagaggtggtggtggaggagaagagccatcagcagcagcagcagcaaggggaggaggagctcgtcggcctctcgctcgccggcggcaggcccaaagtatttccaatgtcgagccctccacctaatccttcgcaacttacaattttctatggtggatcagtatgtgtttatgactcagtgccgccagagaaggctcaagcaatcatgcttattgccgcagcagctgctgcagcggcgtctgccaccaaaagcaatgctgccattgctgttaagccccctgtgatgcctgcagccaatgctacccaagcagcagtctctcctgtgctcacaagatcgctctcattgcagagcacttctgtagcaactggacaacctcaag

SEQ ID NO: 432583 - DNA, 223 bp, Oryza sativa
ggagtgtgtgttggggggaatcgcgccagggacgtgaggggggtttattttaaatcaacgggggttataaaaaccaacaacatttccttttcaccaatttccatccattctatttcatttattgcgccatacactaaattcacaactataattaaattacccattaccagtccgtatacaaagcgaagaaccttgctcatagtcactctacatgactattccc

SEQ ID NO: 432584 - DNA, 195 bp, Oryza sativa
ttcaatgccagagccttcccgtcgccgcccgtcctccgcactccagcggcagcggcagcggcagcggcggctcgcatcgcggcgccagcggcggagggagcggaggaggtggtggtggtggaggtggtggtaactctcttcggggtgggcctactcacgcatgcgctttgagcaccgaccagccgaccctgtgta

SEQ ID NO: 432585 - DNA, 306 bp, Oryza sativa
atcatgtcttcttaaggcgtcgtgggcggcctacatcgagtgggtcggtccggccatggtgccggataagaaggaggagatgaaggaggaggtctagaaggacgccggcggctggtttctgcgacggctagaaggaaggaggtgacggctagaatgaggagggcggtgacggcaagaaggatggcgaatgcaataaggaaggtgacggttgctgcgacaagaatgatggctaggtcaagatggatggcgtcggcggttgcggcgactagaaggactgctacggtgactgctagaaggaatgctact

SEQ ID NO: 432586 - DNA, 252 bp, Oryza sativa
cttactcttgggcgagggcccccgcgccccgcggggggccatatcgggagcccgcgttcctgacggtcacaccgacgacgatgccccggccgcgaacgaggaaggcgcagatgatgaccaaggaggagaatggacatggcaactggaggcatcagtgaagacccgcatggagaaaacggtatcctttatttttaaaccatgttgagatacatttgtccacgagggctcctaaatacaactccgtaatggcca

SEQ ID NO: 432587 - DNA, 164 bp, Oryza sativa
atcatccctgaacttgtgggactacattcacatggggatctacacagtcaggatacaaattaccttgtgacagcatgtgatgaggaatcaattcgcctatatgacattcaaaatgctgtgtgttcaaagactattaatggcaacagatatggggttgggctcgc

SEQ ID NO: 432588 - DNA, 510 bp, Oryza sativa
tcggtagacgatggcgccggtggccgccgacggaaggttgtacggggagatcgtgatgctgtgcaacaccgtgatgaagggctacctgaagaaccccaaggcgaacgcggaggcgttcgccgatgggtggtactatttctgcgaccttggagtggagacagataatgttaccttcagctctgtgagaagcacaaccaagattgacatggttatttctgcaaggcttcatctctttatactggccatgggatgttatggaacttttaaatcaccctcatttttttgtcttatttctttttgagattggcattgactttctttaaagactttttcacttttttattttatttttatattgtggctattttgtttacttgtttactcttttaaatatcttttttatcgttatattttaatcaatctttcttttgtctccttttatttttttgggagtttgcgttacttttgtctagtttttttaatgagttattctctaatatttttcttttt

SEQ ID NO: 432589 - DNA, 527 bp, Oryza sativa
  unsure (1)..(527): unsure at all n locations
gcagaatgctgcacaagaatccttccatgaaatgactgcggtcaaaaggtatctttttacttattctttcaatgtaaaggatagcaaaaaaaatagacatttgacatcccttacaatggtagctaggttgacaagggaacactaagttcccagaaatgagaatatcagaatattattcacagctaacaaatatgatgtgctgatgttagccaatagaacatcaataattagtatactaactatggctattctacttctgatgtgctacagtgacacaaatatgtcaggactatagttcaaagcaacagttgtacattttaagtttgatgagtgctgggttgaatataanagctgttatgtacttgcatccatcattgtattggtattcttttatgcattttatgctctgaatgaaaccaatatgaatacacaaattctattttattttcgttaattagcttttagaggaacttggctgcatggtactgaaagttcaagccagtgccttatcatgactcatgtggttg

SEQ ID NO: 432590 - DNA, 527 bp, Oryza sativa
tcggtggagttctgcgtcacacagcaaagcggggcaatggataatggaggacagcgtcttgatataatttttaagttttcaacatattatcacatcacattacacttttcaatagaacactactagagggagttccataaattgagacactgtcgtgtccagaaagatagcaagtggatcatcttgcacaggctgcaccgtcgtattggttcagaatctttcaaataaagtcgaaatattaagaagatatgcttctcagaccatgcatcaccacactatataaggggcaaacaagctcccagtatcgttactttgagcccccgcctccccttttgaaataaggttgactgtaattctgcttttgttcgtaatatggatgatcataacttagactacaagggaagtggtgctcttgaagagcttgacatgttaacagtgaatgccaaagaagcccaggagctcatattgacgaaaatccttgagaggaatcatgctaccgagtacctgagcatattcatgaatgggtc

SEQ ID NO: 432591 - DNA, 149 bp, Oryza sativa
tttggtgtttgctcgcgactcctccccactagggggagctcatttccacagcgggaccccggctaatggcctacagcattggctctcgccatctacatcgatgcaacacgactgtaggtctcatcaggagttaatcacatggcatgaac

SEQ ID NO: 432592 - DNA, 175 bp, Oryza sativa
gttcaagccccacacacaaagcgagcgactcggcggcggcggcgatggccacggtggcgatggacatctccaagccccctcccgcggcgggcggcgacgaggctgcggcggcgaaggggaggggcggcgcctgaggaggaggtggtctgcttgctcactcgttttggatcttcct

SEQ ID NO: 432593 - DNA, 267 bp, Oryza sativa
ctccttcccagctccaaccatttctcccgtcctcctcctcctccgccccgacctcgctggcccgcccgcccgcctccgcctccgccaatggcgacctccacgcgggcgttgctcctcctccccctcctcctgctcttcctcctctcccgctccctctccctccgcgccgatcccggcgccgccgtgtccaggatcgccttcggctcctgcgccaaccagagcgcgccccagaccgtgtgggaggccgtactcaggcccgacccgacg

SEQ ID NO: 432594 - DNA, 182 bp, Oryza sativa
cttgattttgataaagagattgttcattgtacaatatcttcccccataggggatcaggaaaatctgcaaggtaacattgatggcacgatggacgatgccctggcggcttgccagaccgagtcagattctgtacagtggaaatgcccctccaagggcgactgaacctgcattcaatgagcccc

SEQ ID NO: 432595 - DNA, 110 bp, Oryza sativa
tcgtgctctaccgcgcaggaggcagggcgagcgagcggcctccctccctcgctgctgccgagcgagcgcgccgacgctgctcgaacttggttttagactgtctgggggcg

SEQ ID NO: 432596 - DNA, 283 bp, Oryza sativa
tcgttttttttctaaaatacccccactctacctgggattgtgcaattgaattacaatggttaactatcacacgaatcagagctacaaatcaagaaactaggatgtctggaaatctctctactcagcctatactctaaaattgctcccagaaggcggtctcaaccttgattcgatggaccgggcatgtcagggttgtcgaacatgacattgggcgctgccgaggttgagggagcgttcatcgctgacagaggcaaccgacccccgaaagagagcatttgcaggt

SEQ ID NO: 432597 - DNA, 447 bp, Oryza sativa
gtttgaatgacaagcttgtagaatccgcagttttactcctggctgcccgaaaacatatccgtgagggcaaacctgatgggttcgacattatcgcgcaacgtatatatgaggactatgattccctagtgtgtgataaaggtgatactgcagaggggcagaagctgctggaggaaagaagagcacttttgaaatgtaaatgtctgattgtcactataatttcgcaagctggtgaggttttggataactacattcaagcacattcagaggtgcccaatgtggaggtccttgcgcgtgtttcatatattcttaaggaattcgggttttgccctaacgaagaatacattgacaccatgatcctgtactgctctttttgtattcaatataatattttttttctatgcaaatgtttgttgtttattaattatttcttaaacttgttattgaagc

SEQ ID NO: 432598 - DNA, 355 bp, Oryza sativa
ttcattacacctgggttagaatacacagaagaacagatacttttgactcttctcatcacacacgcactgtccttgcaattgcggcggagcctggtgtgatccagccgtacccgtaggcgcacatggagctgcatgatgggaggcctggaccagccaagagatcggctgagatataaccgccatatgcaaggaggaacgtgggagctcgctcactaaggagctgccatctgcaccaggatgttggctaaactcgcgctcaacagcagcggctcgctctgggcgtagaacagcgttgttaataccgcttacgctacttcacaggtggtcactgcgaacgctctattgaagacaaaga

SEQ ID NO: 432599 - DNA, 444 bp, Oryza sativa
tcgttagctctagcactcctccgaatctcgcgatggccctccgcccccgcgcgccgactatgtccggcgaacccctcaccggcggcggtggcggtggtgcaagtgggacgtccgatggagcaataggggacggagcggaggctgcgtgaggtgaacgacgggcgcggaggcgatggcgaactacctggcgcagatccagaccatcaagtgctcctgcgaccgcatcgtcgtcggcgctgaagatgggagagacctgtggatgaatgagaaagaaagctctcacgcaacccttaccaggcgaagaaggcctaggatcaataacaaggcgaggaatcatgtggatgtggaaaacgtaccagttgagtttatacagaccagtgattcgaggctacggagacggtttccacaagatcaatactcggtctggtcgcgggaaccatatgc

SEQ ID NO: 432600 - DNA, 287 bp, Oryza sativa
gtccattcacacgaccagagctgtgcgagggctagcttaagctagccttcgccttcggggtcctcctcgcggtctccggcgatcccgccctccgccgccgccgacatgtcggagcacctcgcgctgcggagctccgtcgggagccacagctgcgcgctgccgccgtcctaccaccaccaccgtcgtctcccgccgccgcagcagcagcaccccgacccgctcaactccgtctggatccgccgcctccctttctaccccaccagccgctccctcccccgcccccgcct

SEQ ID NO: 432601 - DNA, 518 bp, Oryza sativa
tcgttcacgcgaaatccggccgacgacgacgacgggacgtcacgcgccgcaggcgaagcatcacggtccaccaccaccagatatgccgccgcccaccgcccttctccccggccgctccgccgccccgcgccctcctcctcctcctcctccgccgccgcagcttgcgtccgccgcgagactctctaggaggcccctcttcaatgccgccaccgccgtcgtcgtccggtccaggagcaaggacgaggccagcttcaccgaccgcatcctcgactacatcgaagggggtccaaagttgaggcggtggtatggagcgcccgatttgcttcccaaggatgggagtgctgaggatggggaggatgagccttcagatatcgaggagcctcgagatgctgtgctagtcaccaatggcgatagcgagattggacagatggtgatattatcattaatcctgaaaagggccagaataaaagcattagtgaaggacaggcgatccactgaagaagcatttggaacttacg

SEQ ID NO: 432602 - DNA, 332 bp, Oryza sativa
cggaacgcccggcccggcccaacccacccgtttcgttgtaacccacactcccacacgggaagggagggctcattttggttgagagaggtggacgcccacacaagcgcctgcaggtggaggcgttgcccaccaaagaaagggttcgcggatgcgcgtaactgctacgcgtcgcacgtgcgccatcacctactctacattgtctacgaacgggggcgaacaaacagccccactcttcggtggattctgagattagtgcaacctactcaggtgaaaattcgttcactagcagtcgtcatggcagtatggccaaagaccgcggtaaccgtttgaca

SEQ ID NO: 432603 - DNA, 431 bp, Oryza sativa
atgcgttttcttgtggccttccagggaacgaggaaccgcggtccggccgaatccttggacatgattcgtcagcataaaggaacattttgtagatgtgtctaatggagtccacaggcggcacagagaagtctagcagtcagaccttccatgtacaaagctctcctaggctacaagattgaggaccttcgaccaaccggaggaataaagaagtggaagaaagatgtgtactccagatgcgctcgcaggctatactgatattccttgacatccctggcctgcggcaggacgaacgtgctgcaatgaggacttggctatggcgcactcaacattcttaggctgggtgcattgtaaatatatctgctagacatctacgacctgaaactgcctgtgttgtgcactgctccacacaacacttgagcaaatgaccatgt

SEQ ID NO: 432604 - DNA, 525 bp, Oryza sativa
gtttcttggatccggttagagtaggttgtggtttgtgtcggccgtcacgccatccgtcctcatggtcgcgcaaaccagcagcagttgttgtcatttttccgctgagtgtgatgcctcttctcacggccaaaccagtcacgaatgctatacagatagaaccaagggcaaatcggtctttctccgtacgaactcacggctaaacacttgatctgagcagcagcagtgacggaagtgctaccgatcgaagaaaaacaagtggccaatgcttctagtcgaaagcgggaagtttccatgctattttttggttaccgacttgttttctatgctatagatcgaattttctcaaaaagaaacctctcgttgtctcctccgctccttgcctacttgcgccgccgccaagacgagtggcggctgaacaagggagggcacggcggcgatctccatcgcagcggaggggaggggatcctggtgcgtcttctttctgattcatctctctctctctctcccaccccacccggactggaa

SEQ ID NO: 432605 - DNA, 296 bp, Oryza sativa
tctgtcctcgatcgagagccgcccctccttgagtggcggtggttccgacgaacgacgacggcggcggctcccccctcctcgcctcctcgggcgccgaatccgccgccggctctcctcgccgctggccggtctcggggaggggaggggagtggaggggagggaaggcggataaaaagatgcggaacccgccgtctaaagcggtacataaaccgccgtcctgggggaccacgtgaaatacaaaaacggcgtttcctgggcaaaaacaagttcaacaccgcccgccttgggggtcaccc

SEQ ID NO: 432606 - DNA, 167 bp, Oryza sativa
caccgttttgttttggctcacccctgtcgggttgagaggcagggccaattctagcctgaatctattgtgagagtgtcagtgtgagaagtgctcatccaattcgagctgttaacatgttgctcgctgcatgatcagagagaagggtacagagagatcgactgggagga

SEQ ID NO: 432607 - DNA, 310 bp, Oryza sativa
gtctttttttttttgtgctgaaaaccaccacgggcgggttttattgagacaaccatggctaaacccccacgggggcgataacgggaaagacaagctcccggacagactccacaaatacccccgagcaacaacagaaggccactcacaacatttgatacaagatattgaagccacacatgaggggctgacaaggccacgactaagaatgccaggagagcagctgcgcaggaacaagacaaccagcaagggcgagctcggggccaaagcctactaaggccacaccatccaggagacacaccaaggcaacttc

SEQ ID NO: 432608 - DNA, 533 bp, Oryza sativa
tcgtttccattgacgatgaagacggaaagagagagggcgagagctagaggggatggggtgaggaaggcacgcagcgagttcccctccttccttcgtagcaattggtgcttccaccagcaagctttctataacgtggagtgtcgccgaccacggccgcagcctccttcctctggattggactccactgggaactcctccgacatatcaagtgtgcctgtccaccttctacctctgaggcaaagattggatcaagcaagctggatctgactcagcaccttgatctgctcaacaaccggagcccccacctccttatacatcccaaagatggatatgcatcttctgtattcagttaggataaggcttccaaggtctgcataaagcaaccgtgagactcacatgctacaaaattttggtttcacatgatgtttatgactgaaagtaatgcagtatcaggcatgcaaaaatagaagtttagttgatctactggtgcttcatctgcaaacaccatggatcagttcatgacagcatgacca

SEQ ID NO: 432609 - DNA, 457 bp, Oryza sativa
ttctttcgtctgaccgcgtggcgttgctcacacaggctagcgaaagcgagagacacaggcgggtgggggggcgacagacagggagagggagagggagagagagagagagactccgccggtttctttcgcctgctcccgctcgttctttctcggggtgggtgggtgagccggtccacgaggcggcgtcggcgaccgtggtgcaacactgccgcagcacaggggtcatgagacggggccggctgttggcggaggagaagattgggcacaacgagactatagagcaagcgacgcctccttttctttttttctccgatccatctaggggaagcattctcccatgctcgttgactattgagaacggattattcgaatggagtgagggttttgtatggctcatcgggagctgagctgtgtgatcttgtctttccgacagttactagcacgaactggtgcactg

SEQ ID NO: 432610 - DNA, 373 bp, Oryza sativa
cgtggtgatacccactgatctcaccactcctaggggggctgcttgcaacaagcgggccgtcgaagcaaccaaggatatgaccgacagcgacacagtacagcacctccgcgcgcccgcagacgaggccccatactacggagctagagcacaaacggagaacgttcgcctacacgactctctcagaaacgtgagccaggccgcaaccgagggcccgacgatgggtagccaatgtatcaactgagctgacgctgggagtgattgactaacgacatgagaggatgcaatgccacagccagaccatgggttagatcaagactcacaccaagttggacccactcggcacctgagtcaagaacacggggggggggaacta

SEQ ID NO: 432611 - DNA, 349 bp, Oryza sativa
ttgtttaagggcattgtcgtatgggctttgggggggagttggataacccggggggggcatcacccataagctggaacccatactgtatgctcaaggaattgctccaccatgatggccctagttgctcaagtatcccacggagggagaagctcgcggagatcgtgtggagtttctgccaattcgcactgggatcagtaaaggcaccaaatccacacggcgaatccatcctcgacagtgcaaacattgtactcagtgttgctcgccaacgagcttctcggcatctagtctcggtggggtgagcagcgtgacacccttgaactcattctaagggtgtgggtggagatgttgc

SEQ ID NO: 432612 - DNA, 542 bp, Oryza sativa
gtgttatgcatatagagattttttttctgtggccaatcaatggactagtcatgaaaaagaaaaaaataatcagtgggtggaaataccttgtaattttttcctgaaccaaaggggtccaatacctgcttgtattgaaagccagagtttttcaggagataatatgaaagagaatagagttgggagcatctctggcactaaaagcaacatatagtacatattaggagacaccaccagattcaaagagaaattaccaaaagacaacagcagccagcatttagttcatgcaggttagttaggcatacagagcaggtcatagagcgctgaaaaattcaaatgatcttgaacctcaagtataccacaaaagctatatatttttattcaaggtcactaccctccacatcagtaggaagctcactaagaaataattttcatgcaaagatcttaatcttgagaggtattttgcctttccatattttgtttaccgatcgctccaccacaagatataagattgtagagggacttttgcatgtacatgttatttt

SEQ ID NO: 432613 - DNA, 483 bp, Oryza sativa
tcttctgctattctgccatagatttatagctgggggtgggttctatttctagagagtcaactctcctgaaaatcgattcatattccaaaggcaaggcatcaggtatacctaacctctctttctatctaaattgatttgctttcttcccaggatataatcaaatacaaacaattacaaataacaaaatacggagtaacacataggcagttactaaagactccctatagtgttgtcactcgcattttagcataccgatctcccacggacaaagttgtgctgaaacacggtctacatctatcatatagtgctgcagcatatgacctgataaaattttcagccctaccacccaccaacaacagaagatattcactaagccgcttcaatgctacacgttctagcaatgcctacgaacatctatagacattgttattcatctacatcatctgcatctgcccatccaatgaaaactcacatacaaatata

SEQ ID NO: 432614 - DNA, 343 bp, Oryza sativa
ttcgttcctcctcctccccctccgctccctgggagaggcggcgaccgcgccgcgccgaggccgcctctcggctgggctagggggttcccccccaacctcccgccctaactaccccgcgccaccatggcgggggcgacggcctccgcgtccgcgtccgcgtctgcggcggcgttcctcctcctccccctcctcgccgccgccgccaccgctggccacggggtctgcccgaggcagcccgccgccgccgccgtcctgccgcgccaggcagcccgccgttcctactcctcctcctactactcctggccctcggcggggtggtcgggccaccgggcgcaccacgtgg

SEQ ID NO: 432615 - DNA, 488 bp, Oryza sativa
tcgctatgctgctctggttatctatctatctgtctgtctctgtcctggtgaaatatggatagcaattagccgcttgtttgcatgggtacttctgtagatatattgactctgcagcaaacacagtgtttcttggttctttacggtggtcttctgtagatatattgactctgtatgctttgttctctgttcaagatagatttaggaagttttcatggttttgtacttcaatatgcatgtgcgtttgtgcatttgctatggtttttcagttgattaattattcacttctttttaccgtgtttacacatttttctattccaaattagcttgaacaacacacatgtacatgtggcaactcagtcaatttgataaggtcaaaatggtcaaataggactataacattttttgtaattactattatgtactacctccgtcttgaaatgtaactacttttggctgtgaatgtggacaagtacttgtccagagtcata

SEQ ID NO: 432616 - DNA, 528 bp, Oryza sativa
ttttctcgcgggcgctctcgctttgccgggaagaaggaccgactaccacgatggggtccccaatgagggtccataccgtttgcttgcttcatttacatcgagctggatgtcaaatcacatttctccctgagacataccaaagcctgcctctgttgatgaattcatcaagaatggcaagaacaagaagtcattcatgtcgagcatctttcggacgaaagggaggagcatcacagggagctcagacaagaagctgctatcgcggatggatatcgtattcggcttggatgataaatgcgacgataggtcggagctcttggattcttcccctgccgtccgcaagagcttttcatatcggcattgcgccacaaaaattgagagcttgactctaagctgcttggatcacccccaggcagttcgatacccgagaataccgggtgttcataggcacatggaatgtggctgggaagccttctaacagcagccttaaccctgaggattctctacagatagaaggattaccctgattat

SEQ ID NO: 432617 - DNA, 374 bp, Oryza sativa
tttccgacccaacgccccggattgaaatcgggcaggcttccacgcacccggcggcgtcagcctccaccgccgctccccctcacacgcgcgccgccaccacgtgcccctccgccgcggcatctgtaaagccccccttgtcgcctccctcaactcaaccgccgcttttattcccccacctccacctccattccacgcgatgccgtcgcgcctctcctctcctcctcctcctcctcctcctcctcttctcccgcgaccccgactcccccacgcctactacttcttcttctcccccttctcctccatccatggcgccctctcccgccgccgcgatgccactcgcggccgagcccgatgaagtggtggttgaggtggag

SEQ ID NO: 432618 - DNA, 530 bp, Oryza sativa
gttcacttccctcctctcctctctcctcttctctcttcccactctcacgtctcctctcttcccctccgcgaagcaacggggggcgaggcgaggcgagccgacggcagcggaggaggcggcggcagccgaaaccccaagaaaacgccgccccttgtttctttcttgccttgcacagcctcctcctcgatccgtcgcgcgttcgtcgggcgagatccctcctcctcctccggtttccccgcgtgcgagattgagccccgttttcggtggaagcccaaccagccgcggggttggggttgcgaggcgagagggcggctggcgcgaggctcttgatttgatctgcggctgctgctgcgggggtgctgtggggcgccatggcggcggcgggagggctggagcagtggcagaaggacgggttcttccaggcggccgaggaggtgcaggagtccgcggacttgatggaatctatttatagaacttggatgcgggaatgcgatagcggggctaatttagaggagctgagcgatttgcaa

SEQ ID NO: 432619 - DNA, 389 bp, Oryza sativa
ttatgatctgccggatgatcaaggacaatcgggggcacacccttcagatccgggttggtggtcctcacatgcggagcacaagctcggatcaatttctctgactaaacaggaaaggaattcgggttcgccaggatcttctcattgtggggaaggtgaccattcattatgggctgcccagacattatggtgtactgggtgtttatcaagtccaatacccaatgggttttattcaattattcctgataagaaactgaaggagcgttttgacaccatcccgtctccagatgatctttattcccttgaatagagggattcaaagctgagataattcttgtggatttagagaaggataaaaaactatctgctataaagcagctatgtgcagcatt

SEQ ID NO: 432620 - DNA, 176 bp, Oryza sativa
tggttgcgacccatgtgaacctcccttcggggggcgtttaaaaaaacaaaggggtctcccaacacgtccaacccatgagcagccaagacgcgccttggcttagcaggggagggccggcgctctccatctgccgagcaaagcgggccagaggattacaagatcatccctactaccct

SEQ ID NO: 432621 - DNA, 365 bp, Oryza sativa
  unsure (1)..(365): unsure at all n locations
atccaagtccaacccaccaccgtccagtccgcctggatcccgaggatctccttcccaaagcatccctgattccttcccaaacgcctaaaccccaccaccgccaccgcccatggccgacggcgccagcgcgaaccccggcgacccgccctcgccggcctcggcgaggtcggggcagcggaagcacgtccccgactggctcaacagcccgatctggtccgcgcctccccctcccgcgcgccacccgcccccgtnncccttncccgnccgncccctgctccccctcctnccacgcagccctgacctcccccgccgccgtcctgccggtgcggcggaggcggaggctcctaccacggctgcgacggcga

SEQ ID NO: 432622 - DNA, 482 bp, Oryza sativa
  unsure (1)..(482): unsure at all n locations
tgtgtctcggcgtagattccggccggagggcgggggcgcggagggtggagccagcggcggcgcccctacctccacccgccgctgccgacgtggtccgtccttgtgtaccccgcgtcgtcggaaaggggagagtgtaggggcaaggaaggcggcgtacagatccgccgccccccgttctcggaagagacggcggcgcgcggatccggtggcctctgtcctctggagcggccaggcgcggctgggaaggacggtggcgtgcggatccatcgcctcccgtgctcgggagcgacggcagcgcgcggatctgcccgattccgcccggcttaggcgggcgggttcgagcggccacggcggcggcagctgcgataacgacgacggccatggtggctgcgacgacgacaacgatgggcgtttggggtggagcggcctctccgcgcgtntgctcctctcctctcctccgacgtcgcgccacgtcccgcaca

SEQ ID NO: 432623 - DNA, 377 bp, Oryza sativa
gtcacgtgaggccccaaccgcaaaggaagcatgggggcccttagtagactggccggcggatccagaagcagactcgccttatcagatctccctggaccctgcacttctactagtcagccaatgcgattataaactccttgttaacagctgactggatttccctctattcgccagaatctcgctttatatggcgttggtgtttcggtggcttatatattagggaggagtttggatggccatcgactcttgaggagatctaccgatttaattaggccgacttgctgcttaatttgtccttaaaaaaattttagcacccttggttcttaattgattctttctacccgtttcgaattttgaacaacgttttttctaataca

SEQ ID NO: 432624 - DNA, 471 bp, Oryza sativa
ttataaaaaagaaagactgcgaaaaccctggtaggagaaaacccaccggcgggcgatggcgtcgccggcgaaggcgtagcggcggccggagggggcctcggtgctggagaccctccccgcgctcccgctcgcgatcatcatcgccaaggccggcccccgctgcgccgccgcgctcgcctgcgccagctccaccctccgcgccgccgcctccggcgagggcctctggcgccacttctgctccgacgacttcgccctcgacgcccccctcgctcccggcgacctccctctcccttccttcaaggatgcttacaaagcttgggtccaatcttttgggatgtaccctttgccacttgttaagaggggtgaagatcttctggagctcattcagggcatggctatgcgagtattttcccgaagggctgaggactctaggggaaggcgtttcggaagccgagatagccgtcgcggaat

SEQ ID NO: 432625 - DNA, 363 bp, Oryza sativa
tttctttatctaacaaacttaaaaaccaacttgtggactttcaatcaaccaaggtgtcactaaaaacatattcaactgttataatagtacagaaatgtcttattcatgacacaatacatatggtttgacaaaattctagcatttgaatacagagatgtacatttgggactggggtatttttcaaagactccaacatgtactctcattactattttaaaaaaaactctaccttttatgattctattatatctaaaaccatagcctaaactttttgcatgacaaacatcattagttacactcatgagagtactagttaactagttatgagtacacacgttataacttacacgattcccaggtttc

SEQ ID NO: 432626 - DNA, 193 bp, Oryza sativa
tgcagcatagtgtatgctcggtcgtccggtggtagacttgtcaagaatgaaggtggaaatcattcatcggccatcaccatacatgaagattcaaccaccgacaccattgatacctgatgctgccttctctgccgcacgctcacctcagtgtctgagatggttttgatgaccctcaactttcaaataaatagtg

SEQ ID NO: 432627 - DNA, 171 bp, Oryza sativa
aggcaccggcccgaaacacccgggccgacccacgcgcctgttcaaagaaagagagagagagagcggccgggggggaagacaaaggacgacagacacaacacgcggagaccgcggagcccgaacaggaacaaagagaacccgggcaacaaaaaggcaaacgacaggcaacag

SEQ ID NO: 432628 - DNA, 364 bp, Oryza sativa
gttctctctgctgcgctgctccgcactcgtggggggggttgttcatttcggcggctatggctgccccgctgtcaacactgaaggggcggcgctgctcaagtttcagtccagggtggtggaggctccgcatggcgccatggcacgttggagccagcggcatggcgatccttgccattggcaccgcgttccttgcgtggatggcagggcggagatgtctgaatctaaaggatctctcactaagagggaccttgactacagaactaggaagtcctaggcatctgagggctctagcactctccaacaacttgttcgatggaccaataccgaaggaaacgagtgatcttgcaatgctggaaatactgga

SEQ ID NO: 432629 - DNA, 84 bp, Oryza sativa
tactatagttaaagctccccgggctgagtacctatccttaattccctgatccacccacacattttttttacacacacacctaca

SEQ ID NO: 432630 - DNA, 387 bp, Oryza sativa
tcggttcgaggccccgaccgcagaggaagcatgggggcccgcggcggacggcccggcggagccggaagcagactcgccggcagcagactcgcctggccccggcacagccgacgaggcgggcagcgcgggcatgagctccggcgtcacggcggccgtggtggccgccgccgccgccgcgctctcgctttagatggcgttggtgtttcggtggcttatatattagggaggagctcggagggccggcgattcttgaggagttcggcgatttaattaggccgcttgctgcttaatttctccttagaaaaaattaggcaccttgggtctcggctgatcgctcggccgtttgtaatttgaacaacgatgtactaatacacagttgggtctctg

SEQ ID NO: 432631 - DNA, 542 bp, Oryza sativa
ctttttctcgttctcttccttcctcccgttttcccctttatctttctcgctctcttctctccctggcgcacgagcgctgcgctcccagggcgcatcgccgccgcttcctcctctcccccccttccttccttcctctctttccctgttcaaaccctaactatccctcgcctctccaatagccgctgctgccgtggagatggccggtgccaagcactgcgcaactccggcggccctgttctatccccatgagtgtgctctcgggtctctacttcttcctctccccctctaatttctagtgtttatattggatctactctcctcccctattttaatttttggttacctctgatgattctacagtgattgaaaaatctgtggttcagcccctccttcagaaacccaagtcttctcttctactgctgctcttctggatcaatggtaactctgctagaacaccacttgctccttcttcaggttggtctctctgctgtctcacttcagcatcttcttgctgctttggtttacatgcctctcctggctgc

SEQ ID NO: 432632 - DNA, 414 bp, Oryza sativa
cttcttcctcctcgaaatcgtttgtgagggtttcgatctcgaaaccgacaagggttcgccccgcgagtgcatggcagtgcgcctactggctaatgaggtgtcggacctgtgcatcggcaagccggcggtgaggtcgctcccgctctccgccgccgccggggacctggccgcggcgctcaggaggggaccgcatcaggcagcgggaggggcggccgcgtgcgtcgccgtcgacggccccgggcgcgccgtcgcggggaggctcgggctcgccgacgtgctctgcttcctctgcgccgcgccgggcgcgctcgcccaccccaccgtcgcgctctccaagcccgtctccgcgctcctccccaaggacggcgccggctaggtccgccgcgtcgacccccgcgccagtgtgttggaggc

SEQ ID NO: 432633 - DNA, 203 bp, Oryza sativa
tttgtttttttaaaccaaagggtttactcacatttaattatcattcaactaattcccacccaaccttggtttaaaccaacactttttattgtcacttactctactaaactaaaacctcccttgacttggcttaaaaaccaccaaattccttcacttgtataagagtcctttaaaaacattatgccctttagagtggtaccatc

SEQ ID NO: 432634 - DNA, 338 bp, Oryza sativa
ttggtttttttaaggttaggggtataatctcgtttaattatcatgcaactaattggcccccaaccggggattaaacggttttgttccgggtctccgggcactagaaatctttatggttacttaaagggggagactatcggcatggaaattttttaatagactcctataaaaattgatggctttggagggggccatcagggctctaatatcttggtgctatttaccatctccataagggggagaacactggattccatgacacattaagaggccgggcgttatttaaatagagtcttggaggtgaggaaaccttttccatcataccttgaagatgagga

SEQ ID NO: 432635 - DNA, 475 bp, Oryza sativa
tttggtttttttaggataagggtataatctcgttttattatcatgcaactaatttgcacccaaccgtggcatagactgctttgctccgtgtctccgtgcactagtaatctttattgttacttaaaggtggagactatcgacatggagattctttcatagactcctctaaaaattgatggcttttgagtggtacatcagtgctctaatatctttgggctatttaccatctccataagggggagaacactcgattccatgacacattagaaggccggtagctatcttcatagtgacttggaggtgaggaaccttctccatcataccttgaagatgaggaatctcctttatgatgtctccaaggggaggggcctctttcaatatatatcgaaggtgtgaaacctccttcattataacttgaaggcgggtagtatccctgataggaccctgaagttcggggatattgattggaggattt

SEQ ID NO: 432636 - DNA, 490 bp, Oryza sativa
  unsure (1)..(490): unsure at all n locations
tcggttagatgttgagagacaaactacaaaaccaattggtgttatggctccgcaggatacatggtgtaggatggatcccaaatcccttcaacagagcgaagtcgatgggcacgaagggtgcagccaaaatatgttgggttatctgcatcttgcttcccctgcaataaataaatacgacagtcgctccctagattttgttccaccccatctcaagattcctgcaggacccatagaagaatcagtaagagggagagggactatcgatcatgtgacgaacaagaaagatgtggagagacaaactacaaaaccaattggtgttatggctccgcaggatacatggtgagggnggggatcccaaatcccttcaacagagcgaagtcgatgggcacgaagggcgcagccctaaagactcaatatacaccaactgcactatcccccatcgatactccctaccttcgaaggatgataaagatcaatgtgaatatccatg

SEQ ID NO: 432637 - DNA, 382 bp, Oryza sativa
ttgatttttaatagcgggaagacccaaaccagctcgccctacattgaccaaatcggatcgggccaaatcctcctccccttcgtcgccgctgctgtaggctacccaaatctcgccgctgctgttggctactcaaatctcgccgctgctgtaggctacccaatcgctgcaccatgtgtggtgactgctgcggccgcggtgccgggggagcctgccgaggcgggggcggccggcgccggcagcaggaggaagcggaggtgctcggggacggcgctcgccctcgtggcgctggcggccgccgcggaggtcgccgtcctggagggcaccgccggaggtgtcttctacgtgggcgactggtggctccacgagtgcgccaagtgggaac

SEQ ID NO: 432638 - DNA, 316 bp, Oryza sativa
ccaattggcaacgaaccaagctcattcatattcacaagttgataaactcagcacaatcacgaggaatcaatagaatacctcgtcttcttctgccaataagtttacctagcggctatcaacagttcaatgagataaaaaacgaccgaccaacctagttaaacacttaaagctcttgccagattgaggcagagaaaacaatcggttaactctacttatacccattaggtagggtaaacctactaacatcatgtccaaactccccacatattcacggcgcaggataaagaacaattggtacgtttccttacttacataa

SEQ ID NO: 432639 - DNA, 430 bp, Oryza sativa
tttgtttttggagaacttagggtcaactctccttgaaaaaattgcagggggaagccaatccactaacatggctatgaaacactgttgctttccactacccccgcttatacaaatacatcatatatctgaagacattaccaacagatatattccaacataaattccggccctactatgaacatacaaacagcatgagatagccgctcctcacacagtgtttgcactggaccgagatagacggcatggggagctcatttggcacttttgctcatgttagtcattgggaacctggctgcaactggcaacccttgacgtcgcgctatttagactgggtggcggataagcttggcaggccaaaaccattgttggtgagggcaggcttcacctcggtgtactttgcgggtattgagacccgaatcagggttttacc

SEQ ID NO: 432640 - DNA, 461 bp, Oryza sativa
tgttttttgagtgaaaccatgggatgctgtagtaacacagacgctaaagatcgcagcattacaaatttacaacacaatgatgaatccatgaataccaaacctaactcgaataggctgccagatacattatccatacaggctacttggaatccatggtaataacgacgcacagtttgcccaaatgtgagaataacctgtttgagaacaatgcaactcgtcttcgccacagaagttatcgagatgcttaattcctaatgcccggtgtattaaatgatacattaagataaataacaggctggcagccttagtttcaggttagtctgtgaaaacgcaactggcatggcaatgaacgcatgttccatacttcaccctactccttactgctgaaatctttgtcaatctccatctgcatgaatttactagtcccacaagaacatcatcatcatcaccgccctcatacc

SEQ ID NO: 432641 - DNA, 558 bp, Oryza sativa
ttccgatgttctattgtggacagattgtgccgattgttttctaggaaattattcagacggagtgaaactgggttgagtgtgatctgctatcagtttgaaaagtttgggggatattcatattttgagaagattcatggtgtcctaccatggccccaagaaagagcattctttttaaaataggagtatacatcgtttcatctgtttatgttggatttcgtttataaatcctgagaggatgggctgcatatgtggggaatatgacagacagtgcgggatgctggttgtacagcgaagtgaaagagatatcaattccatctgcgctgtgtgctttctgcagaaacttttggaaatgttgtggaactgagctagtagtaagagaaaatgattagaagaataccaaccatggtaacatctgacaggagctgccctgtaagataaacactgatgacctggtttctatctctggctacttgttggaagaaatatactctacaagcctgcacctggcatgtgatatcagcactagagtcatttatatacaaaactagagcgtaataa

SEQ ID NO: 432642 - DNA, 465 bp, Oryza sativa
tcgttttctcttccccagctcgaccacgaccactcccgggagggagagggagagggagagcagcagcagcggtagccagttagtccagctgatgccgccgaagcggcggccggaggaggagtcgccgcaggcggcggcgctgaagaagcggtgccggtcgttcgacctagagatcaggggttgcaggcacctgcaggagctcgccgccggctgcgtccgcacgctcgaggccgcgctcgagtccgccattagccggattccagaggaggtgacaaaagcacttacaagcttcctaatccgtgctcctagaacactgtctgatcagaaccagcctccaaggtacaagcttaggttctcaaatggcttgagcaatgaagttttcacaaagaaaggaatctgtgatgttaatggagagtctctcaagatatctgtgcatgtaaacaacccacaagaggcctgctcgca

SEQ ID NO: 432643 - DNA, 351 bp, Oryza sativa
aaaaccaaacactccactgaccttgaccgaaaaaaatgggggctcagttcgcaccacaaatttttttttctagacaaaaaaggtgggcccaaaaaaaccgggacgacccttcttataaccccaaatgggtgggggcatttcatttcatttcagaaaaccaacttaaacgaccccaatttttttaaggtcagcatccgggggctcattcttaacttgggggggtgggttggccttcgggggggaatggaaacccatttcactggtgaacgtttgggtgcatgactggcaagaaaatgccccccccccgggtttgggggacttcccccgtgacttggcattcacgggggtttt

SEQ ID NO: 432644 - DNA, 404 bp, Oryza sativa
acaaaaaaaaaaaggggatccatatttttttttcttcccttgcaaaatttcttacacggttcttgccttcttgcaggtgtacatttttctgaaactgcaacaaggtaacttctaagctgaatgctgtactaatctttgatcaaaacctctatttgatcatatctgaaaatgattgacagtatccctatgttactaactccagaagatccaaagcccaaacaatcacctaatgctgcaagtatttgctcactgacatttttacattttaagttgtcttcagaaaatcggcagtgctcaactgaacacagccaaccagccgctgctgttcgtcggtggactgcgtcgtcgacgtggtgatctcccacgtggacgggaagccggtgacgaactcgtcgaatgactcg

SEQ ID NO: 432645 - DNA, 359 bp, Oryza sativa
aaagctcagtaaaaaccggtaccctcccaagaatagactttgtagcaaacattcaactgtatcatatacatcttttctttttcgttagtaacttgcaactaaaactggggttacctggagtatgcatgattgaacaaggcagtccacctgctaactcaagaggatttttttcatcacatcgcatcaaagagcgaaaaggccttattaggattagggctgaaagcagcactagggagggcaagttggggtcaaatgtatgaattgttcagcgccttagcgtcgttttttttttggaagagggagtttcccacaagagcagacagtaatttagtccataaaaccattttaattggattcca

SEQ ID NO: 432646 - DNA, 366 bp, Oryza sativa
gactacagaaatgataaatttactacaaaaaatgtgcaatcctttctgcactgttttttaaggatgtatgggatacaatcttaactccaaaatataacaaatgacaaacagatacatgtaagaatcccgtattgctatccagcctcaccgtaaattaaaagtaaaagaatagtcatcctctattcaaaaatcttttcgccagtggagaaaatcaaaaaaatgatggaactgaaaatacagaggtaccctggaacaaagaagactgttttccaggttttctgagtttgtcagatccatgttagaagcctttgccccctccagaatactttccgttaggccaacaccaactattccagccaatgtccc

SEQ ID NO: 432647 - DNA, 552 bp, Oryza sativa
ttaatttgcttgacaatatcggaggtgcactgcactgcaccaacccaacggcacaggcatagtcgatctgacagacaagcaagcagggaactgaaagagagagagagaagaatataacccgatcgtctctgccttccattttgcttgtgcacagaagcttccactttctagcttgctagcttagcctgacgacgagaggaggcatgcagagctaagccgccattagcaagagaggaagaagaagaagaagaagaaggtagctgaagccatgaagccgggggggagcagcgggcggctgcacgccctgcggttcgagtcgcagaggttcaggctgctgaccatcgtcgtcggctgcttcctcatctccctcaccttcctcctctcctcccgccccgacgccaccgtcttctccaccctgagccccagggagtcgttggaagacgcacgcatgccggcgatgaagatgctgcaccgatcatcgtccggcggtctcatccgggatttccatgtcgacatcctgccgcagcagggagagagacatgctcatatgca

SEQ ID NO: 432648 - DNA, 471 bp, Oryza sativa
cagagcataaaggaatatatctcctcaaattggatgatcacaacttgtacagagggaggcaccaccaaccaacaaggcaggagaaacagaaaaaaggcatatagagatatataattaattgctacaaagtaattgctagtatagaaaccaaataacacttatcaatccctagacatagatgaactgcaaaaagaatttttcggagttcagtacatcaagctccaatataaactatgatggatgtcccccctgagtagctactagcaagaagaaacttctaattagcaaaccaacaaactccacttcctcatcaccccccttaaaaaaaacacatctcattttcctcctcctaattgactgactgactagctgcaaagttttcctctctaaatctgtctccctctgctgctggtttagctctccttctcacctacctaattttgcaagcaactgcaaatctgcaatgcaaca

SEQ ID NO: 432649 - DNA, 443 bp, Oryza sativa
aaagaagccccaacatggcttggaatatgtactatgatgcttcaccgaaccgaattccacataaacacccaagctgaaacgtttttcctccttgggtagtttgggtttgcgttcttggtgttcttttttcacctgcctgcatatttgtctcgggagtctaattaccacgcaaacacaggacgacatacaaccggggtcttcaccctactttcttacagccaaacaggggttttttccaggttcttatttttaactttgttggttcaggcgacggtcggggggctaagctacatccgagggatgtgcatctgtcggtacgacgagttgtccgctggtggcggtggaggcggcggtggcgacctcccggctccgttccattgaccaaatagcctcctacccggggcagctgaatgatccgtcacgcatgggattgcggcgtgctg

SEQ ID NO: 432650 - DNA, 231 bp, Oryza sativa
gtccgttgccgttggtgggaacgagacggttgccgcgcccgcgcgcgagatcggagctccggggaggcgaggcgcaggcgcaggtgggcgcgtgttcttcgtcgggggcaccccgttcgcgctctaccgggagggatccgcggggcggggagtggtggggaacgccgcgagcgcagccgggatgggcgccgaggaggaggaggagccggcgtcggtcgtcgggagggaggg

SEQ ID NO: 432651 - DNA, 183 bp, Oryza sativa
actattatagagctatgacggtgcatgcaccgcgtatcgtaatgctatggatacctttttttgtcaggccgcaatgactaccgtttcgccatggcaagtggctggatcagcatcgtgcatgtgatctgtgactggttgagtaccacatcaaagcctacatcgtacgattgttgtttggacttg

SEQ ID NO: 432652 - DNA, 458 bp, Oryza sativa
tttaatcctttagcgccgccggcgcccgctcgccccgccgtcttcgcctccgctttccggtcgcgccgccgccgctcacgccctatccagcctctccatgaactatgcccaccgccaccgcatccgcgccgccagacccacctccgtatcgcgccgccgttgagacaactgcggactccgacgcacgccgacgtcttcgactacgtctcacggcggcgatggcccctagcgccacacgagttcgcctacccatcgagcacgcgaggccaccggcgccgacgcggcagagtgcagctaggccgcggaggctacgtccaccgccgtcaggcgcggtcgagttcaccttctccatcctcattggttgcactcgctgatctaattgtctcttctcccataaggtcctggctatctgctggagctgggaactcaagccatcttcgaggccgcgggggaaccct

SEQ ID NO: 432653 - DNA, 131 bp, Oryza sativa
ttttttgttttttaattattttaatttttttatttttttttttttatttatttttttattttaataaatttgataaaaaaaaaaaaaaaactataaaaaaaagtatacaaaataaaaaaatttttggggag

SEQ ID NO: 432654 - DNA, 505 bp, Oryza sativa
ctctctctctctccatccgcgagaactcgtcgggatatttatgagcgctggtggagtggcgtggcgaggtgaggaggtggctgatctctctcatcaatctcctccgtcgcggtcgcagctgcgggagtgaagccgccccgcggagctagctaaaccctagccactgcccgggcggagagttggggtttgggttggtggcggtgggccggtggcggctcggtggcggagctccggtgtggggtggtgtgggtgagaattccgtgcgcagctgttttgggatttttttttctgttgcgtgtgcgggtgatgcgggattagtttgggcactgttgcttcttcactcgattttggagattttttcggggggttaactttatccgctagctttctgggggagtaatttggccttgcggtgaggttgtacgacgccgttctgatcggcgctcgggtccagttgcgtttcgattgagtgaggtttttctgttaattcggttggatttaagga

SEQ ID NO: 432655 - DNA, 455 bp, Oryza sativa
ggattccaaaccaatatccttaaaattaattcccagttccaggtggacagcattcacggtaaaatcttacatgaaaaatactcccaaggtacatagcacatttaatcagagcttagtggtctagttcatcgagaagtccgaagatataaactgtcatcaggctaagacagacaatgtgcaaccgcatccaacagaaatagctgaagcagcatagctatccagcaacaaaacagaagtatcggaaaaccaaaaatcggcatgcagcgtgtgatgattcctggcatgaagtatttaacctatagcgatcacggtcacgctcggctcctcgctcccagctcctttcatagctggggtctctgcccctgtcccttcctcttttcttctcacggtctttacttttacttcggctttggggccgcttttttccatgactgcctctatctttggtcctgcta

SEQ ID NO: 432656 - DNA, 505 bp, Oryza sativa
ttatgtttgggcatgcccaatgtgtgtcaacatacatggggcaaagcggatgaaatgtaatatctgtaacaccactaagccaggtcacaatgaaggctgtgtgagaggaggccgaagtggtgggtataaagaacttgatgaagaagaactagaggaagttaaaaggcgccgcaaagaggctgcagaggatgacggggagatgtatgatgaatttggcaacctcaaaaagaaattccgtgctaaaacacagcaaactgaaaatgcaccaacccttcctgggtatggacaggctggatgggaggttgagcaacgtggttcaactagaagagaaagcagggaaaggagcagagatcgaggcagagaccatgactacaatgaacgggatagcaggaacagagatagaggcagtcatgggagagagcggcgccgaagccgaagtagaagtagagaccgtgagaaggaaagagggagggacaggggcagagaccacatctatgataggagc

SEQ ID NO: 432657 - DNA, 127 bp, Oryza sativa
tttgtttgtttagattttattttttttttttattttatatttattttttaattttttattttaataaataaaaaatttcaatattttctaaaaaggttcaaatacaaactaatatacttatacaatc

SEQ ID NO: 432658 - DNA, 434 bp, Oryza sativa
ttttttttttttttttttttttttttttttttttttttttttttttttttttttttttttttttttttggggaacaaactttgggggaattttaattcggggaaaacggggcaaaaacattttggggcatgccattacccccaaagattttattcctaggtcttaaaaaggtctccgggcaaatgggccccattataccggaaccccgggtaacccagccctaaccggatttaggaggcatcggcttaaacgggctattgggtcgggcctttgggggacaaagtaaaatttgtgaccaagccttttaataggaccccagggcttaatcttaaagggatttgggggtcttccttaggagcaaaaaaccctcaaaaaccggggtcagggggagaaatttttaaattgccaactttggttgttcccctgcagcaagg

SEQ ID NO: 432659 - DNA, 345 bp, Oryza sativa
ccccctgaaaatttgggaattggacccgcaacacctcaaatggagaggaaaccctgggggttttcccctcagtttacaaaacaaatcccccggcgggggggctcaaaaccccccaaattcattaaaaggaaaaggggtatgggggacctgggccccaagggactggctaaacctaaccccagacgggggacccccgggccccaggtttttcaaaaacaagaggggtttgagggcgattcctcccaaaaatcgaggggacactggtggcaaaggggaccctaattttggcctaacaagctgggggcggatgaacttgggggccaaaaccattttgggggggggagg

SEQ ID NO: 432660 - DNA, 432 bp, Oryza sativa
ctcttctctctctcctccaccacctcccctgcgaccagcggcgcgcggcagcggcaggcggccaccgggatggcgtcgtcgtcggggacgagggaggtgctcatgctggaggccccgccggcgccctccggggcgccgtggcgcgcgccgtcggacgcggaggccgtggacgcgctgccctacatcgacggtgactacggcgacccggcggtgaagcgggaggtggaccggatggtggtggaggtagatgctgtaccctgtccctatgtaacttgcatttgttgaatacaatgtctgctactaacatgacgggagcagtttgctgcactagcagcattggtttaaaatccaggcctatttcgtgatgacacccttttggcttttttaactaatgtcatcattgtttttttgtgatcgcataagttttttttt

SEQ ID NO: 432661 - DNA, 305 bp, Oryza sativa
ggaggaggcgaaggaggactgcgacgcgccggcgaactccccggcgtacggggtggcggtgtacaacgtgacgacgggggagtggaggcgggagaaggcggcgccgccggtgcccatgttcgcgcagtgcgccgcggtggggacgcgcctggcggtgctcggcgggtgggaccccgagacgttcgagcccgtggcggacgtccacgtgctcgacgccttcaccggcgtgtggtggagcgcgccgccgatgcggtcggcgaggtccttcttcgcgtgcgcggatgccggtgggaggatctacgtgg

SEQ ID NO: 432662 - DNA, 297 bp, Oryza sativa
ccattgggagacaaaagagggactctgcaatctgcacctaaaacggggggtcataatatgtccaagggatgggattatggttactaataaccataaccatggttgaacaagggaggatgagggggggacccaagaccatcccctggattcctccagggttttttgggacaaaaaccccacactcatcatcatcatcatcctcacaacaacaacaaattggggagagatagagagaggagaggagcttaacaaactcaccactagcttcctctccttcttttttcctggggattcttt

SEQ ID NO: 432663 - DNA, 320 bp, Oryza sativa
agccagaatatcttacattaattttattgtagagtcaaagaggtacaagggtgtttacctggtagcacggtcacgattcgtggtttcgcactcaaaaatgaagataaaagaatcatgagcgtgagaattctgatcataaccaggtggaacatagagagggatatcatatggagaaggtccctctctggacaaacgacgaatgttatcggcaagcggcggtggatgcacggtgaggtgtcgtcttcaccagaataggtggcagtcaggcggtcggggggaaggtagaacttggtggtggccgggaaatggatgggggcggg

SEQ ID NO: 432664 - DNA, 379 bp, Oryza sativa
  unsure (1)..(379): unsure at all n locations
ctccccccttttccctcctcctccacctccactgccatggccgcctccgccgctcctctctcccgcgtggtagccgccgccggttgccgccgctaggggagcgcgacgggggagcggtaggggcgacccagctcgctctgtcgccccgcggctggtgggggtgcgcgcgggggagagcggttggttagtatggtgctggatctcaatgtggagtcgcgtgtgggatcggcagngacgaaaagctcgggcacaccgacggcgacgaccgactgtggcggccgggggtactgctggtggtgaccgcgcggttgcaccggccgacagcaaacatgacggcggtttctcctggctgacgggccctcggtttgtctttctaact

SEQ ID NO: 432665 - DNA, 147 bp, Oryza sativa
aatcaaaagatatatttaattttaaaatattatttctgaacagaaacgaatgaaggaaggccaatgaaaacaaggaaaatgaaaaaagaaaagatgcagaaaaaaaaaaaagaacgacgcattataaaaaaattaacaccaaatccg

SEQ ID NO: 432666 - DNA, 284 bp, Oryza sativa
tttttgggaacaaggacaacaggggcagtgcttcatacatctcaagagaattgcacacgaccaacaacaaaggcagctatacgggacacagagtccctgggccggacgagctacaagaagagctgcatctcccacacggaggcgcactgcgactaggattgcaccgaccacgaggccgatggtggcggaggccgaaggagccctaccggggacgccggggaggggacatgacgaggacgcggatgatgctcaacgagcttccatgggcacggacacggacacga

SEQ ID NO: 432667 - DNA, 466 bp, Oryza sativa
gtaactggggtggcatcgtcacaatctcttactaaatcaaaagcagatcctcaaagtaattcattctcgagttcttcgactgtttcaagtacaaaactaccttcttcatggaatgatgacacaagcacagttccgaaaatgacggaaggacgagatagtttgtctaaaaccttgaagccatataagcctggtattgcaaaggaaacccaagctgtaacatcactggagtcatcgcttgacatagacttctctaccataccttcagcttggaacgatgatgatgtcacatcagatggcatgtcaaaaggaagtgacgagaagcaggttgtaaatgacaatggaaagtttgaatgttcagtttcttcaaagccagctgaatcagggcatcttacattgaagtcaacgacatcaccaaagaaagacatcgcagtaaacagtaccaggcaaagtcctctaaattgtgtat

SEQ ID NO: 432668 - DNA, 400 bp, Oryza sativa
atcaagtaatgtaaaatcacttttcattttatgatcattttgcagtgtcaaagtacacttgtctgaaacatactttattacctccaagaaaacgaaatggacggtaactattataagagtagctatgagaagatgtaaggaaaggggaaaaaaggtgtgcttcataacgaagcagttacagtaatttgcgcagccgaccacagcaaatggtctgttcagttactgattactccaatctactacatgtcccagttgacaaatcgtgttcttcatgtatttgttgttcaatcaactgggtgcttggctctccgattgaaacagatgctaacgatttggaagcccaagcagtagcatgccttgctccatcatgcaaatttccttgcttagacggggttaccct

SEQ ID NO: 432669 - DNA, 399 bp, Oryza sativa
aacataataatctttcacattgataagtattatcttcacctaaagtagttaccctgtatttatttgtacatctatatttgtttatgacatgtaaaactaggtcctagagccacactcgtaacttcctggcacatgtatatgcatttacatgtgatgaatgaatttgcagttaagaagttgtcacttctgtgcctgagcagagataggaggcggcggcagcagcagaagaagcagcattgctcttttacctagcttgagtcggccagctgcagtttggggtcctcagctgcagccgccggcggcgaagccgatcctggactgcgcgacgtcgtacaccacgctgaacgtctgctgctgcgtgttcccgatgatcgccgtgccgccggtcggcgcgaacgc

SEQ ID NO: 432670 - DNA, 444 bp, Oryza sativa
ctccaaataaagtcagattaatcagagagccatcttcttgccggcgaaggttccgatggagcccttctttgcgttcttatcgtcctggctcagcaccacagtggagtttccgggattcctggatcctcccctgtttccaccgaagcctcctccgaagcctccctggccaccgaagttgccctggggtctatccctctgggaggcactatcgagacggatgcttctaccgtcgagctcgccaccgttcagctccttataggccttcttggcagtgtccacatcgtgggaactcaacgtatccgaaaccacggggcttgccggtctccttgtcagtgaccacacgggcagagctgacctctccgatctggctgaagtagtccctgatggagtcagcattggagttgtaggaccgaccaccgagaagagagtaggagtctcgttgtt

SEQ ID NO: 432671 - DNA, 540 bp, Oryza sativa
tcgatcatgagcaaagccaaaaacattaagcccaaggtcattgaggactctgaagaagactccgacagctcgatccccatcattgctgccaagcccaccaagaaggagaaggttgaggagaagaaggccgtgaagaaggtcgccaagcctgccagctccgacgaggaagacacccccgtcgtggagaagaagcccaccaagcagcaaaagactgagaccgtcgccaagaaggtggtccccgtcgctaagaagcctgccaagcaggaatcatctgaggaggagagtgaggaggaggcccccaagaaggtggtcgccaaggctaaatctcccgtccagaagccagttgtccagaagaagaagccccagcctgaatcctccgaggagtcctctgaggaagaagcccccaagcctcaacccaagggaaaggtggcccaaaaggtcgcatcctctgtccagaaggccgtgtcccctgctgccaaggtgaccaataagcctgcccccgtcgttgagagctctgaatctgaggaggagtctgaggag

SEQ ID NO: 432672 - DNA, 397 bp, Oryza sativa
tgtgttttttttttttttggggttttttttttttttgttttttttttttttttaggggcacaaaaaaggacacggacacaacaaagggggggacaacccaaggggggggaaaaaaaactctatcgagaatgggaacaattgggcttgggctaaagatctggtcaaactaaggactccaggaacaacctaaaccatacttagaccttggtgccattggtatgggcgccatcaccaccaccatttttaaaaggaacggcgatgttcctgacggggcccttgaaccacctcctgggggggagcccccaccaaagcccgatgaggccgaggcaggccccaagggcgacgggggggtaattgaagttgccggcgctgaacgggtcccgccctcggaggggga

SEQ ID NO: 432673 - DNA, 459 bp, Oryza sativa
  unsure (1)..(459): unsure at all n locations
ttttgttataaagcataaacagttgaacaaaacatttattcatttgttactctagtcggctgatacgatcatacaacacagtttgacatgcctaataagccgaaagaaagatagacatgatgattaggatgaaggtggaccaccttcctatccgaaaatgtagaacatgacagccgccaatgcaaccattactgccgtatcatcagcagtatcagctcaaccccaaaccaggaagcatcagcacactgaaatcatgaataccactggacaaaccaccgatgctatggaatatttcttactctcacaccccaaaaaatttcaccttggtttatagacaaccgaagctcccacttcctctcctgcatggctgcatccagcagccagcatgagatttttccggtaccggagagattgagtaggaacgagatcgctagatgttcattnangcaacanaccatc

SEQ ID NO: 432674 - DNA, 488 bp, Oryza sativa
tcgcctcaggagaggagagcatctcctgcatctgcggcctcccccatcccactgctgctgctgctggtttgaaaccaaggcgacctcctcctgtagtagcgaggaggagaggagaggagggagaggcgggttcttggctcctggggggccgaatcgcgggggttcttgcctgcccggatcgatccggcaatggatgcggctgccggaggcgcgccgccgcggcccgcggccggaatccgcgtccgggtgccactggtagagtctgtgtcttgttactgcagggtagatggaggtcttaaaactgttgtgagtgctaggaagtttgtccctggtgcaaagctgtgcatgcaacctgacattaaaccaaacaagcgcaagtcaaggagctcacacaaagagaggtgccgaactcaggcaccacttctacctggccttcctgacgacctagctattacctgcctcatgcgggtccctcgacttgagcacac

SEQ ID NO: 432675 - DNA, 117 bp, Oryza sativa
gttgtttatttattattgggggtttaacatttcttttatttattttttactttagtggggaggaacaacctgacgacattttacaactggcctaacttgcaaatggacaaagctagg

SEQ ID NO: 432676 - DNA, 225 bp, Oryza sativa
tgtgtttttttttttttgggggtttatttgtttgtctttttgatgtttcatcccagtaagctccctcaaataatgaagaacggtctaccgtccgcatctaagaacagacaacaggggggaggccccaactgtggggcagtacctgatggcacgcaaaaggagcccaagaccccctaaatccccacaggatcccccccaaaaagaaccggggctgtaaggacaaaa

SEQ ID NO: 432677 - DNA, 370 bp, Oryza sativa
ggtggtttttttttttttatgccaaagaagcgatatatatttgatagggaacataaatgtgatgatacaatatactcgatgagtaacatgagcaccaaccacaaggactatgagagacagtgccaggccaatgctaggacaggctaattcaaagtgttcatgctcgtgctgatgttattcttcatcaggatcatgataatacttatcgccataatttatgggcatttttcgatatcgtccataagatgatacctattgcttccccaggtctgaaatgtgcaaacatctatgtgtttacaaccacgcggggatcttgatcggcgagacgacggtcttgacctgcagggagttcttcaggctgtcgatgccc

SEQ ID NO: 432678 - DNA, 274 bp, Oryza sativa
gttttaattttattatagaaacaaccgcggccaacatcaggggggccacgtcagggaaaatcgcctattaagatgggacaaggacgcgcgggccgggacaacgagagcaaggaaaagggagcacaaatgagattgcctgaggcgtgtctacacacaatgtgcatgcgccagagcatattatgctggtgcatacagaggacggtgtttcgcctcaccggaaggagaacatacgccatggggagctgaggctactaacggcccatgttggtgcggc

SEQ ID NO: 432679 - DNA, 169 bp, Oryza sativa
gctccagcgaacgcgacatctatatgtggggattgttgtagaaatatttggggggctcagcgacaacggggcgtgtggagaacactaactatccgcatacgattcctggagatggtactagggcccagtctagggacaagctacaggggggccttatgcgcatgccaaa

SEQ ID NO: 432680 - DNA, 395 bp, Oryza sativa
gccagcggccggttaacaattttgttgaggcactaaacaggggggataccatatgacctgtaaagcaccgaggtacatggcatgaaactacgttacaacaagatgaggcttcttcttattcggtcacacgacaatataagcaggggacaggcaaactagcgacgatgacaacacaggacagcagaagccagatcgatcgacaacggacacgatgaacttgggcaatatatcaggccattactcgaatgcacccggatgctccctctgcatcttgaccacctgcttccatgtctcgcgctttgagatttggtcgaaccaccttgccacattcttcctgccagggaagagctttcttcctcttttagaactcacaatgtaatgcgagtttggaaagt

SEQ ID NO: 432681 - DNA, 196 bp, Oryza sativa
caaataaaaacaggagtatgacgattttgtggcgaaagcattcagataaattacacatttacaagaaccaaatgaaaaaggaaattttgtgaaaatttacacattaatgagaaggcatacgcaagaagatcccaccacctacacttctgatatacatttaaacaaaggggggaaatagccaaaaataataataact

SEQ ID NO: 432682 - DNA, 227 bp, Oryza sativa
gcttcagagtagtatagtatagggtagggtaagccatcattaacatgcccatcaccaaatgacaaatgtattgtacgggagaaaatacatgctgttagggcttaaaacgatgaaatcgcctcagtaaccaactaaccatcagagctgtccggacattatttcattatatcatgtatcgaccggcgaccgcccggatgcaatcttacgacgtgccggagcttcgggga

SEQ ID NO: 432683 - DNA, 169 bp, Oryza sativa
ggtgggtcttctcggactcagacagccattaaaccggtaagcctgcatgcccgaaaaacacaacaacacccagacggaactccccttggcaccaactctactaggacggcaaaatgaagcggaagccataggcggccgggacaacccaccgactgtcacacccaaagaa

SEQ ID NO: 432684 - DNA, 413 bp, Oryza sativa
  unsure (1)..(413): unsure at all n locations
gcaatcaacaaattttattaaaatgtgaatataaataccaaaatttacaatacttgttaaataagactacataaaaaacgtgtgaaaaaattttataaaaatttgttcccctccttgagacacttctccatctgtcggactttttgacactggtgtgggtgctatcaacggttctcgttgggcttcttcactttgttctggtattgccttcttttgtggggattcaccctttttcgtcccatttccattcatataagaataagttgtgtgctgggtggtgngataaacagctatatatttggtacatgggccgaagaaggggcgtaacatggttaagaaagcgtgtcgaaaactgtcattgattaggccatacattattgggttgacgcaagcagatgtcatgccgatcaaat

SEQ ID NO: 432685 - DNA, 95 bp, Oryza sativa
actcttctcctttttatcacacccgcccatgctgaatcaagcgggcggatttaaacatgcaaatgtcgaccttttctccaccacagtcgacagtg

SEQ ID NO: 432686 - DNA, 75 bp, Oryza sativa
ggggaaggggaaagagttgactttatccattctccatgatctgcctaaggtcttcaccatttcccattcaataac

SEQ ID NO: 432687 - DNA, 434 bp, Oryza sativa
aaagcatcaaaagggttcttgacgtacattaccaaattaatgaactttcgtacaacacaaagctacaaagtctatcccagtctatttatatttatttttcacagacggacggtatgtttcaccttgatttatatttttatagacggtcatttggctctaatttggctctaagggtatatccgcctccaaatatatactggactatgtagcactacactgcaccgtacaatacaaaaaaaataccaatgtaaaacagcaacgtgccaaaagttttaaataaagaaaaaaaacaactgacgtcttggctcgcggcagcgcaagaaaaaaagcgcgcgaaaacgccgtgttgggttgcaccttttcaaagcttacagctttgcacgcgatgcactgccgcggcggacatggcggcggcggtggcgatcaaacttagc

SEQ ID NO: 432688 - DNA, 90 bp, Oryza sativa
tttcttttttttcacaccaacacatcatgcatcccgggggggctcttataggagtggattctctcttatccactctctgcctctccactc

SEQ ID NO: 432689 - DNA, 417 bp, Oryza sativa
aaacaaaaaaaagatgggggggaattaaagccggtgctccaatttaccatacccagctttgggttccggggatcccaaaaaactcctcccgggggcggggtttattttttaaaaagccccggttcaaatttttgggacaaaagtttttgaccccccaaagatggggcccttggttgccaacccccccttaaaaccctaaatttgcatccgggggggggccaatggggtcttcagcccccccccgggggggatcagtccttgggggccttggcggggggggttttagggggccccttggcggggccagaaaacccctggtttggcccaaggggagccccaaaggtggccctgcccccgggggagaagggcttttgggccttaccacattttcggtttgccccccaggccttggggggg

SEQ ID NO: 432690 - DNA, 133 bp, Oryza sativa
tttttttttttttttttttttttttttttttttttttttttgttgggggactaaatttagaagaacgcttaacaaggcggcagccactgggatattttaatacagctctagtttttggggttccagcctgggc

SEQ ID NO: 432691 - DNA, 409 bp, Oryza sativa
aatagaaatgtttggagacttggtattaatttggtacatgatacaatagtttccctagatattatctaatcagagtgcacagctgcggacagcatgtcaaaaatgcaatattgcctgacaaaatgcagcatgtccaaagaagtcttggaaaaggtacgtaatatttggcactagaaaattatgagggccccttattcaagaattgaatgcttttgggccaaatgagtacggtgataatgtagtgcaaaggaggcgaccgcatgtcagctataagaagacgggaaaaatatcaaacagtctactgtgcctgaaggaaaatttcatgacacggtgtcaggttgatttcactgctgatgcaagtgacttcagaagggctggtgacggtcttttaaagggtgggtggaaggat

SEQ ID NO: 432692 - DNA, 333 bp, Oryza sativa
ttttatatttcacccacaggaaccaggcgtgatgggggagataattgaaactgcatggtcagtacgattccaccactgtaagaactgaaaattccttaccctctttattttaacctcctcccaccgaataaacaagcgacaacacattgcaccgattgggccgacgcccagaccttagtaagggactccaagaacagtagagtactcaaacacatagcctcatcactgcgttgtggaaatgctcctaacacccggcgaccgaattagctatgtctgcatgcaagcctggatcataattctttgggggaaacaaacccggcgggcccgaattac

SEQ ID NO: 432693 - DNA, 412 bp, Oryza sativa
ttttataacgaaaacattcctgatacttttttccactgctaaattatggcagcttatacaaagtcaagtaaggctacaaagagagaatccccaggcaaagaaagatatcagaacatatgcttgctaagggcggaaggtggaggggacgataaattacatatcggatgtcatctgacatggaaaaaaaagggaggtaaaacttctcttccgggtaagaagtaacaccgtaccatcaaaggatagcaacaggtgcaggcaaggctctaaacctttcaactctatgtttcggtcagacaactgaagccaagccgcaaaatgccatagtttgacaacacacaagcagctaatcggaaccattacaacctacaggtgacaggctcagatgcttgttgtcccaatgacctttttcatg

SEQ ID NO: 432694 - DNA, 324 bp, Oryza sativa
ggggcccagaaaaaagcctcctcagccataactagacgggcatatatatttttggaccatggagaacccacccgggacaaaaattttcggcaatggtgaggagatttttcccacatgggaccaagggaacttttgcttgcgctatgaggtgcactttaaagcttaacggaaaaaaaatatgtagttggatgggaccgcaccaaaggagggttgtagatccccccataggcaattcaacactttttattgtctttggggttggggtttcttggacccctcaagattctgcaaaccaccctgtgttcatcccaaaaaggattgggg

SEQ ID NO: 432695 - DNA, 77 bp, Oryza sativa
gaactaattaatattaattgatcttaataatagtgaacaatagtggtagtaatacatcgagcctctcgggggggggg

SEQ ID NO: 432696 - DNA, 436 bp, Oryza sativa
caataaaaaactattggaataattcattaagaaaaaggttagatggttacaatgccacaaatattctgccagttcaactacacgttgtttctaaatatttccaaaagttatcgaagctatcacctactaagttaaaaaaaagagctgatcatttattctacatatcacttgggaatagttaacaattatcctaaccctcattgaggggcttccaatttaaaagaatctcaattcttgttttggatgcaaatttgtgagcaatgatgacttcatgtgaggcatcagtagatgatgattgtactattgatgtagcaacatgctcaaaacagtttcttaaaggcactcattataggctttaccatactcctccatacgaaatgatgaaacagaaagagatgtgttggttgtatactcatcaagatgattgaaagggatc

SEQ ID NO: 432697 - DNA, 139 bp, Oryza sativa
tctcggatctgttttatacggcggcggcggcggctgtgggcgcggaataactttaacaattagacaattcactcatccaaaatgttagctctaatacaaccttcatctatctttattaatttacaccaaatgcccacca

SEQ ID NO: 432698 - DNA, 414 bp, Oryza sativa
ccatattatttttttttttaagcaaacccccaaaaacataaaggagggaaacgtttaaaactgtaaggggaaggtggtaccactttcttttaacaccaaatcaaacgggaacaaaaaattaaactcccgacaatttatttgaaaagagggggatgatatctccaaaggaagtaaaaagagagagagacctagtaaactcccaactttcaactgcaaggcacttttttgaccctaaccggggaagagaagcgcttgcacaaaaaaaaaaaaagtaaatgcgccatgccaaaccaaaaactttcgcagctaaccaatctttttaacttatatacactttgggaaggaaaaactttttttaggcagtcaaaaaacatgggctaaaacaaagcaaagggaagaactaccctactgctg

SEQ ID NO: 432699 - DNA, 289 bp, Oryza sativa
aactcctaaaccaggaacgaaagagtgacgtcacgacttggaaaagtttgatacaaacagccgtacaatgttttaaaaccaaatcaggaggttcgagttcactttttttcatgatcaattctctgtgtactaaatatatgacgtcacattattacattgtcacacattctgcaaaactgtaataattttaatgtctaaagcatatactttcttccgtttgaaatggtcaaagacttgaagaggctaagagaaattctactaagttcgttctactcctggagtcttgatg

SEQ ID NO: 432700 - DNA, 389 bp, Oryza sativa
gcagttcttaaaattattattgttggtcttgaggccttttaaatttgtacatgatggttgggatcttagctggttcatcatctggtgtagagaaaacaccatctaataatatatactctcgacctgcaggtagtttaccataagtggcttcatatgcgtcttgaagtaatttgttcttgttgccctctactaaggctttgatggtttcgtttggtgcaaagtcgagataaagtactttaaagttatcggtattagcaccggtagaagataaagcttcacatttaacaccgtgatgaaatttagggaagctttgtacgaattgttccactgtgagatcacccacatcgacaactactttgtcccaaatagtataacccagtgggatagga

SEQ ID NO: 432701 - DNA, 435 bp, Oryza sativa
gaatctgaatgcaacatgcatatcgtgtatgcgtgttgcgtgatacaagtttacagcaacggataggtttgcatatgcatacaccgcaggaaaatacctcaactggtagagacaatcacacaatagctttataagaaagaaaaatgaaatggtggaggtacaacaggagatgaacactagcaggctagaacagggagattattgtgggtcaagaaaccttaaagagtgatgccttattcttcagtgatggtttcagtgtcagatacaggttcaccattcaaaatccactgttcaagctcatcaagatcatcatcatcatgtggataccaatcggaggatctattccaattgaaagtccccaattcttcaccacggcaagccatatgtaagaatggacggcttcgaacaagggcatccaccataaccctgttcaag

SEQ ID NO: 432702 - DNA, 136 bp, Oryza sativa
gacccaaagctgattgcattaccacgggggggaatattaaagagaaccactcggtcaaatatttaactgcagcgtgatcaaggcgaatgagctgcgtcagatacaagagctgataccacgaatcctgtcagagaca

SEQ ID NO: 432703 - DNA, 98 bp, Oryza sativa
acgcctcgcggcggaggttttttcggcggcttccgatggcggacgcggcgggggctttttttaatccggagagggtgaaccagtacttggactgcacc

SEQ ID NO: 432704 - DNA, 338 bp, Oryza sativa
aaaaggagggggcccgcgccatatatgatctttctgtaatccctccttattacatgaaaatggggaaaggtttgggtggatgaatacaaatccaatcctaaccataccaaaaaaaaaaaccccagctaattaactttttttttttttgacaccaatcgacaggggatgcaacaacacaaaagctcctatcccccatgaatttttgctggcctggggttgtcacatacacatgcgcgttgaatttaacacaaaattaaacccattcaacacgagaccggcgggcgccaacaaatcaaaaaaaagaacaggattcccaaaatttaacgaccttgatgaac

SEQ ID NO: 432705 - DNA, 78 bp, Oryza sativa
ccgaatgcaacatgcatatccctgggtgggggttgtgtgatacaagtatgcggtcatcgataggtttgcatatgcata

SEQ ID NO: 432706 - DNA, 257 bp, Oryza sativa
ggaagaagggaaaccattttttggcaatcaccaaatttacaatggtttacatgcctaatccttctcttataattgccaagaacgccaggcgaaatgatgagaatgggtaataatcgatatgtccaaacaaaaacattacccgagcgaacatccagcctctgggggccgctcacgagcaggagcaccgccagtctttcttcatggcgctggcctccatgaaggagcccccttccaacgtggtccctttaagtgacagt

SEQ ID NO: 432707 - DNA, 332 bp, Oryza sativa
cgcgagcggtctttgtgtgaaggatacaggctttttattcacccgaataggatagaatatttcgagacggctacatattattgttttacaaagtgtcaggccagggacacacacatcatctgcaatggaaacagtctgcccaaagaagcgtaattcaacaagcgcataatcaatgctataggttctggagacattaccgactgcacaacacctaaacattactcccagcagggtgctacaaaaattcggatgtgggcaaaaccaatggtcatgtgcttacatctgagaacgctttccacaatcaagatgacacgcgcacggtatccgcctta

SEQ ID NO: 432708 - DNA, 232 bp, Oryza sativa
  unsure (1)..(232): unsure at all n locations
cactccctccccttcctcctcctccggcgccgccagcaccacttctcagcggcggaggaggcggaggaggggaggggaccaagctccgccgcgccctctccttcgaggacgccgccaccgcctcggnctcggacacgccgtcgtctccggagaagaagccgagggtggttcccgatgcggatgcggtgggacggggcggggagggggaggtggactatacacccgccttaac

SEQ ID NO: 432709 - DNA, 277 bp, Oryza sativa
gtccaggaaaaaatagctcatgttgaggcagaaaaaaattttcttaggtcaactacatctggacccaattgagatacagcagaattcaacttattctttttgctgctcaccattgtaaaagaaagggaaataacagcaaacacatgcttttatccacgcgacttttttaacacgtatgggcaccacttattgaggaacagctggctctatttttggatgatgccgagcgagcgcatgttggaaaagggagtatttttcagacaggcacagcctcaat

SEQ ID NO: 432710 - DNA, 196 bp, Oryza sativa
  unsure (1)..(196): unsure at all n locations
cagtaatttgacgccgcgagggcgggtggtttncgggccatttagatctccggtgcggcgcattgagcccagcgtgcgagggggcatggatctggaggccgcgcatggcgcggctgcggcgccagggaagcagaggaggaggagggcgagggagtcatggggagcgtcgctgctgctcgcgtaccagagcctcggg

SEQ ID NO: 432711 - DNA, 70 bp, Oryza sativa
ggaaggggcaaaccaaagctttattagaaggggggcccggaacaaaagctagaaccggcccttacaacaa

SEQ ID NO: 432712 - DNA, 427 bp, Oryza sativa
tttttttttgtttttttttttttttttttttttttttttttttttttttttttttttttttttttttatagggaacacgggggttaaaccaaggggcctgatggggtgggccgcccaatgccccattggaaggccgggtgaaacaacccgctactggggggggaaaccacaaacaataggaggggtttacccttataaaccacggggggggggtggcaacaggggggggcaaaatggaaaacctggtggattgggaaaggggcatgccccagggtggtttgtttttaaaaaggaacagccaccgattttggccaaaaacaccaacctggggggggaaccaaaaaccccctctgaaaaatggaacaaaaacccagggggggtttggaaacccccaccttttttaagggggggagggggcccccccttg

SEQ ID NO: 432713 - DNA, 450 bp, Oryza sativa
gttttagactcatataaaacgctcttacgtcgtggaccactttattatgacaccggcggccgggtggacccaacagctgtcatgcttcgtgccatcagcagcacggtgctgctgctggctttctttccatatgcagccttagcttcaagcacttttgatctttcaggcaggcagtggacgctgcagaacagcaacaggtccatttcagcctcaaccaccctgccatcataccctttggaggtgctgaagaccaaaggagtcatcaacgacccgttgttcaggtatggcgaggcagacagcagatgggtggcagcagaaacctggacctggagcaccacctttgacagcactgagctgccaagcgtcatgagcagcaaagcagtgcagctgcggctggatgggctggacacctttgctttcgtgcagcttgacggacagacggtgctgact

SEQ ID NO: 432714 - DNA, 189 bp, Oryza sativa
gtggcagagcaatcttacgggtgttaaaaggtatgaaataaaattgggattagactaaacaactacctgggtcaggggagaagcaacaggcttctttacaagacctgacgcacccgcacgtttactggggcttgcttgctgaccagaagggatttttagacccacgcttgctagccgaaacataccgtt

SEQ ID NO: 432715 - DNA, 356 bp, Oryza sativa
ttcagtgctccgaccgacgcgccaatcaaccgggggcagttacaggacagtcgggcgtcgccgccgcgcgtcccacttggcccgcatcgcaacgccaccaggggacgcgaccgccgtctccccacccctccggcaacgcccgcccggggccgcggacgcatcagccgcccgccgccggggacgcccatggcgacgacgccggagacgctgcccaactcggaggccgtctcccacgcctacaagttcgcctccacctgggagaagaacgcgccgctcacggagcagcagaatgccgcgatcgccgcgctctcccgcgccgagtccgagcggacgatcccggccaacctggagaaaag

SEQ ID NO: 432716 - DNA, 342 bp, Oryza sativa
ttttggggtttttttaaatttttattcgggtttttacaacctatatctttcttatttttttctcacacatgaacttgcaaactttctacaccgaacaatggccgaacagcttctcattaagaactgggcccaaaacaacaaaaaagaccccttcctaaattaacacagcccacacacccaaaaaaagaccgtccaaaaaaaaaaattcacacaaaccacactattcggctactcgtcgcattaaaaaccttccccctttccaccatgcacaggagtaacccgccaccaaacatgcaccccaaataaaagttgaagtacaagccacctaacaatgctctcctg

SEQ ID NO: 432717 - DNA, 456 bp, Oryza sativa
tcgcgatggccgcccttttgttttttttttatttttttgatgttgagtaatacagacaagtcgatcaagctttgatctggcccaagagagcacctagctgcccgattagaggctcctccaggttgtacttcttaggctgcgagaggtcgttctccagaagggcgataatggcttggcgatgagcagccagcacttgagggttgttgcttgccaggaagagaagggctttcagagcagagggctcttcttcctcatcacccttgaagggtaggtaggggataagtgtgtccacgaagacctgaagaggcatgggtgggttgatggtgtagataatcctgcagatggcagccagtgcgttatccttgcagggctcggaagaactgggattatcgaagatctgcttgagaagcaacaatccattgggcagatggttggcgaagtacttgggtgaatttt

SEQ ID NO: 432718 - DNA, 510 bp, Oryza sativa
cttacatgtaggtcaacattgacctcaatgcccgtggacgccacccaggtctccgaactcatccaggcctccctctcgggggacaatgagcgcatcaaacaggccaccaagctgctcaagacctacaccaagcacaaggcctccatccgagtcctcacctacatcctggtcaactccacccagctggcacacagacagatggcagctgtcctgctcaagcgcaacctgatcaatctctacgagggactctcagttgaggagaaggcggaatttaggtctttgcttttgcagcaatacgccaaggagccgcatttgttggtccagagaggtatcgccacgctcatcagcattctgctgccagtggttgagatcaagaattgggtggaactacagcaacttttggacaccgctgtccaatcagccccctaatcagctgctactttcgtgctgcttgacagcatcctttatcacttcaagccttcagctgcactctacaactatcttctcaat

SEQ ID NO: 432719 - DNA, 515 bp, Oryza sativa
  unsure (1)..(515): unsure at all n locations
gaatcaacaaattttctgctttcattaattcgacaaaaatgaaaacattgaaggccatactttacattcatctgcatccgacatttatcagctagagctggtcaagaggcaggaagctcaacaagggttctttttcctagagaatcctactagatgtccgaatttttacatgcttgaaataatgaaatactagaagatgatctctataccatttacaggatagctaatagctattcagtagtacaatagaacgaatgcaaaaaagaatgatcactttctcatctcctctggaagttgaacttcatgatcgcaaaactgaagaggaaggcgaaggtcacggcgaagacgacgtgcaccacggncaccacccacaggaagttatgatggaagccaaagtaatcagtgacaaactgtgcaacagttctggtgtcgccttcgagcacatgttggatatcaccaaactgggaagcaactaatccatacaaagtccatgcaaccgggcaaatccaacagta

SEQ ID NO: 432720 - DNA, 315 bp, Oryza sativa
ggtggaaggataacaattcccttctattttgtgcaagcaatgcatcaagaccggtccaaactcccagcccacaaccaatacaacgtaccatggttcgaggagtacaaaacggtatataaatgttgacatctttcagctgctacgagacatgtacacgaaacacaaactttgatcactgatcgggctgccattccgggcacatcttttaccgtgcgtctaactgaacatagctgtagggcagaaaaagcaccggaccgaacacctccacacacttgcggattccaaccatgggctggtcttacacacgccccaatt

SEQ ID NO: 432721 - DNA, 405 bp, Oryza sativa
gaccaagccgtccgttttttccacttacgtgattcacaatggctgggcgtaattagcagcttttggctgcgtacgtctctcttgagcatgggagtggtctacgccgcaggggtgattagatactagcgctcctacggaaatgatatccgatgacgaggacggacaacggatcacaaaggtgctgccgcaagactagatagcgctgatggaaccagacggacgacacctactggcgccgatacatctgcggcatgaacattttccgcacgccgtgctaggaacttggcaagatcatcctatggttgggaggaagcctgacgctcaagatgtagtgacactaactaacgggcacgtggattttgactgcgaattcgaatcccatggtggtagcgatgctgttggaac

SEQ ID NO: 432722 - DNA, 361 bp, Oryza sativa
ggaaaccggaagggggaaagccccccccccgggccaaaaaaaaaaaaaaactggccaaaaagggggggtaaaaaagggaaaaaatttaacccaaaaaggaaaaattgggggaggggggaaaaaaagggcaaaaaaaagggcccgcccctaggggggggaaaaaggggaccctaaaaaacaaagggcccccatggggggaagcccaaagggcgggaaaaggcccaaaaaagggcccgggggccccgggaaaattgcccaaaaaaatttttttttcaaagccgggggtttttttaattttggaaaaaccctgggaaaggaaaacaagggggacgccccccgggtaaaaaccggggctaaaggg

SEQ ID NO: 432723 - DNA, 329 bp, Oryza sativa
ggaggcccaagaaaagggggaccgggcttattcaactatcaacaggggcccagggatcttacaataaaaaaaatgggcccccaaaaagaaggccttcatcgagccccggggggcaacccggaagctccaaaaagcccccgcagggcccatgcaaaaggaaaaaatgaggattctgaaacggaattcacatttacaacctcacgcgaagcaaaaaaaatggccccaacccgcttggaaaatcgggggaaatttaatgggttcccccaaggggaccccaaattaacaggacttaacctagcttaatcttttaggggggggaatccgggggg

SEQ ID NO: 432724 - DNA, 509 bp, Oryza sativa
agcagtcaagaaagagtggagttgtagtgaaaagcaataacaagcatcattccaagggaaagtttttaagtaaaaggtcatgacaagcatcattcttgatcaaaagtctacaggatgaaccactaaacaccggggtcctactaacctgccttaccgggatcttgttcagttccttgcactaattgactgacctccctccatctccagccaaaaaaaattctgccttccaatgttgattctattagtacttctgcaatgcaagagattcttccacatctccaatcaagaatgcatgcgcctcgattaacttgtaatcttgcaagatgtatagccttcaacaacaaaaaaaaatgaatgcattgtcacaaatgatgagatgaaatgaaatccatcactctcactcagcttcgtcttcttggagtgaatcttgtgaggatttagacatgcatggcgttgttgggggagagcttgatttgggtgtttggatcagaatggcggcggcctgatgc

SEQ ID NO: 432725 - DNA, 426 bp, Oryza sativa
  unsure (1)..(426): unsure at all n locations
ctttccactactactactaccttttccttgagcggcngccgttccacgcccccgccctgccggccaacgagatcgatcgactatttgcgccgccgccgccgcctcctccttcccctggacacgtggcccgcccgagacgtcaaagaggaagaagacgaagaagcttcgctccgaccaggggtgggtgaggtgaggtgaggggtggtatctatngatcgagccagtctcatcgaggatggctagttagttaatttccgagggcgatgtcgacgacgtcttttcgtacggagccatgaaccgctgcacggacttctttatcttcataccgatgttctttttcagcacaagcgcacccaggacatgttctgactccaccaggcctacgaccgcgggtagcttatcgagtagctgctacttcccccaaaa

SEQ ID NO: 432726 - DNA, 400 bp, Oryza sativa
gcacactgaacattgtggaatactccactatatttcatcaggacaaaggtgtgtataatactgttttgttatcacaaaacaaagaaaatttaatacctaattaaaaagtcctatcttgttaatttacatgatcttttgattcccataaacacgtacggatcataacccccaaaattatccaaattatcccaagaacaaaagctgcacaaacaagatcaaatatatcacatcacaaatccataaataattaaaaacgagctgacaaattcccagaagcaatttttccttgccaaaaaaaatcactccgaccatcatcagctcagagtgcaagcaacgctcccatcagcagcagcgccgccatcgtcgccgcggcggccgggacgacggcggcggcggcgcc

SEQ ID NO: 432727 - DNA, 344 bp, Oryza sativa
tttcttctccttccctgaatccaccatggcgccgggggcgttgtccaccggggcgggactactcttcgccatcgccgccgtgcttctcctcgccgtccgggatggccattgcgcgcaattgtgcatggattcaacgttcccgaggacggtgaacggatcgctcaccttctgcggctacaatggcacggcctgctgcaactcgacggacgacgccgccgtgcagaggcagttcgccgccatgaacatctccggcacgccgtgcggcgaactcgtcaagtccatcctctgcgcgagatgcaacccgtacgccggcgagctgttcaccgtcacgaccagcccccgga

SEQ ID NO: 432728 - DNA, 116 bp, Oryza sativa
gtttttgtggggggcattatatttaaccagtatcaatctatccctttcatttttctgctctctgtttctaggaccaaactacagggttgtccaggcacggatcctttcaaacaccc

SEQ ID NO: 432729 - DNA, 360 bp, Oryza sativa
gttttcaagaaagaaaaacctgcttccctagtgaggggcatttagaaggtgtatggggcttaaaatgctgttgctgacgttaaggagaaaaacctgaagtcagcttcaccaaaagtgagaaaagtggaagttagcaagaaagaaagccgatcttagaaagaaaattctgccactccaagaactgaaaacacaaggcagtcaaagtcctcaaccatcccagcgcaggtccctcgcaggctaactttccaactaggaaaggtactgaacctacagagcaattcagagtagagcagcacgccgagactgcttctgttcaagcctgcaaagactgtagaagacagcaacaggagcaaagaattc

SEQ ID NO: 432730 - DNA, 363 bp, Oryza sativa
gcaggtattctgtcatcaatcagttttttattcctgaaaaacaagtattacttctgtaacaaaattgggagaattgccatggtttcagttcattgatagacaatgctgcatcaatggcagctgaacaaacattttgtttcctatgcatcaatggcagttttcacttgctctgctcctttgccttcagcgcctcgattacagcagagaagtcctggtctgcaagcccaagcgatttcgcgaccttgtacagctcgtttgcagctgcgactgtaggaatagactgggacaccgattctgccagggccaatgcgagcctcaaatccttctgctgatgcttcagaggaaaaggcagtagggtttgca

SEQ ID NO: 432731 - DNA, 491 bp, Oryza sativa
gtgttgagcaaaaatggcgatcgcgatctctcaggaggcgttcgacgccatggtgcgggagaacatggaggacctcggcatggacgccgacgaggccctcgccgacgccgtcgacgccctcaccctccaaggtgccgacctctccgggatcatcaagcgcgtgcctggagaggccgccgcggcggaggtgagcccggtgatgcgggtgctggacgaggtgaaggcctcttctgccagtgacagtgacagtggcggcaggtccgaggaggatgctgagaggttggcctctttgctcgacgagttgcgcgagctgtgctccggcgatgggttggagaatgcggcggtcgctgctcggaatggcggcgtggaggcgctcgtcgccctgtgcgcgtcggctggggttaagcaggagagactacttgcctcgggcttgaaggcgctaagctccttgctccgcgatgttggaagcactgaaaagttcaggcaaagcg

SEQ ID NO: 432732 - DNA, 345 bp, Oryza sativa
ggtcgccgccggcgctggccttgctgtagaagagcctgtgcgcggtggccatgtccatctcggtgaccacgcccttcttcgccgccggcttcgtcttcacggcgctctgcttcttctgctgtggttgttgagggggaggaggagtcttcagtttggatgatggcggcgcggcggcgtggtggtgcaggaaggcgaacttgtccttgccgtcgctgcgggagcggccgccggcgccgacgaggtcgcgcaggcgccagcgccgcgatgacgacgacgactctccgccggtggacgcgctcttggggaacctgtcgcggccgggcgagcccggcgccgagcgcggcg

SEQ ID NO: 432733 - DNA, 343 bp, Oryza sativa
gtttgtcaacgtcccaagcgaccgagccaagcgcggcacccgccacactgtcacagacgcgacgcgctcccgctgcccgacgatgccggcggcggcggcgctgtccgacgacgaccgactggtcgtcgcacactgtgccgcgctgttcttgctacccgggttccagccgaagcagtttgccatcgccatgtcctggtactctggcgtcggggcgggcgcttccttccaggtgcagcacgcgttccactcgtacacctgcgccgacatggcgttaccgccatggtggttcaacgcgcccgagtggggcgtcaaggagcgcgcggcgttggaagacgccccggtg

SEQ ID NO: 432734 - DNA, 398 bp, Oryza sativa
ggaaaaccaaaaactggtttactggccagaaaaaatttccagaggaatttaagctaaagcatgcaagaacccatcatccaaggaggggtttttttttatttctacaggattgggaccaaaaaataagacacctgggggaaagggaaaactttggccatcagcgggttaaagacccgttgggttccagccaaggtgggttttttactgaaggacagcaccccacaattcagggggaggaccccccgttttttggcccaaaggggggggctaaaatcctgggctgcccttggggggcgacacacacatggggccaactgggaaagagttcctgaaggatgctataaccgggtaaaccataagcttaaaggatctttattaaacacttggggtcagaagac

SEQ ID NO: 432735 - DNA, 351 bp, Oryza sativa
gtttggggagggcgcgccgatctccatccggcgaggaggggttgggagggtcgatgatctccatctggcgagtagagcaggcgaggggaggggaggggatccgatcgatgattccacacaatgcagatttggaccatatcagcacacctttagaaagtgttgaaatacctttggctataaatgttgaaagtcagcacattatttgacgattctatggcatggaaggggatactttgctagctgacatacaactggtacttccaaataggtgctatgtggtaccttcaggcatgcacatagctaatacataatcataggctactatcacatgtgacgaagctcttaacaggg

SEQ ID NO: 432736 - DNA, 353 bp, Oryza sativa
aaaagggaaaaaaaaaaggcccaaaaaagggggaaagggaaaaaaaaaaaaacccggggggggaaaaaaaaaccggaaaaaaaaaaaaaaaaaccccccggggggggaaaaaccccaaaaagggggggggccaaaaaaagggaaaaccccaaacccccaaaaaaaaaaaaagggggaaaggccaaaaggaaaaaaaaggttaaaaaaaccggggcccaaggaaaggggggccaaaaaaaaaccagggggttaaaaaccccccccaaaattgggtcccgggggggggccccccaaaggggggaaggtgggggaaaaccaaaaaaaaaccgcccccttaaaaccaaaaggcgggg

SEQ ID NO: 432737 - DNA, 232 bp, Oryza sativa
ttttagatcgcgagcgggcggccttttttttggggggtttttatagatggtggctgggtatagaaagaaacagtattactacatgcggatacacaacaacctgagaaaagacaagtacaagcataagtcgttgacgaaactggagagctttctagaatatcaggtggctctgaaaaatgaaaaaaggataaaacggcctatatatctgaatactaaaactgtggctgtttca

SEQ ID NO: 432738 - DNA, 439 bp, Oryza sativa
gcttgaagtgcgcgccgaggccacaaggccaaggggggagattgacggcaagctgtggccatactactacgaggacacctccgatcaagggagcagcgtgtaaaggtaaaaacccccaaaagagaagaagatgacaataggccaatagctgcttccatgaatcttctcccatggcttgtagagctgtagctaggtaggaaagctgcaatcataacccagtcgtgtccaaaattctatagttgctgattttgagcgctgaatttgctcgccgccgacgccgggctccgacagcacggttaactatggagctgtgcactccagttcggcaatgtaggacagtaagatagtggatgtccagtggacgtggtccacattgctgtatgtggaccgcgccattgatgccgcgagggcaaatcgctccgttgctggccatttatag

SEQ ID NO: 432739 - DNA, 131 bp, Oryza sativa
cttttctcctctcctctccccgtcgaagaggaggaggagattttcgaagagcatctccctcgccgcgaactcgcgaaccggcgcgcgcgggtgaggaggaggaggggatggggaggttttcttcttttttt

SEQ ID NO: 432740 - DNA, 416 bp, Oryza sativa
acattacatgatacacatttttgaatgtttccttttggcacaaatttgtaccaaattatgaatgttgtttacaagaggggggtaatgatataatatcatgtctgcaaaagaacacatcaatttaaaattcgcaacaactaagcacatgggggctgcacctccagtatcctttcctgtgaaaatggggctccaaggtgacacacgttatggtgttagcgtatactgctctggggaaaataatgttctttgccagaattctccccagaatgcgccgaaagaattccctcccagtatctacgggcaactcaacaggcgctcgagatctgtatgcccttgatttgtgctttgagacactccgattcctcaccagttatattcaccattctagctgggttttggacaacttcagacattgg

SEQ ID NO: 432741 - DNA, 429 bp, Oryza sativa
tttttttttttttttttttttttttttttttttttttttttttttttttttttttttttttttttttttttttttttttttttttttttttttttcccccaaaaaaaaagggccccaatgggtaaaaaagggggaaaaaaaggggcgcaaggggccccttaaaggggccccaaaaggggaaccaaaaaagggggggggggcctttccgggaaaaaacgcctaaaaaaaaagggaaaagggtaaaaaaaaacccccggggttgggggggccttttaagggggtttgggccccacccaaaattaaaatttttttaacccaaaagggggcaccccaagaaaaaacgcttttttggccggacccggggggggccaaaggggggggggggggttttaaaaacccggggcaaacccaatttttggggcccccggc

SEQ ID NO: 432742 - DNA, 420 bp, Oryza sativa
  unsure (1)..(420): unsure at all n locations
ttttgctccgtcgcctcctctctctctctctccgcgccccttcgctttttaggggtgttgttcgcgccgccccggtgagaggtagacgggtctccccggcgagatgggccacgtcgacgcataggccgacgccgccgtcgcgcgcgacgcgaagaagaagagggggaaccggtcggcggcgaagctgatgcagtgcaagcttgacgcgcgccgcgagcagtggctttcgcaagtcaaggatggaaaggaggctaaggcatcgacttcgccgacaggtacagagccaaatgctgggtccatgaccgttccttcngcacaccctccgctccctcgccgtcngttagatgtgaggtcgaagggaggggatccagaagaggacagggaggagaggggtgctcccccgcctgaggttggcagcag

SEQ ID NO: 432743 - DNA, 224 bp, Oryza sativa
gcgagacaatgggagaggatcggctatcatgctttggcacatgacagcggatcggcagccctagctcctcagatgttggttaacagcatgaggatgccgacaaacggaggagtgtaaccctacataaatgaacttgaaaaggactgtaggcacacgaacattataagaatctgcatagtgacgaaagcaccagttcatggttccgtaggacagattacccatgc

SEQ ID NO: 432744 - DNA, 254 bp, Oryza sativa
atcatatacacgtgacatacatggcttctgtgcgcgtgtttttaatgcatatatgggatctaaaacatcaggaattattaaggtttaggttttacctattagaattgatgtatatgtttggtgatctatatctatcctgtaatctgaatctgatcattttgtacgctttattaacctcaaacactaggaggatgctaccgataaccttatctccatgaacaagcttagcaccaagaatctcggggctctgtcct

SEQ ID NO: 432745 - DNA, 152 bp, Oryza sativa
ggggaggaaattatagaggattaatcaacaacacgacaagacaaaacacgacgcacattacgaggacatgtcaacatcaatgcatgcatgcatgcgatgacttgacactgtcacacactgacacaacttactagcctaaagctagcagtagt

SEQ ID NO: 432746 - DNA, 165 bp, Oryza sativa
ccacccgattccccggtccacccacacctcccggatttccatccatggcgacctacaacctccagctggccctatgaaacccgtactggcgtttcaaacaatctcccccaccgcctccggcgcctacaccgcctgcaccactcctatgaaggagaccatccataa

SEQ ID NO: 432747 - DNA, 486 bp, Oryza sativa
acaggcaaacaaaactcataataatttacacgcaaaagactctaattacacagcaagaaaagaaaataaattggagcattgccaacacactgctcgatggttttttttgtttgtatgtcctggatctcctgttctatacacttcctatacgcccaaaaagtaaaaaaaatctgtaacaaattcattctcttaatcctatctgctcccaagtcccaaaccaaaatcctgatcgatgaaacctaacaaagaccagcaaagctgtgatgaactgctgtgatatgtacaaacaaacggcgaaaatctcaattcagcagcccatgcccttgatcaccaccggccatcgtcgccgtcgccggctgcgtgccgtcgtagttgagcagcgcgaacttgacgttgagcccgatcttgccgccgtccttgacgagcttggcggcggtgaccagccagtgcccccgcacgtcgtgggggcccttcaccacctccgac

SEQ ID NO: 432748 - DNA, 163 bp, Oryza sativa
ctattcttcttcttcctcctcttctcctcctctcctcgccgaggacgcatcggaattcaggtggaggcaaggattgcatgagctaaggtgaggtgtgtccggcgtcgcgttcgcgtgcgaggtggtggtggtggtggctgtagtgtggaggtggtgtgtcttg

SEQ ID NO: 432749 - DNA, 496 bp, Oryza sativa
cagaaaaataaaacccgttttctataatatatgggcaggataatgtacgccaactccaaatgatatcaacaactgttagttccaaaatgtatctccatcaaaatatgatgcaaaagcaagttgaacgcaataatgcaggtttaagcaatttggtcctaataaaaaatatatatctagacagcctgtacattactctgctgtttacattttgttccctttccagacaaataatattttcggtaccatgagtacttcgtgtatatggcattttaagcgatatttttgttgaattgtgtttgatgaaacagtggcactagtcataatatgttgcaacatattaacatgttggtgaaatcaaattattgcataactatatatttttggaggatagacccctaccattgatgtcatgatggcttgttggtgctcttaataatgtagtagtactagtttttttttaaaagataataatactaccttcgtccaaaataagtgc

SEQ ID NO: 432750 - DNA, 284 bp, Oryza sativa
ctttcttcgcaagttgcagattctacttggtcgggggggcagtctaaggcgaactgctggcgatcgatcgctcgctcgctcgcggggacgcgacgaggtctcgcattggacaagaccagccacgccttccttgtcgctatatagtgcaaggcttgccagcaagaggacaacttgttcccgtgcaaccgagccggcgtcttcacaaccgagaaccagagattgatcttccaaaggagaaattcctgaaagaatacaaaaagccccgattactttattttgactcc

SEQ ID NO: 432751 - DNA, 276 bp, Oryza sativa
gggcccaacactttatcacaaaaggcatggccgttcggcccctcggttacccaaaaagcagccaagggcgccttgattaccaaagccggcccaaaaatttggggggtggccttcccaagggagtttccgagagggagagagccccccaggtcgggcccttatttaggtatcgttcctttgccattgccaggcgtaaaaaggttttagttattttgggacctccaggctgagggtctttttggggggattggcctttttctccaaggtcccaagcgg

SEQ ID NO: 432752 - DNA, 150 bp, Oryza sativa
cacgttgagctagccatggcggccgccgccggcgggcttctgttactgacggccgggggattgctcctgctggtcgagggcggcgagccgccgtactcgtgcgggccgcggtcgccgtcgtcggggtacgcgttctgcgacgcgaggctg

SEQ ID NO: 432753 - DNA, 302 bp, Oryza sativa
cgccccaacccaaagggaacattgggggggcggggtgttccttttcccaaggggccccccccaaaacggggggtccaatggggggggcaatttttttattaaaacccggaaggggccgccccccctgaaaaaaaaaaaaacaacattgtttttttagaggcttgtcaaaaaaagaaatcccgggggcccaaaggggccctttttaaacccccgcttttccaggaaaaatgcctggtttaaaaacaagcccccaaaaaaaaaattggaagggttaaaggaggcccttaaaaaaaaaaggtaaa

SEQ ID NO: 432754 - DNA, 420 bp, Oryza sativa
tctgcacgcttctcgctacgctatagaaaccgggggtcgtgtagacgagtctcgaagcacaaattcccctccttgctcccctctaaaccctccccctcgcgcggattcgcttccccgtgtctcccagaggggagttggtggtgttcctggagcttcttgggggtggtttttccaagctgcggcgggctcgccgaagttggatccggcggaagagaggatttctgggaagggtgccgcgaagctgctcgacggcaggctcgaggtggccttgaggaaatcgcttcaatttcgaacggcctgttcagttggctggacgattcatttcatgagcagaagtgtttacaccaagccgtagcagaagagggaatccttgatttgtcgtgggaataaagaggtgctcacctttgagttggacaatgc

SEQ ID NO: 432755 - DNA, 61 bp, Oryza sativa
tataaaaaaaaaaaaaaaaaaaaaaaaaaaaaaagaaaatttaaaaaaaaaaaggccgaaa

SEQ ID NO: 432756 - DNA, 237 bp, Oryza sativa
gtaagaaagaaaagaaaaaaaaaaggaaaatcggggctcgtttagactcgtcttcggctcccccgattcccgagcagcttctcgaaaccctcgcggcctcgattccggcgatggcggagcccaacccgcaagtggagagggaggtggaggtggaggaggtgaggaggccaaacctaaggtactcggagttacagcagggggcggcagaccatgcgacgaactggcttgcggggctct

SEQ ID NO: 432757 - DNA, 446 bp, Oryza sativa
tttcgttatcagcagcaagcggaccacaggagggaggcgttaattgaaacgagggctgctaaacaaaccagcgagcgagcagccaacggcccatcaaagtgaggcaatcgtgaggggcgccggccccgcaggagcgctctcatgcacgttccgctccgcttccccttacccgacctccccggccacccgccattgctggcctgttctaggctaccgctcccgctcccgctcgtatggcacggagctggggcccgcgcacgaagagccccggggcacctaggttattcctgtcgacaccatgacggcgcttcagattctgcaggcaaagcaacgcttctatccacgaacaaagggcaaaacaaatgctcgctgccatctttcagctcattctgacagtcagggattccgcctgaacaaccaaaatctacccgtaagcacaatctcct

SEQ ID NO: 432758 - DNA, 356 bp, Oryza sativa
tcggtcagtgcatgcatcatctgatcagagggccggttcgcgtgcggcttctcgcagcgatccgccatggctggaccttcgatgaatcagctcgtgcacggacacagatcactagaaaagatcatcaatttgagttgaaaataccactcctaaattagtactagattgttaattatacatttttctctccattgcttctttggatagagaagtggcgtggaaacgttcaaagatccaatttttcttcccctccgttgaaaaactggagcggggctgtacttgtaccggcactgtattcaaatattcatgtgattattcgtatccttcaaacgagctcctctgataactaaaacaca

SEQ ID NO: 432759 - DNA, 83 bp, Oryza sativa
ttttctttacttcgacgttaagatcataacggggggcgttttatatcctgacgggggttctcaatgctctaaacgagaacaat

SEQ ID NO: 432760 - DNA, 525 bp, Oryza sativa
tcggtcaactgcttccgcgacgccaggtcgcagcggccgagcacgtactgcaaccccggcgcgctggccgccgtgctgccgccggcgcaggggaccggcggcgagcaggggtcgggcgggaagggcggccaggtggggatggcccttggcatcgtcggcggcgtcgaggccggtgcggcgctgatcgcgctggtgatgatggccgtgctgaggagggcgaggaggcagaatccggaggtgagcgtcttgcccaagtcgccgctggcgtcgacgccggcggagaagaagaaggcggcggcggacggcggcaaggcgccggccaaggtgacacagaggattgttactcctgctgaaaagaggcatgcatcacaagctgcaagggtgaatacactagaagtaccagcctaccgtgtgtatacacttgaggagctccaagaagcaaccaacaactttggttcatccaacttgatcaagagttctactggtgttaagcattacaacggtcagctttaagatggttctaga

SEQ ID NO: 432761 - DNA, 377 bp, Oryza sativa
ctagttctagatgcgagcggccgccctggttttttttttttttttttttgttttttttttttttttttttttttttttttttttttttttttttttcttttttgggaaaaagccggccccatttaaaaccaagattttgacagggaacaacaaacaccaggctaaaaaagcttagctaacttagaagctacagaacactgccaggaacaaaacaacttggggttaaagacccccaaaggaacccaatattttcatcaaaacaagggacccaatctgctgaggccgggggtgaaaagaaacttttccgaccgggacccgaaaatgttgcccagggaaaggcaaataggggccggggggaaactctgggatccccccac

SEQ ID NO: 432762 - DNA, 514 bp, Oryza sativa
tcgtttctaatcatggatgtgccagtgaacaaatggagattgtgatcgcctcaatctcggtgaaggtcacttggtcggctatggagttctagaagggtacttagcgtttggacattttttttttatttgttactccctcagttctatattgtaagactttctagcatgttcatattcatctagatagatagatagtgtgaagctagtgttgctagtgttgagtgtaggcatgtgtgtgtttcagcccaacagggcccattacaccaatgcatatgtatagtagaagagagaggaaatagtgtgaagcttctggagaaaaacaatcacctagcaacatggtatcagagggcgaccgcgtcgaggctaaaccctagctagcggcgcgccggtttgtggtgctgcagcttggagcaacggagtggtggcgttgacagcggagacggcgacagctgctacagaggatctcgacgcatccggcgtgaaggagggagcagggtgtgcgctcgctggttga

SEQ ID NO: 432763 - DNA, 439 bp, Oryza sativa
ttcttttccagtttggtgcacctgtccgcgacgcatctgccgtagcttcgcagcagcagcagcatcatgggccacgccgccgcagccgccgcggcggcgcacgtgccgctgggcgcgatcaccgtcgacgacctcctcgccgcgggggtggcgggtggtgcggcggcggagctgcacgaggcggtccggcgcgcggtgggcgcgcgcggcggggacggggatgcggcggcggtgtggggggagctctgcagggtcgtgctccgcccgggcgtgcccgtcgcggtgcaccggatgctctactacggatgcttcgccgggttcccctccgtcacgccgccggcctggacccccgacccggaggaggccgtattgaccaatggtggccgcgttctctaggcgtgagggagggagttccttggcgacaagtacaaggatccaa

SEQ ID NO: 432764 - DNA, 136 bp, Oryza sativa
tgtttttttttaaattttttttccgtttataaccctttttttttgcaaaaaacactccccccattatttaaccacactctcccttcttttcaacccccaccaaaaccccctttaaaatttcaaaatcacttgccct

SEQ ID NO: 432765 - DNA, 92 bp, Oryza sativa
ccgccgacgccgccgcgagctgaggcaggggtgttttaaactaagctgtcttaaggcatcaagaaggcgatgcggatgaacacgtaccaccg

SEQ ID NO: 432766 - DNA, 197 bp, Oryza sativa
tcgttcctctcatccccttcctcttcctcccggactcccggtctaccccgacgccgcggcgcggctgcttcctctcatcgattccgcctcagatcggggaggaatcgcggcgagatcggccgctccgaatccgatccgcgcacgtggtctcgccggcggggtcaggttggttcgcgggagccgccgtcgtcgccgcc

SEQ ID NO: 432767 - DNA, 112 bp, Oryza sativa
tcttcgaaccccgcgcccccattacacgcccgggtaactatccaccgttttcctttctcggagtccgtggtgacaggagcccaccgtcgccatgggtgaggagaagaaggat

SEQ ID NO: 432768 - DNA, 123 bp, Oryza sativa
tcgtccacgcgtccgattttcctcttcctgggcggggcgatttgagaattcaccttcttcttcctcctctcctttcgcctcctacctcttgctgcagcgcacggcgccgcgccatcatagagc

SEQ ID NO: 432769 - DNA, 460 bp, Oryza sativa
tgttctttcagctagtagcagagaggagaggagaggagttgttctgaggtaggataggagagcagcagatcagatcagatcgatccgggcaggcgggcagcatggcgtcggcaggtggctgcaagaagaagacgggaaatagtcgtagtaggagccctcgtagcccggtggtgctgcggagggcgatgctgcattcgtccctctgcttcctggtcggcctccttgccggcctcgccgccccctccgactggcccgctgccgccggcgccgccgtattcctccgcacgctccgtgccagcaatgtcatcttcagtcgcagtagcaataggccgcagcagccgcagctggtggtagtggtcaccaccaccgagcagtccgacgactcctagcggcgcgccgccgggctgacgcgcacggcgcacgcgctgcggatggtgtcgcctgcgcttttctggctggt

SEQ ID NO: 432770 - DNA, 159 bp, Oryza sativa
gtgagtttgctttggtcgccggcatggcgctggcggcttttgttgcgagcggcggttactcacacgacgacgagtacgcgaagctggtacgggggatgaacccgcccggggtggtggtggacaacaaggcgtgctactaggcgaccgtgatcctggtcg

SEQ ID NO: 432771 - DNA, 512 bp, Oryza sativa
  unsure (1)..(512): unsure at all n locations
tttgtgttgacagcggagaaagcagtgtaatcggggcccgccaccgcagccgcctccacctccaccacctcctctcttcccggcgccaatggccgcgtcgtgaagcgcagcagcagcagcagcagcggagacagcggcagaagctttgcctaaggttgggatcctccctattcgcgcgcgtctttgatttgtcgcgtaaagttgtaatccgtacttcggatggccggctcaatcgccgcctcggcgttcttgccggggtcaccggcgccggcggcggccgcgccgcccaagagcgtcctgagcgagcgcccggacagcctggacgtccgcggcatcgccgcgaagccgggctcgtcgtcgtcggccgccgtgagggccggcaagacgcgcgcccacgccgccatccccaaggtgaacggcggcagctcggcgctggcggatccggagcacgacacgatgtnctcctnctcctccttccgggggccaggacgttctacaaccagcttcccgac

SEQ ID NO: 432772 - DNA, 108 bp, Oryza sativa
tttcgtttgctgccactgcggacactgattttgagagagagccttaaggagtaggaagggatggcaaagaaggtcttcttcagggacatacggcccccaactgaagaa

SEQ ID NO: 432773 - DNA, 345 bp, Oryza sativa
gggaagcggaggagaggggaaggaagggagagaggcattcgacccggccgcgcagcttccccccctccctctctctctctctctccgccgcccccccctcccccctaccaccaccaccacccgccgccgccgcacgatgagctcctgcgccttctctcccccgccgccttcgtccgccgccgcgttggacgggagggtcacctctcacttggatcccttcctcctataggcgctcgacaacctttgccacccacttatggttctgcgtatggcaatggatatacataaatttatgccgaatcctcaactgcacgaatcttaattccctcattttccaacttctta

SEQ ID NO: 432774 - DNA, 139 bp, Oryza sativa
cctttcggtgagtgagtgagattctcagaaggagggatttttgtattgttttggcacgcacatatctgccacattatatcgttatccctaattaagctatctcctccatatagcaaactaccaaccgactccctcacac

SEQ ID NO: 432775 - DNA, 65 bp, Oryza sativa
acacaaggagcgctggtacgggatctactccttacacaacttcgacgtattttacaccgtatatg

SEQ ID NO: 432776 - DNA, 178 bp, Oryza sativa
aagcccccggcccggcccgaccggaacgcacaggcgacgctgacccaccgttaattttggacagagcggcgcgcgccccggggagagagatagtgagagagagagagagagccgacaggagcacgcgagaatgtcgccgatgctggcgacgccttcggaccgcacggccgtccttcac

SEQ ID NO: 432777 - DNA, 241 bp, Oryza sativa
atcttattctagcagccgctcgatgggggaagcgcgggggttcttctactcttcctggcggaaaattacaaatccctccttcacttatccaacaccttcgacaactggaaaccccgaattccccgtcgccttcccacccatgccgcatacccctaaaccctagacagcacctacaccgcggccgacggcgcatccaagcatttgtacatccacgactgcgacccggacatccactaggacc

SEQ ID NO: 432778 - DNA, 289 bp, Oryza sativa
gtccttccgccgccgccgccgccgcctgggcggcttcacatccccggacccggaggaggacacggatggcgatccgtctccgccgcccaccgtcctcgacggcctcgtcacgaccctcctctctcagaacaccaccgacgccatctcgcgccgcgccttcgccgccctcaaggccgcgttccccacctgggaccaggtttggtggccgcatccaggaagcttctagaagctccctcgtgtcctctgatgcgcgattcgttttcgtttttggaggtggtggataggagga

SEQ ID NO: 432779 - DNA, 339 bp, Oryza sativa
gggtggtttttttttttttttctgtgggctttccttctccaaatattttttttccctgaattttcttcttctcgtatagaagacatggaataaaacctctatacaattacatacaccagaagccataggcaaggcaacaaaagaaggggcagagagtgggccccacgttgctgtgggtcatcaaatcttaaaaaaggctggtctgatccggtctgttaaggaggggattcttggcaacctgggtggggcgccaaggcacagtctaggacaaaaaggtagggcttcttggctttttgggtcacttggcatgggctatacacaagagggggaggtgatggt

SEQ ID NO: 432780 - DNA, 55 bp, Oryza sativa
tctagatcgcgtgcggtcgcccttttttttttttttttttttgggggggtttttt

SEQ ID NO: 432781 - DNA, 452 bp, Oryza sativa
tgtgtttttttttaaaatttttcccctttttaaaaaccttttctttttttttttttttcctctttttcttccttcttttcttcccccaaaagcgcccccccctttaaaagaccccattttaccccccccttccttccccatcataattttttttcttgtccccccaaactcaattcccctccccccgtttttccacaccctctcccttaaaaccccctgccttccccaccataatccccttgcaaaacacccccttttccccccctgtgcaaaaaacaaaaagcccccccccaatccccctttccaacacagtccccccctttatacctaatgggacccccccctattccccccaaaaaacccgcggtcgtgtgggtttcccccaaatgtccccccccactttcccaccccctaaccccccctcttttaaatttctcccttcttttttcccc

SEQ ID NO: 432782 - DNA, 352 bp, Oryza sativa
  unsure (1)..(352): unsure at all n locations
ttttctctctacttctctctcaatctagaganagaaaatttataggagaggagggaggataacaaatctgctgtttgtagcagtataccattagatgcatagggagcatggagccaaacagaaaggctgtttcgccattaatggctctcccactcacctctctctctagaaacacatagccaagatcatcatcatcagcaaccatattagtgaattaagaggaaatcaaatcagtatcattccatgaacagcattatcaaatcagtaagagaggggagtttgcaagtggggctagtgttcaaggggccattactaactagagttctatatagagctagaggtcatgcatggg

SEQ ID NO: 432783 - DNA, 363 bp, Oryza sativa
tttctcaaatgtcattcgatatcaacaaatggccggaaattaacaaaaaaattggcgttaaaacccatgaaattgctaaggaatttaaaaatatccaacttcaccccttgcacttgattttggctctcttgctggatgaagaaggatttacttcaaatattatttccaaagccaatggaaattcaaaggattttgaacgcgctattaaaaaacgtgttactaaattaccttgtcaagatcctgctcctcctgagttgactttgcattcgtattgctagtgaggttttacagaacgctcaggaaattagtaaaaatgctggagattcacttattgctgctgataatttattacttgcttgtgct

SEQ ID NO: 432784 - DNA, 281 bp, Oryza sativa
ccgtttatcacactagctagctatctgcttcccctgtcgatctgggatatatatgtggacgaaccctagctcgatcttgagtgattaagttggggatcaagctagagatcgagacgatgtcgtcgtggaacagcccgtactacgacacctcttcctacggcgccggatcaggaggcggcggcggcggcggcaggcggtcgttgtctcctgcgcgcggtgccggctacaagaaggagaccaagacttacgattaccagtgcttcacaagtcacaacaacaac

SEQ ID NO: 432785 - DNA, 257 bp, Oryza sativa
tatcttcgtcctactactctcctcatatcggcgcgtagcttttgaagacgctcgcgggctatccctaattctagcgcggacgactcctagctgcggcgcgcgtgcgcacacgtcgaggcggcttttggggcgcgcggccaggaggtgttcttattccatccttgtctccaaggggaggggcatcttctagaagcttgggctacttaccaaggtcttttttatttctgcttactgttaaacaatatacaaaaggtgag

SEQ ID NO: 432786 - DNA, 228 bp, Oryza sativa
tgtatgttcaattcaatcgagcattacctaatttgcgattttttaacacggtctgggtggataaaccccggccggcaagaagcacggacggcattctttttctgcatcatcatcgccgtcttcgtcttcttcttgttcagtagtgcagctggctcatcatcagcgcccactagggtgaggaccctctcatcggcattaaatcagcatcagcaggaggaggaggaataa

SEQ ID NO: 432787 - DNA, 419 bp, Oryza sativa
acgcagcgcatgtgttgcgctcgcgggcgatgcgcaccatctccagcagcgccaggtcattgaccagcggggcggcggccgtgggctgatccagctgcgcggccagcgccagcagctcggccgggcagtcgcggcccggggtccaggccagacgacgcaccgggccctgcgcctcgagcacgacctggctgaagggcggcgccagcggctggggttcaggctccggttccggttccggctggggttccggttcaggctggggttccggttcaggctggggttccggttcaggctgcagcatcggatcatcgatgttatccacagcttgtccacaggagttgtccacagccggcggcagcgcatcggtctcggccaccggtgcgacagccggttcagcggcaggctccgtgacaggttct

SEQ ID NO: 432788 - DNA, 470 bp, Oryza sativa
gtttttctttaggagtttaaatcctttgctgatttgggacgaatataggagccactggcgatggctatctttacttatgggaaagtaaatgggctgttgacaaagcaggatctcaagcgtgcagcgcaccatgtaagtttggctactaagttcatcgtacttaaattcgatatctccaagcaaaagaattgattttgaggcttttcttgatcaaataaatggtctccatggtttttttgttatcttaatgctcacttactaaactgataactcctgctgctcaatacttgattactatcaccattgtgcatccactaagcgattccattccctttttggtttgtgatgtaggtttgtggtgttgacttaactgacagagtagttgacatcattttccatgtgtttgatacaaataatgatgggaaactgagcctggaggaatttgtgagagcattacaaagacgagaaac

SEQ ID NO: 432789 - DNA, 309 bp, Oryza sativa
tttctcccgcactctctcccgcgaaaagacttctgctctcttttaagatgttgggggtgttgatacactcgcgcgcggcggcgcggtgccagagatgaggaggatgttgcgttgcttcttcggcggcggtggcgactagacgggaggtgacgaggagaataatgcgtctgcggcggcggtggtgaagaacaagaaggcggtgaggcggatgctgagtgcgacagcgcggcttcagtcgttgtcgctggaggacctgttgtggacgctgccgcaatccgggctgtaggccttcactcttgcagagcttaa

SEQ ID NO: 432790 - DNA, 434 bp, Oryza sativa
ttttatccctgatttctcgtctgtccagaacgtggccaatttaaaaattggtgggtggttcacacagccagtcttgtttgcgccgctctgctctcaacaattgcgtgattgtgctctagttcatcccgagacgcctcgtggcgataccgcgttgttctgcctgctgtcctggcgtggctgcctgaagcttctttgcatccacgcatccagtgcatgcagtcctccaacgcaatagtgcaatagtttttaaggactggtagagggtttgtgcggccgccgacaacagcctacaccagcaacagtacattacagccccccagtcgccacataggcaagacctacccagcatgtaggacctggaccccctggtgcagatattcaatgtctcttgagacgttggagccctccaccagcacccttgatttgcccttggc

SEQ ID NO: 432791 - DNA, 174 bp, Oryza sativa
ttatacttgatcagattagctctcttgctcctggggctgactcactctactatacacgcacatatatacttttttctgggcgtactagtaaggacacctaatcgacatcaatgggtcaccgtagagggtgagaccccgaccaccgtgctggcctaggtggccccagttgaggct

SEQ ID NO: 432792 - DNA, 155 bp, Oryza sativa
ctctgtccccatctctcataacttggggtgttctctataaatctactggggggtaccaaaggatacaactccagcttccaccggtcatcaacaaaggaccaatcgaaaatcagataacctgtcaccaacacctaataagcagcctaacactactt

SEQ ID NO: 432793 - DNA, 458 bp, Oryza sativa
  unsure (1)..(458): unsure at all n locations
ctcctctcttacctcacctggttctctccgccaccggcgccgccgcctccattcctccaccgccgccaccccaagacttccccccacctttatatagcggaccaccaacccatcgcctgcgcgtcctcccgagaaagagagagagagagagagatcccgacctcaacaatggcggccgcttcctccctccacgccgccccgcgggtgggatcctcctcctccttctcctcctcctcctccgctggccgcagatcagcctccgcggcgaggagcgtgcgcgtggcggcggcggccggatcgtgcgcggcgcggcgggcggtgggaaggatggaggcgcgggccgccgttgcatccaaggcggaatcgccggcgagcgcggcctccttcaagtctgacggtcatgaggtcttactgtatgaggctcttcgcgaggcctngataggagagatgaaagaaga

SEQ ID NO: 432794 - DNA, 155 bp, Oryza sativa
aaagctgacaccctgcagacacctccccaaaatccccgtctcgacccacgcgcgctagtgagctagcgaaactgcaagctagctaagtggcatttttaaaaacgctcggtgcgtctaaaacttacaaggtatcatgtccactaacaatccgatca

SEQ ID NO: 432795 - DNA, 211 bp, Oryza sativa
  unsure (1)..(211): unsure at all n locations
nnnanaanaaaaaaaggggaaacatgaacaaggatgggggcacaaaaaggaaaagctacaacatgtcaatcgcatgaaaaagaaaaagggaggaaagacagccgccaaaagccaagccattctttgatacctctgcaacattagatacatgggaaaggaatatacacctcgccggcaaaaaaaaagttaaaaaaaatcaaaacaaaacgac

SEQ ID NO: 432796 - DNA, 482 bp, Oryza sativa
ctttgtgtcagcctccattcccttcttctttgtggtctctctttctcttcatgcggctcttctcccacatcggcccatgcccatcgatccatcctcgactacctcgcggtggtgacggctcccagcgcacgaggcgggaggcggcggcgacgacgtctccccgcgcacgcgaggtggcggcggcgacgtctccccgtgcgcgcgaggcgggaggcgatgaccgcgacgacggctcctagaacgcgaggcgcgaggtggcggcaggcggctccccccggacacaaggcacgaggcggggaggcggcagccggcagcagcggcaccccgcgcgcgcgaggcgcgagtcgacggcgacgacaacggcttccccgcgcggcagggacgatgcagatggcgacggctccccgcggcggcgatggctcgtgcgtgaccgtggcgccggagcggcaatgatgactcccacttggacgacgaccacccct

SEQ ID NO: 432797 - DNA, 372 bp, Oryza sativa
atgtgagcaagtgaaactgcaagtgagctaaggtgcaagaagagagaggtggagatggattggtacgcgtggctggcgaagaccgggttggcgccggcgctggcgtacgagtacggccgcctcttcaaccagaacgagctggagcgcggcgacgccgcgcacttcgaccacgacctcctcaagagcatgggcatcgccgtcgccaagcaccgcctcgagatcctcaagctcgccaagaaggactcctcctccgccgccgacgcaggcggtggcgactcctcgtcgtcgtcgtacgcgcagctgatcgcgcgcaaggccgggaggtgcatcgcgcggtgcgcgcggcggctggcgcgaccgcggggtgtcggt

SEQ ID NO: 432798 - DNA, 300 bp, Oryza sativa
ttttcctctcgtctcgatgtcatcgccgccgccgccgccgccgccgtgtcctgctgcggcgtgcgacgacgggtggctctccctgtccgtctcgacggtgtcgggagagagcaatcaaaagcgcctcaagcgaggaggcggaggaggtggtggaggggtcggcggcggagcggtcgaggatgatgggtgtcccctccacgacgaggtcctcctcctcgtgttcgcggaatgttcgctggagacagacgatctcgttcggtgcgccgtcacctgtcaggcggtggcgccgtcttctcaatc

SEQ ID NO: 432799 - DNA, 247 bp, Oryza sativa
ataaaagaaaaaaaaaaggaaaatcgtgtctcggctcgtctcggattcgtctcgggggattcccgagcagcttctcgaaaccctcgcggcctcgattccggcgatggcggagcccaacccgcaagtggagagggaggtggaggtggaggaggtgaggaggcctcatctgtggtacttggagcccaggcaggggggggaaggctaagccgagatcggggtagaggggctctactcgcttgtcaaggac

SEQ ID NO: 432800 - DNA, 294 bp, Oryza sativa
tgattatctagccgataggacaaactttaatatagcagccttcattaggaaaagggaactgctacattgcttatgtgggtttacttcagcaacataagttacttcaattctctttacaagaggtggctatcgaaaaccgaaccagataaatctattttatttgggcaacaaatatgttaatgttttcttttatctaaccttgtatattggtttggttgatcaatatgcacgccgcggtggctgcttgacgccagcggcacggttgatcattgtcgtttcagttatggattattt

SEQ ID NO: 432801 - DNA, 54 bp, Oryza sativa
tttcctgatcccaagcgaataaaccacaggggaattctataaactcctagagag

SEQ ID NO: 432802 - DNA, 105 bp, Oryza sativa
ttttttgcagccaccgcatgtgtgcctcccggggcgcttttatatatgtaagggggcttgcaacacatggcgtgtcggttaatcttcgcatattattcggctcac

SEQ ID NO: 432803 - DNA, 396 bp, Oryza sativa
ttttttggttttttaaaattttgtgtttttttattttttttttttttttttttttttttttttttttttttttttttttttttttttttcccccaaaaaatttaaaaaattttttaataaaaaaaaaaggcccaatttttaaggccaggggggatcccatggttacccaaaaccggtttaaaaggggcaaaaggcttctccttaaaaaaaaaccggaaggcgggggcccccccgggtggacccaacaagcaatgtgcatgcaggcacttttgggcctgtaaaaaaaaaaaatctttaaaattggtcacttcctttaaatttaaaaggagaaaacacgtaaccgcccccctttctttcaaacccagggaaaacccgggggcggttaattaccaatgg

SEQ ID NO: 432804 - DNA, 361 bp, Oryza sativa
aacttcatgtggggtttttttttccatggcgtgttccaccgagcgcgcaacgacgggctgggcggggtgtaccccaccttgttccagctccggcgatccgtcgtgtcgctggggtgcacctcgtcgtgcatgccagagcaaggtgttggtgttggtgctgaagccatggacacatcatcttcagacaatgctagttgtcaaaacaaaccccttcccccgactgcgtcttcaggcggcggatgagggtggcctccggctaactgcagcatgaaggagcagccgccgctgcggacgctccggtcgctgacgatgcggacgactagcaccggcgacctgaggaagagcatgatggaagacatgc

SEQ ID NO: 432805 - DNA, 318 bp, Oryza sativa
ggcgcctcctcatagctgtcgtttggagtacacggtgtacagcaccccggtgttcgccccggtgagcgccgcggtctcggcgccgccgggttaccagccgggtggcgcctccggtggcaatggcgcggcggcgctggcggactccggcggggagcccgtggccaagaagaagcgcgggcggccgaggaagtacggccccgacgggtccatgtcgctggggttggtgacctcgccgacggccgccgcgtcgacgccggtggcgcatggcgttccagggccgttctcgccgacccagcctaagccgtcggcgagcttttt

SEQ ID NO: 432806 - DNA, 370 bp, Oryza sativa
gttctagatcgcgagcggttgcccttttttttttttttttttttttgttgttttttttaactagaggcggtgataataacaataatactttgataccattgcatattggacatttggataacatgatcatatgtctctcaagataccactacctacctaatacataataaatccagggtgaaacctacacgacagttacacttaccaggtacaaattttcccctaattaaacttcagatttacactacatcataggagctagttatacaatacgcgagagaacggtcatttctcttttggggactataatgcaaatgatggacaaagtctatcagagactcaaagtccacgtttggcgaaggatgaaatg

SEQ ID NO: 432807 - DNA, 406 bp, Oryza sativa
  unsure (1)..(406): unsure at all n locations
tttttggttttttgatttttggtggtttttaatttttttttttttttttttttttttttttttttttttttttcggggaaacaacccgggaaaaaacaagccccattggggaatgcaacgcaaatgcaacggaaggcaaggtgttcttgggggctggggcttttaatcctagggggggctagtttttaaatgcgccccaaaagggggggggaaaaaagaaagggaagcaaaaaaactgtccatgttaatggggggggggncacttccactcttgggtgtcaaacgggtgggaccctttttgggcaacgtaggggattttcccgcctgggaattacacccggcctgccagtccccaagttaaagggccctccctgggggcccaaacccatttcccgggggacccccc

SEQ ID NO: 432808 - DNA, 487 bp, Oryza sativa
tctttgagcgagcgcaagtgttcactgcgtgggggtcctataaatatctgtggggggttctagatctgtagcttattagcggccatgtgcggcggagcaatcatctccgggttcatcccggcgtcggccgctgaggcggcggcggctgcggcggccaaaaagcagcagggcaggagggtcacgggcgacgtgctgtggccggggatgctgcggaaggggaaggcggcggctgcggaagaggactttgaggccgacttccgcgagttcgagcgtggcatgagcgaccaccaggcggaggggggcggcagcgaggaggaggaggaccactaccacatggtcgaggcggtccccccgccagcggcggcgaggttagtcgtccatgccgcgggcaatggggggcccccaactgcagatgggatgctgactacaaagcttgtccaacatgatggacctactgctagatcagcatagctcaagaggaagaatc

SEQ ID NO: 432809 - DNA, 340 bp, Oryza sativa
tttgggactttaaaatcttggggttgttaaactacaaatgatcaccaacagaattcaatccgcagctaccttttgttttcctaagctggaatcctactttctagtttctacccatacgacaccaactcggttcttttgctacctcttaatctggttacagagcaatctataatgcataattaactacaaataaaccaccaatggaataaatcagcacctacaacctcaaacaatgtcacagctcttcttccattgctgctatatcccaagagttggtatgtgagcatgctgctgctccattgcccccatttgatgggcaggcaccccagacatcatatca

SEQ ID NO: 432810 - DNA, 207 bp, Oryza sativa
gtcaactcgacacagtgtgttcgctggcttgcgtggggcctactttgggggatttttgggacgactaaggttagcggcccaaggccggtcccggacggaaagggcagcaaagacggtcgagcgcccatagggccaataggcaagagtgcactgggaaaagatggacgcacgccacttgagcgtgacatgacaacatcatcggacttg

SEQ ID NO: 432811 - DNA, 224 bp, Oryza sativa
tggcgcccgtgcgtgcccctcccctgtttcccggtctccgccaccacgcgcgctttttcttctccaccgcatatacccccgcagagtggtgttgagttccacagagagtgagagagagcgcgcatggctctggctagggttagggttttctccttgccgcctccgcgtgtcgcgatgttcgccccgccatctttctccccgtagatcccgcctccggcgggggt

SEQ ID NO: 432812 - DNA, 194 bp, Oryza sativa
ggggaaaaaaaggcccccccttttttttcaaagggaaaaaaaaaatttcaaaaaggggtccccaaacaattaccacggccccccaggagagggtctctttgtaaaaaatttgggggttagacccccccaagagagaggggcggaaaatactaaagaatataagtgggggggtgaaaccccacggggggggcggg

SEQ ID NO: 432813 - DNA, 503 bp, Oryza sativa
  unsure (1)..(503): unsure at all n locations
acgccttctgtggagagggagaccacgagatcatcggcgatggctctgatccggcaatggggccgcggcctcgccctcgccgctctgctcgcgctccacctcgccctcgccgcggcacagtcgcctgcggccgcgccggcgcagcccaccccaaccccagtgcccacggcgccggccaagtcaccgcccgcgccggccacgcctgctcccaccgtcactcccactcctcccgttgcaccggccaaggcgccgcctgtcgcgcccgccgtcgcgcctgtcacgccgccgccaccgtcacctaagaaagcacctccaccgccggtngacgccccctgcgggatcaccttctccggagacacccccgccgttgtcgtcacggtctaaaaccccggctccggttatgcctgcgtcgacgccctcgacggtggctgcaccggccgaaagctccgcagggttacccccagcgacgacaccaccggcagtggtcgaagcgcccgcggagc

SEQ ID NO: 432814 - DNA, 407 bp, Oryza sativa
ctagatcgcgagcggccgcccatcatggggggagctttaaaaaaagttgggggggcaaaaaacgaatttcattagtttttttagtattaaaaataaacgaacaaaaacagaggaccagcctcctcgccgcggaaaggaaaggagagctccgaaaagaaagggggggaccaccaaaaggggggagacggggcaaaccccaaaaatgcaagggaaaaaccccctcctcccatttggagccaccaaagggcaaaaaaccccccaaaaaggggggaacaaaaagaaaaccccaaaaagggaaaaaaagcaaaatgggggcaacaaaaagaaaaaaagggccaaatggggaaaaaaaaaaaagcacccgagggggggcccccaaaaaacgagaaaaaaggggggacaagaac

SEQ ID NO: 432815 - DNA, 394 bp, Oryza sativa
tttttgtttttttaattttttggtgtgcatcctcaaccaatataccattatatagtatctgggtctgtcttgctcacagcaacaatttatcatgtacagaatatgctatgcaattgttcctagttgctagctggggaacacacaattcctaggaagatcaccagtcccgttcacaatcacaactacttagaccacatcctgaaggaataaattcatcatccagcaatcgggtgattcataccaccacgctttgaagagaggcaaactggagtgcagcttttcttgattgctccaagggaactgtctcagttcagttcagggatgcggttggtatatccaactccctgaaatttttgcgtatggtccataggatctcagcgcatcgcctaatgct

SEQ ID NO: 432816 - DNA, 464 bp, Oryza sativa
tttcttttcttcttcttcttcttcttcttcttggcttcttctatctacttggcaaaccatcaacgtgcccttctatttccttcttcccttcctccgagggcttctgatccggagagacagagatgattgggagcagaggcggcggcggtggcgcggcgccaaggccgaggcggcggagcgacccgggcgacagccgcgacctctccgtggccaccaccacggagtcgtacaactccgagaggtccgtggggagcggcggcggccgcgggaccgccttcctagacgccttacggtcatgcttcgtcggggggaggcgcacgctcgctccccggagacctcgccgttgtccgacgacttacatccctcacaacaggtatcacagtcgataagctcacaaggttctagcagtgggagcaattttgagatgcggagatcaatgaaaggactgtataatccaatgcata

SEQ ID NO: 432817 - DNA, 428 bp, Oryza sativa
gtggcgcccgggcgtgccccgccgcggtttcccgggggcgccaccacgcgcgtcttttcttagcggccgacctacactgttttggtagatactaaaacattccaggaactggcaggtagctagggctctgcggcgcaatgtgtatcacacattgcttacacccttgctgggctttaccaagctgagcatggaagtaaatgccctttgatcctaatgttcaggcatcttcccatgctgagagcacgtcatgcatgacatacttaccgacaccctagatgacttgagaggtctctgctttacaccctgaaatagatcgctgttatgttcacataagacaggatcgatgggcactggttggcgttgcaagacatgaactagacagcctacttatgcttggatgacttggaccgctagcagatcttgacagg

SEQ ID NO: 432818 - DNA, 412 bp, Oryza sativa
gggtaataaagaaattaggtttattgtttccatatactaaaagaataccaccaccacctggccgggcccacttccagcctctctttctctcactctctgtgactcttgtctttttgtctccgtatacatacatctcccagcatgtacagtacaatcatacaccacacccccaccccccgggccccacctgtaagcccccctctcttccttgcagtaatgtataatacataattaattaccacaggtaattaaaaaactaaatcaaataaacaccatcttttttctggacaaaactaaaaagaaagaaaaggagagagaggagggggcaaaaagaggaaaaaaaaaggttaaaagaaaagaagacccaaaaactttcaaattttggcgggccgctccgccaaatgcatgcaca

SEQ ID NO: 432819 - DNA, 305 bp, Oryza sativa
ccaatcctggaccaaaccttgacacccccgcctgcggctacggtggcgaatgggaagcacgtgttcctgccgatgcccaagatggcatacggtaagtcagacgcgttcaccgacaccatcccgcgcgcttcgaacccgtcgccatactcaacggaggctgcgacggccgccgacgaggcggatatcgcggaggcctttatggtgacggcggcagcgtaccagatgcaaaccgaatgcgagagcgacacatactgcgagttcgtcacgatcacagctgaccccgctgaccgagtaccttatgcaca

SEQ ID NO: 432820 - DNA, 443 bp, Oryza sativa
tttttgggtttttttttttttttggtttttttttttttttttttttttaccccgaaaaaaaatggtgggtttattaattttttgaacagtttttaatagcgcacaggagcaatccacaaaagcacaagtgacagcccactgggtttcccggttggcccatgggacaccagttttacaaccacaacacgggtacccgacgataaatagcgtccacgggatatggcatgccgagttgacatgaactcgttaaactttaggttttctagaatcatactactagggacacaagggggccatgtaataacacatattctgcctggctgaagaccaaagctaatccaacctcccgggggggtactggtttttagcaccaaccgaagaaatgtccatcctggggttacgggttttatttgggggcttttcggtcgaaattacatgttggc

SEQ ID NO: 432821 - DNA, 367 bp, Oryza sativa
tttcctctcgccccaagactcccgcatctgatgggactcttttaacacaccgtgggcttcaaacaacctccgtcgtcgctgtgtgtaccactaccaccgtaaaaagccaggcggcgaggaccgatccgccggaagaggaagaggaggtactggtgtgccctaccaaaacagactcgcaacacatgcccatcaacatcatcctataccagtacctctacaacaaggagctacatgttcccaaaagcttgtcaaaggtggaatcaaccccccaatgatgaccatcctcttcaatcactgctaatgctacagctgataaaggtgacaaaaactccatgaacgacccactcaagcgggtaatgccatccca

SEQ ID NO: 432822 - DNA, 429 bp, Oryza sativa
tcttgttctttctacccgtctccattggagtgtacttctctaacccggagtggggttcaagaacggacatgctgctagagaggtcctctcggacgcggatggcgagcctcagcaccgccccggcggcgctgttagtggcggcgcttctgctctcgtcgtctccctcacccgcggcagcggccgctggacgaggaggagaactcatgatgaatcattctgatggtggctatccttataaccgcactctagaccatatttttgtgcaatatgcatctgctgtgtatacctctgacttaacctcacttttcacgtggacatgcccaaggtgtcacggtcacacaaagggcatcgagattattcagataattgtcgatgtggagaaccgattacaggctctcgttggagacgcccctgatccacaatccatac

SEQ ID NO: 432823 - DNA, 280 bp, Oryza sativa
tcctcgggggctccaccaccacaccagcactgtggcgcaacacgccgctcaacacagaggacaccctctaatctggcgcgcgggcggccccgatatgccctacacacatctacacgaggaaaagcatatgggggcacatccccgagaccctgttcaaaagacacagggccacactctacgtctgacacatgtgccccgcgtccccaagcacaaacacaccacacagtgtgccgcgtagagtctacaagagaaggccccccccctgttcaaggcacacaag

SEQ ID NO: 432824 - DNA, 467 bp, Oryza sativa
acttcgtgaagaaaatggctcattgaggagaatttttacgagttcgggggcagctgcagccacttctactggggctccggacagatccgctcgtggagtgcgcagaaacacacctcaagataacgcattgaatgtctcattccacaatggatctggtgggggcacctgacagggcatgcacccaaatgcgttggactcaatgacagaggatccaaggcaaacatgtaggcaggggaccggtctttctttgctgtctaaacatggctccctgccaacgggatccgcatggaaaggaagttactgataattctgagaaagaaactgaaacaaaaaggaggttagaggatgtacacatgcggaatgaattgcttcagcatcagcttattgaactaaatgtcagcatagagaggatttcaactaacatgggaaagctccacaatgaggtgagtgtgatggaggccaagttg

SEQ ID NO: 432825 - DNA, 133 bp, Oryza sativa
ccccttccttaactttgaaccctttttgtcgccccacctagattctacattgaggctttaaatgtcgagggtttccaccccattggctgacctaatctacactacctgcttcacactcactgcccgttttaca

SEQ ID NO: 432826 - DNA, 474 bp, Oryza sativa
ttttggacacaccttctctctcatcgaggtgggttaatatattcttctgggtgctttagcatccaagctccagtttcaccgagctaaggtagggggaagggaattgaattgaaggttcttgggtgctttcttttccagttacctcccaccttaggaaccctcgaaaagacccctcaccatctcctttgtgtccttgctaaccaactccccattaaatccctctccgcgcgccttctcgctggccattagagctagctagcgagagctctagctacagctatacatacgtgtacccaacggccacggtcacccgcgcgagcgagcacgctcaccaaccgatcgagcccaacaagctcgctcgctcttggtgcgcgcgcgcgcggcgagttcgatcgatcggtgtatacgcgtatcgtgctgtgtatgcaaggcggtgatcacggaggcatggagatgggcgtggggtcgttcacc

SEQ ID NO: 432827 - DNA, 331 bp, Oryza sativa
ctaaaaaataattttcccaggggccggggaaaagggaaaaagaaaaaatcgggacccacaaaaaacgggggggcaccactaaaaaaaaaaacggaacaaactaccaccccaaatcccaagggacaggactcccgggggcccaccccaaggcaccaacggaggaaggccaaaacccggaaaaaaccccccccagggggggaggggaaaaaaaaaacggcaaccgggggagggcaggggaggacggacacaacaacccgtgggggagccggtccggccccggccggaagcccaacctccccagggggccggaacccgggatggccgggggggc

SEQ ID NO: 432828 - DNA, 518 bp, Oryza sativa
atcactatattgtaagcggggacgcccgggggtaccccgccgcaatacccccggcgacgccaccacgcgctcttcactggtgaagctgactacaaccagcggggatccattttcatccctggggctagaaccgagctccaccccacgcagataccccaccagtcccccttggggtcatcccaccgtaacacgccgagacctgtcgaatgagggcaccacatgccccgcaccaagctgacgtgctacaccttacaagctcacccacgcacaagctgctgccactgcatcaacagcgccgttggccagacaggaggactgcagccggacatgccaggcgacggcgatggctcgcatgacccaggaccaccggtaggccagcccgccgagcaagtgggaggcccgtgctggaggaggccgtcaaggggtgcacagcagcacccgccaagaaggcatctgtggcaacacccgggcaggccaagcaggcagccatgtccccctaagctacacccaactggatg

SEQ ID NO: 432829 - DNA, 62 bp, Oryza sativa
gggtaaatacccattattttttaataaggtagacccccaaacaacgcggttggataattgag

SEQ ID NO: 432830 - DNA, 68 bp, Oryza sativa
acaaaaaaaaaaaacaaaaaaaaaaaaacacaacaacgaaaaaaaaaaaggaaaaaaaaaaaacacaa

SEQ ID NO: 432831 - DNA, 457 bp, Oryza sativa
aaaaatgaccataatttctgaattgagaagcccccataaaatttgtatggataacatcatgcaggattgaacgaggaactcatgatcatttaatgtacagaaaacctgatgaagttacaacatttcctaaagcagaaggattaagaacctgtatcacagtcaaaactggaattcttggggtatgccgaataagagctaaagggcttctctgatctgaaaagtcttcaaaatagctctagctttatcatattcattcagttctaccaatatgtctttcaaacgacgagccagcccacgtgtctcttcctcacttatgcctgacatgtgtcgcctttccaacttgtttcctagttctaccacgagatctatgaaaggctgcaacttttggcttggtgaagaccacactcctttaagtaatgcagatatccgttcagccctagcaattgcataatgggca

SEQ ID NO: 432832 - DNA, 201 bp, Oryza sativa
tttttggttttttaatttttttttgttttttttttttttttatttttatattttataaaaaaaaaaaaaataataaaaaacaaaaaaaaaaaaaaaaaaaaaaaaaaaacaaaaacaaaaaaaaacagagaaaaaaaaaaaaagaaacaaaacaaaagcaaaaaagaaaaaggaaaaagaagaaccaacaacaaccaacag

SEQ ID NO: 432833 - DNA, 490 bp, Oryza sativa
cccgccccggaatccccggggacgccaccacgcgcgtttctttatcgcattgcgagttatccccgcgagccaccttaaaatggtggaggtggagctactaaacttcctcgaccagggccggctcgggaaggtgacctcctccaccaagactacctcctcccaggagaccagatcaacctccccgagagccagccagctccactgcaccgaaggcgacgtgaggcggtaccaagacgaagagcacgctgccgccctaccggggcttggccaagagacctagtagtcgccccaggccaagaaggcttgtacgccggaccgaccaacccatgacaaaagagccagaaaagccatgaccgcaaatgcggttcatccaacttaattcatgcggtcacacatagacccaactgaacacaacggatctcaaggtgcatctgcgtcccagaaaattgatcatggttccatgctctatgcaagattagaataggagtct

SEQ ID NO: 432834 - DNA, 101 bp, Oryza sativa
accatgtatttattgttttctttttttcaatggagggacagaaggggaaaaaaaggaacaaaaggaaagccaaaatactcgggacaaacaaaaaacccccc

SEQ ID NO: 432835 - DNA, 480 bp, Oryza sativa
gttgggaaatgccaatttactatacatttcctttgtgggcagtatttatccttgtcaacagtatttgaactaattacaatgtagggaggcccctaaagtccaacaaaaagaaactatttgaaattacaggcagcaggagcatcatagtcggcaatgcagtaggttcgagatgcccaggacactaaaatttatcctgctgctgaaacgatcatgtacaccaatccaaaatgcaagaccgactaacctcctgcctccagttactttcaacaacagatcaactggccatgcatcatgcgttatcgcaagctcttccatgtctatccatgaatcactgtttgtatcctcttcacagataaatattgaacggggaccctatgggtcttcagattttagttatttgggaatttacagagggtacctttttgaatatatacatacatgctgagaggggcatggccacggagagggactgtgggaaga

SEQ ID NO: 432836 - DNA, 470 bp, Oryza sativa
ccaggggtgactcaatcaaaaccgaaatttatcttttacccatccattcgatccataaacttatgcggggaccgatcgatcagttggcgagaacgttctagtgacgggttcataaaaactaatccgcaaggcaagcctcaatgataccggtacccaatttaatttttttcacaacaacttacaccggccgagcatttactgcacttaatagaagtacctgtgatcagggtgggtgatgttctgccacagcttttgacatgatatctactccgccaagttggatccacggatgataggttgatcatacttaatatacctcgcctaataggggctcttcttggcgattgctatctacaggcatggtttaatgttacggttgtaatgaacaaccagagctttatctcatttttgaccgaaaatgcttgggttggttcctaatgcaaggacatggtattaaattgtaaagggga

SEQ ID NO: 432837 - DNA, 393 bp, Oryza sativa
ctttccctgctcccatctcaccacgccactccggtcctaccccaatctcaagtgggagaaggcaacagacaccctcgccgccgcggcggacccatccggcggatggcaaactcaaagcggctcccgtactccacggtcggcggcggcgacggcaggaggacgagacaggccgactgacctacctgcacgcggaaggggacagcaacgactcggaggaggtggcccgcgccaccagcgcgctctgactggaacacgcgccggagcaccaccactggcaccaccacagcgtcgctgggcggagcacgttcgcgtttctcgccggggaccacggccgcacgtactatgccctggcggacccgacgcctggcagccccgatacggtccggttcctgc

SEQ ID NO: 432838 - DNA, 383 bp, Oryza sativa
ttttgtttttttttttttttttgggtttttttttttttttttttttttttttttttttttttttttttttttttttggaaaagaaggaacgattcccattacaacgggggaggggcaaacaaggttaagggcccacagatttttcaaaggtcaaggggggccttactttagggggcaaaacattttattggggggatgaccagcactgtttaaaggtcctggggggaaaaaattgggcagggggggaaatgaaacggggaaccccaaaccctatttgggactggctctaaagggaagggggggggcccttgaggggaggggaacgggtttccagaacctctaaccattttttaggggaaggggaaagaaaagccaaagcttaa

SEQ ID NO: 432839 - DNA, 504 bp, Oryza sativa
tcttctgctgctctgcgagttatcggtgttcatccagcatcgagagcggtggcagtggtactaggagtctaggacgagtggtgggtactggttgtactggtggtacggcggtttcagcggcggagttctcgcgggattgtctcgttcgtctgatccggcgctgggggacggcggttggtttctttttcttctgctgcttcgcgagcgggtgtgagagatcggttccatgcgggggtcgctgctgctggcctcgggccgtcagggtttgcaagcggaatctactcaactatgacagattagcctcaaaataaatgatggcagctgaggttaatcaaacttttttcgcgtggtcacaaggagaaccaactgaacgggacggctctcaaggtgtatctgtgtgccagaaaattgatcatggttccatctcctttggaagattcgaattggagtctctatcatgggaaaagtggtcagtattttctgatgacaagcgtcatgaagaat

SEQ ID NO: 432840 - DNA, 447 bp, Oryza sativa
ttttggttttttttttttttttggtgtttttttttttttttttttttttttttttttttttttttttttttttttttttttttttttttttagaaggggaagctggcccccccgaaaaaaaaacagaaaaaaggtgggactgggccctaacggaacagggaacccccccaaaaaaaacaaattttgggaaaccaagaagcaagggaccaacagggccggggccccaaaaaaatagggggggccccgggggaaccggggacaaaaaggggaaaaaccgggaatttacagggggcaaaacaggggaacttccttaggtttcccggggggggaaacccccttttcttgggcaaaaaaattgcccataccgccaccaagggaaaggcactccaggccgggggggaaagggacagcgggggaccctattgaaacggggggtttggagaaaaa

SEQ ID NO: 432841 - DNA, 63 bp, Oryza sativa
ttttagaccacaagcggaccgtccagtggaggggagcttaaatacccgtggcggccacgcaac

SEQ ID NO: 432842 - DNA, 331 bp, Oryza sativa
ttccgggtcgacgccacacgcgcgcttttaggatcgtgagcgaccgacattacatggggctacttttaaaataacgaggggccggaccatgtgccaggattacaagaacgacaacatgctaccaaaaggtgagtatccgacagaattgtttgtgctgtaacgggtacaggccttggaacctaagctaacctactgcctgattttcaatttgttgcactaactgtgctacgcgatgtcacagaacagcaatgtcacctacgaacgggagggaatctagatatgatttgtctcatgcgttatgtgctgggtcaaaaagaacccatttgaggcc

SEQ ID NO: 432843 - DNA, 436 bp, Oryza sativa
agcatggcaacagctaaaatgagaactgcttgattcagaatagtgacagcaggttacatatagtggtgtgatgcttcgtttggatctgtacagctactgactgaactacaaactagtgttttctcagggacattattctgctagtagtcagtggctaaattctgcagcatgaacgacctggtcttgccatctggtttcaacccaatgctccgcattttcgtgtatactttcctcgctaatctgatcttgcctcggagacaaagcccgtgaattaccgtgttgcagaccgaggagtctggagcgacctcctgcaatatatgctcaacttgattccaaagagatcctgatatgcaagctcttataacagataaatgtgtgaacgtgtctggtgaacaccctcgatgagtcatacgccggtacacttttagagcaactt

SEQ ID NO: 432844 - DNA, 475 bp, Oryza sativa
tatttctcctatccgttctagcgagggaccaaatttctcaccagatttcctgccgattttcccctcatgagccagccgactccctcttccagcgtgatttccagaatccctctgccttgttgagagatcatcgcaggtttcgtttgcatttgcggggcggccatatatggctgcagtgtggagcggttgcagcacgagcttcagccaagaacttcccccacaccctcgtggaagaaggggcggcgatggggcaatgaattcatccatggagcggaggagcggtcagagacgccaccacccggcatgcggaagctgcaaggaccgtggtcgccttcgccagagggctcgtgcgcgtgtgcagggcggcggctccatgcgttcttgaacccgacgtcaccggcaaggaggaggtcggcgtggcggcttggggcatggacgatgagccgtcggtcgctgatggtcaccggaggcactg

SEQ ID NO: 432845 - DNA, 93 bp, Oryza sativa
attaaaagtgtttttttttttttaattaaaaaattacccccaaagaaaaaaaaggaaaaacccaaaaaaaggtctcggccaaaaaaagaaaag

SEQ ID NO: 432846 - DNA, 565 bp, Oryza sativa
cactctattagagctatgacggggcatgcgcgcgcacgctagcgctgggcctctatagcgcgcgcgcctcgttggtcgctgcgtttttatgccaaacccctccgatttgagagaatggcctgacgacttcctgctggttggtgaggcggaggaggcactgtcaagagcagcaagctgacctaatgccgcttgaccctgggccaatcgacctggctgcaacgatcggaggtttcctatcccctcgtgaaggagtcaaatcacgtatccttgcgccggatggcttggggataattttcgtagtgagttcataatagcgcctcatttgggattcctctggttgattcagttccctttgcaagtttgcgggtttgttcacggatttggttggcttgagatcgatcttcattcattgggagatggatgatgatgactactcctgggtgcggcgcaccaagttctcgcactccattgttaaatccaactctggcagggagcagtttggtgcattccttgatccgtttgacagttccactgcatggaggcagaaaggattcagtggagagct

SEQ ID NO: 432847 - DNA, 118 bp, Oryza sativa
tttggggtgttttaaaattttatgggggtgtttatatttttttattgatttttttttttataaagtctgtcagaagtgcttttttttcccaaagggggaaaaaaggggagaccagaca

SEQ ID NO: 432848 - DNA, 431 bp, Oryza sativa
ccccggcgcgagaatccggggggatcgcacgcgtccgttttctcacccaccctgtggatagggcgcgagtggcggaggagagtggcctgcggtctgtatatctgtgatgtctctcgacttggtgaggcagaggaggagagtggggacctctgcctggaagccaaatactagtagcgcgcgcttgccacgtctggtagggggtgtgagcgaacatttgccgcaggctacgaggggaagttcccagataggatcaaacagcttccttgggacaggcagtttcgatattaacaatggcaaaaggacagggctgggaggcgcgggcagagacccctccacgagacatgcggaagctggatggacagccgtaataaacggcagacgggacatgcgcaaggacccatcacggctgcgtgtcgaagaggaacaccacg

SEQ ID NO: 432849 - DNA, 414 bp, Oryza sativa
tttttggtttttttttttttttgtgtttttttttttttttttttgcacaaaaccttttcagctggcacaagtttcaattacaggaaggaagggcaggcgatgcataaaacagctgcaaagcttgactttttttggagcaacagtttacacaggggctggaaccacaaacattactaggaataagctccaaaaattccaggggggaggaaaagaaggccctccattttttttctttaaacccccatgaaaggaaggaataaccaagggtctttacaggaagatttccagggagggttcgtcctaaaaaagcatgccggtggaacaaaccacaaatccttacccttttctttccttggtcccaccacccggaatttataccatgcatacagacagatttcaacaaacctggttggt

SEQ ID NO: 432850 - DNA, 494 bp, Oryza sativa
tttttgtttttttttttttttttgttttttttttttttttttttttttttttttaagcaaaagggccagccagaaaaatagaaatatgtccctccaaaggtaaaaaaggtagaaccctaaaattggtttttggcaaaaaaagaaaagaaagaaaaggggtatacaacaatgatactttgggacacaaggtgggctgtacaaatctgagcttcccaaggggaaagcttattgccacctgactaacccaaacatgtcacaaaatggggggggggccccgttttgggcggaagatgcccaaataacaacaggtgcaaagatcctttaggccaaagggaggtgaaaccaagggcttggatttcactgaacttccgaaaatatgattggagaaaaaaacaacacgtcgggacgctgtttttgttttgacttagggcacaatcagggaggttttatttgctcatatttttcacctatgctcccacctttttgtttttgga

SEQ ID NO: 432851 - DNA, 395 bp, Oryza sativa
gctggtcgctctcctgttctctgagggaatcctagaacaacgttctggggtggacatgtgagaaaggactccaggatagaacaccaggagcgggggctcagagctcggattcgaatccggactccctgggttggatgacctagatcgcactcgctggctgacgaagaatgaggatgcactgtgacctatgagggacactgtacttgttggtatgtgcttggattcagcgccatggaccctcatacatgagaccacgtctactttgcctacatgcacgctgcctatgggcaatcagaggctgctgcagcggcggaagcagagtaagcaacatctccaggggaaaagcagttgcggtatgatcctaactccagactacagggcccattgtttctgtc

SEQ ID NO: 432852 - DNA, 82 bp, Oryza sativa
attcattccatctaaggctatactacagagtctgatgagaaggggaaatagttcatttgacggaactaaacaaaagttgaac

SEQ ID NO: 432853 - DNA, 326 bp, Oryza sativa
accacgcgcgttttttttttggctagcaaagtcttttgcttgttgttcattttaaatatcttgcagggctttactgcccccccacttttccttgctttgtcacgcacaccaaagctcctgccttacccaatctccgttcgccttccctgacccccgttgtagtggcatcagctggctgctctcctgtcgcgtttcctctgctgaattgggacgatcttggcagctcgtaaatccgggtggaatggataagatctgtggagaatagcatgagatctttgatatgaacttcagccctcccaaccagtttccgtcggggacggagccgt

SEQ ID NO: 432854 - DNA, 322 bp, Oryza sativa
ttttgggttttttttttaccaggggggaatttaattatatttctccactggccctgccttatcataatgaagaacaggttaatcggataaaccagtccacgagggatggtgtgataatttcttccactaacatttaactgcatcactgatttaatcatacggaggttgctgatgatctgacgacgactgagcgatcgatggtagtacgaaaattttcatttctgcacatccatttcagggcctaattaacaaacggcaacacaatgcaactatatgcaatgcaagcttcgtcaggctccggggactgggactttggccttcg

SEQ ID NO: 432855 - DNA, 236 bp, Oryza sativa
tttttgtgcacttaaactgggggggggaaaccatctggtcactttatacaagccgtacatcagctaaaagaagttcacgatgcctcaagggtcaactctatgtcgccggaaaacccgggggggctccaaaaacaaattacgaccgcctacatgagacacaaattaaaattcgtagagattagtgggcccacttactattaaagttaacatttatttggtagagggccccccccccc

SEQ ID NO: 432856 - DNA, 497 bp, Oryza sativa
tttgtggttttttagttccccgagggaatacaagcagtacccaggcaaatatatttgtggtaacaaagtttttaaacatcttcgctaaaaaagaaagctcttaaagacttaaacatttggatagatcgagtttcatgacggactaatccggtttaatttgaagcagcaatcagctccagcctccagacagtgtcaagactgtcagttaccatactcaagctgcaatttgctccaccaggttttcaccggactctgccacggtattaccctcagatggcttctccacaattgaagccttggcaacatcatctgcattcttgatgtcttccaggatgcttgagctccactcagaaagctgcttcacacttggcttaataaggcttaggacaggggggcccttggggatgtcttatgatgacagggtcctcaaaggcagcggccagctcctcggaaggcactttgagccaatccttcttttcaatgaaatgcactgattt

SEQ ID NO: 432857 - DNA, 431 bp, Oryza sativa
acgtcttggaccctatttagcggccccccctttttttttttggtgctataagctctgggggtactataaacaatgaacttatcaatttaatcatcctaaaccccaaatataaaaagggggatttgaggaattattactagctgcccaaaataatttggaatatatatcatcaatacaatgctagaactaagattcttttattctttcctaaatatgatcatgtggtatgggcaaagatgcctgcgcatccagacactcattctgatggactgaccgtgctgagactacgacatgttaacagagtttggccttaacgctccctgaacagactcaatgtctgactgagtacgccatgttcacgtccacttcagcacattcctagcactctgctgcttttctgcagcactcttcagggggggggcatcaatttg

SEQ ID NO: 432858 - DNA, 399 bp, Oryza sativa
cttgctacagtaaattccccacccttgacccctttatactcctcgatggctgcgacctcctccccagcggcgggagggagaggggccgtgccgcgtgccccaaccgaagcacgccagcggacgcgtggcgcgtgccgggcatcttgcaccgtccccagctgtagagaggcgacccaacttggagacggcccctggaacaccaggcgcaccagcgacagcggaagcgacgaggttacggctcgcaactgctatggggactcggatactagccgaggcgacagcagccgcgcagatccaacccgtggcggaagccgcggcgcggatcacctccgcggcagccgctacgacctggtagaggaccaatgtgacggcagccgagcggatccaacccacggtggc

SEQ ID NO: 432859 - DNA, 302 bp, Oryza sativa
gaacaaattcatcaattttatcccccaatcaccaagaatcaacttacagtaatgttgtcatcttctttttacatgagagtttctccaaaatttcttctttttttttcttttttgaaatgtaaaagaaaatatcagaaaagaatagtaggaaagaaagaatgaacacatgtgtacgctccggtgatcggcgaggcgagccaatgcatctcggagctccggggagaaggatcagttcgccggcggcggcgtcttgggcgtcttcggcggagcgccggcgagcccctgctcgatgtcgccgccgc

SEQ ID NO: 432860 - DNA, 308 bp, Oryza sativa
aaaatcagaagaggcatattgcatataattaagttaatttcagtgacaatattacaacagtaaacttctcatgcagaacaaatgctccggccacacagccacttctccgctcatctacaaatttaacactgtttcacaccatgcatgacaaaaaagacacaaaagcttaaattcttgtgttttcctcctcttgcatacatacatacatacatgtacacccataatttaatcaccggttacgttcaaacatacatacacaccaataccgtaaatatcctttggttttattacaccgaattaacccacca

SEQ ID NO: 432861 - DNA, 422 bp, Oryza sativa
ctggggggaaatcaggggggcaaactggagtccattgggaatcaccaaaaccattttcacacactaattattggccagacacttggatcactaatgatgcatccgccgattgggaatcaaacgatcgaattaatcaggataaagcctttattattcataaaaaatcatgaaaaggccacccctaaaataaaattttttaagagctagggactaaaataatatttggggggggggattacaatggcaataaatatcattatttttgggaataataacacgtaacgacttttacctcggaaccccaaacaagtagcccaccccatgagagcaacctactggtacccttttggcctttacgggggtcggggtgcccggcccaccaggccccgggttttccccccccgccccggtcaaaacccccc

SEQ ID NO: 432862 - DNA, 330 bp, Oryza sativa
catcctccctcctcttttttttcccggatcatctctttcagccgatgggagtcggatcttctccaccccgcgcgcgccatgggcaagaagcacgccgtcgccggcagcggtggcgggtggctcgccgtcgtctggaaggtttccgcccctccaaggacgccgccgacaagaagggtggcggcggcggcgatagggaggaggaggcggttgcggaggctgcgcctgaggttcttctgctggagcatttcccggtgggcggtacgttcctcgtcggttgaggggacgggcaatgatcagggtggcacggtggtggggaaaggggagggtgag

SEQ ID NO: 432863 - DNA, 343 bp, Oryza sativa
tttaaatccgcgatcaaaaacaccaagcatagcgtggttagcccacagctgggttgctgctgtccccagcaccacccaaaaactgcagcaccaaaatgaggcatcaacagcaggatcgtaggctcaaattgagtatgagttctttgggccttatggaccagcagttctgttattggcactgccatgcgtggtcctaggactggtgtacgcctgcaactcggagggctgtctgcagctgtcgcagctttttcagctcccgctgtctcagtggtccctggcactgctgccaggtttcccatcaaaccaaccgctgtacagtcatgaggcgatggcagctgtggtg

SEQ ID NO: 432864 - DNA, 464 bp, Oryza sativa
tttggtgtttttttaattttgggggttttttttttttttttgaagatccggggagttttcaatttcattcacaagcctgccaaaatggagcttatagctcagtttacatgcagatgctttcggaggtaaagaggccaaacttggtttttagccccccaaaaccaaaacccaacacatggcaaactagcaattgcatcatcgcactcaatcaggtcatcgttgccagtctactaacttgggcaacgcctatgtgaaggcccaagtagtgaagcttacaccaagaataactagctggagctcacatagggctccaaaatgaggcctggtaactcaagggttcatcatcggggggtacccttcacacggatcattttcaacaggttactggaagctggactcccagaggccagagcagcaagatgcaaaacatagggctctggtggctaattaggtagctacatatt

SEQ ID NO: 432865 - DNA, 351 bp, Oryza sativa
tcgcgtttccgccggcccactcgctcactgcgccgccgctcatcggcgcgacgctccggcggccggcgctcgcgggctccgagccggtcgccgcctccctctgctctcctctccgtcgccctctcctcggccgccccctccggtgctccaccgtcgccctccctcgctccggcagctcacgctcgggggctggccgccgtcgccctctccggcagggttcagaattgcatttggtacgatggaagagggcagcaactattatcttgtcaggaagggggagatggtagctgtttacaaatctttaaatgattgccaggctcaaatttgctcatcggtatctggtcctgctgc

SEQ ID NO: 432866 - DNA, 145 bp, Oryza sativa
ttgggggttttaaaaaaaggggtcactaaaacttaaggttaaataccaatcgcatatttcattgtgcgtcaactatgcggcctacatattgtttcaccaaaaaccattcctcattgatctggtgcttattggtttgtaatttaga

SEQ ID NO: 432867 - DNA, 262 bp, Oryza sativa
tcttatgatcgtgagcggccgacctactatcggtggtttttggacgattgtttttagcgggctaatgctgatcccgttcgcggaaggtggctatgctggtggagcgcacaagccgaacaaaggcaatacgacctgggaaaagcacgccgaacgaagttgggcgcgaacccgaagccggcgccgtcctctgggcccgccggttgaactagcgggagctttggcgcagggccggttcggttgatgtcgtttacgcggaggatga

SEQ ID NO: 432868 - DNA, 161 bp, Oryza sativa
gggggggtttttttcttgctttgccggatcttctccgtgctgtgctgttgtctccttttttttcggacacaggccaacgttccggggaggcgggggagttgggagcagaggcggcggccgtggcgcggcgccgcgcccggggctggcggagcgaccccggg

SEQ ID NO: 432869 - DNA, 314 bp, Oryza sativa
ttttgggtgttttaaagaacgggggtataaacctgaaaaaaaaatttcaactgtggttttctcattgggtgaatcattgtacaaatgaacaaaaggtgagctaagaaatggtttcctttttctttttacagattttttttttctgacgagtaggactatcatacagcgctatggcagaggcttgatttccattgagattggctcgtctccaaccatgccaagaatctggagaccttgcctaagacgctgaggaagaccaggcctgctactaggctttacccctgcacagagactgcgccgtcctcaatggggac

SEQ ID NO: 432870 - DNA, 152 bp, Oryza sativa
ttttgtgtgaattaaaaagaatgggctgttcatactgaatcatatatcgagttaccaatggagtgtacatgaatgccaccatgtggcttctgtgagcgggaccacaaaagacacgaacttgcagttgagcctatgatagattgatagtgtta

SEQ ID NO: 432871 - DNA, 338 bp, Oryza sativa
gtccttggtccttacactctttttataggggcgtgggtcccacgtctcagggagagtgagagaagctttttttttctacatctgagacgttcgccggagatggcgtctgagctcacgtaccgcggcggcgcgggggccccgctccgcctccgacggcggtgagtactcccccaagccctccaagccgctctcctggttcacccgcgccgtccgttacgccgtcgccgagcaccgtcccgccttcgccctcgccgggatgctcctcgccgacggccttttcttcctatacgccccttccttcgacgccttattcttcggcgtcaccaccaccaccacca

SEQ ID NO: 432872 - DNA, 418 bp, Oryza sativa
tttgtggggtttttttaatgtttgggtttttttatttttttttttttcggcaaatttttttcttgattcaggacagggtcgcaccaaaacacttgcccaaacactgaaacacaatctaaacctgaaatgaaatttaaacaaccgcaagaagaaaaaacttcttttccagaaacttttattttcgcgaaaagcagcagttagcaacaccgatcgatcacaaatttattggtgaaatttttgaagaacaccacatcagcttctaccttaattaggtggttgccacttgatccccataatccatgggggggaggtcaagcttagggtgggcgttccttttgttgacaaccctgcagttgagcctgacctcgccctgggtggtcccggttttaaccttgaggccgcccattttaaccatggc

SEQ ID NO: 432873 - DNA, 56 bp, Oryza sativa
ttttaatatttagcaccaacccagaagtgattcatgcaggcttttatcgctagaac

SEQ ID NO: 432874 - DNA, 412 bp, Oryza sativa
gaactgcgccatgagtggccaaaagcactaatcaaatgttaatctctggcacttcatcatttttcggttaaaaccgttaccaccaaagtgccagaatttgcatcaaaaagacagtgatgctctacttctgttgacaatcttcgtcccccccaaatcagacgcagctgttttcatctcttcttttgagggggtctagtactgcatgagcaactacaggatgcatacaaactttgatcgccgccaaagttgttgtttacaatctttgaattgttttggatctacccaaattacattctttcagggtgatgagttccatggggccagtctttttttcaccgggctttttttcacatcctggccttttccaggatgaacttgccttccttgaacttttcgctcttttcgtatgctt

SEQ ID NO: 432875 - DNA, 342 bp, Oryza sativa
tttgttgtgctgctcccgcggcacggcgacgggggaggccccttgtaggcggtgctcaagtgccgccggtgccgcgttgactccgccttcggcgacgccattctctcacgggacttccgcggtcgtcggccgcgcctaccttttcgaccacgtggtgaatatatccttagggcctaatgaggatcggtatctgaatgaccggactgcatacggtgaaagatatctactgtagctgttgccagcaaattctcggctggagatatgagaaagcatacgaagagagcgagaagtacaaggaaggcaagttcattctgaagaaggccaggatgtggaacgaagccc

SEQ ID NO: 432876 - DNA, 391 bp, Oryza sativa
ttttggggtagcacatgtcacattcaattttattagctctaactcacataaaaatgcaatttatttgaacacgaataatgtccaaaattagctcttgaaacgaagatcactaccatcactttgcaacttcgcattcatcttccatcatcgataatttctctgttaatctctagggaaggtgtgagaggggatgtctccctctgcccactgagctcatcggcagtagacccggagtagccggtggtgacatggctgctattccttcccctgagctgcaactcaatgatgtagttcggctttggcaccacaattactcaccggaatgtcttcggtgagcattggccccacccttgacattggtggtctttggtgtggtgagccttgggtgcaa

SEQ ID NO: 432877 - DNA, 349 bp, Oryza sativa
tcgctgctcctctccctcttccaccttcctcccgccggaacttgtcgaaacctgggacgtgagccacggaggagggggaggagaaccccgtcgtcaccgaccgatctccccgtgcggcgccgggcgggggagcggagcgggagcctcgaccgagccgatccggacaggggccaccagatacgccccgcgcgagcgccggcgccgagcgcccaggcggcgttagatcccgccgcccggcccccccacccttccccgtggcatgcaaagggatcagaggcccacggctatagagtgatacatatatcctggggctgtgccttacgggcctccggtcctgcttagttagagg

SEQ ID NO: 432878 - DNA, 396 bp, Oryza sativa
tttttggggacttgtatatttggggagtaatatattacatatgaacctatcatgtcaatttttttaaaaattctccataattatttagatgacatgtatgaaacgggtgaatgtccaacgagggtttaaaacggtttcccgtcaacacctgatgcaggagttcactcaatcaaacaagaacaacaagtggcataaaattactcacactgactatatccgatttcttagccggacccacaggccgcccttgatgttcatcggtgccgtcatgttgtacgccggcggcgattccatggtcggagccggcgccgccacctcgacgctgaaccttcgttgaatggctggcggcaccgtctttattggcacgtacgccatcttcttcccgaggcacgccct

SEQ ID NO: 432879 - DNA, 345 bp, Oryza sativa
gttattttgagaaaccatggagaccgcgcatctagcctacgtgctcctcttcctcgtcaccgccgtcctcctcttccatctccggcgaggcggccggtcagctccggcgaagctcacgacggcgcacgcccgcacccgaaccccgtcctgggcaacaccgtcgagttcatccgcaaccggcgccgcttcttcgactggtacaccgacctgctgcgcgcgtcgccgtcgggcgccatcgaggcgtggggcccgttcggcgccggccacgcggtgaccacggcgtgcccggccgccgtcgaacacctcctgcgcggcaacttcggcaactatgtcaggggggcgagc

SEQ ID NO: 432880 - DNA, 521 bp, Oryza sativa
aagtggctgatgctgcgcgggccacagagcttcatgaaagtaatggtaataatgatacatcgaactttcaagaagaaaccacacaatctgacacctatcttggcgatgctatgctaaatgaaaatggcagtagggattaccaacttaacaatagtggtgctgatgatgatgaaattccaaactctccagcgtttgagatggaagatgtcgacaccagagcgttacatgagacttctcacgatgaaaagtatgaggcagaggatgatcaaatgaatggtaggaattccagtccttgtgatgaacatgatgaggacaactgcaactctgtgattgagccatcttatttagatgtgatggagcatgaaaatccctggtaccaaaaatggcatgttgacaccaagcaatcaatgggattttcctcctgaaagttttgtaagattggaaaaagggacaccatcaccagacaggatggtcttacttccagttggagggctccttggactcattcacctaaggaactg

SEQ ID NO: 432881 - DNA, 63 bp, Oryza sativa
gaaaccggggaaggcccccttccgaaggctggaaccctattttttggccgccctttttttttt

SEQ ID NO: 432882 - DNA, 100 bp, Oryza sativa
tttttgggttcattaaaaggcgggtgattttcaaaaaaaaattcaatacatttatcctcgaacactatctctgattagcattatacaatttaaactcgga

SEQ ID NO: 432883 - DNA, 343 bp, Oryza sativa
tgtttttgctgtgggccgggcttagcaattggccagaaggtactgctggatataatgttcacatggctatatatgtgttaccttaataattactgatctatctggagatctaacatgtgtatatagagaccaatagatgcctagctgacattaactgtttgcgatagtttcattcaaacgatcgaactacaggcattgacgtagtacacaaatactgaaagagctagcttgtgcactattgtgaatcttgattaccatataagaactttagactgagaagaatttgtcctatgagtaaaattcaggtgagcgctggacccgaaatacaaactgtaagttaatg

SEQ ID NO: 432884 - DNA, 467 bp, Oryza sativa
ggttagctggtcatcacagtacacttgtgttcaaaaacttcctacaacgatttctgtacacatgattgctgaagcttaagaatagtccgaaagacctcaaggacacgagatggattttcctccgttcatcagaaacccgaatttttcagtgttgacggcgttctgacgctgggacatggggataagtacactaatcaacacaggaatagctgagaagaaggttcagggggccacaaacaacagcaaactctctctatccaatgcgatttcttgtgagctgtgacatgccgagccaagcacgagacggtcagttcaggctcggcccaggtctgtcgtgtgaggccggctctgtgtcagatactacttgtgaaactgaaggctcgcatctgctgttgatcatgggattcttgggcatggctatctgtgaactgtatttggttagcattgagacaacctgattcatggta

SEQ ID NO: 432885 - DNA, 340 bp, Oryza sativa
ctctctcatctcctctctctctctctctctcttgtttctctctctctttctctctctcactagacccatctctagaaagataaaggagctatgaaagaaagctctaaaaaaaggccatgagaccttaaagattgacctgagatttgcacaggaaatttgcaacaacaacaacacaacgagatatatcacctcgatatatatatctgttgcaattgcaagaaaaattcttttctccccttgcaattattctgtgctcatctcaatcaagctagcatgctgagtagaggaggggagttgaagagctcctccttggtgcagcagatggtgtgggttggcacgg

SEQ ID NO: 432886 - DNA, 431 bp, Oryza sativa
acaagagaatccatttatttagatttttctaggaaaaacatttgctctttgtttaaggcgactagcaatccattgttgtgtgacaatcttaaagttattggcaatgacaggatcactgaaaatagagtacataggtacaatttcataatgtacaggcaccatattatccttaatcgacgcagcaaaagtatcccaatccaaaataggtccatcagtcacagcagataaatcaaattgataatttcccaataatcctgtcttctgcatatacttatatgcggatggatcccattcacctccattcacttggatattcactactgtatttgctttcaccacatcactcactgctttggtggaatagcctcaatccgattttgcctccaaataatcctaggaaacttcaacttgattgttcattgaattgttcg

SEQ ID NO: 432887 - DNA, 341 bp, Oryza sativa
  unsure (1)..(341): unsure at all n locations
tcgtacctttttactctgcttctgacgcttattaatggacatatcaatcctgtacctggatgggagcatatgttagctggatatgatattcgtaacgcatcttctatcctagatggtgttaaattcctatctttgaacccacttatacctttggacaaaaatattatccacccaactctacaatagcctatgatgtccctgatcaaatgatggcttatgctatttatgaaacagatgtccttactactacagacatctaccaagacatttctgccatgttaactgangaaaccgaaagtgtctcttttggtattggatttagccttggtgcttggggtatt

SEQ ID NO: 432888 - DNA, 293 bp, Oryza sativa
ctctctctcttatcatgcaacacccacacatgcatatatccatccatccatctatccccttatcacatttaattcttcttcatatataccaatttggcaacagctaatgattctttttttatttgaaactctgaatgaattgatttagatgcatgcatcaatacaaataattgatttctttttatctggagctctgaaattgatttagatatgcatattgataaaacaaaatttgatattcatctgaaactctgaattggttaagatgcctacacataaatgttccattttca

SEQ ID NO: 432889 - DNA, 75 bp, Oryza sativa
tttttgagagatcccgcggcgcgcgcgcgcgcgcgtgcttgtggcctctatttttgcgcgccccctttttttttt

SEQ ID NO: 432890 - DNA, 332 bp, Oryza sativa
ctccttcgcgcgagcgagaagcagactagccgcggtggagatgtggagctcggattccgaggcagacctcgccgccgccgccgccatgaccaccaccaccaccacaacctcctcctctcatcctcctccccttcctcctcccctcccccgcctcgccctcgccatcgccaccaccgccgcgccgcccgcaggacccacccggtggaggccgaggcggccgaggaggtgtggcgcggcgcgcagtgggaggcggcgtggccgcggcggacgaagccggtggtggtcgccgaggacgagccgccgagcggcggcgtcatcgtcggcgcgtgcac

SEQ ID NO: 432891 - DNA, 81 bp, Oryza sativa
tttctgcatatctagtctagaccaacctgaaggggaccaatttataggccaggcgcggcgaggatccgagaggcgaggaga

SEQ ID NO: 432892 - DNA, 429 bp, Oryza sativa
acagccaggaaaccaaactcagattactggttgccaaccagacagaattttatgcacagagtacaggaaatgctggggggccattctgtaagaggataaatccaggcaatggatgactacccagcagatgactactgtttgttcccccaactaatgtatgagaaaaggcagtacactcatcgactcatcgggggggaggatattgaagatatgttctccaaggccggatgacggattaaccaaggcgaaaaaccgagggaaattcagtgcatgaagtacaagagggagatgatcagattactgacgagatcatgcttcccatcctatgagaacgggggcccgagcaacacggttgacaccgagggtgaaggggcccatgcggaggccggaggggaggctcttgtacatatgctttaaatccctggaccc

SEQ ID NO: 432893 - DNA, 479 bp, Oryza sativa
gccgccctttttttttttttggtaatgtttctggaattgttgatctgcaagtgagggtcagccagagttggtagacactgcacggccactgcctccctctcctcacctaaccccaccacagagcgggatgagccgcaggcaggaccagccttgacgccacccaattgtacccctccctgcactcctgcaacgaacaccggcttcaagccggttggcagtgccaaccgagcagacagcagcagcagcaggcttgcttgcacccaaagctcggcaaagaatttgacagcaaaagctgccgacgcaccctgtgccactcagccacacaagctggagcagcatcacccaggcttggcgtgcttgccactgcccacacacaccacgtgctgtacaacacaacacgtcagcgtcaaagaatcaggtctggacgctttccacagacatgtcgttttgttgcagccccaggcgagcgagcaaaacac

SEQ ID NO: 432894 - DNA, 341 bp, Oryza sativa
atgtatacactacttacacgacttacagccactgtttcgaggagtcctgagtctttggctttgacccttttgtagtcctcgctcaagccaagctctgaacggctgccgaacacgcacgttgccactgtggcctagtgaaaacaatgatggcagcagcactgcgcacctctgctcctgctgggccctggatcaacagagggcccaaaagagcgtcaccccgggtcccgctgcacccctgcagtgccaggcgccctgcgggcaggctgcccaccatcagcactgctgccagcaaaggggattcaggtgacctgcctggcctcctgaatggcagcaagcccttt

SEQ ID NO: 432895 - DNA, 345 bp, Oryza sativa
gtcttcgccacccgcagtggcaggaggtcgccgaggtcgtctcctcccgcgacggctactccaagcagcccaagtccgacgtccagtgcaagaaccgcatcgacacgctcaagaagaagtacaagtcgagaaggccaagccggactcctcctggccctacttccaccgcctcgacaccctcctcgcccccgtgcacaagcccgcgggcgcctaccccgccgccgccgccgccggggccgcgggcgcgggcaattccggctccaactccgccgccgccgctaccgccgcccggagcaccgcgcccatggcgccgcgcgtcaacttcccgcagcgcacgcgcacgca

SEQ ID NO: 432896 - DNA, 341 bp, Oryza sativa
ttttggggtttttttgtatgtctggttttttttttttttcttttttttttttttttgacaggagcacagttttttttaaaaaagtccccgattcataaagtgtgggagggtcaggagttttgaccggcggggaaatattggggaaaaattactcaaaagagggttaaaacagagggaaaggcattcctaaaccaaagttggaaaggggaaaagctttctgaaggaacgcgggggggcgcgccatccacggaagtccagaccctaccaagggtgggctattttataaacattttgggttatgagccccaaggcccaggtttgcctgccagttcgaaaagggg

SEQ ID NO: 432897 - DNA, 405 bp, Oryza sativa
gggagggcccatttaaaattcaactaataacagatccaatcagaatacaacagaattcaaacaatatttcatttaaaattcaacctaataacaggaaatttgaaaacagaaaacaaagcaattttttaaaacattgaagggaaacactccttggttttgggcctccactcatagcaaaaaggggatggaattacataagggcctttttggtgaggggcaaagggaatttttgggtacaacttaaacatggcttttggagatgggcttataaaaaatttcccaattaccctaatataaggttatcaaccatttagggcccgggatcttaaaatttatttcaaccatttaccggttttgagctgcaaattggaaacttccacacatccaaagaaccaacctggaaaa

SEQ ID NO: 432898 - DNA, 346 bp, Oryza sativa
ttttgatccagccattccagcttgcccgtgcccagccaccaggcgtgcggcgcgccgctgcctcctccgtcgacgcgcgcgcggccgccgcctcctcctccgtcgacgcgcgcggccgagagaggcggcccgggcagcgacggtgctgggcggcggggcggacggaggtggcgccagcgctgggcggcgggtcgagcggaggcggcgaaatccgtggctggagaaagggagggcccgggtggcgacggcgctgggcggcggggcggatggaggcggcgccggcgggcagcccgagcggcaaccccaccaccaccctcatctccgtcactctcccacgacgggtacc

SEQ ID NO: 432899 - DNA, 350 bp, Oryza sativa
ttatggctgctcctccccctccgcctccgccgccggccgtcgccggcatgggggagtcgctgctcaccgcgctctccatggacaccaccacggcccaccacccgcaccagggccccttcacgttccttccatggacaccgcctcccacgacgacttcgacctcttcctcccgccgccgccggggccgttccgccgctgcctccatgccgcggccgccgccccccctgacatcaacctccccctcgacgccgacccctcccctccgcctccggctctgcagtccggcgccctccacgaccccaacgtcgacatgcttgatgtcggcctcggcggcccgcagctttacgact

SEQ ID NO: 432900 - DNA, 341 bp, Oryza sativa
gtgatgaaggagagctctgctcctccgccggctgctgttgtggcggcggcggcccagggatgacgagagggaggggcggacaggtggcacgctggtgcaaaagaggagcccggacggcgacccccggccgggcccgtgcacaccatacgcgtcaaggtcaagttcaacggtgtctaccacgagatctacatcaactcgcaggcgtccttcggtgagctgaaaaaacatctgccggcgccgacagggctgcacccggaggaccataagaacgttcacaaggacaaggagagggactccaaggcgttccttgacatggccggggtcaaggaccgatccaagat

SEQ ID NO: 432901 - DNA, 109 bp, Oryza sativa
aaaagagggaagggccgcttgggggttggaggaattttcaaatttgaaactttattttacctcaaataaggtctcatttttttcccgtttttttttaacgggagtattg

SEQ ID NO: 432902 - DNA, 59 bp, Oryza sativa
atttatgcggccccactctattttttcagaggtattttaaaatttggcgtttcacaacc

SEQ ID NO: 432903 - DNA, 136 bp, Oryza sativa
gcggtcacccaaacgccaatgcacaggggggggttttttagaacaagagcggcgggaaacaaaccgcgaagcaagagagaccgggagaagagcacagaaaagcaaggaccgcaggcaccccatagcccacagacaa

SEQ ID NO: 432904 - DNA, 500 bp, Oryza sativa
gggaaaaaatcacaattagtgcacatccattgccttaagatctggttacagcacacgaatacaacatagcatcccaaaagccataattacacttaaaaacacctcacatcatgagcaacactgaacatgacaaaaagatcagctgtaccactaggaggaccagcaaaatatacacaagaacggaaagctgtatcaagaactgttgagtgttgaaaggcttcaaaacaagaccattcacacttccttgagacacaaattactgaaagcttggatagagcaaaaaggctatatggggaaaactttgattcacatgtcggtgtacatcatattgatcttttaaacatgcaagtccatgtacagcgcatataataatcctgcaaccatgtatagattttagttgtcccgattcgcaaaactgaacttgtttttgtggatctttgctggacactggtgagttcaccaaatgctctctcgagtaaaagcagaagcttggatcagat

SEQ ID NO: 432905 - DNA, 344 bp, Oryza sativa
gatcctgacggcgcggtctccggcggacgattcggcggcacgcaacgcaaccctccctctgtccctccggcgtcggtcaaacttacgtccggccaggacacgcccgagcagcggttcacgcacactatcctgctgaccaacccacccggaccggcggtgacgcgtgggcccccgagcccacctgtcatgagaggccggtggggccaacgatatactagtgtaaaatatattcagctcgtcggtgtcgtcgcttaccagacggctcgcctttctgtgtcccggtcgtgggtctccgctgcctctgttgcttctctcttgccctcctgtactactactaccagcag

SEQ ID NO: 432906 - DNA, 230 bp, Oryza sativa
ttgttccatcccctcccccgccggaaaggggggctattaaactcgcggccctctagcccgcactcagggagaacctgggcggggctcagcgcggttcgattcgatctcctggcggagatctgcccgcactcgcggaagaaaagaatacgacccatagagacctctgcggtcacgggcccacaagggaagagataggagttgacgccaaggaacccccgacggataccacg

SEQ ID NO: 432907 - DNA, 412 bp, Oryza sativa
ttttgggttttttgaatttttggggttttctttttttttgtttttttttttttttttttttatcgaaacaacctgggacattgggaaactggggctgggtgggaaatgctccatgggtgccgcgctaagcatgggcggacgggagtggcttgcggaaacaatccactggtaggcaagtagtaccgccacacaccggggcaggggttctctacatgggggccctggggctctgactgtccttgggaggggctgaaacccaaagggggccggggtgttggcgcccccccataagaaaggtccccatgacgagctttacaaaaatcaacgctcaagcccggggtggagggccccgactggacctcagggaaaccggtttttttcccctctacggtggctagggcggtttgcccaa

SEQ ID NO: 432908 - DNA, 484 bp, Oryza sativa
tttttggtttttttaaaattttttggtgtttttattttttttttttttttttttttttttttttttttttttttttttttttttttttttttttttttttttttttttttttttttgggggaaaaaaaaaacttgacccccgggcctcccaattgggggggaaggccccttaatttaaacaaagggggttttatattaaaaaaaaaaacctttagggaaaaggtttttaaaaaaaacccccccaaaaaaaaaagtggggggggtttttttgtaaatataaaaaaaaagggctaaaaggcccccccccccccaaaaaaatttaaaacccccggggggtttttttttttaaaaaaaggggttaaaaaagggtaaaaaaaaccttttccctttttttttgaaaaaaaaaaaaaaacgcggtattttttaaaattttaaaaaaaaggggaaaaaaacccttaaaggaaagggggtgttttaaaaattt

SEQ ID NO: 432909 - DNA, 335 bp, Oryza sativa
ataccgtgaattgccttagtctccaaggagaacttggagacaataaacctgcatgatatagaataaacccaatcatctctgagtaggactcggttaatcaccagtccatgaggagttttccataatatcttctagttttccttatcatatatgggaatatatcgtatatacgaaggtataccatatccgtatatttcgtaattcataggaaaggaggtatgccttattcataaccatgacaatttccattggcatattttatttatgttgtagcaggcacccggaacaaagggttggcctcctatttaaccaagacatggcctcgaacgcctaac

SEQ ID NO: 432910 - DNA, 451 bp, Oryza sativa
ttttggtgttttttatatttttgtttttttttttttttttttttttttgggaaaaacaaacattaggtactccaaaaagggccaaggttcccaggacctcatttgaaattttgaatagacgcatttgcttcaattagtaaaccaatataaccactgatttcctttggcacaaaacaagggggagcttcaatttatggcccgatttttggtgaaaatttttttacataaacccaacttaacacataccctttttccgaatggtgttaattccaacccacgaaaatttcaaattttttcaccgacccataacaaccgaggcattaaaacttactttttcactttgcaacggcactagggcccaatggggcccgagcatctcgaccctgagagtggtcaacccgttggtagccaaaattaccacctcgtgatgaaccacctttaccaacgcctt

SEQ ID NO: 432911 - DNA, 343 bp, Oryza sativa
ctcaccgcgactccgcgagcgagagaggaggcggacccctctgcacctccccgcaaaaccctaacccctcctcctcccacctcccgccacgccaccatggcctggcccccgccgtcgccgccccgccgccgcccccggatcgccgacgtcggcgcaagtggtggggaacgcgttcgagcaccagtactacaacatcctgcaccagtcgccggatcccttccaccgcttctaccaggacgggagccgcatcggacgccccgcctcccccgccgccgccgagatggacaccgtcaccaccatggaggcgattaacgcgaagatcgtgtccatggacatcgcgcgg

SEQ ID NO: 432912 - DNA, 53 bp, Oryza sativa
tttggggtttttttttaaaatggctctatacttatcacacgaaccatataaac

SEQ ID NO: 432913 - DNA, 115 bp, Oryza sativa
ggttaacatcatcatctaccatcctatgtgaatatgtttccattgatataggggggggccacagaagcacgccaaagccccaaaaaaaaaaaaatgtaaagctttttccacccac

SEQ ID NO: 432914 - DNA, 78 bp, Oryza sativa
atcgtttgcggggtttttaatctccgggggagaaaaaagagttattcatttagctgggagttccatactatacaccca

SEQ ID NO: 432915 - DNA, 284 bp, Oryza sativa
gtaatatggacaaggccaccatgcttgatgattagggagaacttgaaagagcaaacgggtcactctgcgatgttaacatttagctgagttatttatttactggagtcctatttctctcttgaaccgcgaagagattccggattcgattgtttagtcttctccttcccctgtactgcggtcgtccgaatttatccacgccccgcccgctcgctcgctcgctcgctctgtgagccaacacagacatctcaccttattgcttttctagcgtttttttgctcaaattt

SEQ ID NO: 432916 - DNA, 147 bp, Oryza sativa
ttgttgtgtttttaaagggaggggactaaataacacctactactaataaaccataacgaaaagaggggaacatacaggctatacatgaaatagcgaacaaaaagacacggaacttgcgatcccataaacaccacgcaactatgtcga

SEQ ID NO: 432917 - DNA, 126 bp, Oryza sativa
ctctatccgcataccctgctccttcaccccctgtgggccactttaataaccgggggcggttctaaaactccctgcctccgaatgcatggaccacagtaccaaccttcatgcggcgatagaatcgct

SEQ ID NO: 432918 - DNA, 51 bp, Oryza sativa
tgggttttttacaaacatgagcatttatcatatcatgaacaattacagcat

SEQ ID NO: 432919 - DNA, 125 bp, Oryza sativa
tgttatgcggccgccctaaccacattctctccgtgttccttttttaaaacacaaggggccaaaacgacaaaacttcatttttttgaatgtttgacaaaaattacaaattcttgaatgcttccctt

SEQ ID NO: 432920 - DNA, 274 bp, Oryza sativa
ttgggttttttatttttttggttttttacaagtttcggggatggaaacaaaccacccatttgaacgagctttatcaagatggtagcaaaataaaataagtaatgtggcttaaacccccacttagtttacaggcaccggtgcaacttatacatcgtctctctgaaaagaccaaatccaacgccatgtaaacggagtgacagcccctacttcaccggaaggcaattgataccattgggatccaaaaatgggtggcattatggggctcaaggagaat

SEQ ID NO: 432921 - DNA, 85 bp, Oryza sativa
ttctcatatcacatactctccttcctcttcctgtggtcacttatttatcccccgcgcgcgccaccgtcgtcgccatgtcgggcaa

SEQ ID NO: 432922 - DNA, 315 bp, Oryza sativa
gcgcgtcgagtgttcacctcgtgttgtaaactgtttatatagtcatcatcatcatgtatttccagtgtgatttgagtaattaattgacagatttgcttcaagaaaaaaaaaaaaaaaaaaaaaaaaaaaaaaaaaaaaaaaaaaaaaaaaaaaaaaaaaaaaaaaaaaaaattaaaaacaaaaaaaataaaaaaaaaacaaaaaaaaaaaaataaaatactccaaaaaagtaaagggggtgacaccttctccttccaaaccaaaggcggggggtaacccccacattatttgatgcccttacggttaggatttccc

SEQ ID NO: 432923 - DNA, 272 bp, Oryza sativa
ctcttttttggttttttttaaaattttttttggtttttttacccttctcttttttcctcttactcattttttctttccccttatattctttccctttttcttccttaccaaccttacctactcaactccccacaaaccaattgttccaaaaaactcccataacccccctaaaacccccataaacaccccccctaaaaaccctccccccacccttgcccccccccccccccccaaaaaacggcccctcttaatacacccccacacaacccccc

SEQ ID NO: 432924 - DNA, 333 bp, Oryza sativa
gtccccgacattctttttttcgaccgctccgggaaccggcgagactggtgcctatccttcgccgtttacaagctaacggttcttggcggcaagtcgacgttccaggcctacgaggccttcttccgcagcttcgccgccgccttacatgactaagttgtctcgactgttacgcctccccccccccagcttgggtccccactggctctcctcaatgtacctctgtaaatcacggctgggcagcgataggccgcgcggcggatataggtgacgcgggcgaatatccagtgattacatacaggcgacatggaccatgcggatgaagcgggactcaca

SEQ ID NO: 432925 - DNA, 491 bp, Oryza sativa
ttctgttcctcctttggttttcggtcgttgaaggacatcactacgaaagggggatgattgcaacttcattgggaacaaagtacttcttgcgaaatgtagtcacgcaaggctccagaattgctggaagggccctcagcactgagtcgtcaatctttacttctcatttgtgcaaccaaaagcgggacaatgaatcgcctcagcgagagttcaaggctttcaagagtaccgcggctgccactcctgcccaaggaaagggagaatctcgtgacacgtacaaagtagcccagcatttggtcggaacggacgcttgtgccaaggttggcttgaactctcttggcatcaccggacctaccacgatttaccgcaacatgacattccaagagctttttgaacacgaacaagccaacaacgaaagaaaggttgctgctgctgccaatggtgacactttcactgtctacacgggaaaatacactggtcgttctcccaaggat

SEQ ID NO: 432926 - DNA, 386 bp, Oryza sativa
ggggcactaatgttcatcatttatttgaataaatccaaacttttagcaatttgacaatggccatatttacactcgagaaacattaaaaattgagagtaaaccaacaatattacaaaatacaagactttaagaactgcaaaaaaaagaaaaccttaaatatataaggcgtgcgcattacattgcaagtccacattcgggagaaaaaaagcgtttatctcaggccagtgctcctttgatatcttactttaaggatgtgcgaaaaactaatttaaaaatgaaagagaacatctcgtcaagcttattattaacctgaccggtgactgggttgaccgaaggctatggactggagctgcccatctggacaaattcaaaagaatgagtacccg

SEQ ID NO: 432927 - DNA, 138 bp, Oryza sativa
gttttcagtttttatggcccgcactcgtcagggagccttttatgcgctcctgggccatcagattgagctatgctgaaccttgcaatgacaactggcataattgaggattccaaagcagccgtggagtattattaccaa

SEQ ID NO: 432928 - DNA, 412 bp, Oryza sativa
  unsure (1)..(412): unsure at all n locations
ttgttttttatatgatcataactatttttatttatattggataaatcatcgaagttacagctcaacggtacatttaaaccaaaaaaaaaaggtgcaatggcaaaaaaaaaatgaagttcacacaattgtctcactaattaaagctatctacagctttctacatgtagaactgattaattggccgtttctcttttcccntgtaatctgtaaatcatttagtnttctatatcctgcaaaaacaaaaatcaggcaaggtatattaatgattcatttgaggtagtgaccatgtcgaaagtcagtgttcacatttcaacagaaatattcaaaatccaagtaaagactaagtgttctaaaatgatgtgcatgtcatcaaggaattactagatagcatgctctataccaactttttgga

SEQ ID NO: 432929 - DNA, 554 bp, Oryza sativa
  unsure (1)..(554): unsure at all n locations
tttttgcatgccatttttttcaggtaaccaggtggaatgaataatgggagaattatgtttactgataatgtgcatttttatttactgtgccttattagttcatttggcatggacgcccttacttttgcatcagctcaggcttagcaagaaagattctcatcctgttttaattgctgacccatgaatgattaatcttgaccccccaccctcaagcaactctgttgcttttcgcttgcgagaacgcagttctgtaatctagcttaactcagaccgattccttattttattgataatctcatctatttgtcatgtgagtaatttaagtggcgcttaaacaacaatgaaacaattgtccagatgtggttggaacaaaaccatatccacttgccgtcaaaaaaaaagaaaagaaaaataagtgcaaatttgntatttcttgttcctcgcatggttaaagatggtcttcctcgtatggttgaagatggtcttgcttctcactatgaattattcttgtgcttgcagatggatgatactctgacaactggaagcatcaggag

SEQ ID NO: 432930 - DNA, 118 bp, Oryza sativa
  unsure (1)..(118): unsure at all n locations
gtctttaccatctacaatgcncgacaactccggggggaccttttacacgcatggggtggcataatcaactagcatagacttaaatcttaagcggagagaaatggtcatcctgggaaca

SEQ ID NO: 432931 - DNA, 121 bp, Oryza sativa
atcgcgagcggcgcccttatattttttttttaaaaaagaaacttccttgtgttttcttttaatgggactggggttgctgaacaaggggaccatgaacaccaacgctgacacatctccacat

SEQ ID NO: 432932 - DNA, 94 bp, Oryza sativa
aattcaggacagaaatgggctgtatatatatatatatatatgtgtgtgtgtgtgtgtgtgtgggtgacataggttggcgtccgggcttccctga

SEQ ID NO: 432933 - DNA, 395 bp, Oryza sativa
attttaaaaacctgccatttttcaatctgccgggggagatattttactctgccgggcgcggcgagggccggccgggtctcgactggcgccggaggcggaagccgtcgggttcttcgatctttctcgcttgccggtttcgactggagatcgtcggtttcgccgcttggatcgagtaatcaatcactccgtactagataccagcatagatattctgtcatgtgactgttcagtgccacttccatgggggcatggggcatgggttacaatcccttgttctgcatcacgatgaaagcaaatgatgtgcctccggtcccggaagataccctcttgttattgattgatccagtttgggatacaatggctgttgctgaacatctatgatctctgcgggcata

SEQ ID NO: 432934 - DNA, 99 bp, Oryza sativa
ttttttttttttttttttttttttttttttttttttttttttatttttttttttttttattttttttttggaaaaaaacggagggttttgatccccatg

SEQ ID NO: 432935 - DNA, 216 bp, Oryza sativa
tttttgttttttgaaaaaaaacggtcaaacatagcctttttcaagaacccctcaaaatcgggtggtttcacttatattggtaaaatgctagatcaaccgcattccgaacaaattacaatcaaacaaaacccgtatcaaagattgaaaaactgccctgggccagcttgaacattcggtgtcggcacaatagcaacttcttcaactccggcagaatcc

SEQ ID NO: 432936 - DNA, 225 bp, Oryza sativa
atgagctgaagctctcgtgcgcggcgcgggcgtgaaggcgtcgtcgtcgtcgcaggggcagagcccgaggacgccgtcgccgcgcgccacctccgccaccgtcgagcacacgcggtcctccttggagccgtggctcgtggtggcggttgtgtgttgcaccttttacgactcgtgcgttaactaccttcagaacttttcgcgcaccgttgtctccgcccagtttat

SEQ ID NO: 432937 - DNA, 136 bp, Oryza sativa
tcgtcttctcctttctctcttttctttctctatcctagcgagatctggggcgtcactgacctagcttgttcttgctagctgctgctgctgcttcggcggtggcaggtgtcgtgaggcaatagccgtcatctccggc

SEQ ID NO: 432938 - DNA, 105 bp, Oryza sativa
ccctgtactagatcacaagcggccgccctcctctgggggcttttttaaatcccctggggtatactaaaatctcctcttacctatcgaaaaaaatatttccacaaa

SEQ ID NO: 432939 - DNA, 99 bp, Oryza sativa
tctatgcctttcccctgcccgcgctgccccggggccacctttaaccctcctgtgggtctcctactcctcgacttacctttcaccaccaccccccccgcg

SEQ ID NO: 432940 - DNA, 385 bp, Oryza sativa
gaggggcagcaatggtcatcatttatttgattaaatccaaaatattagcaatatgacaatgaccatatttacacttgagatacatcacaagttgagatttaacctacaatattacaaaatacaagtctttaagtactgcagaaaaaagaaaaccttaaatatcttaggcatgtgcattacattggtagtccacattcgtcagaaaaaaatcatttatatcaggccagagctcctttgatatcttactttcaggttgcgtgaaaatcttatttaaaaataaacgagaactttttttcagctttattattaactgagtcgttgactgtgttgatagaatgttatggactggagctgaccatctggacaaaatcaaaagaatgagtcc

SEQ ID NO: 432941 - DNA, 436 bp, Oryza sativa
ttttcatttcttatgggtagaaattgccacgggggcttttttgcactctagaggggtcacatagagctatttgaattttgctatgttaatttgaataatacagtattccaaagcggcagtggatcattataaccaactaccacaaactattcaattgcagaatttctgcattccaatttttgcatttctcaatttaatcatgtattttggtttgagtaattgcaaagtaaaactgattctgtaattgtaaaaatgaatgaattttctggacaacatttaatgtgattttatcaaaacacaatgaaccttttaatttgtccgtatagttctgttttcttttattttcaaaagtaagatcctcagtataagcttttgtttgtggatcttttaaaaatgaatattgggggggcaatcctctcttgcttcaccgttggac

SEQ ID NO: 432942 - DNA, 298 bp, Oryza sativa
ctgtgttctttttttaatttttttgggttttttattttttttttttttttttttcaaaaaaaaggcaataatttttataaaggaaaacccccaggttccattaccagttaattgttcaaatctcaatgaatgtacagcttatttttttttcacacttttccacaaataaaccccaggtaaatttttttaaacactgtttccaaccaacaaaccggggttaaatttttccttccattttattgtaaacccaagcaaaagcaagttttattttttcatccaaataggggggaaatttttt

SEQ ID NO: 432943 - DNA, 336 bp, Oryza sativa
aaaaccatcagaaaagaacataacttgaataaagtttggacagaacacttcagttgagagatcccactgaaatcttatacatcaaagatttccaagagttcataaacagaagtttgccagttacaattcggctacaaatttacagcagatattgagataacatgaagagacaggagtactaattatctgaagacttgatatgctacaacgagcagtttacagcgaacaaatgtacttaactagattgtcaatggcgagagtcccagcgacccattgattcgcctggattttcaggggacgcgctggatcccttatcgcggggccttcttccccaac

SEQ ID NO: 432944 - DNA, 65 bp, Oryza sativa
gttcttggttttttttataggtaagggccagaaccaaacaccccacttaaataacgacccaactc

SEQ ID NO: 432945 - DNA, 521 bp, Oryza sativa
ttcttcgaaagagagagagaggggggcggcgggggcgttttcagagccgcgaggggtgaggcgccgccggtcgccggagcgagcgagcgatgagcagcagcgccgccacctccacctacgcggagagcgtcgcgtcctgccgcgctcccgctcccgccacccccaggcccccccacgccgccgtgaggcgccacctcgacttcgccgccggcgacggcggtgagctggatgacgacgaggtcgaggacgaggacgaggacgacttcctcttccgcgccgcggaggagacggagcggagccactacgaggcccagcgccgcgctttcgcacctcccccgccgccgtctcagcccccggctttcttcgagaggccgtgcatctgcggccgcggcggctgccatgtggaggagagggagctcgggcggtgggcctacgtctgcccggcgactccgaaatgcaaatattctgtttggtgtggagaagctgatattggttcaaatccacagcctgcttatatgagc

SEQ ID NO: 432946 - DNA, 116 bp, Oryza sativa
caatctcccgctccccttccccgaggagccactgcgccttctgacgccgccggcatgccgaaacactaccggcctgcgggcaagaagaaggaggggaacgcggggaattacatcac

SEQ ID NO: 432947 - DNA, 62 bp, Oryza sativa
aactagaataaaggaaaaaagaatagatcttgaaaagataagggcagagtttgggcgtaaaa

SEQ ID NO: 432948 - DNA, 53 bp, Oryza sativa
tttttggttttttattattttttcttttccttcctttaaaggaaaaatcacct

SEQ ID NO: 432949 - DNA, 267 bp, Oryza sativa
ctacgtgtgttgcctccaacccaagaccgctagccccgggggctgtttgaaaatttgggggggtcaccacaacagctgccagacagtcagggcgctaccgcccgggacgatctggctgctccccatgctgaacaccctagctaactcgctgctcctctttaagcgctatggcctctggctactcacgatggacagatttgtccacgaaatgccgcaaaaatacatgatgtactacaatggctctgaaaacgagactgatgattgaca

SEQ ID NO: 432950 - DNA, 58 bp, Oryza sativa
gagcaattgaggagacgcgccgtagggggcttaattattaatatttgtgacgcaatat

SEQ ID NO: 432951 - DNA, 102 bp, Oryza sativa
tgtgataacaccacaacgcattctagccaaggggggggttttaaccatcgagagggtccttaacaccacccactcctgcctgggcatcagtctccaccaccg

SEQ ID NO: 432952 - DNA, 126 bp, Oryza sativa
ctggccccgccgcgccgcttttacgccacgaagcagctccacaagtcgggggggacctttttaaccggagggggggcacacccccgcctccaaggcgtccaaaggagttcctccccgggcccccga

SEQ ID NO: 432953 - DNA, 345 bp, Oryza sativa
tttgaaacaagtcagaggaacgcagctccgtgttctgtttaaatccagaggggggcacgcacacgctgcactgactgaggccgacgcggcggcggcggcggcagcggcggcggcgaaagcgaccccgatgacgaagcccaagaacggctgcctcaagatcctcgcctgcgccggcggcggatccgacccgtccgccggctccgacggcgacgcggatgaccacgtcgacgagaacaaggccatatcagataaaagtaggtggagctttcgtaggaggtctacaaggcatcgtgttttgaagaattctgatatatctgaacctgaaactcttaggttgagccaagc

SEQ ID NO: 432954 - DNA, 362 bp, Oryza sativa
aaccaccacaaattcccttgcatggtgcctgttcatatctctttctttttcaaataatgctacatatacatgcgccccccaaaaaatgcataatagaaaaggaaaaccaaatagttacaatcacaggacctacaacatctggtccgaaagcgaaaaaaaaagggattatgcagaaccttccccccataacacccaactttttaacctggaatgtatcacaattttctgaaggaagagccagccgtctcaacataaaccttggagccggaaaggagactgaacagacccatctttagaccaaagacgctcttggctcttttctgctagctgcgaaggtttatttaacatggccatagcatgac

SEQ ID NO: 432955 - DNA, 315 bp, Oryza sativa
gttcgccgcgtcgaaagcaaccactcctcctggtcgacctcgcgctcgctcggtggccctacaggccaccgccgcaccagggggggcagcgagcgagcccgcgaggtagtcggcgacgaccaggagggggactgggatgggttgctgcgggtcgtcgctgcaggccgggacccacccggagaagccgccggggatggcggcgccggcgcagagcccgtccttctgcctgaaccagcaccaggcgccggggtcggcggcggcgcacggcgcggggagaggtgcaggccccgaggtcccgctgagctttcgctggca

SEQ ID NO: 432956 - DNA, 278 bp, Oryza sativa
ctttgcctttcccctgcccgcgctgccccgagaggaccatttcacacctcctgttggcgtctcctactcctcgacttcccttccaccaccacccgccgcgcggcgtcgccgatgccaccctgcgcgctcgccgccggggggagcgcgcggcggcggcttcctccgcggcgctgacaagcggggggacctcgggggttgcgcggctgggcggtggcggtgaaagtgcgtgtgcgcccaccggtgggggtgatggggaaggaggggcaaaccacccgagg

SEQ ID NO: 432957 - DNA, 197 bp, Oryza sativa
ctttctctccctcccgatcgatccatcgcgggggtgtgccctcgcactcgcggcggggacctcgccgccggcggccgcgccatgacatcctccccctcctggttctccggcatagcccgcgcctcctccgccatgccccccggcggagtcgcctccgcggccgctcccctctccgatagctcggcttgtaagggcag

SEQ ID NO: 432958 - DNA, 113 bp, Oryza sativa
gtaggcgaagaggctagctagctagctagggtgtcgtgctccccatcgcctggcgcgcgcagccggatccgatcgggcgtactcgtcggcgacggcggcggtgcccctgatat

SEQ ID NO: 432959 - DNA, 135 bp, Oryza sativa
ttttggttttataccacaactatagccatctttatttttgtagtgactcacataagacagtgcgaaattctattgatcgagggagaaaaattttaaaggtccgaactagggaaaaaaatatatccattacccaca

SEQ ID NO: 432960 - DNA, 163 bp, Oryza sativa
gttcttagctgacaggaagactgctaagtcccattagtaatattttacaagaggggtgggggtgcctgaaactactgtgaagaaggggaacgactattcactatgaccctttgtgcttggattcctcatatttttgggccttggaccctctcttctttcaatt

SEQ ID NO: 432961 - DNA, 380 bp, Oryza sativa
caaaaacttcccgacataaattttagcgataatttataattttcagacccacctataagtgataaagggggggtgcagccgactgcaaagatcctgacagccgcctgccccgccactctgaccgccagagacggcgtccaccaaaaccagacagttacattcgcaatcccaatacggaaaaatataccgtgaaaattccacgtgtggtgtaaatccagaaactaccggtcgtacaaaagaatggacatataagatttataactttttactaatgctaacgtgaacaaatctcaaaaatcaatttgtatatgctacgatatatggagattgcaccgacatttttccctttccaacgtgcaggtgtgagacagtgagaggga

SEQ ID NO: 432962 - DNA, 150 bp, Oryza sativa
cagatctctcctcgctgatgtgccgcccaccccctctaccgaggcgggggtgccttttccgatcgcggggggaatgctccgcctcagggcgttccggccgaccagcgacaaggtggtgaagatccaacttcaccccacgcacccctggtt

SEQ ID NO: 432963 - DNA, 399 bp, Oryza sativa
ttttggtttttttttttttttttttttttttttttttttttttttttttttttttttttttaaaaaagaacagggcaagcccgcccttgtaattttccttgccaaagtttatggccaaaaaaaaggggggctttgggccaccgaaaaagggcttttcccctttgatcttgcgaagggcttgctgaaaaggggaaggcacaaaaacttttggcgcccccaacagggagaagaaattccgtttgaacccccggggggtgaacccgggggggtttggggggggaagagggcaaagggggcgggggggcccccgaccatcgagaggcccaacgcgtttaccccaaagcccacgttgtagaggaggcttttcaggtaactccccctccgagccaggggggcctt

SEQ ID NO: 432964 - DNA, 462 bp, Oryza sativa
gttctgtcttcttgggcgtagagccagctatctgtcagccaccgcacaacccaggggtggccttcacaaagggaggaagaagatgatggaggtggagaagccatgggagttgaaggaggatgtggagatcatgactgaggaggaggaagaagacgacagcatcaacctgctgtaagccaggggcaggaacaagaagcacgcgcttatcaatggagattaacaacaacctcttccataagaagaagaagaataagaggttgttgaggagcacaagagcgttttttttgatcccacccaaggttttgagcatgttacttgagtaagtggtcagaatgaagttaccagagtggagcacttcccttgctaaaaggaaaaagtgccttgaaaatttaactcaaaaggggaaatgaacttttggacacctggaaaaaggttttttttaagaaacttatgtaatttttt

SEQ ID NO: 432965 - DNA, 395 bp, Oryza sativa
cagaatcgacaataaatgtatttaattcatatcagtatcttgccagataagattgctccagcaacaaatgcctattacttgtctgatctattccaagaactggccaccctacaaagtgcaaaggtactggatcatggaaatgaagtgtgcaaggatatgaacacactgaaaaagcaatgtatgtacatcacttcttggtacatataatctgatggagaaaaacgaagggatccttgtatagtattacaatattgtaataaccaaggggacaatctaaactcaaaaggcaccaatcagtccatgtgatgactcagcagttcggacacatagcatcccttgtagcaaaagcatacctgtcaccaaatttagtcaaatgggagctactatcttctcct

SEQ ID NO: 432966 - DNA, 254 bp, Oryza sativa
gcacttcaatgcatattttccatgaataatataggtgtatattgtacaaaaggtgggggactctgaacttgggaggattttaggtgatcactggatacggaggcgccgtgggaagattcggtaaaattcaaagaactaccttaggatatcatggactaaggttttgtcttttctcaaggatgatgcacaccggggcagaagctgaaattgaagtggttgtgggaatagctcttggatcaatgagaaattcaaga

SEQ ID NO: 432967 - DNA, 123 bp, Oryza sativa
gttttctgtgtgtgtgtgtgtcacaatgagagatgggatactttataaagaggcaggtggttgacacaacgtgcttctctccccccgcctgccattggccgaccccataccgcgacaggtaag

SEQ ID NO: 432968 - DNA, 245 bp, Oryza sativa
cgcatgttccgctcgccggcggccgacccgccgcgggacgtccgagccgccttcctggccgccggcggaggcgacggcgggctccggcggttcctcgcgcaggcgcagggggagacgccggcggaggtggaccgcatactcacgctgtttaacggttgtagctgaggcagcggaagaggaggcatctcggaccgcctcgtggggccccggaccgggccgggccccccgttcgaagacttatttgg

SEQ ID NO: 432969 - DNA, 53 bp, Oryza sativa
atgatgcatgcattccttgataacttaaaaaccatactttttgggacataaca

SEQ ID NO: 432970 - DNA, 168 bp, Oryza sativa
ttatttattaaaaccattaattaagatgacccttgtccatttttaaaaaaaaatggggggtttatcctctttatttttttttaaaaaaaaaaaaatttcaatctttacttatttaaatttattttaataatctttcctctttaaatcgatttcttttccccttttccc

SEQ ID NO: 432971 - DNA, 80 bp, Oryza sativa
cctccttccggtgctgttaaaccagcgccggaaaacaccgcctacgataccgaccggctcgctacccgcagaaggcttgc

SEQ ID NO: 432972 - DNA, 112 bp, Oryza sativa
atatcgcaacggccgccctctttttgtgtttttttttaacacctattggtgttcagaaatcacccccacaagttcacaaagtactggaatccatttacaagcccaacctttt

SEQ ID NO: 432973 - DNA, 172 bp, Oryza sativa
ccccccctctttaatggtgttttttaaactttggttttaacacccacaaactcacccattacaccattaaaaccaatcaaacacaaaaaaaaaaaagcacaaaatacccacaaactacacctaccaaaactaacgcacttttataaccaaaaaggggcccctcttttaccta

SEQ ID NO: 432974 - DNA, 531 bp, Oryza sativa
  unsure (1)..(531): unsure at all n locations
gtacctctgaagctggtgggctccaaaaaagagggtcacataacttggagtaatatatatgcttgtattgggtgtggcatgtaattgtattgggtgggataggtcagtaccaccactttgaatgatgagggtgatgctggacaagggaactgtaaacggaattattcgatgtaaccttcagagagtcatcattacccagtcagaaaattttccagttatatcttgcatgactctataaggtctcagctttacaaatctggggcttaactttagatcctagctcgggcccatctttagatcctaagtttgctctatcactgtctctgtagctttgatagtgctggtctgtagtaaccaaacggttgaatggaagataatcttctttgatgcaatatcataattntattgagctcatgccactgtgtgcacctaaacaagaattatttgatatgaacttttttgcatcttaaatgaaaatttactatgggtgcataagcaatcgtacgaccaaatgatggaggattctaaaca

SEQ ID NO: 432975 - DNA, 403 bp, Oryza sativa
gggtgcccagcgcaaccgcaccctctcctctccagcagcggcgacccctcgcctcataccctttcctgggcaaggccgggaggggatcaatctagggtttccgccgccgccggttccccggacgttgctgcatgacgatggaagatggaagctgtccttcaccagtcacccccagcgaagccgaagctggagccgaagattacgaatcttggacactgaagcagaagattgaggatctcgtcaactgtgatcctatccatggtatcgggccaaaaaatcctaaatataaagcatatttcgaggaaaagctccaggagaagttaagtaagtacgtccgagctgtattgccgaaacttcgtccagcaattcagaaggatagcgtcaagcaattctttcaagtcta

SEQ ID NO: 432976 - DNA, 519 bp, Oryza sativa
gttcgcagcacgcgggcagcgctcatactgccactgctcggagcggtcgccgcctgctcaaccggcacctgggccgaactgacccgcgtaaccgcacgcttcaacgatgaatgggtgtgggcaggcttgctggtcgtgctgaacctgctggtgctggcccatgctgcgctgaccctgagtgcgcgggaaggttggcgcgaacgggcattcaactggctggagcaacgcgcaggctggctggtggcaatcgccggcttcgccggcgcggtgatgatgctcgcactggtgtttgacccgcgctatcgcagcttcccgagtgcggcactggtgttgccggccctggtgtatctggttcgcccggccaccgggccacgccgggagatcgcgctgctggccttcattatcggtgccggcattgcgccgcagctttatcgcgagggctgctgaaccagcaggcgtggggttgggcgggggcagcgtgatgatggctggagcgttgggcgttgcctgccggtgcgt

SEQ ID NO: 432977 - DNA, 465 bp, Oryza sativa
ggccagtgctgtttcactcaaaaaaaggctgccgagtaaggcagggcagcgcaaggaacggagcatgacttaatccctaagaggaaacgtgctgaatgaagttcgcaggctatgaccaccgcgttgccaccgaagtgccagccttcggcacgaaatgtcggaaaaaaacgtcggaatcggggtaatagcagccagaagatacacgttgccatgcattgatggacactaattgtgtgtatgcgccttgctaacggctgccggcgcattaagctgagcgccgtttttgcctatcggagtaccccatgtcccgtcgtttgccactgatcctgctgcttattgccctgccgctatggttggctgccagttatggcgcacgctacggttttatggaggatggccagtgggtgggtatctgcgttgatgaggccagtcgctgggaatgccagttgcgttcgaccttggggt

SEQ ID NO: 432978 - DNA, 485 bp, Oryza sativa
ttgataaatcaccttatgctatgctgaccgatgatcgcagtaggacaactgaagaagctggcaaagatgcatgtgcttcccgagttgtttgctcagatgctaatgaaaaggcggcttgctcaagtgaaaatggggggagaaattcgttcaaccctatgaatgctttgattgaaatcaagtactctgaagctagtcattccttgcaagctggagatgatacagcaatgaatcttcttgccagtgttgctggagaaatatctaaatctgagttgatttcttcatctgcttcacctagaaattcaccaggaaatgaagagggctgtgaaggagataacattgggaagctaaaagtacaaagtgatatgggcttgtcacggcatgcagggccaacaaatgatgctgagaaaatcatctctgatagggtgagaaaattggtgcaaggttggtcgcaaaggaggaacaacacctatgggatgcaaaggaca

SEQ ID NO: 432979 - DNA, 196 bp, Oryza sativa
gaaagaatcacaaattttttgaaagaaccggtggaatcccagttccccccgacaaccttttccttgaacccacaggatccggagcaaatcccatggacccccttgggacggaaaagaaagggacccccccgcctccatgggcaccaaggggaacgctcccccgccaagcttttggcccggcctaacaaacgcggga

SEQ ID NO: 432980 - DNA, 312 bp, Oryza sativa
tcctcctctctccagatccacatcctctcctggtcccattctgatcggtggcgcggtcgcgacgaagggaggcggacgtcggggggcgcgacgatggcgactgcgacgggatggcgacgggggccgcggcgaagggaggcggtcgtcgtggggcgcgacgatggcgactgcgacggggggcgccgacgcctagtcccagcttctctccctctctctctctctctctctctctatgtatctctctctctctccattcggccggcgtcacagggcggcgggggagggggtggtcttgctttaatcacttttttt

SEQ ID NO: 432981 - DNA, 361 bp, Oryza sativa
ttgtttttttttttttttgggtttttttttttttttttttttttttggaaggaatcacaaattcttcgaaagaatcggggtaatttcagttctacacgacaacattctcctcgaacccttctggctccggggcaatctccctggaagccctcttgaaggggaaggaagtctttcctccgcttccatgggacctagttgaatgtttcctggcaagcatttgccctgacgaccacccggtttaaaggctttgggcccggtttccttgaaggaaagcagactgcccggagccccgggaagaagagctcctgaggcttgctgaaatggagcgggacccccttcgcaaaatctttagcgggttctc

SEQ ID NO: 432982 - DNA, 191 bp, Oryza sativa
ccgtaatccccgggtcgtcatcataccctttgcacttgtacctcatatgggacgtgtaagtgagcaattttaaagtgtaatgggggtctctaacgttcgttgccggaataaacaccttgctccaaacattcttcgcttctcatcctccccttgcgatgcgtgacttataccactttccttcaccaaccatt

SEQ ID NO: 432983 - DNA, 394 bp, Oryza sativa
ggtggttgcctgcgggaccgtcgccgacgatgccgctgccgccgcgggcgccggagacgcggcgggcgtggtggtggctgcgtgggaggaggagttcgagagcacggtgacgctcgctgccgcgtcgcaccgggagcacgccgcgttccagccatgggagctcgccttctccgtgttcactgctgccaacagaggaccaaagatcaagccatcaattcttggaactgcttcccttaacctagcagattatgcatccgccgccgaagagaatattgagataattctcccattgtccgtgccaaatggttcagctgagtcagctccctcgctacatcttaccctgggtatggtggaaataagggcttttcaggaaacatctgatgcttcacaaagg

SEQ ID NO: 432984 - DNA, 400 bp, Oryza sativa
ttggttttttttttttttttttttttttttttttttttttttttttttttttttttttaagaaaaactttttttggtgggggtaacaatagaatttttttttaaacacaatttggcccacaaaacaacaacaaaaaaatttccccatgatgaaattgggggggggaatattactaattctacatggataaacccggtggggaggaaattatttatatcctataaaataaggttaattattggtgggcaaccagaagggggtggtgaccatgaagcccttttttttgaactttccctcggcacccgggggcccgttgaagttgcccattttcaccatggggggggggaacttgacctggaacacctttttgacgggggaggggagcttggcgaccccgggg

SEQ ID NO: 432985 - DNA, 323 bp, Oryza sativa
gcccctcaaacccttgctgccgccgccgctcgctccccctcgtcccccactctctccctctcccgccgccgccgcctcgcgccgccacctccgcctcgcgccgtcatcgctgtcgcctcgcgccgccacggacgtcgccgcctccggcttccccgtcgccgtcgaccgcccccgccaccatcgcgggcccccgaaaccctagtcgctgccgcccgctccctctcgtcccaccccctccctcgatgctccttctcccgcgacgacgtcttgaggtacgtggtgctgagcacgggggcgaactgccgggggaggttggggggggg

SEQ ID NO: 432986 - DNA, 430 bp, Oryza sativa
ttgttttggagatcagaattggatccaatcgattggaaatgagcagtacaacaaacctaatggatctgatgcatcatacttcgccacaagcgagtagatctatctcagatccagattacatttcatctcgagattacaattcgggagaaaacgcaagaaaaaaaaaagcagagatggatggaagcaagggatcaatcctaaaaaccagatcccttctaaattcttctaaatttcctccgcaacgagacgaatcccaccccggattttatatacacgccatcgcggcgacgtcgcgagctgtgggctccatctccctcctccggtggcggcggcagcggcgcgcctaggcggagcgggcgaggcggaaggcgatggcggagtggtacatggcgtcgtggaagctctccgtcttcaccattcttgcgcgcag

SEQ ID NO: 432987 - DNA, 492 bp, Oryza sativa
  unsure (1)..(492): unsure at all n locations
tgtcattagcggggagaggagcgggagagagcgggtcggtattattccgagctcggtatccattgaaccgaaccagctctgagtgagagagagagagatcggagctgttgtttcttctcgtttctttgattggtggcggtgttgaattgaattgaattgatcgattgattgtttcttggtgtggtggtggccgcgacggcgagcagcgctccaaggtacatgacctcggcggcgccggcggcggcgcagttcgctgcgccggcgccggcggcgatggggatctacgaccgccggcaccatcctctcgccgccggcgtctggggagaccaccccttcatccgcccggacaccaccgncagcaccagcaacgccgccgncgnctgcatggtcgtcgcgccgtcgccgctaacagagcccaagttcgagagccagctagctctgcctctgcagcatggagacgatcaagacaacgctgcagctctgcaagaatcg

SEQ ID NO: 432988 - DNA, 513 bp, Oryza sativa
ttcagatgagtaacatggcaaattctgctaaagttataaattataatcaccaatagggatcgtgggagaaaaggcaaagcactgaagatggcttccagcggtggatggtcaaacttcgaggatcaggctcttgttgtccttgtccacgacttgggtcaaaactgggaattagtaagcgacgcaattaatagcattgagcaattcaagtctgtatataggcaacctaaagggtgcaaggagcgttataaggttctcgtggataaaaattctggtgatggtgccgatagtgcagaggactctggttcatctcaacactatcattttacgttgccaggcattccaaagggaagtgctaggcagctattccaacgacttcaaggaccaatagaggaagaaaacctcaaggcacattttgaacaaatgattctactcatgcggcaactgcacgccagacgtagaaagggtaatagccaggaactcaagtcgatcatacagccacatagttcttatgtt

SEQ ID NO: 432989 - DNA, 380 bp, Oryza sativa
tctctccccctctcgaattatgatctcttccgggagaattttaaattcgtgtgcgggtgttaacgttcgattggatcggtgctggtagtacttgctagcatgatcccccacgtgatctgtggccgattgttgggatcgtttttcatcttaatttttatctcaaccctgttgtattccgtagcaatttttttttgctaagccatgcttttaaggcatgtttgtatgcacaaaatgatccgggtctctggtggatttgaagtgatctgtctgcggctgatgtgaattttaccgaatatgagtggatccttcaaaaacctgagtactgatagtgttctgaggttcttgaccaagtttgcttttcaaaattttgccaataattt

SEQ ID NO: 432990 - DNA, 77 bp, Oryza sativa
tgggttttttttttggaaccgatatatattttttcttaatttgtattttccttgtttaaacacttttttataaggca

SEQ ID NO: 432991 - DNA, 487 bp, Oryza sativa
tttttgttttttttttttttttttttttttttttttaaaaaaaaccagccccaattggtttttcaccccaccttttcctggttcttttttggctggaaacacatcattgacaaacttaatatcacacaggtgcttggcctagagaggggggaagagagagagagaggggaggcaaaaagggtaaggggaaaaaaaaccgggttgcaaaagtccccacatttcctttaagtagatccccccaaaccttttgcaggcagaaccagttggtgtttgcagcataagcagcaatttcaccacaggatttttacacagggggaaaactggttaagccaatgggctctgcttttttggcgggatctcaccctaattaaatttccttgtttaaaccccttttttaacctttggccctgggggttttttgctcctggggaagcctctcccatgaaccttaggccaggaacattttgcctgtccttccacccggggg

SEQ ID NO: 432992 - DNA, 232 bp, Oryza sativa
atcccatccccgccgccgccgcgccactcccagggccatttaaaggcctttcggcgtcctcctcctcctcctcctcgccgtctgcgcgctgccgctcgctcgatcccaggcggcgccaagaacggccgagggtggcggaggtggcgcggcggatgacgacactatacacgagctcctgcggacgcacgagctgtcggaggggctgctgtcgcaaggggaggagtctaacagc

SEQ ID NO: 432993 - DNA, 312 bp, Oryza sativa
cacattatattatgctgttgcatactttaattctattacacacgatgattaactttgggcgggcaagggctacatacctactgaaggagaaggaagggatagaacgcatcccattaaagaacccctattgggggggaagaaccacccgtatataaaaaaaagctttaaccggggctaacaaaggcccttggaattgccagccactagcggtacgctcttgcacacgggcacggacttggaatagaccacggtgatggaggcctgcacggcggttatagggacggcgccgacctccaagaagagccccaccct

SEQ ID NO: 432994 - DNA, 356 bp, Oryza sativa
gatacaaaacaacatccatatatgagccagttttatagacaattcagggttgaattgagtacaacagcattacttggatgcaggtatgaatcagggattgccaaaagttgcatcaatcgcctaccaaatttagacagatgtcatggagcacactcaaaacgcataaaactacattgtacagctgacttgccaattcttgtttatggttaaaatgataatgctgagatgctagattcagtaccccggctggggagttgaatcttctttctctgaaagccagagcgatgtactgaattcttctctcagaggctggcagtgttgggttgctgttcaatgatgcacaccacaagctttac

SEQ ID NO: 432995 - DNA, 52 bp, Oryza sativa
ccccgggccgacccacccctccttaccatccccacatcacacccgcccccac

SEQ ID NO: 432996 - DNA, 424 bp, Oryza sativa
ttgttttttagtcaaatcgagcagcaagggcaaatgtgctgttataaactccgtcgagcagaattcagaattgttgctacctctacgggtccatcccggaggcttgaccgacttcactaaagtacactatatctaatccatcatatgtgtgaccaggctgtagcgtcgcccctgtgaccaaacaacatcttatcagctgtaggtgaggagaaacctaggtaggtgatagtagatatgtggtgtgtacaactccttgtctccttgttacttgtacatgtactgctaatgttccatgttgtacaagcagcacaaacaaaatacatggggcaacacttgttcactcggaaaatgttcctgtgtggatctgtaatacaatgggtacgttcatctcagcacaaactatctttctttttacctacaaaat

SEQ ID NO: 432997 - DNA, 302 bp, Oryza sativa
tttttggtatccaatacacggcgttatgggaaaagcctaatacctgaccagcatgcttcggagaaattaagagggcaaagcagaggacgaagacgacgtcgaaaggaacaacatcgagtcacgctctgggtcgagctacgggcgatcgaaccacaagtagcgtaccatggcctgccgcggatgacagactgctgctgaatgcgcaaaggcttgcagggcccgctggccgccaggagcagctcgacgccgtaaacatggccgtcgtagtcgtgcctgaagcccattccgcaagggcacatgct

SEQ ID NO: 432998 - DNA, 241 bp, Oryza sativa
gccaaaggaaccaatatttggaagacatcccccgctaacaaacccaaactgggtacgcccacgaaacccccccttttaccccaagccaaattaaggggcccttttttttaagcccccaaagtgggggcttcccccctttgggtagcacccccatttaagccccccaaaaatgatccgggccccaacaacctccggagccaggccccccgcaaagggctccccagggcccccaaagttgggc

SEQ ID NO: 432999 - DNA, 373 bp, Oryza sativa
agcacaagaactattttattattcagtgcatattgaaacaatattgtacatatgaaagatacgttacctgaacaaaattatatattccagggctaaggctgtaaaggcctaaggctaatagaagagtatttgatccaaacgtttgcacaattgaagagacacctatgaacagaagaacagagatgcgcacacagttatacatgctgtggtcaaaactgcactttggattcgcaaactcaccaccgcggggatagtcaatcatggccacaccgtgaccactgacactacatgccgatccttgccctcgtcaaagggcaggaagacatactagttggcgaaatttttgaagatctcccccgtgagctccccgtga

SEQ ID NO: 433000 - DNA, 275 bp, Oryza sativa
tatggactagtcgccgccgccgtatatcccgccggcaagctaaatacccctcccgccgtggcagcccgatccgtcgccggacgacctccactgaccagacctactagtcggcgcaggacgacgacaccacgactactaataatcgaccactatcgtcacttactagagatctcgaccattcttctccttccgctctccctactactactatccataccggctcccttcactactgtaaagtaaacactgcgtgaaactccggtgtaatacaacac

SEQ ID NO: 433001 - DNA, 344 bp, Oryza sativa
tgggtttttcgccagcgcggcctcccccacatttcattctcctgtttttattttttttcccatgccccacttttttaaacactagccaaaaaacggcctttaaaaaaaaaaggcgggtttttaaaagatttcatttattttaaaattaaagaagattcgcaaacctggtaaaaaggggtgttttattcccaaaaaggttcgaaccgtttttactttaggggggggtccccaattattaaactccccctttaggggcccaaaattattattattaaccccaacctttccttatcgattattattataaacaattattattatttttattaacacccttattacta

SEQ ID NO: 433002 - DNA, 373 bp, Oryza sativa
tttaagacttgtcttaatattaaattataacgtgtaacttaaatacaaccatgagtaatactactataaatcggtaattaatcatttgaataaataataaataataataataataataataataataataataataataattaataataataataaataagtaaagattggaattaataataataattttgttgccttaaagtagtaatttaataattgtagatcaaactctaaagtaaatactgttcgaaacttttgaggaatagagcagccattttaaacagtattgctaatcttcttaaattatagaataaatgatatctttaagaaatcagactttatttcttaaagtccgtttcttgactagtgatta

SEQ ID NO: 433003 - DNA, 69 bp, Oryza sativa
gaagttgcaaaccaaagctttattagaagttggtaccggcacacaagctagcaccggcccttacaacaa

SEQ ID NO: 433004 - DNA, 378 bp, Oryza sativa
tttggtttttttattttttttttttttttttttttttttttttttttttttgagggccaaccaaatttagatatacagatacgatttcaaacgggtgagatcacgatacaaatgctaaacctttggagcttaaaatccgctaaaaagccttcaaaaaattggcatcatgaaacagcaaatagcccgaaataaaaagaaaaggtaaaactcctgaaaaccggttaaatttctgacggggtaaccaagggactaggtgaaataaaaccctccacggggacaactattagtttcgcagcataggcaagaaaccctgggtgcttttagaagctgctgggggacatgaagacggggacctttttgcccatggaggggggccgg

SEQ ID NO: 433005 - DNA, 236 bp, Oryza sativa
actcgtactactggtatgactatgttctttaattccgtggcccagtgccagagaaccggtaaaggagccgcacaccagaacgggcgcagacttccacttcctgctcgagcaagctcgggctcagccacgccaggagaagggcctctactcccaggattcgtcattcaattatatgcaggcataaaacctataagcttgaaagctaaaggaagaagagactaaagtcctggacggga

SEQ ID NO: 433006 - DNA, 174 bp, Oryza sativa
ttttgttttttttatttgattggtattgaaaaaatcttaaacttcaaattctggttacaacaaaaagtatagagaaactacaggtctacaaccgtggccttcctgaacaagaagcaagaaccacgcgctccagtacacactgcgcacgctaggtgttcgcacactccgggagag

SEQ ID NO: 433007 - DNA, 449 bp, Oryza sativa
ttcatttctccccacctcctctcctcctcctcgttacatttgaagccacgcgcggacgggagagaggggaaggacgcggccgcggctcgcctctcccccccctccttgcttgccgccgatcggcgatcggtgcggcgggacgatccccggagggagcagccggcgcggagtccggaagcagatttgtagcgtcatccaattggcttccgctatctgcaacagtttccaccatttgtcaataaattactgaccttgtacttgaggatcgtcaacctcaagttgtaaaacattgatttttaatgggtgatgctttattacattgaacttatttaagtacctcataagatatccaaggaagacagtaaagtttcgatgcatcaacataggatcactatgctatcttccttagaacatgtcaccttggtctagttcgacaaccaagccatgga

SEQ ID NO: 433008 - DNA, 457 bp, Oryza sativa
ttatttatctgaagagttgttcagaggcttgggtagctttagttgatttcctgctgctccattggttcttgctcttgttcttgttgctgctgctgctgctgcttttgctcttggtgtgtgttcatgtgaggagaaggattggaagaagggaagtgaagccgagattgggaagagcaggtttggtcaagaaggaagaacagagtgggagtttcaggagaagctgagagacaccaggacaacactgaaacaccaatgtgatcaagctgctgccatcagatttcccaactcaaataatccatagcaatgagaaggcacatccttgtgatctgcctccctctaatcacactcctttcactctccatcagcttaagctgccaatctgacccccaaattcagacccaagcacttctccagtttaaggccggcttgaccgaccctctcaacaatttcagacatg

SEQ ID NO: 433009 - DNA, 295 bp, Oryza sativa
tttgtttttttaaaacaaaatcaatcttgaatttaagcttccaatagtaaggaatccttcacatttcaaatcagcttaaatgtggcttgcacttcttaggttagctaattttagcttctgttggataactttgggtcaacttaagaatgggaattttcttttgttcattcagttgctatggcagaactttctgaaattgcagccagttacaaagtatctaagctatgttctctggagaacttcgtgagttctttgaacatcagtcatatcattattctacaattttctgaatgag

SEQ ID NO: 433010 - DNA, 522 bp, Oryza sativa
tgttcctccctcttgtctcgccctctccctctcgggccgccttgaccgcgacagccgccgcctccgtcttcccctcgcgccgccaccgcctccacctccggcgccgccgccgtcgccgtggcgtagccgtcttcgagcgcctccacctccttctcccccctcgcgtgggcaggctacctcgggagctgggggagaggggactggagcgagaacagcagcaacgaggagaaccggaggaagagggggcaagcccggtggctgaccaaggcgagctcgtcgtcgtcggcgtcggtgccttcctcctccacgtcgtgggcgagcggctcgacggtgatggactgggtgagctctgaggaggccgagctgcaacgcggccgtggcttctccttcctcgtctacgcctggaaatgctagcaattgggcgccatcaggaacttgctttcatcacataagggaactgctacatttgcttatgtggggttactttagcaacataagttacttcaattctctttacaagag

SEQ ID NO: 433011 - DNA, 301 bp, Oryza sativa
ttttgtttttttttttttttttttttttttttttttttttttttttttttttttttttttttttttttttttttttttttttttttattgttttttttttttttttttagggaaaaaaaactgggggaaaaccaccccgcccaaaccgtataaaaccctggactttttaaaccggggtaggaccccccgaaacttgggggggcggcttaaaacaaattgaaaaatgaccccggggaggtttacaaacagagggtactttacgagggggtatctggaaaaaaaaaacctttaaaaggggggg

SEQ ID NO: 433012 - DNA, 508 bp, Oryza sativa
  unsure (1)..(508): unsure at all n locations
gtttgttcctttttttttttcctcatgtattggggcttttttaacaagaatttggtgtttctgatcttcattccggtaagtgttgccgcaccaacattttatttacatgttttttcttgcagcaaatctgttttgtatggatattgctgtaattggaagaacaaataactgaaggtagtctgtagatgtttgtttggaaaagcgtttccctactcgatgggtgtatatcatctaagtagttagaaacaataacaatatagattgatttgtatcactccataaacattgcacattcaaattcgattgctataagttgaacaaagtatttgtatacaagttttaatttaattttttgtttttttataactggtttttacaacttatacaagtcgaatttcaacatgcatacttatggattgatatatctcatactaatctatttttttggtacttttttatttatttataactatttaagttacatgcgatctatgagtaactgngtcat

SEQ ID NO: 433013 - DNA, 402 bp, Oryza sativa
aacctcccgtcggactgggaccgctacgacggcgaggacgatgccgatgaatccgcggccccctcggagtggaccggcgaggtggcgccgcgcagcaagggcgcagacttcggcttcctgctcgagcaggctcgggctcagccccgcgaggcgcagcgtctctcctcccaggattcgccattcgattttatgcaggcttcaacctctatgcttgaagctaaaggggaagagattttgtcctggtgtgaagatgacaacttcatcttagaagatgatttagcacccgatttcgaggtaccttttctctccatggatctgcatgcattggccacccatctttcgaagcttaagctttctgagaggcttttcttagagaaagatctgctacctgaggatctggct

SEQ ID NO: 433014 - DNA, 418 bp, Oryza sativa
tgtagtttctgaaattttctacctgataaggtgcggaaattttgtagtagtaggggatatcttattagcttctgaaatttcgtagttcagcacaacacctagctgataggctaaacagtcctctgaatttttttaagaatacttctttgaatggctgaaagatggatggagaatcttcattgagagagatgtttttcagagctctgaatgtcattttgtccaagtgaagccattttaaaattttcattttggttggctggacagtttgatactctgttggcatcgaagctctgaaatattgtgaaagttgtggggtttggtgaggtcgaaagataacagctttggtgtaatttacaagcgcatacaaaaaacttactaacaactgcattaaggctgcgttctttcacgggagataggg

SEQ ID NO: 433015 - DNA, 156 bp, Oryza sativa
  unsure (1)..(156): unsure at all n locations
tctgcntcgcacgactgcggcacggcagcgtgttgtttttcaaaagcgggggggtaccaagcaatgctggtgtgccgcgtcatcgccggccgtgtccgccggaacgactactatggctgtgcggaggaggaggagggagcgttcgactcggtggcc

SEQ ID NO: 433016 - DNA, 209 bp, Oryza sativa
agggcagacaaatatgtgtggggggattttaagaatgaaaaatgagtaaaaacagttggtgcattgtagggtagaagatacaattaagaaaacaggtaaaatgaaaaatggatgtgatacaaagaactatataaacttacaatcagtatatgaacaaagaatatctacgcacaatcaatatctgtctatagtttaagctctacacatgc

SEQ ID NO: 433017 - DNA, 105 bp, Oryza sativa
accttttcctgcttgtctactttctttccatgtggtgtatctcctaatagctgaactaaagcaggggcctagctacatcctcactactaatatgatccgctcaca

SEQ ID NO: 433018 - DNA, 339 bp, Oryza sativa
  unsure (1)..(339): unsure at all n locations
tttttcacccttttttttttttttttttttgtggtttttttaaatttttgggggtttataattttngaaacacatgatttaccataacaataaaaaacaaaaaaaaaggcaaaaaaaaaaaaagaaatgcccacaaacaatttaaaaaggctccccaaccccaaaaaaggcctggttcaaaaaaccccaacctgttttgtaaaaaaaagctaaaaggcaaaatttaaaaacatttgttagaaacctaaaaaacggggaaccccaaaatttccgaaaaaaaataaaagcaaaaaagggtcaattaaaaattacaaaacccttagttaaaaattttaaggg

SEQ ID NO: 433019 - DNA, 385 bp, Oryza sativa
tgtctttcctttttttttttttttttttttggtggtttttttatggaaggggcaatagttattgaaaataatcgagttacatatcattctcccttaaagagcatcggcaacagataagaattctactacaatctgaattgctcactatggcagacgcagcaaaccatctagagcacttatttgggcagacagatttaaaagaacaatgaacaagtaacatatgctttgccggtagcccagccagctgcttaaccgaaactgcaagagcagaaccaaataaggcggctcaaaaacttcagatgaatcaaacttgcaacttgggggtgaagaactggccatttcttaaggatttggattttttttttttggcggctttttttctttc

SEQ ID NO: 433020 - DNA, 403 bp, Oryza sativa
acggatgggggtttcacaatacaatgccgtgcaccacgtctaaggtttcatcacacacgactcaaaatgtctccatccactgagaagcgtgcacacacaatggtgacgatccaagtcctccgctaccaaaccacgacagatgctagcattacaagttttacaacaagcccaaaagggtttttgctcaactgtggcaaaaagactcgcgcttgaagatgtacaaagatgaatctctgctcgaccgttggtctatgaactttcggtatttgccacggcttgaatttcgaagaaacacgccaagcttcagagctagcccacaagaagatccacttgttctctgtacatctcttttaggtcaacaatgtcatttcttagctctttcaactttcatcacgttccccca

SEQ ID NO: 433021 - DNA, 582 bp, Oryza sativa
tgttcttcctttttttttttttttattttgaatctccagcaacaatcaaatggccaacagtacaccatatcactaacatccaaattttcaaacacacgttactgaaattgatccaaacagttttggctatagacatcggctgtattcagccttgaaacctattccactacgacatatcactgcattgcagctcattccgcatcagattctaccatgtcgtcgttgctgtcctgttcagtaatgccctccctctccaattcatccataaggctcctacctacacaggccatgccgcgaccgccaccccttccacttccacgtggtctccctctcctccctctacccctgctcattgccttccttaccttttcgaagtttgcgggattttttgggcaggtagttgtgtaatggccatccctcagtccacaccagctgcacaccctagtacagagcttcttcccccttgcaccaagtgatacattctcttctggacctactgtccgctctttagtctttggtttgggtggtggttcttggcttatgacttcagctgatgtgcccgcaccattgttgcgtgcaacg

SEQ ID NO: 433022 - DNA, 376 bp, Oryza sativa
gattagatggttgcccttgtcagatacatcttaattatcttttcaaagtagatgagccaattatgaccgcatcaatatgtattgctgcattactgtaggtagggagggaataatatcgatcacctttaaaatttctttggatcgagaaaacgacaaataatttaatataaaattaaatcctagaacgacgacgatgagtaatatgaaacagaaggaagaacatgaataagcagtgcacattctagttgttcctgcctctgcttaaatccttccatggcctttctccatttgagttatgcatgtcccggcgacataggaggattgtgtcccccgtttgggccgcctgagaggtgaccaccatgatctgcttcaatgg

SEQ ID NO: 433023 - DNA, 345 bp, Oryza sativa
gctggcccgcgtgcgagccccggcccggaatcccgggggcgccccacgcgtgttaatgcatggagggagagagagctaggggagttttgatcaggcaagtgatggctagctgtgacacggggaccaccatggcggcctactcgccgcttcttgatcgtgggagagcgtgcgcgctggatgagtatgctgcacatggtggctgcttctcgcctggattaatgggaggggccggcgtactgtacattaggacgaacgacccgaactggcacgataaaggtgtatgtatgctgctctctagctcgatctgctacagcattaatgcgtgtgtgcgctaaaaaagatatg

SEQ ID NO: 433024 - DNA, 357 bp, Oryza sativa
ctatgggtgcaactcatcatgataaagcctacaatatttatcaaatatgaaacaaaaaatacagttccctctttcaaataccatgtaatgtaaaagtaaaactcctatatctatactacgaattttaacaacagtagctcaaaaaggatcattcttttttttttaatctcggcaccacaagccaaaaatcaatatacaacaactaatcaacctatgaacataaacaaaaagaaagaaagattacaacaacaaaagaacttatattattcatccagttggtcattggtgtgtgcaatcgaccacacgcccttgaacatcccagctgactgaagtgagaaatccgacacaactctgaac

SEQ ID NO: 433025 - DNA, 426 bp, Oryza sativa
acgcgtgttaggtggtgccatgtgtggccacaggggggtgtattttaaacctcagaggggttgtaacgtctacaactactacaaccgcaataaggtcctccgcaacgaggccgaggctgcccggcaggagcagctccagcgcgaggcctaccgccgtcgcgagtcgggcctccgcctcgccgcgctccgccgcaaccgctgactgcagtccgccgacgcggtgcccctctctccccggccgcccacctacgccgcggatccggccgacccgtcccccgccgccgacgacttcgactgaggccacatcaaccttttctccggcgtcccctgcgtctccggcggtgctgccgacttcttgagtctcgcctacgccgacggtggtaggggcgccgccagggagcgggagccttccgcgaaccctaaccc

SEQ ID NO: 433026 - DNA, 540 bp, Oryza sativa
accccaaaggcccaaaaacccccccaaaacgttgaaaaccccccccatcccaacaaaaaaactctctccaaacaccctcccttcacccaaggggcaccccccgccccccccaccaaaaacctcccccaaacccccaccccccaaaaaaaaacccccccccccccctaaccccctacccaaataagccctccccccaaaagagagccccccccccacacaactaaaaaaaaacacccccctttaccccaaagcccccccccctctgaaaaaacccccccccccccacaaacttttccccacaacccattcccccctgttcccccccccccataccccaaacaacaccattctttgttaaacacccccccacccttgaaaaaaaaagcgctataaaacccccaacccccaattgtaactaatccccccataaaaaaccccccactccccaattaatcaccaataccccccccccaaaaaaaaaaccccccattaccccccaccaaagtacccccccacaaaaaacccccacccacccataaa

SEQ ID NO: 433027 - DNA, 57 bp, Oryza sativa
tttcttccttttttttttttttttttttttttggttttttaaaaaatttttgggggt

SEQ ID NO: 433028 - DNA, 84 bp, Oryza sativa
cttccgggcgattgatattgcacagacagtatggtacaccaacagtcacaacacacattcttctctgtttaacccaaacgccgt

SEQ ID NO: 433029 - DNA, 423 bp, Oryza sativa
ttgtagctagtacagtactgatctcctgggtacatgggaaaggagaaaggggcttgctacagtacaaacaacagcagcaaagcaccggcgacggcgaggccgacgaccaaggggtcaacaacagcgtccggcaatggcaggccaccgccgacgacgctgcacgacgtccccgacaagctcctggagctcatcctccaaaacctcgattcgtctctctcgctcgtccgcgccgcggcgacatgccagcggtggcgccgagtcatcacccaacagagcttcgtcctcgactacgacataccaccgcatcagatcgtgggccactaccaccaccgtctccatccaccatccttcactactcccaaacccagaggctgctgcagcagcgtcgcgttcgtccccacctcgccggagtttctcaccacc

SEQ ID NO: 433030 - DNA, 371 bp, Oryza sativa
acactgcagcgatctagctaacacattccttttcttcagaaaatgcagcagtatggaaagatatagtgtccagaaaaggcaaaaactactttatttctagttaattctttgctatgaatagactatggcatgttgtgctcaaacagaagagcaatgatatattgtgcaagaatacattttattggatgagttgtgcaggatattgtagacgagtccatgccacctttcttgtttacaacgaataggttactccgtaattcaattttctgttcccgactcctggacagaacagccctggaacagactagtatacttcccaggtcaatggttgttctaaaaccttgaacagaacaggcaccgagctggtggac

SEQ ID NO: 433031 - DNA, 147 bp, Oryza sativa
gacacgccacgcagcggtgcattaagcacgaagggcgtggggggtacgcgcaacgtgaccggtgcacttgccagtggcctagcgcccagtgctcgcgctttctgccctttctttttcgctacgtgcgacggctttcccctttaagct

SEQ ID NO: 433032 - DNA, 216 bp, Oryza sativa
gtttattaagaagaagaagaagaagacgcgaagctgggtgcgtgttcatactaacgatacctaactcgccttccaagccgcagaattaccccgtcgttgatgcggatggaggcccggggcctcccggagcttgggtcgggggcgagggacccagccggtactcggcgatagttgatagtggcgtcagcagcggaagccggcgatgccgctggctgg

SEQ ID NO: 433033 - DNA, 96 bp, Oryza sativa
gcatgctgcagacgcgtaacgcatcggaaccagaaaccgtgttcttatgatgcgacacacagcatcagacatgccggggaactgtatagataatca

SEQ ID NO: 433034 - DNA, 475 bp, Oryza sativa
ttattctccctcatatggttattattgtaattatttaccctttaattcaacctctgctattacttttgtggtgctctcaagtacgttgatggtcataactgctctatgtggcatagtgatctacttctatcgctcaaatatgcttatacaatcaactaggttgcttattttagaatccattctttttggttgtttaatgcaatatgtatctgtttttcttcttctgggacctataacgagtacaattaattgcgtattgtgggtttgggttttctccattggatttgtactggtaatagctggtctattaactcgtatagctcacattagagcgttaaacaaacctaaaattcgacttcaaatcaaaactattaccttaatttttgcctggtttgatcgtttgcatggggatctacaagtcttgggttatcttggagccatattggcttcttaatgttatggacatttttaaacc

SEQ ID NO: 433035 - DNA, 531 bp, Oryza sativa
tatgagattagacgaacgagttagataaacaataatagagatatactactactagtactaccaccagggggacaatcatgctatccaaacagctgacctccaggctcaaagaggagcaagaaaaagaccaacatcagctcaatgtagctcagtgtgatcgtctcattcggaccgtatcgtgcaagcacgaggcaaatcatgcaatcaagaaagtcaatatcaatgtgttgcagttgttcgacgacatacgcttgtacgtgccgcccagctatgttgtcctaacgagcgggaagacatcgggaccgggttctaggagtggtgagcaatcgccaccctcggtgatagtggccgatcagaaagagagtgcactatcgtcgccatccaagtcatcagagacacaggcacagccagctactagtacaactggcgaagtgcttgaggttaatttcaaagacgtgctggcgcatatcatagacagtcttagtccgtctaatgtcagcagctggtttagcttgactctacgtcgacttc

SEQ ID NO: 433036 - DNA, 155 bp, Oryza sativa
actatcctctacgcacctctgcgcgcgcgccacctgcttgacggatagccccgacgctcagacaatgcaggcgccgccgacagcgacacaaccaggcgcactgatgatagtggcactgaacgataacggaaagcctacccggcgagccacgaaag

SEQ ID NO: 433037 - DNA, 303 bp, Oryza sativa
caagtctagagagagagagagagagagagttgctggattggacgccattgatgctgtagcagagaggtgccaaggtccaagaaagtgagagagagagagattgattgaatgaacatggaggctgcaagaagagtatgaagaggaaggcaaggtggtggtttgctgctggaggttcttgccgctcatctgttttttctccttgcattggcgcgcggcgcgagcgcttgggcccacggcgggcttgtcggcggcgccggctttttttctaaaaaagccgaaagttcatggatcttgatataagga

SEQ ID NO: 433038 - DNA, 353 bp, Oryza sativa
ggggaaaacacccttctttcaaaattagagttcctttttccccaaaaatttttcaaaaaccgggggaggggcccccgggtcttattaaacgaatttgaaacagggttgggaagggggccccagggaaaaggggtgcccaaaaataaggggttttttttttttttttttttaaaacccccaaattttggggcctagacctaactgggggccaggggaggggcctcccttaagggagccacggggggccgttaaatctcctaagcccccccacaaccccagggccaaaactccagggccgagcctaagaactttatattggggcttccagggggtttaaaccccaggggtttttt

SEQ ID NO: 433039 - DNA, 470 bp, Oryza sativa
ctaagtaagtgaatgcttagctagcttcgcataaatccagctctctcttgctaatggcgggcgtcgaggtctccaagccgtcgaggcgcctgtcgccgaaggggagcttcaagctgagcctgcccagcctgctggcgtgcgggcagtgcaaggccacggccgtctcgccgccggagtcccccacgggcgtcggcgcgaggtcgttctcctcgtcggcgtcgtcgtcggcggtgacgtcccgggggagggagcgcgaccgcctggcggagctccgggagatcttcggccactttgaccgcgacatggacgggcggatctccggcgacgagctccgcgagttcttcgcgtccatgggcgacgactccggcgccgtcgccgccgtcgacgctgtgatggggctcgactgctcggcagtccgcagcttagagcggcggttgagttgctgcctgttgcttgcgtttgaggacttc

SEQ ID NO: 433040 - DNA, 548 bp, Oryza sativa
  unsure (1)..(548): unsure at all n locations
ctcaaattatttaaataacacttttatcttgtattgacatgtattggtttgggtggttcggacagtcttttctttgttatccatttctaaacatgtgggctctgttgatgtacttagtggataagtaatatagagctccagcagaaattatgtcttctggtaatttttgttagacatattatctgagttactgttgagcaatttaatgtgcgaatggttggtacaaccattagaagactaaaaaatcctgggaaatacaaatacacacaagcaggtatttttactgcatgcagccttgatgtttttttttcttagaacatcttttcccttttactctcggaaaagatcaaaccatttgcttctgcagtaggcacaatgtatcatttgttttcccattctatgaacttgcttctcgtgtgtattaactggagcaaacaagcttgaaaaatgttggcgatggcacatgtaagcttagatcactttatgcttttaaaagcagcttatctgcaggcatggngtttctacattctgngattattaggttgctg

SEQ ID NO: 433041 - DNA, 464 bp, Oryza sativa
atttcttttcctctactgaacccttccatcagtcgtgctgttcttcagctcttcagcatgtgtatatgattcatatcatttctcttgctctactgaagccttcacccgtcgtgctgtacttgctggcatgttacaggtgtagtgaagaacaaaaaagctagtgcgccccacaaggatacggcaaagtatggcggaagctgcagtagtccaggccctcattaagattggatctgcttttggagaaacagcactgccattactccaagacttcataaagaaagaagcagctctgttacaggaactaccagagctcgcaaaatgcattcggggggaattggacatgattagtagcttccttttgcaagtgcggtcgaagatccacagcaccgacaatgaagttctgaaacgcttggtggtgagagtacgccaggtggcctaccatgtcgaggacataatagatgagt

SEQ ID NO: 433042 - DNA, 351 bp, Oryza sativa
  unsure (1)..(351): unsure at all n locations
tcttatctgccattaccgaagccgagcaggcgaggcgaggcgaggcgagcggacgccatggagcccggcgtgagcatcgagtccgggtcggcgatccgcgtggcggtgctgccggtgggcgggccgatctcgccggcgcgcctccgcgactacgcggcgctggtggcgcggacgcgcgcgtcgacctcgctgctgggcctactactcgagcaccagaagagccttnggcaccagccgggggcggggtgctcgctagttggctcgggtggtgcctgccggggaggacttccagtcctcccgcaaggtgctcgccgtcgtcggcatctgccaccttccgttcttccccgatct

SEQ ID NO: 433043 - DNA, 294 bp, Oryza sativa
gcttctttagtagcacgacggcgagctcgcacacgcatcccgacgccgccgcgaggccgcggccgccgccggcgacgatggatctcccgccgctctcccaccaggcgctcttcgccgccgtccgatccgcggacgccgccgccgtcgccggcctcctggccgacgccggggcgttcgggcccaccacccaggcgctcgccgtcgcgcagacggacgccggggagacggcgctgtacgtcgcggcggaggccggctccgaggagatcgtacgccttctcataccgctctacgacc

SEQ ID NO: 433044 - DNA, 400 bp, Oryza sativa
gccgccgacgccgccgcatcgcgcctcctagtccgccgcgcgccgccgggcctgctgcgccggttaccccgcgcggcgctcgccgtctctcgcccgtcgccgccgtcgacgtcgtcgtacggtgcagaagccgtcgccctctgccggcagacgctcggccaccgcgctaggatgggacacaccgacgacgccgacgccgccgggggccccgcgctcgggctcaccaagcccaacgccgtcgagccgacgcaggtgcgtgttcgggatggggttcgggttcaatatcaggattcatttgctgctaaagacgtcgaattctgcgaatggaagggagacatcctcgcaatcgcagtgacagaaaatgatctgggcaaaggatcagacttcaaattcgagaatg

SEQ ID NO: 433045 - DNA, 381 bp, Oryza sativa
ccaaaggccccagcgaatgtttcctggcgcaagccacgcgccacggggaccttgagctgacggtatgccggcgggcgcacgaggcagaacccatgccgggccagcgcatccaagcgcgcagctggggtgacgacgcacgacggcggccagacggctgcccggccgtcaggcgacccacaaaggtggcgctcacgcaggagggagatcagggacctgcaccacctatgaggtggtcgggcgccgcccgcaagcagaggaaaccggcggggactgcggccgatgcgacggcaactccgaagggcatgaggaggccatgcctgttggcgctcgtaccggggcagggacacaggctcccaaaagggccgtaggtgaccgcctgtg

SEQ ID NO: 433046 - DNA, 481 bp, Oryza sativa
ttcgcacgccccagagacgaaaggcgccggcgatggtgggctgccgcagggcgcgcgccggggaggagaccggggagctggcggcttaggccgggcggcgcggcaggaggcagcacccctgccgggccagcgcatccaagcgcgcagctggggtgacggcgcggcacggcggccaggcgggtgcgcggccgggaggcgatgcagagaggtggcgttggcggaggagggagatgagggagctgcaccaggtaggaggtggtcgggcgccggtggcgaagggaggaaaccggcggcgacggcggccgatgcgacggcgacgccgatgggcgtgaggaggccgcggctgggggcgctcgtcccggtgcagggacgcggccacgcaaaagggccggaggtggcgcctgtgcgggccgatctggtcgcgcgcgggcggcgttccacccggagcggcggcgaccccgatcaaggcgatgagggtggc

SEQ ID NO: 433047 - DNA, 465 bp, Oryza sativa
tttttagaccgcaagcgggcaaggttcctttgttggtttagggtccaatgccaacgctatttacttgaacctttctcaattgtcacgaactgtacaaaagttgcaaaagtggtgggacctatggtgttgcatatcacaccagaatagggaatcacaggctatgatccagatatctagcagaagttgggtcatgcgttaagctaacgataatggcatttttatcgatggatggagagcacattaatgcgccagccataacatgttatggcttcagcaccaagaacatgacattaactacctcgaaggttgatgtaaacaatatggacataagggccataaatacaaaatcgacctttcatgattcaggacgatgtgagcatggaaggctaagctaagctgcaggcctatgaacttccacttctgccgctgcattttgtgccatgagaattgtgcacactcttttag

SEQ ID NO: 433048 - DNA, 152 bp, Oryza sativa
gtatctggggctaggcgcgctttgggcagccgggtggtaccttccgtggtcgggggtcgccagcagctcaggagattgctcgatccaagcctgcagcctgcaggtctcatatgcaatgagctagtcaagatgatccatcgctgtcttgctgt

SEQ ID NO: 433049 - DNA, 488 bp, Oryza sativa
aacagaattcagagataccgtagttgcttctattctcgaaaatttactgaaaattccacaaaggaaggattacatcatgactgactattccctaagggcacagatcaaaattggtaagatccactaattgaacacaattgaggaattgcaggtacctgtttctgccatctctacagttatctagtggctctgaaaatatatcatcttagcattttaaagctaatctatctctccatcaacaatgaaatgcctcataagaacaatttctttcacaagattcctgtaggtgaatggtcggacagcggccctcagaaagtgcccaggagccttgctcttgcgcttatcttttgcgcttctgccccttggactctcctgctgctcatcctcatcctcaatctgctcctgctgctcatcctcatcctcagtctgctcctgcttcataaccattgtgtttgcacgggccattctcaattccatctctttctcct

SEQ ID NO: 433050 - DNA, 484 bp, Oryza sativa
ttttctcccaatttaacagagagaggctctccactttggacctttttggagatggagctccatcaccatggaaccagcagcgtctgaggtggctttcaggctcctgatcaccgatcaccgccagacttgccctccatcacattcgagatcttagagcatagcaatcagatgggttcaatctgatggtttttccccattctccagctgatggatgtacacaagaaacttctcctggcctccctcagctgtgtacttctgatccaagtagcatcgagtgatggcactgcagagggagttggaacaacaagctggacatgtgtatgcacagctcatccactaggtgaaccaaactcaaatagcagcttgtcgtcgaattgttcttcttcctgccattgtctacaagatgatgatggtggcacaggatcatggaactgcacatgtgcttctgacaaagcccttataatagacacactgcagtacatga

SEQ ID NO: 433051 - DNA, 242 bp, Oryza sativa
tttttctctctcctctctctctctactcttctcttctctctccttttgttgcttccatttctcgttcttgcacggggaagaggagagaaagatgcgtgtcgctgcggtttgaaaaaggttgggtgtgagaggagagagaaagtggactggaggggagagagagagagagagatgggttcttgcgcttcggttcacaaggacctcgggttccccaagaagctgtttcttgcgttgtcgcctac

SEQ ID NO: 433052 - DNA, 394 bp, Oryza sativa
tgtgttctctctcctatctctctctactctggtgttgtctctcctcttgatgcttccattcctcgatcttgcacggggaagaggagagtaagatgtgtgtcgctgaggattgaaaaatcctgtgtgtgagaggagatacaatgtcgcatgggggggaatgacacagagtgagataggttcttgcgctccggctcacaaggacctttagttgcccaagaagctgtttcttgcagatacgcctaccacggcaaagatggcctcgaacggcaccggtggcggtggcagggtactctgttgatctcacgcccaaggcgcagcatccggcggtgtgcgcaagggttgcctttatgagccccctctctgggaacaaggatcacatgctctctaactcgcg

SEQ ID NO: 433053 - DNA, 505 bp, Oryza sativa
tctcctttctgaatctttgatatttttctatgtggaacatggatgccaagtttcacatcttcaacagatttgtctattcgctttgcaaccacagaatcctcttcgtacgatagccacagcttctctgatgaacccggtaatgtctcccactaaatacaacttctggaggacatccctgaagatgcacacgatccaacagatatcggcacctggattcagagggcagacttgcagatgctccaactgtttgggaaagaattggtggcattgattgatcgaagcattcaagaaatcaaccgcgagcacggccaagctcgaggagcatctgaaatgcgtcgcctgctgaagctagctgtcgtgattaccatgctgccaacctcgcctgatctgttgcctgtcatactgcgtctgtacgcgacgctcgggactttcccgatcgaccagctaaacggcatcaccaaagagctcatgaagtgtgtcaggaagatcttgcgacgggtatgtt

SEQ ID NO: 433054 - DNA, 178 bp, Oryza sativa
tttatgtttctctcgtcaatccgtccataaatccaaggagttgagaactttgagatcccttccaaccggttgccaaggacctgtaggttgtaactatttcctccggaatttgggaggggtttggtttacctgtgcaagaagaggaagatgaagaagaggaggaggatgcaagacgttc

SEQ ID NO: 433055 - DNA, 107 bp, Oryza sativa
gccttgtttgccccacagcacatccccgagaaggggggagtcttctcagggcgagccgagcaccaccagccaacgtagggggcccaagggggcgaactataaagcag

SEQ ID NO: 433056 - DNA, 469 bp, Oryza sativa
tttgcgtgcaccacctacctccgctgcaaggtctaccacccggggatggaggcggagtgggacctccacgccgtgcccatcgcccgcggcggcgcgccgatcgccgacgccgccgccggctcagctctccggcctggaggcagtggaattctgaacagctcgatggggatgctatcacctgcacttcggcctatgccagtgacaccaacggcgctccggtggccgcctccggggagcgaccagtctccggcagcaaaggcggccatgtgcttgctttgcaagggtagctatgagcgcgagctcgctaagcttgaggccgaacagacggataagccggcgtcccgccctgaggctgccaagcctggattgccacactggctgcagctcagcaatgatcaaaataaggccaaggagcaagagccgaaacttaagaagagcatagatgaacttgagaggaaatggcgcgaga

SEQ ID NO: 433057 - DNA, 506 bp, Oryza sativa
gtctgggcaagaaacttgattggttttgtggattcgctctgagagattcaagaatcgaaggaaagcaagtttgatgatgataagcatagcagggtgaaggagcttgttaagaatatgcaaacagtattatctcacgaaatagggcctgtttctttaaatgcacaagagaatgtatcccttccagatgatcttgtcctgaatgaaaatcttgccgagcttgttgacatcatcagtgaagatgacactactctgtcatcttcaattgctttctaccctcgtagctgcggctcagtcgaaaccagagatgaacctgcattatcacttggactatcttctgttctttctgagcaccgtaaaaggcacggactgtactatcttccaacaggaaaagcggaggatgggccagttgattatcctcatgccaatgatcctctgctgtctgctagcagcgaaagtgctccggatgataaattgaagactatccatcctgttaccggtgggaaaaa

SEQ ID NO: 433058 - DNA, 519 bp, Oryza sativa
tgttgtgctcgctcgaatcggatcgaaccctacgagcgctgtcggaggcggagctcatcgccggagtagcggcggcgcgcggcgccatggaccagagggagttccggcggatgctcgagctcttccccgtcgttcgatctcgcgactactgcgtaatttgcatcccctcccctgcctccctttctcataccctactctctcgtttccagcacgtgtagggcgggggcgaatcggcgtttcggcggcgatctaacagttcaggtgcttgagtcgggggagcaagaggggtctcgattttagggcatgggttggtcgatttgggtggctgatgatttgtggccttgggctgatgcgcgtggagactggattacgcattatgttgagataatctcactttggttatactgatccgtcgaattgcgtcatgaacctgtcttctagcctgagttgttgcgcagcacaagttgtatagatgatagtgcactggtaattgcctgagtgcatgcagttaaaatgaga

SEQ ID NO: 433059 - DNA, 148 bp, Oryza sativa
tgtatgctatcccatgatttgcctcaaccggttgatgctgatgtactttgcctttttgtgcaaacttccaaccgcaaactcatcctgttgtaagcgaattcggcttatgtttttttttcatgaataagaataaataagtttggtttgt

SEQ ID NO: 433060 - DNA, 468 bp, Oryza sativa
tttttctattgcacctcctgtgattactcatgactctggaacacctaagaatatatgaaccttaagacattctgtgtcgtctgacaaagataatgtaccttcggtattgactgcatcttctgaagaacagaatctccgtggatgcttcaatttagcagccattgtctcggttgtgagtcactttaggattgtaatagaacatttgaccaagtatggaattctctttaactgggcgacatttcaaacctacgttacgacgaaatatataattcattggaacagttttactctatatacaccctctaattgcctagacttagcaaaaattgtttattattagaggactggatttcgcagagaatttatattatactgatctattaaatataatacgatctctacttctgccttctatattcgtgtactttgcacaagcaggctttatgacgggtactgtcattcttttac

SEQ ID NO: 433061 - DNA, 520 bp, Oryza sativa
gtttgtggtagttgtatttctgggattgattaataagatcaatactcaatgtcctggcttgtgcgaagacgccaacactaacatttgtgcctccggatttgttcagggtctctgtcctggtgcttctaattttgagtgttgtgaaatgagtactcctaactgcaacggacaatgtcaagataactctctaccttgtggcggtatttatattgctggagattgtcctggtcctaataatgttcaatgttgttcttcttctggtcctactccccctcctccccctccttctggaagttgtgcttcttttgctaattctcaatgggattgtactaccccttcatgtagtactattgtccctgctggtactgcccaacctgactatgaatgtgctgagtttgtatcacgatctcttgcttctgcaggattaattcctcttgatccaatggcagatcaatctgagtttagttctttctcagctaatggaaagacctatgatttactttgggtatcttctaaaaat

SEQ ID NO: 433062 - DNA, 492 bp, Oryza sativa
ttttcttacccaatcacatcgccgccatcgtcgagcttgttctaaccttctaagctattagcaatggcgtcttcgtcgtcatcgtcgccgtcgaggccgttgctcaggcgggtgctctcgttcagggagccgctgttgctgatcccttacatcgtcggattcctcgccgccgcctcgtcgggattcttctacagctactcctccttcctccactcgttcgcccggacgctcgtcccggcggccgcggccggcgccgtggtcaagtgcgcgtacttgtcggcggcggcggattccgacgagccatgctcctcctgcggcggcgaggatgaagacgtctttgccgccgtcgaggaggatgaggctcacctgaacaaggtggaggtgggagagatcatggaacggatagggctgggcgtgggcggccatggcgaggggctgaaggcgaggatggggcgcgaccaggtgtctaggctgttcgacgcccacaagccc

SEQ ID NO: 433063 - DNA, 352 bp, Oryza sativa
tgtatccccctcccatacttctccaggctctggtgtccttttcgtggcatgtgccgtcgttacgacggcgttacaagatgtaacattggcaatggcgtccttcgcctacgccgcagcgggcgtgtgtcaccacgcactaagatccgggcaatatcaggcctacgggcggcctcggcttttgcacgaacaccatcattttcaggccgttggagctcaccaagcgtgggggaggcggtggccacatcttcgtggatgggctgaggcgcgcggtgttgctgcggcttgtgggggacatgccgatgtctgataagactttcacccagcagactatggacgctgtcggggtctaccg

SEQ ID NO: 433064 - DNA, 561 bp, Oryza sativa
acccctcactattgtttaaggtgggcccccggtggggccccgccccgaattccggggggccccccacgcgcttttctagatcgggaccggccgcccttctctcgccgtttttttttaagaaagagtcgcctcaagaagatcagcctatcagacagatcaagtagggggagacatcacagcacgctgacgcgagagcacagcagcagcaatgccaatcagtaaacacttgtagtttggaatctatggagtgctaaaagaccacgaccacaacaactcaacataatttacagcaggatgacaccaaaaggccaaggcagtgatggcagctacggcactcattctgtaacccccctagcttcaccatggatctccaatctcgttgttattcccgcgttgctgcacaagaataaaaacgacagggtaaacaagaataggtgccacatacgtcaggataacctgcattgccctttaacaatcatgagtagatgagaacataatctgggttgcggaataggaaaatataacatggatgctgagatcaaggctgtcgcctttggagct

SEQ ID NO: 433065 - DNA, 334 bp, Oryza sativa
ttttcttaaagaaaccaattaagtacgccctcgggtactctgctgactgagcgggttgtattggaccgcttaccgttcaccttcatcaacctcactcaagtcaagtatctacatgaagattctttcacccccgcgcatctggcacctccgagagccccgcacgttcgggctcgtctcacgcagaaatcctgaacgggacctcttctatatccttcttcttaccagctccgatccgtttattgccgacaactagtgctacgatctgtggtacgcagtctacaagatttgattgccgatcaacgtctacccaacattgacctggctgacactggcc

SEQ ID NO: 433066 - DNA, 135 bp, Oryza sativa
tcgtttctcgtgtgattctggaactgtatccgccgtgagtgttcgtagcattcaacgcgcgaggcttggcctagatgataccgcctctatttccacccattggactcttgacagaagattttgtctctgcttctg

SEQ ID NO: 433067 - DNA, 448 bp, Oryza sativa
tcccgtcccgtttttccgggttcgccccacgcgtcttttttcggcggtgcctcaggggcgtctctcgcgggtgtctaggaagcaagggtcgccgacgaaggagttgccgaagcagaggctcgtgatgggggagatccggatcctcatgcgcgacgaggagccgccggtttgctcaccgtcgcctgctccggttgcggcgcaagccgcggcggttgaccagcgggcgccccgtgttccggctgtggcgcatgccgcgccgactgaccagaaggcgcctcgccccgccagatcgaagcagcagcagcacacggccgctgtgccgacgaagatcaagtccgtcgccgacgcgccagtctacgccggcccggccttctcctcggcttcgcctgagccgagctcccttccctttccggtcttcattcgtcgcgccgaggccgaggcgacccgc

SEQ ID NO: 433068 - DNA, 455 bp, Oryza sativa
tgtcgacgtgcagtaaatgaaatacgtcatcttgttctcggttgttctggcagcagtgggtgtatggtttcagctccaaacaaacaataaacaccctagtgaatatttgaaagaagattttagtactcctcctccatggtttctcttgaaagcagtgcagttggtggactctatcaccaagaaattctcaattgttcctcctctattccaggtgttagatgatgtcctcattttcgaaaaatcccaactggtgcacacaagtgccattttggctatcccagatttgattggtgatcaagtgttatccaatattgatctggctgatcgtttagctccggctagtgctgacaagaagaaggtacaaatgaacttgtgcagattcttgagagccctcgccgcttatggttactttgaagaggtttcctcggatcgttctagatttgactattgtgatt

SEQ ID NO: 433069 - DNA, 295 bp, Oryza sativa
cgcttctctagtgccccaaggggatgaggacgctgagcacagggctggctctgagcacactggtgctgagaggcttggcgaacgaggaggtaggagaagacgtccacaagctcaccggtgaacatcacccctggctggacccagacctgaaccaggtgcaggtagccatactgtactgagtcctggacggagcctgactggacaacctccaggtatacatcggctggcgaggcacacacaagcacaaaacactttcttcacccagacgggcgctaggaagcatgtgcccaaggcc

SEQ ID NO: 433070 - DNA, 393 bp, Oryza sativa
ttttcctcccctttctctctccttcccgatctgtctctctctctctctcctcgagctctcgccgcacgctcccaaaagcggcgccgcgccgagctcgagctcgagctcgcggcgggcgacgagctccggcgagcgcgcgcgcgcacgctgaccagcgggggtttccccgtccgagctcgcgcgggcgtcgtctcgtcgggcccccttttcacctttctatcggtcattgaggggtgttctctctccccccaggccaccgcttcgcctggccgctcgggcgctcgccgcggattttcctggcccgccgagtggcgggatcgcggccaaccgcggaatggcgcagagcaactgggaagcggataagatgcctgatgcgtatatctatgactattt

SEQ ID NO: 433071 - DNA, 275 bp, Oryza sativa
ttctgaaagaaacccgatggcgtcgccgccgggggccgcgccgcctgagtgggttgtattggaccgcttaccgctcacctccatcgacctccctaaggacggcatctccctctcgctcgtcgcaaccccgcgcatcttgcagctcctcgtgtccccttcgctcggcctcgcctcaggcagcgtcctcgccgttgaccccttcggcaatcttctactttccagcttcgatccgtttcttgccgacagcaagtcctaccgttccctgggacgcagtc

SEQ ID NO: 433072 - DNA, 455 bp, Oryza sativa
gcgcttttatcaacacccagcacaaaggcgaaacggggaaaaagaggaggaaaacagcaagaggacgcgaggggtcggtgtgggagagggaggctacactacagcagcagctgaagcagagcgggagagtgatgagggagtgagaccaggccagcctagccaggcccggtcgctcggaaagtgcggagccgtttcccctatatctccactctctgcagggccaggtgctcactgcgctgcgcctcttaacacgcaccacccgtactacgtgcccacccgcgcgcgcgccgaggagaagagacccactaccgtacatgcgtgcgcgccatgtcgtccgacgctgggggcagcgggtacggcggctgccatggtggaggcgcggagcaccaccaccagcaccacagggacgccggtcacctactgctccaccaccatgcgcagcacgtggccggcgc

SEQ ID NO: 433073 - DNA, 414 bp, Oryza sativa
gacccggactttttggtcctggtggagatgaagaacgaggcacaggccgttcgcgtccacgacctcactggcttctacctgtggatgaagaacgaaccggatgcctacgtgaccatggtggtcgtctgcttcaaagacctgctcggaccagcactagtcatatcccccattacttactgcatgcgccacatggacttcatgcacatcctcatggaggagcaggccaaggcaggcaagccacggacggagctgatggacatcactctctagatcgacaaggagaaccaggtgatggtggagctgaacgtgtacaggacgaactccaccgaggaggacagcctgatccgcacgcaagagttcgacaacgcgtgcatcgaggcacgactggagagctacagcggaacatgatccaga

SEQ ID NO: 433074 - DNA, 422 bp, Oryza sativa
gcgcagcgcacgcatgctcttgtactctattttgcgcgccctctttttttttttttgggtaaccaattcaagggaaatcctactttgcattattattcacatttcattcaatttttaggaaatgtttttacacatggatgtacagggacaaaccgtgtacagcaatgctgggcgtgccattgcacagttaagtgagccttaccttgctcgcaacatatgtgtcatgatgaatcccaaatgacattttaccgctaggctctttggaggatgtttgtggggaacacttggcctcaactgataaatttttgaggactcctcggcgtggatcacctaagacatcattggaaacactgattgcacatttggggttgtcaacacatgcctctttcaccaaatccagagtgctctatgcatgggaattt

SEQ ID NO: 433075 - DNA, 158 bp, Oryza sativa
ttttttggttattaaaatttttttttcatttttattttttattaaatattttttttttgaggccaaaaaaaattgtaaaaaaaaggaaccaacatttattcaaattaggggacatgatttttcacataaaacggacaaaaccaaagctgcactacatt

SEQ ID NO: 433076 - DNA, 419 bp, Oryza sativa
tcttctctctcctctctctctctccagtctgcaggttcgaggagaggccaatggcggacgccgactcgagggccccgcccaaatcggaccccggtgccacgccgatcggttcgatctccccttcctccgccgcccccgccgccggggaggacgaggtggaggtggaggagcagctcgccggactcgccatcgccgatcagggggaggagctgctgcttcccaagcccaccggctgggaggatggccctgttgttgttgctggagatgaggtctcccgtggtgagaagctgtcgggtgaggtggcggccgcggtgggggtggagggtgctgcagcggattcgaggccgcggttcccgaggcgacccggggagcccgactgcacctactacgtcaagttcgggagctgccgctttgggatg

SEQ ID NO: 433077 - DNA, 392 bp, Oryza sativa
ttggggtatttgcgagttgggtgctatgcacatggggggaaccacattaacataccaagggatacatacatgtagcaaggttttgatgggctggcacatgaaggcttaatcagaggttattgttactgagatcgactgatgaaggaaatgtctgtgagaccaataatacaatcattggttctattaatgaaggccaaattacttctaatgttggaactactgttaccttcactgggaatgctaccgttcggatttaccaaactcatactgatcattacactgactatgctgggtctcttactcctttctatactgaagctaggtctacttcgtactggtttgggggcgctggttttattcaagatggtcaaggtacctgggccggtgctttt

SEQ ID NO: 433078 - DNA, 263 bp, Oryza sativa
tcgcgatctaaactggtcctctcctcctccggcgacgcgatcgagaagcggcgccggattttgccgccggcgacgcgcggctgagggggcggcgggaagggggtgggggtggggaggagcgattaccatagccacaattttaacacttgagcagaattgaacccagcgacagtgtgtacgtgcacaaactcttacggggatgaacatcgtgtatcacaccgaccgagggaagcaatagtgtgcaccggtgtcttaaaagcatt

SEQ ID NO: 433079 - DNA, 348 bp, Oryza sativa
ttttggtttttttttttcaaacaaccgatctgcaactttgcagatttgaagattcatctaaccaaacaagaacatgatggagtattttacatcagaaaccaaaagcacaagcaaaagagagtccaatagtaacacaacaccctatctaaagcaaagaacattactacagctggaaaaattactacttcctcccttctataatactatgaaagatttttgagggatggcgaatctggacacacagaatattattacagctgcagggggcaacaaaaacaccctgctaggctgctttgtcggcgccccggggacacacagctagctacatgacggagcaggcgttggggt

SEQ ID NO: 433080 - DNA, 468 bp, Oryza sativa
ggcaaggacgagcaggagcaggcccctcctcctccgcgcgtcgtgcgcctacgcgctccgggaggggcagtcgcagcggttccaccgcctgccctgcggcctcgacctcgaggttatcgcccagcagccgcctgccccggccacgggcggtggcggcgccgccgcgaggccgccgctggtgttcgtgcacgggagcttccacgcggcgtggtgctgggcggagcactggctccccttcttctccagcgccgggttcccctgctacgcgctcagcctccgcgcccagggtgaaagtagcgttccgccagaaaaagtggctggcacacttgagacgcatactggcgatattgctgatttcatccggaaggaggtttccctgccacctgtattgattggacattcatttggaggcttgattgtgcagcaatatatatcttgtttgggagaacttctgcatccaaagcttgc

SEQ ID NO: 433081 - DNA, 500 bp, Oryza sativa
ggctagcaattcatgcagtattgttcactaagcatgcttaaatttattcaatcaaataataatacaaaaaaaactgaagagcactaactaaactgcctatcaaccaaagattctacatttgaaaatgaacaagggctacaaaatgtagaaacaggtcttaaaaaatacaaaagatttatcttggtgtaagtttctccagccatgacaagataatcccagctcctttatcccacgagcaatcaagcatcatatcatgggctatcccttcgatgcagactggttgcacattataaaatcttgcagtttctgaaagcccttcagcatcaacaatgaagtcactgctggcgcccacaacgaggatgtttactgtattatttggcacagaagctacaggcaatgatgcattgagcttccttaggtcaaatagtggtaactttgagctgtccttcattagcccttggtacctttggaccaggtcattatccatctctggcgagaaa

SEQ ID NO: 433082 - DNA, 302 bp, Oryza sativa
gggaaaaagcctcacccccttaccataaaaatcccgggaccaaaatgtattctcattatccgcgggcaatgaccatatgatgatgcgggggctacaagacccgacgcttcctggatctgccccacacgatgggcagaacaaaatgggaggaataatggcccataaacagttttcaggggacaattaccacagctgtttgcatttaagcagcaggcttgaattcagggctggggggtttgatcagcccatggcattcttgtgggtccagacgggggatgtgcccttatactttggacgaaccg

SEQ ID NO: 433083 - DNA, 401 bp, Oryza sativa
tggttttcgccatggctaccacccaccacctggagctccccctctccattcccaatctctccgactcctcctaattaatcccgtattcccaccccccaagccaaggacagcatctcgcatccgcgtccttcaattgatttgattgggttccccccctccatttcagggtttcgtttcgcatcgcagcaatcttcccgacccagcaagcttcttcttcccttgggtccgttagggtttgagattgagaggggcggcgctggcgatcgagattggtacggcggcggaggcggaggtgggcggataatgtgtatactgtgcgccgtgcaacggtggtcgcggcgcgtcgccaccatgctgccatggctggtgctcccgctcatcctgctctgggcgctctccca

SEQ ID NO: 433084 - DNA, 391 bp, Oryza sativa
acccgtcacgaaagctggaatcctatttaggcggccgcccttggttctatctggggcaggcctatctttctttgctcatctttctcctacgttctttaaaaggaacagacgcaaagggctaaccacatgctttatgggcataacccacagtttatcgttaaacggacatccaacccaaacacggggggggaaaatgccgaaccaatgcttaaaaaaaccccggctcataaaagatttcacacgccgtggggccaaccttagccctggccgcggaacccttgcaggggcccgtctccgaggtacgcacgaaggcatcgaacccaggaccaacatccgaaaacggcagaatttgtattcccctcactagcgacgcatactgaaacggacgctt

SEQ ID NO: 433085 - DNA, 417 bp, Oryza sativa
ttttggggaacggcaacggcgtgattaattattattatccacccaaaattcgatatctcaaaatgttcgcgacaaaatttccctgtacacacaacctgatcgatctcctcaccctccttccaaactaaccaactcgcaaagtatgcagtgacaatatactgtaaatatcagacaagaaagaaacaagaagaagaaaaaaaagaagacgatatttcgaagatgacgcagtgatgagcagctagctcgccggcattgcagcttagattagacgaggctgcaagccttgttgagggagacgggcttgccgagcttggcgacgtcgagcctgacgctgcactgcacgttggtcaggaacttgggcttcaccagcttgcccagcacgaacgcccgcgacctgaaccgcaccgccagctgcag

SEQ ID NO: 433086 - DNA, 309 bp, Oryza sativa
ttttggggacttcatgcatctttatctcccatatcggattaaagactgacaactgtacctcatcgccaacgtcattatacatgcatacgcctgtgaaaacgactggttaatggtcacccttaatttttttgacaaatgtttagaggtaagggcagatctcaatcagctaacccaaaaaactaaaggccggtcagtttacccaactgcattatatatcgacatatggagctatttaatagacagggggttgtcgacaaatcctagaattgtgatgggggctgccatataatatataaccgcttcttcaat

SEQ ID NO: 433087 - DNA, 392 bp, Oryza sativa
gtaacaatactgaactgatgatatattcatcattgtaaaaatcaataaacatgttccttcagcatgatggcatacaaatttgcaatggtaacttgttgtggcattgaataagacgattaaaattataatcttatttttttcccaacgatcggtattgaccaatcaatcttcctctgtcgaacacattcagagcgccgtcatggcctgctccgccgccggggtaaccgtcttcttcttgtcctcctcttgccacaggaatggcgtctcggcgttgccgtcgctgcagtagaggcacgggtgctgctcgaacccctgatcgctcagcaccgccctggccatgctcaccagctgccggttgctcaccggcgccgggtgcgacgccagcacggtct

SEQ ID NO: 433088 - DNA, 429 bp, Oryza sativa
gtccacacattcaagttatcatacatcaattccatctccaaatgtttacatcaattccatactttcaaacaaaggcaatacaaagttaacttgagagaaattaagttgaaataataaagcaaggcatcaccttgttaatcttgtttccatgtccaacactgggtgcacaagttttctcccttccagaatcatgattcttggaatttatatgattggccaggaaaatctccgttgaggccaacattgtttgcattaccacgtcttctaagagcaaatccatcagggttcatcgttggaagtatatgaagatgcatgttttccataataagagttgcttttgcttgagatgtttgagaagccagagcacgcaaccagcagcaacggagctcgctcaatcccagacatccttgttggacgaccccctaccct

SEQ ID NO: 433089 - DNA, 59 bp, Oryza sativa
gcaccgctgtcacgtaacgtctgtgagatcctcttatttgacgcggcgcgccctctttt

SEQ ID NO: 433090 - DNA, 76 bp, Oryza sativa
ataggccagttttgagaacagtccgccagagtggatgttaatggaccagccggaccggcaacagctgattgtcctt

SEQ ID NO: 433091 - DNA, 266 bp, Oryza sativa
tccacgcagacgaacacgcacccggggcggggacaatcgaagacacggacccgcccaagcaccggaaaagaggcctaccacatcggacgtcccacgaccagaacgacaatacaagccggctaccggacgcaacaaacaagaggatatgcaaccacggcaaaggaacgatcaacccaacctggaaaaccacagacacgaagacacccgaagcgaccaacgagcagccaaccaccaaagatgaagcacacgccgccaacccacggagg

SEQ ID NO: 433092 - DNA, 446 bp, Oryza sativa
tttgggtttttttttttttttcgttttttgattagaactcagtttgcttacgttttaaatttcgaagaatcaactggtgggctggaataagccctgttcattgaatacttgctgcacattgcaaaagtttcagcttatatgccgcgtttttgggacctcttattattaccaaacattacagtcacatttgactgtatttctcgccagaaccccaatcttcaggctccggagggaaatcaattcaccttgttggcatccttcagaatttttactggttgaattctggcttcctacatatatgcacatcagcacacatgcaactttaattagccttcgactaaatttagatgtctcaatcacaggctcacagccccaacagaatatagtaaacaattgtcacaggaagtgatataaatatcccagaataacccctgtgctcatgatgt

SEQ ID NO: 433093 - DNA, 375 bp, Oryza sativa
tctctgaggtgtaccaagtggtggaggcgatggcgcctgtgtacacggtagggtgagctacggtaccggtcggtgcagtggctgaaggcgttctcacaacgagcagcgtgccgggatcaaccactttgtggggctctacgccgtgccggagctcatcttggacatggggtccaccaccaacttgtgcaagaggaactgacggctcatcgacgcagacacgctggagaaggccgggctgctgctgggcctcatggcatgagcgctctgggagcggtcgcgcgcgcgcagtgccggctccaaggccaaggatgcggtgtcttaagcgctgcacagggctatgacctgctttttcgtcgcgtcggtgccacacaccat

SEQ ID NO: 433094 - DNA, 70 bp, Oryza sativa
ttctagtgttttgggggcttttatgaaatatccatgtccacacataacgacctttatggacgtataaaat

SEQ ID NO: 433095 - DNA, 376 bp, Oryza sativa
ttttggttttttttttttttttttttttttttttttctccttattgtttttttttttttaatttaattttaagtggcaaattaccacatttcaaccttaatagtttaaaactgacaaaagggagaaacatcttatgataagagatgaaactattaatgactgaaacctaaattaagacgacaccgacgcgacgacccaatggcaaagggaagctgctcagccgggcgcgaaaaaaaactccgaggcgaaccttttggaccggaacagcttttccatctccggggttgcgttaaacgatgcctacaggaactccggaaagaacgcctttcacaccgaaatttttccccgccggggaccgaaaaacgggtttgggggg

SEQ ID NO: 433096 - DNA, 504 bp, Oryza sativa
tctttttcctcctcctccagatccaccctccgccgccctcatttcgcagccgcgggtttggattaccgtgaaatgagctttcttctcctctctgaaaaggtcagtttggtggtggaaagattggattttgattcccccgattcgcttcccctccggaaagattcaaccttgtcagctctccatccctcaacgaggcagtactaggagctatcaatcagctatggcggaggcggtggatgggggcagctgggaggacatgctgaggaggatcctcccgccggggtcccccatcccggaggcgccgccgaatctcgattactccatagccctagagtacgacggcccaccggtggcctatgacctacctagggtggaccccgtcgagatccccacggcggagccggtgtccggcccgcagaggcttgggaacggaggagggttgccggttgtggagcccatcccgctcccagtgtcccggattgcccggtgcgccgagcccgtgtc

SEQ ID NO: 433097 - DNA, 309 bp, Oryza sativa
cctctatttcgggcgccctttttttttttttggtggtgaaaaggatactgcgctcaaatttaacaacgtaaaatgtgtacgttctagatgtgcatagcagccgacatacatcatttacagaaaatgaaccgtacaggtttaaaaccaaaatctagcctgaagttctgaatcgtatgcatttttagtgacctactctagattccaaagatgcaacacagccatccctgggggtataactgggatgcaggaacatgaacgtgcctcagctacacatgatatagcggcccttgtcggatgacatatattgaa

SEQ ID NO: 433098 - DNA, 312 bp, Oryza sativa
ttgtgtggaatagccgggaaaggccaatgcactcttccatgaaaccataagcacaacacgaaaatgatgcattatgcacaagacgacaggctcaaaaccattctttgcatggacactcgtggtcacaatggagccggttccagggggggagcgcacgctatttaagaccgataacaaacgcgaacaaggcgcaacagtgggtgccaaaaatgggctccccccagaacctaaacttggaaaggagaccgaagacatccctgggagaaatgagcacctgcggaggttttacaacccatggtcgctgacaagacc

SEQ ID NO: 433099 - DNA, 485 bp, Oryza sativa
gcctccttccggctggggatggtgcgggtggtctcgttcctcgtcgggggcctcaacgtggccgtgctgctgctcgggctctacctcatcgacggcgtgctcccaccggggtgcggcggggggctcgcgctcgccgcggcgcccgcgctggcggggatccgcgtgctcgccatgatcggcaccgcgcgcgcgcagcacgccacggcggatgccatcgcgaggcgccacctcgacgaggccgcagcgtcggtcgccgctgacgccgttgcgcgccacgagatcagggtgaggtataaacgctggttgtggtggactagattcggcatggcagtgggtgcaatgcaattggttggggcaatttatctcatgcttgtcattgtcagagatatttcaaatgaaagaagagccacttcctgtttctttggacaggatgaagctgatcatgtctcgaaacgagcattaattgctttggttcttattctttc

SEQ ID NO: 433100 - DNA, 265 bp, Oryza sativa
tttaattccgaaaaaaaaaaaaggaaagcagaggaaaacccctagccgcaagcccccccgccgcgagtcgtcttctcatctctcctccgccgccgccgcctgctgctgcatctctcgtcgtcgccggtgagggaagggaggggaggggggagggcgctatggcggacccagggaggtcccgaccacaggccaactccttgccatgacaaacggggcggtggggtgccccgccgcagccgtggggtgcccgaagaccagtgttcaa

SEQ ID NO: 433101 - DNA, 498 bp, Oryza sativa
  unsure (1)..(498): unsure at all n locations
tcggtataccgcggcgggggttccgcctcgggcggcggcggcgggggggcgtcgtcggcgtcggcgttcgcgacgcgggtgctgctgctcctcacgctgctgccgatggcgctggccgcgttcgccttcgcgctgcagtggcgcggcgggatgcgcgacccggcgggcgcggcgtggcccgcggagacgcagaggttccccggcatggagaacagcccgctcggatcctcctcctcctcctcgggcgggggcgggggaggcgggtcctacttcgccgtcacctcgtcgcagtcctcctccgcggccgcagactgcgccgagatcctcggccggagcgcggcgtcctcctcgcacggcggcatctcgctctaccgcgggtggggcttcgactccgacgcgggactaacccncaagatctgtatcacgggaagcacatctgcagggttacaccaaattcttccatggttgtactatccacaggtcatcggtgtttcacac

SEQ ID NO: 433102 - DNA, 256 bp, Oryza sativa
aggcgacatctatggagaatatacacgcggcgtgcgcgcgcacgcaagctcgtagcctctattttgggcgccctttatttttttcttggggggttaccatttcattgaggatctattacatttttcaacttttcgagaacaaaaacatggggagcgcggcgtggatcaaccacgccttttataacaacacctacgtttcctacaaaaccgaaccgcttatgcccaggaatacccaggcctgtctacagcatcctac

SEQ ID NO: 433103 - DNA, 386 bp, Oryza sativa
ggaacgcaaagtgttttttctcttttccgaaaaaaaccccggaaaaccccaaaacaccaaaaactagatccccaaacggatcgaagcgcgcggtggaaaaagaaacgaaaaagaggagaggaaaacaaagaaaagaatcgatgaactagtgatggtagtggtggtagtagttctaggagagtggtagttattattcaccacgccacgctcagaggacggcggcgagccccgtgacgaccttcgctttgggaggctgctgatgctgctgccacagctgcggcggcgatggcgacggcggcggcttcttcttgctcgcctcctccgtcgggcgccacggcgacggagacaccaccaccgtgatcttctccgcggcggggatctccccg

SEQ ID NO: 433104 - DNA, 339 bp, Oryza sativa
ggaaggggaacaagcaactggtggagagatagtacaccgggcacacacccacaatttgacggcaaaaactgatgcacaaggggtacacccccacccccaaaattagcaggctccagccccggaattaacagagcgggcaatttacgtcccccacacgaaccaccaagcaaccaaaggtggggccattcccccgggaacgcgcgcgcgttttatgaaactctttccggggtgtacgaagcaatagggacacgacccaaaacacccccaaagaccttgtttgggatgacaagaccgaaatcgactggtaattttccgagtaagaggacacaatcgagaaca

SEQ ID NO: 433105 - DNA, 305 bp, Oryza sativa
attgggagcctatttggaatcacaacggctgattcatccaccgggatcataatttatttgaagaaaacatttttcatctacagggcatgcataaagcattccattatccacagtttggattttgccgaaattaacgtggataatacaaaaaaattgggtgatcaccaaaaactggatgaccaaacgaaccgaaacacctggttgatctaatgaaacacctttggaaccactaggcacggagatgtacttggccggccggttggattgaattctctttaacgggttccacttggacggaagcgggg

SEQ ID NO: 433106 - DNA, 294 bp, Oryza sativa
tcgccgctgtttcccgcggcggaggtggcggctgcgtcgcccagcttaagcttctccatcagcgattccccgatgggttgctgcggcggcggcaacggctgtttcccggcggcgcgtcggaggatgtcggtggggaacgcggcgtgtggggaggagtcgtcgggggcacctccgggtcgtcgaggcggcggcggcggcggtggcggagtgttgttctcccggtcggcactgaagttgagggtgcggaggaaggccttgtgcttctgctcctgccgagcctcgcgtatcacccgg

SEQ ID NO: 433107 - DNA, 490 bp, Oryza sativa
actatggatagttcattgtatggtcacttgcttccaatccagggaaaacaatcccacctatacaatctgttgcaggctttgagcatagtcgctctgtcctggttctggtgctctaaaccttgtttaccattgtgatgcaaagagtcatggtcatcaagcagcatgtcttactctattggcaactaagctgtcagagtaaatttgatgaaagctcaaaattgtgtttgccagataaactgccaccagaaacttatggaaccaatgaatctgctatactcttcgttcatgagtggagcatgtagcctagaatttgtgtgtattcactcagcatttccaccattatccttgctactaatgcatgaaaaaccatcatcactggaaactagatcaatactttttgaaaggccaagaataagtgatctgcatgtctcactgtttgggacaaaacccaattccaacatcctgttctgcaattctaatggactcctgc

SEQ ID NO: 433108 - DNA, 66 bp, Oryza sativa
gattttatgtccggggaaggggttttgttcaaggtggggagggccccccccccccccccccccccc

SEQ ID NO: 433109 - DNA, 247 bp, Oryza sativa
tgttcaggaacagacaatactgccggggaagctgcgagagcaaacgacgccgaggcccccacaaatgggggccagaaagcgaaggcgaacaaagccgcacgagacccaggggaccccgccagagcgtgcggccacgacaaacgctaagaaaccaggagccaagacgaattggagccatggagagcgaaaaagcaaccagaattacaaagacccgagccaaccagagcaggaatactcccacaccaag

SEQ ID NO: 433110 - DNA, 276 bp, Oryza sativa
cggcgtgcgcgcgcgcgcgtgctcttggactctatattgggggcgcccttttttttttttgggttactgcgaagaagcgatttttttacaaaagcatacgcctactgagaggtactaatggtcagcaaactcacgggagatgatattatttgggctacacggataagcacagagggattatctcgccaaactttgatgttggtaggcgccaacaatgggggcgaaaaccagatattttttatactttaagttgttgagttatgacgcgggcattta

SEQ ID NO: 433111 - DNA, 194 bp, Oryza sativa
ttctttttcaacgggaaccagaagaccaccggcgagggattttcgcaatgccatacgcactctgcctaatgatcgcgcccagacatgcgctcttgctctacatcccaccgctccgttatgcagacaatgaaaccaccacatcgccggcaccacggacagtgggcacctggctagtgggcacgcacgaggcggaa

SEQ ID NO: 433112 - DNA, 128 bp, Oryza sativa
aaggaccaaactctgggggagaggacctgaggattgcgcgcccttaaaacttttatattttccagtgagacgaacatcacctgctagcactttacctccttctcctgaaagactttggggcagagacc

SEQ ID NO: 433113 - DNA, 231 bp, Oryza sativa
acgttcgtttcgttggggctcgtgcatgccacgtcatacctatacgatagagacaactatatgtaagtgacaggacgtggtgctacataggtcgccactgagtagagctctgagcgcatacgaacttaagcggctggtgacacacgccgcctgatgccagcgtgggtaatgacctgtagggcaccgaccgttcggcttgccctgcaggggtgcagcctgaatggccaatgg

SEQ ID NO: 433114 - DNA, 344 bp, Oryza sativa
gccggccttttttcttcctggtggacccaatgaacaacgttaacatttgcagcgcgaaatacttattaatcaatgacatccgacactttgtcttaccaatcattaacagcaaaacttgtgatcaagcataaaaggaatgtgacaggggggccggataagactcaaacttggaatcaagtacctggccttaatggcaagtatacctggccgagaagtataacgcctaacatccaaaccgggaactggaaccaatcaaggcaaaccattccagggaaaaagtgacctgttgtcgataaccgtatgcaagatcacacacaactgcgagctaaaaagacagctacgac

SEQ ID NO: 433115 - DNA, 411 bp, Oryza sativa
  unsure (1)..(411): unsure at all n locations
tttgcgacggcggcagctcggccaccgccgcgggatcgccgccatgccgcactcactctccctcctgctcgcgcccagccgcgcgctctccctctcctccccaccgctccgcctcgccccaacgcacccaccacttcgcctgcaccacgacggcggccacctcctcgtgggcacgacgaggcggcaggctccctcgcctcgccgccgccgtctccatgccgccagggcttccgcgccgtccgccgccgcggcgtcccccgtagggcctgcgggcgagggctgcgaggtggggggcagggcgaggaaggcggcggtgtaccggaacaggttcctggacctggcgcggctgngggccgtggcggaaagcgcggcggaggcgctcttccgcagcgagattcgcccgcggctggc

SEQ ID NO: 433116 - DNA, 542 bp, Oryza sativa
ttttgattaggataaattaagccagcacctaaccataaagtaacacagacgcggatgaattgcttaacaaacaggagaactgaatcgcctttttcatgtggcatggtgatgcagagatttgagggatatcacccggccaaaaagatttgagagatatctgtttattaggcactttagttgtctgttccttctgtcaaaagctagtgaagatgcatccaaactatagttctaagagagatcacgcataatatgaaatcaaagatatggttgtttcattttctttagaacacttggttgttccattgcatgcatagtttaatacgtgtgaaatgcacatggtgaaaaaaatattgccactaagactcatggtatcacattgagatctataagcttttaggatcactatgcagtgaggctatcactgctgttgttttcttattgtttttggttcaatgcgaacaaacaaggcacttgtcttagctagagtcgtaaaaataatgcaatagggtaacatggatctagaattgctaccacacatatgt

SEQ ID NO: 433117 - DNA, 338 bp, Oryza sativa
ttttgtggggcccaaggaaaaagggtcaccaccacagggcgaaattaacagaaatcgatgacatccaaccatttttctgaccactcattaacagcagaaattgggttcgaccataaaacgaattcgacggatgggccgaataggacttaaacctggaatcaagtgcctggctttaatggcaaggataccaggccgagaagtataacgcctaacatccaacccgggaacttgaaccactcgggtcaaaccattccagggaaaaagcgccatgttgccggtaaccgcatccaggatcacacccaactgcgagctaaaaagataggtacgactgtgaatta

SEQ ID NO: 433118 - DNA, 446 bp, Oryza sativa
  unsure (1)..(446): unsure at all n locations
ttcagctcgatcaagctagctagctactagctgccactactgcagctgtagtagtatagcatccaatcccacagcctagctagctgtggtgttggtatagtggcttgtgtgtgaaaaacacccgagagacagagagattttcatccatcgatcgatcgccatgccgcctcaggagttgcatggcgatgatcatggccgccaccaccaccaccagacacccgctggcggcggcgggggcggcgccggtgacggtcaccaccgcgacttcagttctccaccttcaaccacttcttcttcttcttcttcttcttcttcttcttcttcttcttcttctaccaattctcccaccgccaccgccgcgtcgtcctcttccaccaacacctccggcgccgccatcgtccaccccactacctcaagtcacccctccgtcgnctccggccaccact

SEQ ID NO: 433119 - DNA, 280 bp, Oryza sativa
ggtcattcagtagttcagggcttgctagaatatatttgtagcctttgtcctataaacagatttatacagcaggaagaaacggatattcagatgtttccctaccaaaacagctactggattcctagcagcacagcattgacagacaataaatagctttcccaatccaatggaaagtgtgataactgaactctgaacaaccaattacacagcttcaactgaggatgtcagctcagatgagcagagacgcgaagagcgccgtcaccatcggtagaatgccggc

SEQ ID NO: 433120 - DNA, 474 bp, Oryza sativa
ctagatcgcgagcgccgcccttttttttttttgggggtgtgatgtttaattggttactcggcattctgtcaaaacagaaaaagaagaaaaaatgacggaaaaaaatataaaaaaaaacgctcctatacacagaagatctcggtcttcaagtatgaacattttcctgcctttttttttttcagacaccaacagccaccagattacattccccacctgatttattattcgtaataataaacaaaaataaaaataaaaaaaaacaaatggtaatgtggacggctccagcacagtccatcacctcattctagttcgtgtgtcgggatcatgagatcaatctttcgccgtctactggcagcttgcgaatcgcaatcgctgaccaaggatgccagccatttggcacgttgcttctaacaacttgcctctccggagtttgttcttcttgcgagtgccggtgacggcgggcgccctcctgac

SEQ ID NO: 433121 - DNA, 336 bp, Oryza sativa
ctagatcgagagcgccgcccttcattttcttcgtcgccgtaacggaaaattgccgactgaagactctgactaaactgaaagagaggaaacaacgccggaccaaaagagacaccaaaaccctcctatacacagaagaacaacgccttcaagtatgacatcaccctgccttttttgtctgaaaacaccatccagcaccagattacattgcccacctgatccattattactattttggcacgcgattgcaaggacaagataacaactgggcttgtgagccggttcagtacagaggagcacctcagtctaattcaggatctgggatcatgagatcaactt

SEQ ID NO: 433122 - DNA, 284 bp, Oryza sativa
attccatggctattgctaaccgaatcggattgtgtatggacgaaaattagatgtgacgaccggaaaaacacgaatatttatattagttatagattttacatgttaaatataactatatcttttgcatccatcaaaacatcacaaaaaagctgattccggctatcggttggcaaaagtgaagcacttattaactctctttattattttattggtcgatacttatcaactgcattagtgcaaagagataggtaaagtaatgggttttctagagattctgatgtgca

SEQ ID NO: 433123 - DNA, 368 bp, Oryza sativa
tttttacggaaccagggtttgtctttttttggaacagagggaggacatgtattctacagtgtctgccaactgcaagcaaagacagacaagttagctactgaaatgagcccaggagatatatgaacacatgtgctcaccggcatagaagaagaaaacaaaaaagaagtatgcgcacctcacagatcgctgaactgtttgtgaaacgtaggatttatgcaggcaaatattgatttcttcttcggctttgtgccgaataggaagttccgcaatggcactcttgttctagtcgggaagtgtttgaattggctgtggtagctggtgctgctgctttcttccttcaccaaagatgacctcctgcatgaaagatc

SEQ ID NO: 433124 - DNA, 518 bp, Oryza sativa
attgttgctcatacgacatgcctaaaaaggcttgcttaattaactgatgacgagatgtgtgaaagggaatatgcatgaccagtcatcatgttgttattaactatttatgcgattttcaccctgatgtttggtcctcagtcacgttatcaaccttttgttctccataagcattattatcattgtctgatgtggacctgtgaagtgttcattacttatcaggctgtgatatatggacatctcgccagccgagcttgcgatcaacatagtagatcctgtcacggaattcagtttgttagacagcctttatcctgccaggcatttgcagtgaattgtgttttaattcagattgaatatttcagccaaccaattacagccaatcttactataaatagtcatggacaaatcatttactgctttctgcatcctcccctgtttttaattagttgctctcacatcatgtacttccacaaatgtatcaactgcaatattaatatatgtaacgaagcatgttgaattta

SEQ ID NO: 433125 - DNA, 208 bp, Oryza sativa
tttttgtttacaagtcaaaaatagtagtagtagtatacataaggtccacaacatcagctaattaagttactccttttttggcttattatttcatatgcactggtgttaaaattcctgcggcggaacaagacttttgctttttcggctggaaagattgtgttgtgctgctgatgcttcatggaaagattgagctatccccacgcgtccg

SEQ ID NO: 433126 - DNA, 104 bp, Oryza sativa
agctataccccggctggccgatccaaattccctttcgacccacgcaacctcatgattttaaaacccactccacacccatcgtgtcggggtttaaaaaaaacacc

SEQ ID NO: 433127 - DNA, 281 bp, Oryza sativa
aaaacaagacttcatcttcattcttataaatgcatatccagtttatctgcattatggtacaggaatcccactttgttgcactaaactaaactatcatcatcatctggttggacaaaaaaacatgtcgaacaaaatatgtcaattcactggctaacactttctttatcaaacaccatgatttatggtaattaaatgggtcagtgcatgacatcacatatatacatgcagtcgaaaaaaatatatggagactttgggggttctgttaaaaatcctgtaagatt

SEQ ID NO: 433128 - DNA, 265 bp, Oryza sativa
ggtgtcaaactttagtaaatacatcagaaatcctgctaaaattttagcaatattatcaacttgccaaaattttgacaatgttaaaatttgataaggtttattttgactacaaaataaaatccaatagccatgggccagccgcctttcccgttgctggtgtccaccgctgcccctctctctacctatctaccgccggggatctgggcccccccgatgcaccggcggtggcgggcaaggcgcgcgaggtggcgagcatgggcgcctt

SEQ ID NO: 433129 - DNA, 261 bp, Oryza sativa
  unsure (1)..(261): unsure at all n locations
gatcaagaacgcgagcgcccgccctagggggggggtttttttattttttggggtgttttttttatttttttttttttatttattatttttattttttaattttatgatagttttttatttttttaggggggaaanaaaaagggggggaaaancatagaaaaacaaagaaaaaagggggaaaaaatgaaaaagagaaaacaagggggcaaaaagtaaaaaagggaaaaaaaaggaaagggagagagaggggaaaaaaaagaa

SEQ ID NO: 433130 - DNA, 199 bp, Oryza sativa
aaataaaccatccttaatcttggcgggcccaggtggtgccttcccctcctttttaatcgaacagattaatttacatgacgggtacctcacgttggggggcgaataacccgcgcttaatgctggcgaccggagcctgaccggaactgaaccttttacccgggggtggtggggtcattacaagtggcctgattacctggag

SEQ ID NO: 433131 - DNA, 285 bp, Oryza sativa
gctgtaaatttgcttgattaccaccgttaccacataattacacccgacgcaatttcaaacacgtacaacgaatgctgaaacaatcccagcgttcactaacacatcctacacaaagaaggttcagatagacgaccgatcgatctacagtagattgtacaaaagaaaaattggacgaaatggaaaacccaaattcaaattcgaatgaagtatgcatcaaaaaaaaaaaattcgagcattgcatcgacctcatattctcaatgaattctcaagcctgaatcgactgaa

SEQ ID NO: 433132 - DNA, 279 bp, Oryza sativa
gcaactcataacaggagcctcctcatcttccatgatgtttaacatgcaggcatgtgatgtctcctgtttgaactcatggtaaaaggactgaaaaatggagacgtgagtatacggttgcaacaagtatgacagcaagatgcgcatatttacatcgatttcttgcccatcttgacatcttattcacttgatatgggttcctcatttcttcctagatgatgaggatgaagaagaagcggcagcgatgattccaccagcaacaagtcccacaagtccgaaggc

SEQ ID NO: 433133 - DNA, 286 bp, Oryza sativa
aaagacaaattccttgctcatagtgccatttacattttacagcaaacaaaagctgatcatcagaactgatatacacatgcatatttccttgtcagccaggcccatatacaaatacactgcacacgcactcagcatcaggaatcagaataatttacatgataattaatggacagtacttgcttttattagtggcgatttgtttatgtgcgaatggattaggaaccgattacgccaggactgacgttggctggatgatggagtccagatcggacctcattcccttcgt

SEQ ID NO: 433134 - DNA, 262 bp, Oryza sativa
ggaagagtataagcaagtaattctttgatgcaaagagttaagaacaatgctttcactggagttccaaagaaaatgaatcaatgtgtcaaacaaagcagaataatttcatctgtatgaagtctatgactggagtattatcatttatctcccccaacttcctgatactacaataccctcacgtaaatcaatggcgatttccttccatccatacacccaattgcaaaagatgcaacacaatcctgaatccaaaatgtaaaatgta

SEQ ID NO: 433135 - DNA, 317 bp, Oryza sativa
ggggggagtataagcaagtaattgtgtgatgcaaagagttaagaacaatgctttcactggagttccaaagaaaatgaatcaatgtgtcaaacaaagcagaataatttcatctgtatgaagtctatgactgtagtattatcatttatctcccccaacttgctgatactacaataccctcacctaaatcaatggcgggttctgcctcggctcggccttcaaccccacgttccacgcctactttaacacctttgccgggctgggcaacgcccttggtgtgttcgtggagtaccgactggggccggagcaccccggcccgg

SEQ ID NO: 433136 - DNA, 272 bp, Oryza sativa
cgaacaaagaatgtcaacacacccatcagttaacatgtgagagaagcaaagcaatttagtagagatccaacatccattacatcactaactggacagacttgttcggaattagtacataggaacttgagagcaccaatgtgaagggaatgaaaggcgaatacaagaaattgagcaggtaacagcttgatatggaacaggggggaataaaaactgtaaccgtaacgtgtgcagattagctaagcacaaccaccatgtaaccagcctatagtgca

SEQ ID NO: 433137 - DNA, 437 bp, Oryza sativa
cttgtctgtcccgaactgcgccgtcgacgaagtcgtcgccatcctaccgtcggactgcggcgaagcaggcccgatcggggagccaccctacagggcattgcacctgcactcctatgcttccttgcgcgtcgcgcgcgcgcgcgaagctagtctctaggaggggggcgactctagcctgcctgtccccccacacccaagcctggactgggatcaagctgaaccgtgctcgatgatgaataggaggtgcctaaagcagaccacgacatcgtagcctatggctgctcgatgagcagggcaaatgctgctggctgtactaggaggtggctttctctcggcaccggcttcagggcacagccatggccttgcccttgtgcttcttggcaggaaagatgaagagaaccctgtccaggtattcccgtggaatcagtaccgactag

SEQ ID NO: 433138 - DNA, 425 bp, Oryza sativa
gggtgggttttttttttttttttgtttttttttttttttttttttttttttttttttttttttttttttttttttttttccccaagggcaatatttttataaggcgcccccaaaccccccccgggggaccaggtagagggggcttatttcccccgcataaaaatggggcccaaaccccttggatcgatccgcccaattggacccaccccaccctaaacattattgggaaaattttatctataaaaaaaaaaaaatcctgaaaaaaagggggcgggggattgaacatgcaggggaccaccccctccatggatcaaattgggggcttgaccttggtggggacccaaaaagggggggggcccccctttggtggttggcactgacccgaaaaagggcccctttaacaaaataaaaaaccccaggcttgg

SEQ ID NO: 433139 - DNA, 199 bp, Oryza sativa
aaaataaaatatttttaaaattaaatataaaaaaaaaaaaaaaaaaaaaaaaaaaaaaaaaaaaaaaaaaaaaaaaaaaaaaaaaaaatttaaaaaagaaaaaaaagaccaagaaaaaaaaaaaaaaaagaaaaaaggccggggaaaaaaaaaaagaaataatggaaaaaaaaaaagaggaggaaaaaaaaaaaaaaga

SEQ ID NO: 433140 - DNA, 256 bp, Oryza sativa
aagcatgggagaaagacaaaccgacaacacacatgcataatcgtatatacaagatggcgaggggcaatgtattgtccatgcaaatgctactttaagaaaagcagggagagctatctgatctgatactctggaaaagcagagatcagctatctaattatacatgctgtccatgtctattgggagctcggggcctacatatggggcccctgcaacacggaaaccgtcaggcaagtctgccttttccagtactgcaaaa

SEQ ID NO: 433141 - DNA, 371 bp, Oryza sativa
ggtggttttttgattcgaatagaaatttccaatttgttcgatgatttccaactcttgaagaataagatcggcaattggcacaaaagatgcctgaactgacgagcgacaagctacaggagccctcgagctcaacaatggcggcatcacaaagcgccagaattattccatcatggcgaagccttcgcgtcgtggaggagcttcacttgcggaggaagctgaggatgcgcgcctgcatctcccgcgctctctcgcagcgcggatccatgcagtagaagacgtggccctcgcccatggactcgaggaggtccacctcgcctgcgtagcccctggccttgaggctctcgtagtaccagacgcccctgtcccggagc

SEQ ID NO: 433142 - DNA, 265 bp, Oryza sativa
ggcaaacccaacgaatcactcctttgcaatttatatacgtgtcaacacacacattttcaatcgatcgtgtatacacactttacaaatggtgcgtagtcgtcgccgatgaagtgccatttttcttagttgcagacctcacactgttttcggatgtggtccttgccgccggacttgacccccacgcgggcgagcttgactatggtgaacaatatagtcttgtagaactgcggcgtgctggccgccagcgagtccaccgttggccggg

SEQ ID NO: 433143 - DNA, 276 bp, Oryza sativa
aaaagagaaaaaatactgtacattaatcggatcatgctttggagttcttcagcttagatgtatttgccacaatagaatgtgcagagaacacgaaaaaaaagaaaaatctgatttctgaacgttgatgagagcagcagaatcgatcactgtgtgaatgtgaagcttaggcctcgaggacttggcaatggaggacgcggttcttggcgcggccgcggccaccggcgatggcggagaggagattcgcgacgaacgccttcatctgccccttgccgacga

SEQ ID NO: 433144 - DNA, 524 bp, Oryza sativa
gtcggggagctgcagatcccctgcctactgcgcgtccacgcttcgctgccgtggagattcttgaggaggttggtggtggggatggggatggtcggagcctacgcggatcccttcctgcctccgaagatggccttgtcggcgtacgccgcgccgatgggggagtatggccagccgcagccgcagccggcgccgcgcccgccggcctgcccgtactcgtcttcctcctcctcgcccgcgccggtctccgcgtcgtaccattcttggccttcggcgacgtcagcttcgccggtgagtagcccacctccggtctcctctccgccagagtcgcttccgtcatcgccgccgccggcattgtctccgtcgacgccggacgctcctcccccatctctccctccggctccgccgccgacccacccccgtcgccgacccatggtggggtgcaagcgcctgcccccccgatgacaactgacccggccgacgtgcagccccgtgtgtacccataacccccgccgacggtttccccc

SEQ ID NO: 433145 - DNA, 407 bp, Oryza sativa
gctttctgcaataggtcccatgaagccatgattccatcaggagaggcacatcaagacggttgctagtttctgcattcaattcagggaggacaatttgcagggtgccggtgctaatctgaactctgaagggaggagacgtgctggttgcaacctgcaagaggccaagaagcggccgaggcaggcagcaatgagcgggaggtcgaggccgtggccaggggacccgtcgccggcgccttcgcagccgccggtcgtcgccgcagcggcggacgcgggcggcgaggcgtcgacgtcgctcagggacttcggcacgtcgatggacgccatctcgttcgggttcgcggacaccgccatgctcgtctgcatgttcctgctcatggccatcttcgagcacctcatcaagccccacg

SEQ ID NO: 433146 - DNA, 216 bp, Oryza sativa
caacaacacccaattttggggtttttttttttaaaaacccataacctttgttaagcaggaccaaaatggggggaaaaccccctttacatacccagggataaaggcggaaagaaaaagaccccccctggggaggggggggtaaccggaactacaaaataaattttccggaaaaaccctaaaacaaaaaaagggggcaggtctgggggattcgggggc

SEQ ID NO: 433147 - DNA, 497 bp, Oryza sativa
gccatttcggtaaggtttgctgcgactccgccgcgacgcatcttgcgccgccagccgccgccgccgcgcgcctgctgccccgtcgacctcggctgacgcgcggcgccctcgagctcgcgtcgcgtcgcgtcgtgtccctctcgttgatggaggctccggcaaatagcgtggcagtggctgatgggaacccaaagacagcgacagagactccgcgggtggaggattacaaggacgctgccatgtactatggaacgtacccggcttatctctatggagcctatggtggctggggggagtactccacatacctgagccatgatggtgcagagacaccaactgctggtgcttatggggatatgtactatggctattctccatatggttattcaacttcaggacatgatagtcagatgtatggatctcagcattaccagtaccaaccgacatacaacaaacaacagaataccactggcaagcctgtgcacaatggaaaaact

SEQ ID NO: 433148 - DNA, 260 bp, Oryza sativa
gagaacagatgaattgaatgaatagattgattggtaccagccaattcctgatttgcagaacaaatttcccatagaattcatccacaaaccagatttccaaacaacatgcatgactatgtacgctggtttttacagaactctgaagtagagccgttgatctcatggaccagagcgaagaagcaaccatgccatgttcaccctcccaaaaccaaggggagttcatcaagtttcacaggacagaacttgtggtcgcctgctac

SEQ ID NO: 433149 - DNA, 257 bp, Oryza sativa
ttttttgtttttttttttttttttttttttttttttttttttttttttttttttttttttttttttttttttttggggagaggagggaaaaatttcattcattaaaagaaaaaagacaaacaaaaggggggggggaaagacccccaaaaaaaaaaccaacccaggagcgggggggggaaaactggccgggggggaggggccaaaaagcagggaaacaaccgacctcgatacaggagcagccagagaggagggggggg

SEQ ID NO: 433150 - DNA, 410 bp, Oryza sativa
gaagatgatggaaaattttcattcattcagggaatcaagacaaacaaaatgattgatgataagactcccacaaaagaagccaacgcaggagcggtggttggagatcttgtcgtgtttgaggggctcagagttgtggtaatcaccgtcgttgttgtcggagctgtcgttgttgttgttggcgtaaaccaagacacatcgttccaataaacattagttactgatgtgaacccgagaaacgcaacagcattcgagcttttggcaaccatgaaagatcctggcggagaaagggtggacgctgacgaacgattgaatgacagctggtacgtgttgccaccagacaaaggaactgcgtaaagctcccttcgtgtcttttactctggacggcaactgggtgctggttggcttaaaca

SEQ ID NO: 433151 - DNA, 300 bp, Oryza sativa
agcccaaggtggcgttcctcttcctgaccaactccgacctcgtcttctccccgctctgggagaagtacttcgccgggaaccaccacctcctcaacctctacatccacgccgaccccagcgccgccgtcgacctccccgccaccgcctccttccgcggccacgtcatccgcggcaccaaggcgacggcgcgcgcctcggccacgctcatctccgccgcgcgccgcctcctcgccaccgccctcctcgacgacccatcgaaccacttcttcgccctcctctcccagtcctgcatccccctcc

SEQ ID NO: 433152 - DNA, 209 bp, Oryza sativa
cctgtactggccggagcccagcgcgtccgacctatctaacttttccggcgaactccccgacgagatcgatggccgccggcgaacggcaatcgaacaaggagtactaggacgcccttctttgttgtttcttctcggcaagatcagttggctggcaccacctgccattcttggtttggaagtgtgggagggaggggttcggatgataaata

SEQ ID NO: 433153 - DNA, 278 bp, Oryza sativa
acagatgtgggactaaacccaactcactttatttatatgaagaattatagaagcaccaggtttaacagataggtacatactttaaatcaccattcgactcaaaccaacacagagcagctccaaattgtacactaacaaccacaacaaacaaagacttcaacagatactccaagaaatttcaatagagttgtagaaatttatagtggattcgctgactccagctctctagcagctagcacacaaactgcacctttcatagcacaccatctgcaattcat

SEQ ID NO: 433154 - DNA, 276 bp, Oryza sativa
gaaagaattatctgcacattttcaatatgtcaacaagtgtaacaatgtcctgtaggttactcacaaacaatggcatctctactacaatcatctccaacctaccaaagcaaccacaaaactaacagaacaaaatttcaaggactcgagtatatcaagaaggaaaaaaagaataaaatgagggggaaaacatataaactctcgcgacctcatagtggctgccttctcttacttcgccatgatcaattaatcgatcgatcgatcaatctgtgctaccct

SEQ ID NO: 433155 - DNA, 252 bp, Oryza sativa
gggaacttataccaataaccatgaaaatttatacgagcaagacaacagaaacatgaaatattttcatttgatgataacatcgttccgaaaaccgactgccttcacagcactttgatgacgatataagcaatccgaaaacacattgacgatggtatataagattcctgacaactactttggatattttctttaaaacacgaaaattagtcttccttgtttgacatttccataccaaacaaagaccaagtaagg

SEQ ID NO: 433156 - DNA, 272 bp, Oryza sativa
tttttgtagcgttcgaatacctcctgggtaaaccatttggaagagctggaaggagtcaaagtgacttctccctgtcccacattattccgttactccttgtaatgacaaatataacaattaactcaccacacctacattagaagaggatacaagctttattgtgatgatttgaccgctatcttttatcaacattgagcacatactgcactcctataacagcctattagagtcctccatggatgcggacttcgacgaaaaccttttatgcatca

SEQ ID NO: 433157 - DNA, 257 bp, Oryza sativa
atcgtcagctctggaaagcaacccaccctactgaccctcctcctctccctgactcactccgtggtcgtcgtcctcctcctcggtctcctcgccccggtccaccccccactgacaagtgggcccaccccaccatcccccccggctgcgtccgcggcgagcagcggaggcctccacctcgccggcggcggcatgagcgggttcttggcggtggtggggaaggtcgggaccttcctgctgtggctgctcttcctcgggct

SEQ ID NO: 433158 - DNA, 296 bp, Oryza sativa
gcccccaacggcgtcaaaaccaactgggtcatgcatgaatttcgcatggaaaaccctcacacccctcccaaggaggattgggtgttgtgcagagtgttctacaagaagaaggcggagacggagacggagtcgtcgtacagcatggagaacgagcaggaggcggtgatcgccatggcacggagcgccgcggccatcaaggcgggtggatgctactccaactcctcctcgtctcacgacccggccgccgccggccatcactcgcccccgccgttcccggcgtcgctcgccgcctgcag

SEQ ID NO: 433159 - DNA, 499 bp, Oryza sativa
  unsure (1)..(499): unsure at all n locations
aggtgaaaagaggttattaataataaacgctagctagctgcgctgcagaactgcagctagctagcagctgggagtgtgtgtaagctagctaagctagcactagcagcaccgacacctatggtggatcgtcacatcggcatcaggccgttgtaattgtagtgctcctcgagccctagctccatcagaccgcactgctcgccgccgtcgaccctcgatcccgccgccgacgccgacgccgccacggcgccgccgtcgagatgctggctgaagtcgaagatgctgctgtacagcgccatgctggtggtgggggatgaactcgttgagggagccgccgccgccgccggtgacgggcatgtggtgtggggggggtggatcggngagcgcggcggtgggtggctgctgtagtgggtggctgctgctgcaggcggcgagcgacgccgggaactgcggtggcgagtgatggcccgcggcggtccggtcgtgagacgaggaggagttg

SEQ ID NO: 433160 - DNA, 296 bp, Oryza sativa
gcgccggatggtggtgcgggacggaacgatggtgatgacgttgacgagaggcttgtggagctcgcggccgtggacccggcggcgatggcggtgctgcaggcggcaaagaggctgctcgaagggaacctggcgagggcgccggagaggcaccgcgacgtcgcgctccgggggctgagggagtgggtcggcaagcaggagcggttcgaccccggcgtgatgtccgagctcgtggaactcatcaagcgccccatcgatcggtacaacggcgacggtggtggcggcggcgagggggaggg

SEQ ID NO: 433161 - DNA, 333 bp, Oryza sativa
acgtgtgcttcgctttgttgcaatgactaaaacacgtatctaattacaaaaaagaattttatgcatgctatgcgtttgcggggttgcgtgcgtggcgtgtcagcggtagaacgacacgggcggcaggcggaagccggagttgcgttggcgcaggaagggtatcgcctcgggccgcgactcgaggtcacggtagaactcgtactccgcctcgtagtcgtgaaggtccagctcgcgccgttgcagcgtgtgtatgatggtgccgcgccgacgcgtgcttgccgaacccgaacaccgacacgcggtcgcacacgcccgacgtggacaccaccgtct

SEQ ID NO: 433162 - DNA, 287 bp, Oryza sativa
gggttattaattggtggtgctgtagaaaaaatcaaagcgcaccaaccaacattcgggcatttaagaacgaaacagcggtttggggggtgcccgtacaccaccggggtaaagactgacagaaacccgacagggatcgttgagagcagcatgacaagctctagctgcaagggatcgaactttagttaccaactaacgcacaaccgatgtacagaaacaagtcggcgagcccaatgcctcatgaacagaaccaaggaaccacacgaatccatccgtccactactggaagc

SEQ ID NO: 433163 - DNA, 407 bp, Oryza sativa
catcgatctccaccacctcacctgcaagtaagcaacccacccacccacacacacacactcgtacggcgctgtactgtacggtacggatcgggctaggagatcgagcagcaatggcgcctctgtactgcggcggcagggtggcggcggcggcggtgctcctggcgctcctcgtggcggtcgaggcgccgccggcgacgacgtgcgcggacgcggcgcgggtgctgctcggcggcgagctgcgggcggcggcggcggcgacgcgagtagaggagcaggatgtgaagacgacgactacgcaagcagcagcagcagctccgccggcgccgcgtcgttcgcgcggtgggtgactggccgtcggcaatgctgcgggggtgaggatcctcggctccgtgccgagccctgggatc

SEQ ID NO: 433164 - DNA, 272 bp, Oryza sativa
aaaatataatagcgtcacatcctttaaaatccagaggaatgaacaactcgtgaaaactttacaaggcatttgtaggaaacaaagtctagaaatataagattacaaaaacaaagaaatgaaaacatgacatatgacctcacaaaatttaaatccaaaatccctatggaagagcctattctatctgaattccaaagaaacccatgtaagggttgtgatcctctaaatgaggctttataatcaagggacttggtcatttacattgggatttctac

SEQ ID NO: 433165 - DNA, 277 bp, Oryza sativa
gatgatcattcatgtgtgcctatggatttctagtaacactacattccaaaaaattctatatctgacctgaacagtaggcagtgggtgtgtcctacacacagggggaagtggttattctatagcgatcgtgacaacgaccactactcaggtacggagaactaggcctatggaccagaaaataaagcgctttccataacttcataagaaaaagggaggggcacacatagtttactactgtacacggagcataattcgtcctgatctagttcttgtgcat

SEQ ID NO: 433166 - DNA, 351 bp, Oryza sativa
tggggttttttttttttttttttttttttttttttttttttttttttttttttttggccaaaacccacaaagggatccatcttttggttaaaagcagctcactaaaatttatcaaacttgggacgtacatcgaccccgtgttctcaaaaagatattaaagaatgcgatttgcatactacatttacatctccgggggaacaaaacacattcattattcgccatttgacgtgctctttttattatttttttcatcgatgacggatcatgcatgccttgcgtacgttatgaacatctttttgggtggaactcaacggagcttgtacttggggggggtgccctgggggaacccct

SEQ ID NO: 433167 - DNA, 234 bp, Oryza sativa
cccctatctccccgatgtcgtcgccggcgccgtcttcgccatgcaagccgaagatccgacagatcctgtcaattccggtattgtaccccagcgaggacaacaggcagggacctatgctcgactggctgctctcccgcgcagctactgtcaccagacgttgggctgactgcggacactcctatccagatatttgctgaagtgttcgcaaggccgtgctactcgacaagatcctac

SEQ ID NO: 433168 - DNA, 519 bp, Oryza sativa
gtggaggccaaattaactttattagcatggcttccaggtacaggtttagctgcccttcaaaataattacaaagaatatttgacataaaagaattgctatgccatttctatcattttttacgatgtcaaacaatatacagactagcgaataacctacaaactgacacagttatggcctaccaaggtacagagtgaataaattacggatgctgaagtttgcttgtaaaatctaccacttctaacgtttctatctcggtgattttgtggaaatgcatcttccgcacaagataagacttgatacagctcgtgaccttcgagacctgaccctcaacgaagatagctgtagagagatgattcaatgagtagccaacgagacaaacaaccatgtagaaacataagaaccgtaatttaatcaggattcaaatactcttcagaaacataagaaccgtaatttagcaggattcaaatactcttcagaaacataaacataagaactggtatttaagcaggactcacatac

SEQ ID NO: 433169 - DNA, 206 bp, Oryza sativa
gctcccccgcaaatgcccctgggttgtcttggtgctgctggtgctgcacgaagccactagcgcctcgccacctcgggatcgccttcaagatccgattatgatcttcccgccggtgacaaattcgtccagaccggtcctgggcgtacctgccccacctgaccaggtcgtttcgaaggttttggttctggactgcaggaatataacaa

SEQ ID NO: 433170 - DNA, 529 bp, Oryza sativa
ttgagtttctagcactcagatcatgcatgcaggctgtggtcaagcgcaaggcttgaagttctggagttaaagctttcggaatttgatatttgttgctttcagtgtcttcattgctgttctcaggcaatcagatgcaaggaggtttgggtagccctggtgctctgtctcatgcttatgtacaacatcctcctctacgatgtgacataccagacatacgtgggctgttttatgatgatgctaataagttccttatcgctccaactgctgatcggatattatactggaagatagttccatctactccagctggacctccgaactctgatcctgtaaatgatggacctgttttatcagttcgatattccctggatctgaaagccatagggatacaacgatccaatcatgaggttgaatttataaatagggaaacaggacaaacctgtaataaaagtgcagagctgattctgaactatactttgctttttttggacagactgccccacttgtgatgtcataataataaaaacaa

SEQ ID NO: 433171 - DNA, 166 bp, Oryza sativa
tctctatcacaaatacctgatgctgccactggtcaaatggcaggagatcttataggcatgacgaccggagctggctacacaccaatgctcaaacacccacagcgggacctccactgtagaacgacgacgctgctcatgacacgaggggcctatacaagtctgtcct

SEQ ID NO: 433172 - DNA, 202 bp, Oryza sativa
gagcggccgatttttttttcgattcttatactccaccacaacaggggagtctcatggtaaattactggcataaggcctccagccgtagcatatatacgcaatggaccaccagctatggccctctagccttaaagaacaaattggtcgtaaccgttctagagtgaggctcctattgtacttgaggactatcatagggaacaaa

SEQ ID NO: 433173 - DNA, 553 bp, Oryza sativa
gccaaactctctagcaatcttgatccgtccctttccgcgagacccttccgccgccatggccgctgcagacgccgtggcacccgacaacggcgatcacgccgtcctccgcgaccacgagcgcgggatccctcgatccctttccctcctcgccgcgctcgtggaggccgaagccctccgccacgccgccgccgccgacgccgacgccgactcagacctcatccgcgccttccgcggcggcacgacgcccatcgtccggatcggtgagttcctggagcgcatccacaccttcatccagcgggagagcgtccgccacgtgatcgagatccaggacgcgtgctacgtgctcgccgggatctacctgttccggttcatacgcagcggcgccgcgcgggaggcggtgatcctcgtcgatccttccaccgcgcaccgccttgtcgccgtcgcgatcttcgtgggcgccaagttggggggcccatcgacaggctcccgacgaggtggaccgtggtgttcgagaccagctcggatgcggcgatccgcgcgagggagatggccg

SEQ ID NO: 433174 - DNA, 542 bp, Oryza sativa
tgctctcctcttctttttctcccttgccgccgccgcctccaccaaatcccctacggtcaccaccactcgttcggcgtcttctccgatggtggactggcggccgacctcgagctccctcggccgaccccggtggagaagctgcagccgctattacatcccttgccatctccatcgccggcttcctcgccattgccggcgccgcctctcttttctgtcgccacaatcgccttctccgaccgccaggccaccagatccggcgaccatggtggcgttgagcagctaggagcagctgggagcgccggtgaagcaagtcaacgatgagattgaggggatttttttttgttttctcttttctattttcaattgagagaagagcggaggagcgcgcgtggcaaatccgtatgagaggccagcgaccgaggagcgtggtactggccggccggcggcagaggagccgggaacggctggcaacgatgagtttctagctatgtttgccacatgtatatcacatatagtgtcatgggaggaatccatcgctgctc

SEQ ID NO: 433175 - DNA, 296 bp, Oryza sativa
gacccggatattaattggccgatccacgcacgcgaattcactaatcgatcgagacttccagttctcctgcttggtgttcttcttaccccctgtggaggtaacaagaactcaagaacaaggtgtttgattttgactatacacagaactgcggtcaggacaactctgcgtaagcgatactttgtgtgtgtcatgtgctcagggccgtgcgagccgtacacaccgccgctgcaccagcatcagaaggaggctacccttgattgcagacgtactagcttcttgagcctggcgggacctga

SEQ ID NO: 433176 - DNA, 412 bp, Oryza sativa
cgttatgtctcgtcgccgtcgcgggcgccggcttctccgacgtgaacgcgcggtgcgcgtggtgcctgcaacaggcggcgctcgggcggagctgcacggggacggtcctcggcgactcggaggtgggcgccatggcgagctcgtggaggctgctgctgcaggggatcacgtagctggtgttcctgtgcgcgcgtggcgccgacgagtacgttcggtcgccaccgagcccgctggtgctcacggtgcacggcaagccggcgtcgcatcctcagcaggtgcacatttcgatggtgggggagaagaacatgaggatttcatgggtgaccgacgacctgtacgcgccattcgtggtggagtaccgaacgtacccggtgaagatcacggagtttgcgaccggcgaccacaccaggta

SEQ ID NO: 433177 - DNA, 516 bp, Oryza sativa
tacttcctgacaaaatcagcaagatgatctcctagctgtccagcaaccaacactacgtactcatctacccccgccaagatatgttcggcagcaagtatcaaagcatcttctaggcatagcatctaaacccatacctgcttgtgtttgagtaggaaaatgcaactgggcttgaccttaagaagcagtacctcagagagaataaccttgccttcaatccaaaagacgtgtactggtaggagtaccgcactgagttctttcttgataatggcatggatctctctacttttagttgggagctggaggatgattgcatcgacggctactgcttttgggtcagcatcactgaaatggaagttgatccctaggccaacatgtaacagatgatacactttgacagcaatacaagaaaggaagccagtattgccttcttcataccccaaaataggtcgtatttctacatcaagaaggatcccaatgataccttcacaacctcaggaataagatagtcatgaactg

SEQ ID NO: 433178 - DNA, 497 bp, Oryza sativa
  unsure (1)..(497): unsure at all n locations
ctttaatcaactgacgtgatggagaattgtatcattccgtggatcaaaataggcctatcttgttctatgccactgccaaaagagcgaccggaaatgggacaagtttctaccatgattcttgaaatcaagaacgcagcctcacacaggcatgtttgattaagctgagacatggcgggtcctgtttcatttgtagcagaagagtgatttaatagtccttgaggaagtaccgaaatgtacgatattttctagtgtaaaatttggtacctctcggtacctctagtactacttaaaaattttgattacctctcaaggactataaaatttctcatagaagaatacaccaatataacatcacgtggatatttctttatgaatgcagaatggttagtgacattattggaagatttggtggtagcgcttgcatccctactcttgaatgttgaaaccttttatggttcatgctgtgtgacttattncttcatcggctaatatctatg

SEQ ID NO: 433179 - DNA, 468 bp, Oryza sativa
cggttcttttgtgctcacctccgggctccggccctcgtaccaggcgaggcgagtgaggcgcgcgccgaaagggcatggcaagcacaatgaagaagaaggtggagtccaagcataacattaaggacatgaagatggcgttgaagcatgatataccacttgaggttctgcaagaaggaatcccaactgttcttcgtggcgcgcctgacaacgaggttcatgctgggagagtcataagagtttctagcgccaccggcttgaaagaggctcttcagcaggcggggccgggagcgcttctcaaggtctaatgtcgtcagctacatacctccgtccgtcgcggctcagatccgtgagatgaccaccactacaagaggaggcaaggaggctcaagaaaagaagccgttcgccagcgtcaccattgccaaggcccagccccagccggacgaccaagagacggccaccggcccgccc

SEQ ID NO: 433180 - DNA, 431 bp, Oryza sativa
cacttctgtgactgcgcacggcctcgtctcctccgcttcccgagtccgaccttgccccgagccggagtcgcctcctcctcgcgcgcagcgcacggccggtgccaagcaggttttggaccgagggcggacggacgcgggcacggaacttgctccctccactagcatatgtacctgctgctgcaataggcgggtgccatggccgccggtgagctacaggaagatggaagaggtgccgaagggtggaagaagatgcccaagggcaaattagtccagtagggcattcgggcgaagccatcttcgttgaacgtggtattttaccgaagcctgttttaaggatggtattctagcgaatccattcttttgcaatggtacatatgcaattttctctttggtggggggggggtggaagacagttgacctggagacgggaa

SEQ ID NO: 433181 - DNA, 428 bp, Oryza sativa
ttgcgtgccaagctaccattctcctcctcggcggcggcggcggcggcggcggcggcgatgcatatggcggcgaccaccaccaccaccgactcctcccaggcggccgtgccgcctcaccaccctcaccctcacgcccacccgcacccgcacgcgcacccgtacccgcaccaccccatggtgcatgcgcggtgggtcgttctgccttacccgcctccgccgacgtccatggtggccgctccgccgcccccgccggcgcagtacgccaagcacttcgcggcggggccgtcccccgtcgcggcggtcgggcggcgcacgccgaccctcgccgtccccgccggatcctgctggaacgggtgctttgagaacaagacgatctgggttggcgacctccagatttggttgtgccagaactatccttcaccgttgtt

SEQ ID NO: 433182 - DNA, 533 bp, Oryza sativa
tatcgcgaatcacataagagttcaagccaaagctaagaggccatgagatcagctatggctactgcatcggtggttacctatcttcagaggccgagagagcttccggtgccggagttccgggcaccgccgccgtctccggtcaccggcgtcctcacgagcagtagctccggctctcttgcatacggcgagtgccccgatagcaacgaagacgacgagatcggcaggttcttgcgccgctccgccagagtcccggtgctgcggctgccggagagggccgtcccgcggaagaagaaagcggcgtgggcacctccggtcatcgacgtgcgcctgctggccttgccggaggccggcggtccggtggcggaggcgctgaggtcggcagccgtcgcgtttggctgcttccaggtggtcggccatggggtcgaccggagcttggtctcagcagcgttgcgtcatgtggcagctgcaactgcaagggcggcgacgccggagccggaggaggtggaggtcaacggagacgatgagaacggtga

SEQ ID NO: 433183 - DNA, 313 bp, Oryza sativa
ggaaccttgccaggatttttttttctttttggttctcattcatttcgagaataacttattttgatttcacaaggatgaccggttttgataccaacgaatttacagacttttgggttacaaaacaaaatagttccgttacaaaaagaaaaatttgaggggaaaaaatgaatttttcctatatgggacattggccgcgattttttacaccgcaaaattattcctttattgaatatataagctttgggcccctcaaaaaactttgaaggctttatttctgttccctggcaataaaacctcgggctggaaaggttaa

SEQ ID NO: 433184 - DNA, 399 bp, Oryza sativa
ttgtttttgcaaccaaccaccattatattcttcatactacctgcgaagatctccattcatggacgttccctacgaattaaatgcacacgagcaaaccatgcagccacagcgaatctgtccccatgtcatactgtaccttctcgtggaaggcttttcgccttttcggcgccgtcaaataccaaggccccaccgatcagttaaaaaaaaatactcacacgatcacacgatgagtccatggaggaggtaaaggtaaagatcgtgatcgatcacgcacctggtccgtcgaggcgggtgaggaagaggcggcgccacgaggcgaggtcgtacgcggcgacggcggagtacgcgaaccgcggcaaccggtcggcgtagacgatgagcaagcgccccctcggcgcg

SEQ ID NO: 433185 - DNA, 357 bp, Oryza sativa
tttattttctccaataatattccttcaaggaagccgcttggattcccacatcggagatggcggcttcctccggccgccgccacgcgccgccgtcgggttaggaagggctcgaggttggagaggcaacaatggcgatcgcttcgtcatcgtcgtcgatgctgctgctgatgtttcttgcgttcttggatcatggcgccgcggtggcgaacctgtcatccatcgaggccgccgtccgcgaccgcgcgttccagctgttccgccgcacgagcgagatcgtcgtcgtcgacgtcccggcggagctcgccggcgccggcgtcaaggcctcggcgacgcgcgggcgccagatcgcccctgtgg

SEQ ID NO: 433186 - DNA, 384 bp, Oryza sativa
agaaaaatagaattggattccccagagaaggagattgaagcgtctgacttttgcatgcgggcagtatatgttcaatctcatacagaatctaagttcgcattgtacaatttgcagctacatccaaatgaacaattcgactttgtatgccaattatgagccacaacaaatcggatctccaaaactgtaacagtataatttcacttagtaaacactaatgtatatatacatttagtagaaaaaagaaactaagattaccatagttcacagatgctgcataccattatccaaaaaaaacaggtgatacatgcagcttactgtgacctacacaaatggcagtattaactagtactataacctacagcagcggccagaagtgaaggaacc

SEQ ID NO: 433187 - DNA, 371 bp, Oryza sativa
gcctttttaccggcgccgccgcctcgacgccgttgacgccgtcgaccggcaccggaccgtcgtctatctaccgcaaatatacctgcgcgcgctccctgccactgcacccccaactctgccgaaccgcgcgccacgggctgcaagagggagagggcgacgcgaggaggcccctccaacggacgacgtcatgctctctttctcactcgccgtgctgatgggcgagacagttgcgctctgtgaggtggctctcccccctccaggatcctctccggaggctgccggcacgcttctataacgagtgctagattaccgagagctggtggttcggaagccctaacgttagcttgggtggaattctccgggcgagctct

SEQ ID NO: 433188 - DNA, 448 bp, Oryza sativa
ttttcattatgtacgctcctcctgaggcaaaccccctctaatccacagcctttttctgctactccttcctctaaaacaacgaaaagttcctgctgccagtcatgagcaacagatacttcatcaacatcaagaacaacttcgccgagatcaaatcctcccaaacatacagaaaccctttcaaaagagccctggagatacactattccatccccactgatcctcatttctgtgtggggagggtgattgccatctatgatacggtcactgtggaaggcatcgtcaaggagagacaggtggtcaaggctgaatacaagtaggccaaatagaagggaaatactgtcatgatggctattagttcggccaatgagaagtcggtgctgaaggtgcgtttgggaaacttgccggcaggcgagagtgtccgcattgagtttgaatttgttgggaaatt

SEQ ID NO: 433189 - DNA, 392 bp, Oryza sativa
tttctttatgcgccctgcgccgccgccacctcttccttctttgcccaagagcgatggccgcctcccccgccgccggggccgcggccgccaccgtctcgtcgttcgtctcgccgtcgttcttctcctctgacaaggcatcgaagcccgaccgtcttcgtacggagaggagggcggctgccgtcaacgtccgatgcgtcagtagccctccggccaccgaaacttatttcaagacgaaagtaccactaaatgccaatatggccaagctgcaagctggctatctgtttcctgagattgccaggagaagggcagctcactctgctgaagtttcctgatgcgaagattataagccttgggatcggtgacactacagagcccattccagacgtcataac

SEQ ID NO: 433190 - DNA, 341 bp, Oryza sativa
ttttagttgaagctctcgcgcgcggcgcgggcatgaaggcgtcgtcgccgtcgcaagggcagagcccgaggacgccgttgccgcgcgccaccttcggcatcggcgagcacacgcggtcctactccgagccgtggcttactggaacaaagttggcgagcacctgcaacgactcgtgcgtcaacgacgtcgagaacttttcgcgcaccgtttccggcgccaagtctacgcagctggtgggcttgtcatcagcgttgcaccccaagatgctcgcgtccgtgctgtcccactacgccgtcaagtggcttcccaacgtggtggccgtgtcgcttttgtccttgtcg

SEQ ID NO: 433191 - DNA, 432 bp, Oryza sativa
gggggaaattgaaacatagggggaagtataaaggggacctttccaatcggacaaatttttggacaaaatcagatcagagaagggcccaattcgagggggcccacataacctatcacaggcccacgacccatgacgggccactggtattgctccatcgatggcgcacacgccaaaacggaagaaaatatacaggggaccatatatgttggggaaactaccgttagatcgagaaataaatgttcgagaatcatccacgttatcacgcacaggaaaatttttactcacgagtaaatctgggagtaaaatttttactcgggatgacgtgaacaaatctcaagcgtctattatttaatctaacggtagttttcaaggttccatcgtgtacgtggtttccacccccatattttccccaaaacggggcacaccaaacgc

SEQ ID NO: 433192 - DNA, 168 bp, Oryza sativa
agaacatcacagattcaggggggctcttataaaagcagggggatctgaaaggattcaccacaaacaatagctaaaaccgaaagggcaccgactgtgaacaaacgtactgaaacagattgacgacccagttagcctctaacattggggataaaatagaagatcctgtca

SEQ ID NO: 433193 - DNA, 528 bp, Oryza sativa
acgcatcgttttgcttgatacccttcttgttcagagcctacgtgattaagctaagcctggtttaatatttcgagatcggtaacgacgatcgatcgaacgccgcaatggacgtcgtcgtcgagagcccgccggtgagggacgagaagaaagtcgacgtcgccgcgattggaggcgcgcctccaatagtctttgagagttttgcaccatcgacgcagagagattcaaccatcatcaagaaggaggagaagatggaggcagcgaatgcggagatgggcgaggtgagggaggagaacgagcggctcaagacgatgctcacacgcatcgtcagcgactacaagtcgctgcacacgcacttcctcgacgtcgtcaaggtcaaggagcaaacggcggcgttgcctccgacgacgacgacgacaagcaggcgagccgccgcgcgttgccgacgatgcccgtgctgaacctcagctccgacagcagcggggacgccgccggcgcctgcgccggcgagcctacccagctcgacaaagc

SEQ ID NO: 433194 - DNA, 421 bp, Oryza sativa
ggtggcaaaacaatataaatatccgggcccacagggtaacaaatataaaagggggtttttttatggcccatactccataccggggtttttattattggggctgggggcatactaagcgggggcaaaagttttttcattccatagggaaaaaactattattttccttcatccgtttaaggatataaaactttttagtttggcccattttcatatagattttaaggaatctgggctgggttaccctgatccgggtgcatagccatgtttccgaatgggatccggaaagggaaacagatcccctccgaaacgtatcccggacgtatcccacatatttgggatttccaaaaaaataaataaatcagggtcccccagggataccccacgacctttctccgtttttgctcgcaccagggataccccc

SEQ ID NO: 433195 - DNA, 495 bp, Oryza sativa
  unsure (1)..(495): unsure at all n locations
ctcgcgctttgcggcaactggcggtgtctcctagcccttgcctgccatggtgtcgctagccggctcccagatcccgtcgccggggcagagtccgtgcgcggcggcgcggtcgcagcgccgcggcgcggggtactccatgcggaccatccggtcggcgctgctgcagccggactcctgcccgggctcgcctcatgtggcggccgcgtacgacgcggcgggggcggactcggacatggagaacttgacggactccgtgattgatttccatctcagcgagctggcggccaccgcggggcccgcgcaccccgcggcggtggccaagtccgtcgtcggccaacgcggcggccacggagatgctcgagctctcgcgggacttcagtgactactcgagcttcaactcggatatctccggcgagctcgagcggctcgcggcggcgcgcgcnggtggtgacccccaatccgaccgcggcagtggcgccggggatctgatgagct

SEQ ID NO: 433196 - DNA, 438 bp, Oryza sativa
gaaaacaaataatccatgtgacaatgtatttggtaagatttacaccattgaaacaagatgagtgacttaattgagcaatttgctagatgagtgactaaactgcactcacctcgcaagttgtgataccaacggtatattttactctatgattattatcaagtagtacaaataatcactaaactaatgatcccagaaactgtccagtggataatcaagtagagatcagcagttttgtatgctgcagaatgtggtgtcgatatccgctcagaaaaaagaaaaagcaaatgtggtgtggatagacaaaccttttttcctcaatacaaaagaaactagctttatgtaacgagaacaaatgaatcaattaaaaaatacatgataatccttaataaagctccctcactttaggcaaaagttcagctttaggaatatgcacattta

SEQ ID NO: 433197 - DNA, 75 bp, Oryza sativa
acgcacgcgggcgtacgcattgctatccatctactatacgagccggccgtctccttctttttttttttatctttg

SEQ ID NO: 433198 - DNA, 520 bp, Oryza sativa
gtgataaaaaggcagtgttgatcgggattaaatctccttgatttcattccacactcccctgctcaaacacctccagatccgaatgcgcttcttctctgatccactcaggtaggtgcccatcacattccagctcagcctgaagcaaggcaagttcgacagggatagctccctcaggacatcaatcgctggcagggcttctttttgagtctaccgcacattcagctcaaagaccttgatgaaagcgtcagatgcgactgcgagtaggtagtaggagcggccattcattagtgcccaggaaatgtcattaatggtcctggtttccttgatctttggcacactaattttctataggggcttggccaagttgttattgaaattaacaaaagccacagtgctgatcacctaaggcttcacctcctcttcctctatggcatctttgaatatcttcatcccattcagcactttcttgggtgatgattaaagatttttgcagcccactgcgaaaaagcctcatcttcct

SEQ ID NO: 433199 - DNA, 573 bp, Oryza sativa
aatgttaataacaactgggagcggaagataacataaatattggcttctcagtattatggttgtacagacttataaaagcaaacattaccagataactagcagctaagcctgaatacagctgcatcaagcaaacagctcaggaatcctcaattactcaggtcaactgccacgtaaacatacagaacattaaataggagtcatataagcacacttccagaacatgatataagcaaaagaaaagtttttaaaagatgtaaatgcatagcaagagattcctcagcctagtggttgatggctttctttgctctaagagattccagagccttctcgcgaagctcaatttcaagtttctgctgatccgattcgtctcttccattatatgaacctttcttcctagcatcagcatctgagtcagattcacgatccttctcaagatctgaagccatatcaacagtttcagcatgcttcagttttagtttgctggcctgacggtctgccttttacggtgccgctttcacgtctgcgcgtctttcctctttcgcacctcttctctcctttctcctctctggactc

SEQ ID NO: 433200 - DNA, 450 bp, Oryza sativa
tctcctactcagtgcacaacagaatgctagtggggtgccccaacagtttttagatgcaaaggaagctgagattcagcagaaaaaggcagaggaaagtagaattgctcaggagatccagaagaaacgggagaaagatggaagggagcaggaactagagaaacaaaaattgatggacggggatgccggtaattctagattaggtcctgatcgtgctgatgctgaggaggaaaaagaactggattctaagcatagctcaagaacaaagagccgggaaagccttaggtccaggagcatctccttgtcgcctcgcggtaggcggcgatctgattctcctaggaggcgttctgcatctacttccagaaattccatttcttttgggagacaagaacgatcttcaaggcgctcagtttcactaagcgttctttttcttcacaaagcgctctcaagaag

SEQ ID NO: 433201 - DNA, 593 bp, Oryza sativa
tttcctatcttccacggcatcgccacccactgctccttctccgtctgctgatgaggagggaggtttctttttatttctcatttttatttttttttttttattattttttatttttttttattttttttgttctttctttttcttttttattttatatttttttttttttaattttaattttttattttatttttttctttttttttttatttttttatttttaatattaattttttatttttttttacttttatattttgttttttacaatattttatttattttttaatttatattttaatttttcttttttatttattttttattcttttttttattcctattgatttttttaatattttaattttttttttatattttttttttttcattttttattttattatttttattctaaatttttttttttattctttatttttctttctatatttttttttattctattttatttttatttttactttttttaattatatcctcttttttaattatttttattaattatatatcttattcatttttatttttttttattttctttttttcttattttattcctttttttttta

SEQ ID NO: 433202 - DNA, 365 bp, Oryza sativa
tcgggctaggctttcctcaatttgtgggtcggtcgtagcgttgctggtcgctctgttctcactgtcggcactggagctgctcgctctggacctgtccttccaatagatcggttgtcgcatgctgccatcacactgtacaatgttgatctacaggatgcatgtgatgcctttatgtgacgaacaccacatgcactggaagggcacacatgatcacatagaggaacgatatctgcttactgtcagttgcgaaaggctacccacaactgtagtgggggacataacactggagagggctgctgtgcctctccgttcagtacagctgctacagactgcacaaccagtgctaccgaagcggtgaccggtac

SEQ ID NO: 433203 - DNA, 524 bp, Oryza sativa
ctatagaagcgttattataacgcattttattcatagatcagcacaaattacaatactacaatacctgacacgacactacgactgacgacaccaaaggcacggattgttgcgtacgtatagcccttgtataagagcatatacatacatacatactagctagccgtgtgtacacagtatacacacagcagatgcaatcctttattgaccaagcaaacagctatagggataattaagtagctatacaagcacatcatcatgcatgtatagcagatacatatatctgtaaggttttatgtgtgcgtttttatttgtcataatccattattcgttcggttcttgcctcgtcgtgctcatgagcagcagccgtggcacttgcctttccacttgcagcatgggccgctatggccgctgcagtagctcatgcactctgccgtcatagtcgcagcaacctttacagttgcaaggcccgcacttgccgtctgcatggatacatatatatgggaaaatgagtcatttatatgggg

SEQ ID NO: 433204 - DNA, 517 bp, Oryza sativa
  unsure (1)..(517): unsure at all n locations
gtgagatcgagggagctaattaatcaactagctagcttgcacaaattaatggcgtccaacaaggctttcgttgtgttcactctcctgatgctggtggctgcatctgccgtcgtcgacgtcgcctctgccggtgatgatcactatctacactacatatatacatatgcatttataattcagtttaattataacatcaaggaatatataattaatcgatcgatactcattaatacttcccccatcctaaaatataaagaattttagatagatgtgtgatacattctagtacaatgaatctagatatactgtatatccagatccattgtactaagatgtgtcacatccatccaaaatctcttatattatcatatgaggggaggtacgtatatctttcgtgttcgatatcagcttctacttgcattgcttaacacctgctgacgattgtgtttttgtttggtcttcttacgagctngcatanattaacgaatatatatatataggagtatatcccatataa

SEQ ID NO: 433205 - DNA, 562 bp, Oryza sativa
cttacacaagaataacaaattattttcttatagaagaataacaaatgacatagtcttctcatcaccacaaaacaaaaaattgaatgaaatgcacaaatgttctgttcactaagatgaatttaccgaacttactcccctgtatggacatgaatgtacaatcagagtatgcagacggtatgtctgataagttgtggcatgcatgtaggatcaactttatctacatgcttgccatatttacagttttaagtccaaatgggaaaccaagctgatatgttgtaaatgaaagaagtaggaccattccagcgctagctagagtatagaaatttgtatgagcaccctcatgtcctgcctagcttcaaaatatatttatatttgctccacattctactcccctgcttccaccatgtttaacattttctatcacaaataatggagtcagcatttcctctgatgatgtataaagagttgtcttcattgccactattggcattggacagtaccaaacaagtcaaagtgatattctagcatccttgcaaaaaaactgataatctagcataattgg

SEQ ID NO: 433206 - DNA, 534 bp, Oryza sativa
gcaagatcaattggcgaacggcgacggcggcggcgacctggtggccagttggcaccttgtcgatttccttccaacctaccttccttctccctctatcttctccatcttccaccacttgtatcccttagttcatcctccttccacctctatttactggagtatggttgctattgtattggatgcttgcatatttgagtggaattgagatcagaggttggagttcctaacacaccgccaatgttcggccctgcgacatgaaaggtaggtttcctccaagaccagcagcaacggtgtataggctacacagatctacagccatgccatgctgagtcaggtccgatctacagccatgccatgcggaatcagggtgccgttgctctcctggtttggagatgtacagggaaaatggaaatggtacaggtatttcatattggcctacgaggtaatatttcttcactcggtaatctgttcaggcaatgaaaagttgtgcaatctcctgactctttcaggacatcgacataactactacatggg

SEQ ID NO: 433207 - DNA, 463 bp, Oryza sativa
gtacaggacaacaaaaaaaaaggggaatatatcacctctgtaatttgtacattctctttcgtttctagcgcaatccattttaattatacacatttgatttcccagagacaggatatcatatctgtatctcgaaagcagatcctctgacttaactgcacatgcagttgagtcactgacatgtgagtcccactttgctacgacccacatgtcagtgacttaactgcacagctgttaagtcaggggatccctttccctgtatctccagggatcccgcgcgacgaacctccggtttgccggcaaaaaagcaacggcccccaattctcctgcaccggaattcaacagctgagctgactgaccaatgcgctgcgccgggccaaaaccaacgaccggaagacaccacctcatcttcgggtgcgcaccgagttgagcctcccctgctcctggttcagcggcgcgcgccccg

SEQ ID NO: 433208 - DNA, 488 bp, Oryza sativa
tgaggaggaggaggaggtgcccaaacgcagcggcggcgatctccccacaaatccagtcacccgcattgctccaaatccagcccggcgaccgcggcggagacggccactgcgacgccgctctcctcctccacttcctcgagactgaagaacaacatttctttacttggacagtgcttccttttgattatcactatttctcttgctcctaagttatggcaactatggttgaggggtgtgttggtccaagtgagcttcacttgaaaaaggaacttactgcactacgaaaggcacggttcttgcgtgatcctgaaacatgttcatcatggagatcgcctttgagttctaaatcatttatgacaacttcgtgtgttattaatcccaatgagattggcagtaatgtatcacaaaagcacattgagccagctgctgcacctcaaagggtgaaaagaaaggaaaaggtttatcttacaattggagcatcattctac

SEQ ID NO: 433209 - DNA, 530 bp, Oryza sativa
ttttttttttttttttttttttttttttttggttttttttaatttttttgggggtttaaatattatttttttttttttattttatttttttttttatttatttttttttttaaaaaaaaaaaaaaaaaaaggccaccaaaaaaaatttaaaaaaaaaaaaaggggaaccggcaaaaaaaaaaaaaactgggggaaaaaaaaggaaccccacaaaaccgggggcaacaccccaaaaaatttgggaaaaaaaaaacccctgggggaaaaaaaaaaatatggggaaccccccctcccccaaaaaaggaacaccgaaaaaccccgggggggggttttggggagggaaaaaacccttggggaaccccaaaaaaatttaatgggaaaggggaaaaaggaaacccccccgggggggaaaaaccatggccaaaaatttgaaagagctctaggggaaaccccgccccaaaaaggaaggggggccccccccaaaaaaaaaacccccgggggcccccccgggaaaaaggctacaactttat

SEQ ID NO: 433210 - DNA, 391 bp, Oryza sativa
gcattaacactttttaattaatgcggggcgcaaaatcaccaattacgggaattgaataatatctgcatcaatagactgttcattgggtgcagcttgtctgcctgaacctgaaccaccgattgttgaggtcgaactcccagaggtgctcctgctgcaggatgttgccgatcacggacacccccggccacgccctctcctgcaccctgatgcacttcacgccgggcgccgcgtggatcacggagcttttcgccgtgggcttcagcctcgacgacccgtcgaactgaaccgccagcttaggcacggtgaggtctcccccggcgtagacgtgggccgttcagctgtagcagtagtcgaacgggtccatggccacacgcggcagtccggcgagctg

SEQ ID NO: 433211 - DNA, 462 bp, Oryza sativa
tgcggtttccgcttagctagccgcagctgaaaatctcctcctccatttcgaagcagagcacagcagccgccgagtgtttgattgctgcagggtgtctcggcaaagcgcgacggcgacaatggcagctcgtgtcgtggtctaggaggagggagcaggagcaggagctgcgtgcgtttcttggtttcttcttgtgcgtcgcctcgcgcattggggacgacgtgaggtgatcgggcgaggaggaaggaggaatggcgcgcgggaaggtggtgttgatggtcgtggtttgtctcgccgtggcggcggcggcggcgtcggcggcgagcggtggggggcacagtcgcggacgcccgggcaagtcggcgaggctgcagctggtcccggctgccccggacgcgtcgatggccgagcgggcgagggatgacatgcggcggcacgagtacatctccgccaggctcgcggcgt

SEQ ID NO: 433212 - DNA, 345 bp, Oryza sativa
ccacgcgcacttcgcattcctacttacgagcgggtgaacccggtgagggagccttgagattacaaacgcctacaactcgctccaactgtcacccattttccattggtcctcaaattaagcacatccttgcaactcaggaccacaagtttctaagccttcctatctaactgggagatttctttcaggcgaaatttatcccccttcggatttcattttcgtatggacctttacacgcttgcacatatgtcacaaactgaccttgcttggtgaatttctacctggaaaaccagaggaccaaagttggctgcaatccaattccgacttattttgttggaaattcgaaaa

SEQ ID NO: 433213 - DNA, 97 bp, Oryza sativa
ggcaagttgactgaataatacaggtaaattttcgttcagatggccctcaaacagaaagagccatgatgacagggggagggggagggggagggggagt

SEQ ID NO: 433214 - DNA, 536 bp, Oryza sativa
ggcagaaaaatgactatgctcttttcccacgacttgttcgacattatatggggattactagcgtctccaaaatttattgatactgggggctttccagtttccattacagacgatattgtataactctacgctctttagtacacagtttttaagcttccaagtaacttggcccgagtatcaagactgctctgttgcttgggctggtatatgagtttatctatcttgaaattgtaaaatctatcagatatggcccccatgagaccaatgatctgagggaggaccgtctatagctcgcaggagaacatcggtttggtgtctggactgagtactgaagaatgaagatccgtttggagacttcttggctttctctggttcttggttgaacttggtggtgagctttttaaagcagcatgctcctgcctgattcgcttcggttagctccggttggggctcttgaacaccaaatagccgaaaccgccaattgtcagggcaatgagtgggccgatggacatgtccatttccaggatcccgttttt

SEQ ID NO: 433215 - DNA, 491 bp, Oryza sativa
cttcctactaggctactactactcctcctcggctcaaccctcccgtcccctcacccccacgcgcgccgccttctccccagaacgcgccgcggcgaagcgccgccgaagcagcccccactcctccgcgcgcggcggcggcggcgcagtctccagacgcttcctcctccggggatctcgcctttgaatggaccgaagtgattccatggctgattcgccaaggaggcgtaatggccttctgcgggaccaggtccagttggtgaaaaggaaggacacaaatcgctacgaaatcgtccgctttcctgatccattgtcatttgagaaaggcttctttgttatgatccgtgcctgccagcttctggtgcagcacaatgaagggatgatttttgttggcgttgctggaccctctggggccgggaagactgtgtttactgagaaagtgctcaatttcagcccggtgttgctgtgatatcaatggataactaccatgatgc

SEQ ID NO: 433216 - DNA, 585 bp, Oryza sativa
  unsure (1)..(585): unsure at all n locations
aaaagcttgcagatgtagatcacggcaaatgatgacatcacatgtacatctcatctacctcacttccaaaaaacacacaagaagcttattgagcacgttgtacatctgaaaatgaaacgaaatggtaactattgcgattagcaaaccattaaacacatgtcatcgatcgatcgatcaccctgctgatggtgtcacgatgatacaggtggtccggtcccacctgcagtgactgtacaactgatagtacattggtttctttctcagtgtacatggctcttcttgcagtcagctgcttcctcctcgccgccgccgtcgcgcggcggcggcgcgacgaggtcgccgcagtcgaaccacatggtgtcggcgagcaaggggaagacgaagcggtagaagatccagtcgcggaacagcttgacggcggcggcgcgcacgccgggggcgctggtgctcccctgctggacgtagcccgacaggtacgcgccggcgacgatccacgcggcgcggccgcggcgctccgcgacgtacgccgccacgccgtcngccggcgacggcgactgcgaccgagacgacagcgcgcgggcgagc

SEQ ID NO: 433217 - DNA, 459 bp, Oryza sativa
cattggggcgtttgagtatacatatccggggaaaaaattgctttatactagtatcgtatctggggattcatgtggaatttgcctatccaaaaaatgttgtgccacactcgttaggccacagttgacaaccctccctatcacaaaagataataaaaatgacaaaggggaaaaatacatcgatgtttctttctttgcctttacagggtacaatagtttatttcactcgccacgctatataaactctgctgcctccaagttggatggcaaaaagaattgtcctctacactacctcaaaaaaatacttcatgttggcaataggggttgcctctcatcagttccaatcctatggctggcatcttcagcagcgccagcagtcatatttacaaaagaagattcagatgaccgatgattctgtgtatcttccaactctaacaattcagctggtttgtcatctttggc

SEQ ID NO: 433218 - DNA, 320 bp, Oryza sativa
acgtgccagtttccagctttcttcccttccgcgtcacaccttatgtcttcagctacacacaccagatgggcgcgatgccggtgaccgcgggtagcacgcgtacgccctgcgtaccactgcgcaggaggccgccaccgcgcgctcgccggaggaggcgccgagctaaaccgcacacctgtccgccgtgcgcgtccaggccgagctcacggggtcttcgctgcgcacgaggaggggacggcgccgacagacgacggcgggccggatatgatagatgcgtacagaaggccggcattctcacctttgcggaggcgtcacgccag

SEQ ID NO: 433219 - DNA, 483 bp, Oryza sativa
tttgaagaaggcggcgacaatggcggacgcggaagcggaggaggagatgatgatgaggatgatgtgtggttcaggaggcaacgagatgacgaatacgaatatgaataataagaatagagaaggggaagaagaagaagaagtaagcggaggaggtaggatgaggaaggggccatggacggagcacgaggacgtccaactggtatggttcgtgcacttgttcggggaacgtcaactagatttcttagcaaaggtctcagatttgcgcggtggcggttgacctatctacatgcactgcatgccatcctctctttgtatatatatctccttgccactaaacattcatgcatccatcgaatggttctttatatttctttttttttctcttcttgaatgctcttgaacttgaccccctttctctctctcttatcatgcaacacccacacctgcatatatccatccatacatctaatcccttatcacatt

SEQ ID NO: 433220 - DNA, 418 bp, Oryza sativa
tttagttttcctctctctccccaactctctgctcctcactctcggacaattgacagtacagaggtagacccacctgaagaacatgaggaggagaggaggtcttttgctgctttcttgcctccttctttctccttttttgttcatggattcttgatagcttctgcatgtcaagaaatgtttgtgcctcaatttgcctggttctttcttttcttgattgattagatttgattttgattcctttctttgtagttctcctgaaccaagtaggtgttgcttctgcttcctttgatatgattggagcaagtggttgtgaaagaggaagagattgacgagagagagagagagagattaagaaggcgaattcaagaactgattagaaacaagttggttgtctgcatcatggattctgcatttgatg

SEQ ID NO: 433221 - DNA, 153 bp, Oryza sativa
tttggtttctgatcatttttatctaagttcttaatttcgatcgcgaagggccatggcgaaggtggcgttgcctgtggcagccattgcggtgctgctgctgcttcgcggcggcggccgcgccgggggcggaggcggcgtggattatttgtcttg

SEQ ID NO: 433222 - DNA, 228 bp, Oryza sativa
tctgaggctttgacaaaccttgggaatgtatatatggaaaggaacatgatggacatagcagcttcactgtacatggcaacactgacagttacaactggattatctgcaccttacaacaacttggcaatgatttacaaacagtaaggtaactgtaatcacgccattacatgattcaatgaagtactccgcattgatccaattgctgctgactgtctggtcaatagaggc

SEQ ID NO: 433223 - DNA, 124 bp, Oryza sativa
gtattgtaaagctttgatgcataagtggggtttcgacaatgacaaatgatactaagcggatgtatacatataaaagtggccttttattctgcacagattcagaattggggggggggggggaggg

SEQ ID NO: 433224 - DNA, 169 bp, Oryza sativa
  unsure (1)..(169): unsure at all n locations
gtattgtaaagctttgatgcatagggggggtttcgacaatgacagggggtactaagcggatgtatacatataaaagtggccttttattctgcacagattcagaattgggggggggggggggggtccancgaaattagaacctatgaaccccaggcacgcgggaggaggc

SEQ ID NO: 433225 - DNA, 535 bp, Oryza sativa
gcacgtcgtcccccaacaaccgaggcacgaggtccgccgcctgcatcacccgcgacgacctcgctgaggccgcgcgcctcgtcgaccgctcacgtggggaggcacccgacgctgccgtgaagaccaacgccggcgaagtccgtgagtcgaagcaccaggcgcacacagccgctccagtcgtccgcggtgttggggcttgacttcgaggacaccgacctcaccctccggctcccgggctccctcgccgccgccgtccccgaccccgaccgcaagcgctccttctccaaagccgacaactcctcccccctcgccgccgccgccgaagccgagaacgagacggccgcgagttgggcgtctagggagatgaggagggagcgggagaagaagaagagggcagcgcccacctcgaacggcgcggcggtggagtgcagcgaggacgccgacggtcgcgaggacgacgagctcaacgacggcgaatgggaagccgtcgtcccgaccgcgtcgtcatcccgactctgctaccatccgtactccg

SEQ ID NO: 433226 - DNA, 421 bp, Oryza sativa
tttgttttttttaagagccggggacaagtgcatgatatttcccaaggtgttaatctttggcatagaattgccgaagtcagtagtcggactgaaattttactgcctgtctacatcttacagttcctgttcctctaacataagtcagtagtgaaactatgcgtaaggccatccggttcaattcatccaaaaacagcatgtccttgtcttcaaaacctaagacagctttcccaaaaccatgcccattaaagtaggtttgcactctttcaatctggctccatcttttaaagcttaaatcttgctctattttttcttgccactttcgacaccactacaaccttctactcctttgcggccagggtgatggaaaaataaagaaaggaatgggtccacttctttggttgtgtcaatatgcaaatgtggc

SEQ ID NO: 433227 - DNA, 278 bp, Oryza sativa
ttcttgttctcgactccgatcactctcctcctggggttcgttacggactcctcgcttcgctagctcgcttgcttgctggctgagctgtggtacgctcgccatggcgtcctcgacgggggggttggaccacgggttcacgttcacgccgccgccgttcatcacgtcgttcaccgagctgctgtcggggggcggtggggacctgctcggcgcctgcggtgaggagcgctcgccgagggggtttctccaaaggcggaacgagggtgggcggctgagtgccc

SEQ ID NO: 433228 - DNA, 431 bp, Oryza sativa
ttgggttttttaaatttttggggcacttcacactttttaaggtaacccggagacggcacacctgaaatgccctaaattaaattggagctaacaatgtaatttacatttgaactttttggtttacagctacaacaacatgcaaaggcacaagctgcagcaatcacatacaatgtctgtagacttgatacatgttcagttaacccccgtttacaaaatcaatatgtgcatcgcccgccctacagtaaggttcacaattgggtcccaaggtaccaaatttttccacccccatgaccaaacctttgggactacaaattaaatggagaaaaaagatgcccttttccccagggttccaaatccaaaatgagcaattggagagcattaatttggccacttgattaataaccacacgggaaaaataatttctgccccct

SEQ ID NO: 433229 - DNA, 368 bp, Oryza sativa
gtggggtttttaattccttgggcggttccttcttcttttttttaaaaaaaaaacgtatggagaaaggccctcatatatcaactgcacccgttggttgtgcacttttcgctaatccttggcctcaccataagcttttatcgaatcgcccttgaccagctcattcattagccccttttttagccccaccacattggcaaaaaccacattaccaacatggttcacgatcgcatccagggccaaaaactcagaagctagcttggctactgggagggctacgccttagacccacttggcggcaacgctcactctagtaatggcggcgctccttgaggaggggcttggtctgtgcggaggggtcctctaagagg

SEQ ID NO: 433230 - DNA, 287 bp, Oryza sativa
tgggtttttttttttttttggtttggtgcacaaacgcgcagattaaaagtgacagagccggctgacccaaaagagggcacacaggttaccacaacctgggttggaaggctgttaagcccctagcataatatcgcccccaggaaacgggtttaagacacactgacatgggaaacagggaaacgtgcccactggccgaataatgggggagcagacagttcttaataagggtcttgacaaaaacaaaattgagggcttagacgcccacccctactggagaacatgacacg

SEQ ID NO: 433231 - DNA, 378 bp, Oryza sativa
ttggttttttaatttttggggtttttttttttttttttttttttttttttttttttttttttttttttttttttttttttttaccaaaaaccccccctttttttaatttgccaacaaattataaaaatttctttaaaaaaaaaatttgggcaaaaaaaacccgaatttttttttaaaaaatccccccccaaaaaaaattggggtccttttaaaaaaaaaccgccttgaaagggagggaaaaaattattcaaaattggtaaaaaacaaaggcccttttaagggtccaaaacccaaatgggaaaaaaaaaatttttaccgcattttatattggttttttaaaaaaaaaccccaaaaaaaaaactgaatctttttttaaag

SEQ ID NO: 433232 - DNA, 333 bp, Oryza sativa
catcatctatttataataataacaataaaaccaccaatgccaccccatcaacattaaacaaccttttttatcatcatcaaccaaccaaaaaccaaactataaacttcctctgctccatttctgcctccattttcaatggacacccacatcataactatgcatttttttttcaccccttgtgtgactgaaaataactaccacttccccttttgccttaactgctttaaaacccatcccctgctgctgaagctaccccattccgtgattcccccaacaaacctggctctcaagtccttcctaaaaaccttccccgaagggctcttggagatagaa

SEQ ID NO: 433233 - DNA, 418 bp, Oryza sativa
ttgggtttttttattttttgggggaaacaaaaagtatctccaaattaatcatgctcaaatttaagttatgctcaaacaatacattatgacaccggcagagaattaacaatacagcttgggattttatagctggatattaatctggccccatcataacacacacggagatactcctatatatcaaccgagcgaagaagcacacacaagatcacacaatcaggccaggttgcttcgatccggccaccggccggtcacagcccgccacggccattatgggtgatgccggggtggtggtggttcgtgtatggccggaatccccgtgccagcgccgcgctccacgccttttgcacgccggtgaccctgccgccgtacttgtgcccgtcccactttttcagcgcgtgaacgatccccgtcgtcc

SEQ ID NO: 433234 - DNA, 499 bp, Oryza sativa
ttgggttttttgatcataacggtttttatttatattggataaatcatcgaagttacagctcaacggtacatttaaaaaaaaaggtgcaatggcaaaaaaaaactgaagttcacacaattgtctcactaattaaagctatctacggctttctacatgtagaactgattcattggccgtttctcttttcatctgtaatctgtaaatcctttagtcttctatatcctctcacagttgtaggcaagtgaagcctctgctaaacgtctcttttcccctgtgtactcctgatgcttccagttgtcagagtatcatccatctgcaagcacaagaataattcatagtgagaaacaagaccatctttaaccatacgaagaacaagaaataacaaatttgcacttatttttcttttcttttttttttgacggcaagtggatatggttttgttccaaccacatctggacaattgtttcattgttgttaagcgccacttaaattactcaca

SEQ ID NO: 433235 - DNA, 502 bp, Oryza sativa
ttgtggtttttaaaacacgggggcatgcatgcatgcataagcttcatcacagaacagcaaaagcaggagatgggaaatgagttttcatccaaatgtgcatagtacagtgccaaggtgaaacatcgaactatagcaaaagggttttcagttgacctctgattcaccccatccctaactatgccatcggttggtcacaggacatcaaaggcaggtgatgggaattgagtcttcacccaaataaatagcaaaagaaaggtttcacctgacttcagattcacccctcctagctatgccatcgtccaaccggaagagaagtcatgtggctacaacactaatgcccataatagaatctccaagggacaacgaggatatatatacatggtgagtcgatagtagatgtggagttctagcagacttccgtcttaaatctaaggcagatccccatgctgaatagcttttgatagagcagctttgcgccgtagggcacattgatccttactat

SEQ ID NO: 433236 - DNA, 454 bp, Oryza sativa
tttgtcgttgaatcataccgagagcctaacgttgcacctgcgccgcgtgccaccatgtcatctcaggcgccgtcggcgccggtcacgccggcggctccaccgccgcagacgccacccgtgacgcctcctccggtgactgctcccccgccggtctcaccccctccggtgacgccaccaccggtgactcccccgccggtgtcacctcctccggtgagtcccccacctgtgacacctcccccggtgagccccccacctgttacacctcccccggtgactcctcctacaccggtggctcctccaccagtgccaccgtcaccgccttcaccgacgccgaccccaacgccggtgacgccgtccccacctacgtcggtgacgccattccctacttcgcctgtcggaagcccgccgccggccgatgtcccaaccgacccgccaccgagttacaaccccccgt

SEQ ID NO: 433237 - DNA, 367 bp, Oryza sativa
tggttttttaaatattttggttttttatttttttttttttttttttttttttttttttttttttttttttttttgcaaaaacaaacaattttggtttgaaaaataaagccataacggggcccatgccttaaaatatccaaaaattaaaaacttaaaaagtccccaaaaccgactaattggggccaaaatttaatccaaaaaaaaactggtaccccaaattggaaaaaattttacaaaaagtcccggagggcttaaccccaaaccaaaattttaaaaagacccattcaaaaaatttgaaaagctcaaacaagaaaagccattcccttttttaaaaagccgcacaaaaaggttatcaaagcttggcaaa

SEQ ID NO: 433238 - DNA, 342 bp, Oryza sativa
tgggtttttaatgtgctggggcactgcacacggtgcaaagtcagctgctgtattcacaacataccgagtttatttctaagaggaaaaactctactactgtaacacaatatgacaacggatcccgttattactagattccattagagttctttaaggaacctactaaaggcttacagagcccattttaggggagccaaatccgctacactatatgcatcttagccgaatcgggaaacatagtacattcatttttgggtccaaaaatttaccggaatcctttccaactacattaactcgcgaaccaatgacacgattgctacctgacatcctttttttactgca

SEQ ID NO: 433239 - DNA, 315 bp, Oryza sativa
aattgttttttaaaattttattggtttaaaattttttatttttttttttttttttttttatatttataaattcaaaaaccctaaaaaaaacaaaaaaaaccaaaaaaaaacaaaaaaaacaaaaaaaaaaaaaaaaaaaaaaaattaccaaacaaacacacaaaaacaaaaaaaaacaaacacaaaaaaaactaaaaaaaaacaaaacaaagcaaaaaaaacaattcccaaaaaaaaaacaacatgcgtgcatccaaaaaacaaaaacaaaaaaaaaaaacagcacaacaaaaaacgaacaagaaaaaaaacaaa

SEQ ID NO: 433240 - DNA, 450 bp, Oryza sativa
tttgtttttttattttttgggtttttttttttttttttcccctacaaaatcgaagtaagaaaaaatttgtaacaccaaaagaatttatccataaatatttggatttaatacaaagaaacttgtaaaacatatatgggatgaaacatggaaaaaatgacaaaaaaatatgccaatccaaatttagggcctttttactttccgagggctggatctaagattccttcgatgaactcgggcctttgacgtagggacccggggctccttaccttaaatgatcttgccttcctaattgggggagtccaaagcaatggccatctccttaatcgctggttcgccacgatgggggaatcccccttctcctttccactggcgagcttttagaaggttttttactttgcccgaacaacagttgttttccccgtaactatcgccaccaggcggccatggaaa

SEQ ID NO: 433241 - DNA, 413 bp, Oryza sativa
tttggttttttataaatttttgggtttttatttttttttttttttttttttttttttttttttttttttttttttttaaaaggccaaccaaatggattggtattgcctcaaaaaaaaaaattttcccaacaggggaaaaacccctccaatttttttttttttattaaaaaaaaaaggccttattttttggccaccgggaaaaaaaaatcctatggaaacctaaaatttttggccccattttatcctatcaaaaaaaaaaaacaattctttgggaaaaaaaaaattatggtttttgggccaccccccaaagctacgggattaccttacaaaaacccttttttttttgcccccctcaaattggcaagaaaaaacaaaatttttaatttaaaaaaggttaaaacaccaatcctttt

SEQ ID NO: 433242 - DNA, 497 bp, Oryza sativa
cataccctcgctatcttgtttaccctgtcttgcagcagcagcaagtgcagatcaccacaccacatctacacccgttgctctcgtgcttaggccgcaggctgccgcatgcgtttggtgtttcgtctgtcggggttcacgcgttcgggtcttcaagtcgagtctccccggggctggttgcaaacccacagcactgatctgttctgacggttgaaggcaactttcagaacccgctgctcttggatctccgccgtcgttccattcagagttatctcagctgatatgacaccaggcacgcaggacgcggggccacacggctctgaatgcgtgtcagcagccccaaccgccattaagctgacagctactcctcaggcaataccaacatgagtggcgggctgcacctggccaaaggaggagtgtgaaacaaggcgccaccaaggctgctgaatggcaagcatgctgctgcaagacccctgacggcggcgtggtgacctagtaat

SEQ ID NO: 433243 - DNA, 434 bp, Oryza sativa
cgcttcctcgctctgctgtctcttggtgtctttctatatgctgctttcccaactcgttccccttgcttacttccttcctccctccgccctgatcctctctcgggattcgcctacgatcatccgcccgtgcgggagagcctagcggagcagaagcaggcacgcgcggcgacagcggcagcggcaaggagtaggaggaggaggaaggcgaggaccagggcgaggaccaggacgaggagggaggatatggcagcggatagggaagcgaccccggcggcggtgcggcagacgatccataacatcaaggagatcgaggacggccacaccgacgaggaggtctacgccgagcatcgcgaatgcaacatggaacccaactagaccaccgataggcttctcaaccaaggtacattccatgaggccagaacaaagagagacaa

SEQ ID NO: 433244 - DNA, 375 bp, Oryza sativa
aaaaaaaccccccttttaattaataaaaaagggggcggggtaaaaaaaagaaaaatggtttggaaaaaaagcccgggaatctggctttaatccccccaaaaaagaaaaaaacaaaccctttccgggcccccccaaaaaaaacatttggccccaaataaaaaaccgggatttcaagtgtttcccactcctaaaaaatgggggggtgaaaaaaccccccttttaatttgtttaaccccccccccgaaaaaaagggggtccccccccccccccttttccccctttacaaaaaaaaaaaagggtttttttgccgaaaaaaaaagtttttctttggggggttaccgaaaaaattttcccaaaacaacccccggttgaaaa

SEQ ID NO: 433245 - DNA, 493 bp, Oryza sativa
ttgtttttttaaatttttttgggtttttttttttttttattttttttttttttaaaaataacaaaaaactattaatataaaaaaaaaaaaaacaaatcccagaataaaacaaaaaacaacaaaaaaacaaaaaaaaaaaaaaaactaaaaaaaaaagcaccctttaaaaaacaacaccaaatataatacaaaaccaattattttcaaaaaaaataaaaaacaacaaaaaaaccaaaaaaacaaaataccaaaaattcaaaaataaaaaaaaaaaaaaatttccaagaacactaaatttaaaaaaaaaactatctaaaggactaaattttaaaaaatggaaaaaaactaattatagaaaaaaaaaaacatctgaaatttcaaaacataaaaaaactcttttccaaacaaaccatttaaaccaacccaaaaaaccaaatttttaaaaaaaaccaaactcccatatttttaaaccttataccccaaaaaccaatcc

SEQ ID NO: 433246 - DNA, 381 bp, Oryza sativa
ttgtttttttaattttttgggtttttttttttgtttttttttttttttttttttttttttttttttttttttttttaggcccaaacttaatacattcattttacaagaaaaatgtttaaacaaaaaagttttttaatttacaagtttttaaatgacccgtaatcaaaaatgaaaaccaaaaacccaaaaaaaaacagttaacaagttttttttgccaataccagccccaattaaacctggggagagttatttagggcattaaatttaaacttgggacaaaaatttatgcaaattcgggggctttaatccaaaacctggggggatattaacttttggaaacccaaaatttatgcccccatgccacgggttccccattcaagg

SEQ ID NO: 433247 - DNA, 399 bp, Oryza sativa
tgtttttttattttggggttttttttttaaagcacaagccttccttttttttctttttttttttggaaaagtatacaagaagggctcaaattggtgttcccttgggcaaacaggccatttccgtggaaggtcatgaaagcgtggtcacagattacattctaaaagtgagtacaacacactacaggaaaatagagaaaaaaagaagaaatttccatgactagaactaattaagttgctattgcaaattctgggactggaaatatgtgctgatacaatggttggagaccctaccagcagaggtacttcaggaggacaaaacaaacgtgtcacaaatgggatgtgcaatccgcagtcaacaaagacctaggcatgacagtgttctttgatcatagggaaaaa

SEQ ID NO: 433248 - DNA, 53 bp, Oryza sativa
gattcaaagaacacagagggcacgtcggtgtccccgacaccaacaataccatt

SEQ ID NO: 433249 - DNA, 501 bp, Oryza sativa
ttggtttttttaaacgagcgggaagccaccctcggatgaatgtcatcgatcatttacaagcaatgatgctctactcttttaaaatacaagcggcaaccacgaaattaacaaatgtaaccaacgcgaaaccttaacagatatacaacagcaaatatagacacgtgtggaacaaccgtagtagctagcttggaactctagaactatttcttcccacccagcaaaggttggccactgccatttggactaggcatgctcgccgttctactcatcttgcctccaccataactcttcacatcaatcaaatcaccaaacaaattgtctggcatgtagtatggtttggccgcagccgctgtagtttctgatggccgtggattaccattcattctaacatcttgagccattgccggaccacttcttgtttgagaaacaaaggagttgtactgttgcatcggtttggttgcaggagatggcacttgttgccttggcggagcagcatacggc

SEQ ID NO: 433250 - DNA, 377 bp, Oryza sativa
ttgggttttaaagaacaagggggaacaaattaattaattacacagtacatttcctgtcggaaatacgtatacgattgggagttttacagtaattaattaaggtcggattaataatacaaatccagcttctgcatcactccctcacccttgggaacatgcacctgtacacctttgataagaaggacctcttctcggcttttctccgaggatgccgcgccggcgccgcctgcgccggcgacatgcgcggcgtgacgtccggccgggcggcggcggatgtcttcgcaacctcccggtgccgcttcaccttattgaactgtaccgagaagtcctgacccgtcgtcttgggcgcactgtactctctgaggccctacttggat

SEQ ID NO: 433251 - DNA, 372 bp, Oryza sativa
ttggtcgccagtcccctcctcccccgcgctctccctctccccctcacgccgtcgcgtcgctgtccccgacacctgcgcctccgcctcccgctcccgccgccgcaggtccgccgttcgccgcctccgttgccgaccgccaccgccccgcgccgccttccccgcctcagcctccgcctgcgcctccgcctccgcctccgcgcatcgcaacgcaacctcaggcgcagaggcggcgacttgactcccccgtccccgacctctagctctaggggtagctgccctacacggtatagtcgacagcccaccccttatcttgtcggggctcccatgtacgtggcccgcggggcatggatgggaggtcgtggggcttcggat

SEQ ID NO: 433252 - DNA, 311 bp, Oryza sativa
attgttatttaaaaattttttgggttttaaatttttttatttatatttattattttttaaaaattacaattaattaatattaaaaaaaaaatacaaacaaaaaaaaaaaaaaaaataaaaaaaaacaaaaaaaaaaaaaaaaacaaaacaaaaaccaaaaacaccacaaaaaaaaaaaaaaaaaaaaaaaacaaatctaaaaattcaaaaataaaaacaaaaaaaaaatcccaaaaaaaaaaaaaacaaaaaaaaaaacaaaaaaaaaaaaaacaaaaaaaaaatacaaaaaataaaacaaaaaaaacaaa

SEQ ID NO: 433253 - DNA, 443 bp, Oryza sativa
gtcaccgccatggccgccggcgttctcccccgaccgcgcccgcacttcctccgccgcggcatcctcccctcgccggcctccccgctccccttcgcttcccgggtctcctccgctgcgcccctccgccaccgcctcccgccgccgcgcttctccctctccccgatccccaagaccctctcctcgccgtcgcacgtccccgtccgctccctcttcaccggcatcgtcgaggacgtcggcaccgtccgccgcatcggcccgccgcccgcgccgccctccggcggcggcggcgaggcccccggcgttgacctcgaggtggagacgagcaccctcctcgccgggacgcagctcggggacagcgtggccgtcgacggggcctgcctcaccgtcgcggccatcgacgcggcggcgtcgacgctcaccttcggcgtcgcgccggagacact

SEQ ID NO: 433254 - DNA, 311 bp, Oryza sativa
tcttatgttcgccggcggcgcggatggcggcaacggccacctgccgcggccgcggagggcgcggcgcggcggcggaggcggatgaggaatgttgtttactcctttgtgaccgactactccgccctgcaccgactactacttggcctacttcaaggtgtactcccacatcgttgtccactatgagatgttcaaggaccatttgagaactaattcttacagaaatgctatcatgcattaccaggatttaatttcatgcaaagtctgtttttgttgtgtgctgtggcactggtgtactttttttattttgtgct

SEQ ID NO: 433255 - DNA, 453 bp, Oryza sativa
gtattagtaatgccacaaaaacatgcagtgcgtaataatattgaggcatcagaagtgaatgctgttcatttttcagaaatagtactagacaaatgttgttcatcagaagtgattccaacaagttgtctgcccataatacaagtagatcaacgagccattccacatgccatattttctgaacaaagtacaaagttcaaattgaagtagtaagaaaaatgagtcatgtgcagctttagttcaggcctgtaaaaagctcttggcagtcggcagaatacaacttacttaaatctgaactattttggtacatggttcaaatggtctaaaaataatttcctaggttggtccatttttagtagatcttttgtagaaccatctaatgaagaaattctggatgtaaatcatgatttttgcagctattgcttgcttaatctgcagactactgatttttgcttc

SEQ ID NO: 433256 - DNA, 490 bp, Oryza sativa
ttgtttttgatatgaataagggtcacatttcgacgacgaaatagaataacatctggcatttttcacccgtagatccctaagaaataaccattcaccacattaatttgacgaacaaatgctaagcaaatgaaatcaaacgtcggggaagcaatggaaacgaaggcgacgtcggggaagcagtggtggcgaaggctcttggctagacggcagcacgcagggtaggctgaggcaggctgagcgagtgcagaaggaagatcatggagagcaaaacctctggctgccacaaggcgtgacggactgggcaggggtgtaaatcatccaactgaatactgcagctcctcggattgcagattcattttctggagtctatgcctacgaagaactttgtttcaccaatacttccagatgctgcacttactgttgttccgaagacaatttgaccaaatttttattacgataaaagaaggcgaatactgttttctgatgagca

SEQ ID NO: 433257 - DNA, 455 bp, Oryza sativa
  unsure (1)..(455): unsure at all n locations
ttcacccctctctctctctctctcgccccacccggatgcctcgcgctgccggaggctgacctcgccgccggcgactccgctcggccgccggagcagccagcgcgcgcgggtaagtcgactctcccccctccgctacgtgctgtcggacgttttgtcgggcggttttggttttggcttctgcgtcgagcagcaagggtgggtgggtgctcgatctgcgcgggctcgagtcgcggggagacttgctcgtggggagcgctctctcaccggaggaggaggaggaggagcaggngggttcctcctccggagcggcggccgcgtggtctgcggattctctccctggtgggaattatgaactacgcggcgctaccccaaactgctgaaacccacgcggatttattcgtttggtggtttttccccgggaatgaccttggtggggattcgtatggaaaagcccc

SEQ ID NO: 433258 - DNA, 485 bp, Oryza sativa
ggggttaaaatataatctgggaattttcatttccagaacataattatggaacattacacaattgagtacatttctcaggtcatactaaatacatacactcagtatgactgacgacccattttcatttgttacatatggctggcacaaacacatgttcagccacataaatgcatatatgaaaactatgagatctacatagatacgtatttcttgatttttttttcttttatcagtttgtattttcttgattcttgattatatatcacgtagctaggcacatttataatgtcgtatcaggagctagcacttgtaggggtatagtagagtgagctgagctgtacatgtctaggccaaggggtcgccagcgacgccgtggccggcggctttgggcggcggcggcgacggcgagggcgcgggaggcttgggcgtgggcgcgggcggcggcggcgtgggcttgggcttgggcggcggctgcctgagggcgc

SEQ ID NO: 433259 - DNA, 479 bp, Oryza sativa
ttttatccgccgccgccgcctccctacctccatctccatctccatgaccgcctgcgcctcctcctactcaagtccggtccggcaacaacctccttcactcataaagcccggaaactactgagacctcctctttcacatctcaaacagagttcatgggtagtacagctgcagcgggtggtaacctgcgaaccgccctctcgtactgtgtgcagcaagttcgcaactatgattatcaccactatctctgccttctccacctacctccagctatgcgcaaggctgcattcgccttccgagccttcaacattgagacggcaaaggccatggatgttgtctcggaccctaagactggccttatgcgcctcctctggtggaaagatgtagtcgacaaggtctttgcaaacaagctggttgagcaccctgttgcccaggtgctctcttctgttgtgtccgagcacaagattagcaagcattggctc

SEQ ID NO: 433260 - DNA, 513 bp, Oryza sativa
ttgtttttttaattttttgggttcttttttttctcttttttttttttttttttttcttttttttcctttttttcccttcctattctctcctctctccttcccccccccccccaaaatctcacccccttttttttttccccaaaaaaatcccctcccccccccactcccaccactcccccccttccccccctcccccaccctcttctttttccccccaacacaacccaaacacccccccctctttcccccccccccctacccccccccccccttctccctgtgataacccttactccttttcccccccccccaccacccacctcgtacctacccttcccccccccctcccccccacccttccccctcttcctccctcatcatccccccccccccctccttcccccctcttcccaccccccccctccgcaccccccgcatccccctacacaaccccccccccctcccccccactccccctcccccccccccccctcctcaacccccccccccccc

SEQ ID NO: 433261 - DNA, 122 bp, Oryza sativa
cctcatacacactcacacaaacttttatcctcttgagaccccgccctctttttttttgtttttttaaaaaaaattggggttttaccttttttatttttcttacatactttttctttttctct

SEQ ID NO: 433262 - DNA, 238 bp, Oryza sativa
ttcttagctgtgccatagctgtcctcctctccactccactcacctctccacctcccaagaactcccaaatcccaccccgcattgccatttccagctgttgttcttgattccttgttcttcggcgatcatttcggcttcttttttgtggtggtatgagagtttcgcgatgaggaaggaggtggtgttagtggccatggtggtggtggtggtggtgagctgggtcgttgctgccggcggc

SEQ ID NO: 433263 - DNA, 419 bp, Oryza sativa
ccgccctcttttttttggtttttttaaattttttgggttttaaatttcttttttttttttttttctttccaaaaataatcatcacctttatccaattaaaattcccatttttaacctttctaacccagggcatccataaaaccccccctccttttattaaacaaattcaaaatactcaccaattgtttctagcctattaacttcataaggtaggggcacaataattggtccaaacactaaatactctgcttaaaaacacattaattgcaacataaaagcaatctaataaaaatttgtccccccctccatcaattccttcaaaaaggaaaacaaaccccaattatttccattccctaggagcccccaatgctccaaaatttaccaaaaactttttacctttttagcctttaacccattat

SEQ ID NO: 433264 - DNA, 457 bp, Oryza sativa
ctattcccccggtcgctccatcccaggggcgacgcgggtggcgattcaagccgcgccgccccctcccttcccctgctctccccagcctcgccgccgcccgaacagccgccggcaaagccgggagaaggcaaggaaggcagcggcggggctttccatctccctcgctcgtggtcaaggcggctggggcgccgatgagaccggacgacgggagtgaggcgacggcgacgatgtccagttccagcgctgccgagcacggatccggccctcccttggccggatctggtgctcccaccggcgggagtcgtgtgggacggtgggatccgccgccttcccggccggcagcgacgacgccgcggcctgccaaggagaggtaggggctggcgcgccctcgccggtgcggagacggcagccgtgacggtgtccgatgccatcatcgggacggtcagcaacggcggga

SEQ ID NO: 433265 - DNA, 91 bp, Oryza sativa
tttggtttttttaaattatttgtttttttttattttattttttttttttttttttttttttttttttttctaattgaatgtccttttcgga

SEQ ID NO: 433266 - DNA, 367 bp, Oryza sativa
tttggtttttttaatattttgggttttttttttttttttttttttttttttttttttttcttaccacattattaacatttttagattataatttctgaaaaaaacataagggggggccaaagtccacttcatttaaacaataaaacccattattacattataaagggcacctccccatgcaaaaaaaaaataaacaaagttaacaacaaaaaaacactttttaaaacttcccaaaaaaattgacctcaagtggagaaaaacaaaccaggaaataggtgaccatggaaaaacaaaaggaagtccttatggggaaagccaaaaaaaccccccattttttgggaaaaaaagccccaatccccaaattaag

SEQ ID NO: 433267 - DNA, 330 bp, Oryza sativa
tggtttttttaattttttttgtttttttttttttttttttttttttttttttttggaaacaactttaaaatttttgacccaaaacaggaaattttttacaagcagggattgaaaccaaaacacccatttccgcaattggttttttttagctaaaaaaagggctgacatattggacaacccggaaatccaaatgaaacaaacctttccggtttgaaaaggcaaaccgggggatgagcaaaaaaaagctcccaaaaaaatttttgttcccaaactgactttggttccctaaaaaatttcggcgacaatttaatttgtccatgagggaaaccc

SEQ ID NO: 433268 - DNA, 455 bp, Oryza sativa
  unsure (1)..(455): unsure at all n locations
ttggttttttttttcaactaggtttttttattggataggaagtactgtacaattacatgtatatttacaaattgaaggtgctttacagatgccagctgatcaattacaccctcttctctgcatattcattgtcacaggttatggtcagttctgtacatcaaccaaaaaccttatgatcagctgaaagcctatgcagaggcttgcagtgtcctaaattaacagcctggcttcagagaatacatgagcgcctaaccatcacttctttttggagccagtgcgattgaaggtgtgggctctttcccattgcgcaacgtcttcaacccgcgacggtggtggtggtaggacgtcncgctctaccatattccagccttttaaaatgttgtctggaactccaccatgcttcgtcggtttaccgctatacaggaagctcgtgttggagttcaacaggaggttgt

SEQ ID NO: 433269 - DNA, 132 bp, Oryza sativa
aaaacttgggggttaattttacataccaatgccaacttttcgccattaaccttaatttaattttcataaaaaactgagaatggcccaccctttcatattcgtcgcatacataacccacacttttatctttac

SEQ ID NO: 433270 - DNA, 430 bp, Oryza sativa
tggttttttaaaattttttggttttaaatttttttttttttttttttttttaacatatactttttttcttttttttctcaccctcatatttttttttttccaaataggtttcacaaaaaaaaaaaaggctctttaaaaaactcctaaaaaccgcaaaaaaaaccaaaaagcaacattttaacccccttttttctgggaaaaaaaatctaagggggaaaaaaacaaaaaaccctaaactaaaaaacctcccccccctttaaaaaaatattcaaacaaaaaaaacttgccaaaccccatcacccaaattgtaaaaaaaaaaccttttattttccaccacataaaagccccggagggattaactgggggaaagaaacaacccttttttttaaaaaaaaatccggacctgtaaccacactccattctccaaaaa

SEQ ID NO: 433271 - DNA, 483 bp, Oryza sativa
ttgttttttttttccaggggacctaatttcacataccaaaagaaactgagggcaaatatagtttactttatgttcataaaaaactgataatggacctggcagcggatacgatgatttcagcaaccacacttcatgtgaagctaaacaggaccaagtagcaagagactggcatatgataccaatatcagtacaacacattaccaggttaaataagcaagcaaacagccacacgccgatttccattcatctgttttgtatgccaagcttaaactgaggacaatgagcagccctgaactggaggggatcatcgcatcgatcttcaacaccgccagaagcaaggacaaagcttgaggaggctgtgaattatggagcagtgacttgttggtgagatctgtaaacgggaggtgccgggctatcaatttagcttgctaacgttaacttcctgcttaccaaaatcattcaacattgtcgttagcctgaatt

SEQ ID NO: 433272 - DNA, 402 bp, Oryza sativa
tcgtaatcatctacatccattcatccagttaagttgattttttaagctagctttgccggtgactgaagagaatttgttggttaattaaagtgaggatttcgccgggatcgatggaggggaggattagcagtgcaacgctggtggtggcagcggtgttggctatgctggtgctggtgccggcggcggcgctcgcctagcggttcgatgttggcgactcggcccggtgtacgtggggttacaactacaccgactgggttatcaagaatggccccttattacaaaacgacagccctgtgttcatgtacgaccctgcgaacgcgacgacgcacgcgcacagcgtgtacatgatgcgtaacgcgggggactaccagttatgctatactaaggctgcgaatctggttg

SEQ ID NO: 433273 - DNA, 457 bp, Oryza sativa
atcctgtgagctagcagaggcgccgtcgtggtcgccgtcgttcgtcctgctgcttccgccgcatcccgatccgccactgctgaacggggtgctttcgccatgtcgaggctgcgggcgctgtggcaagcctccgttaacgccaccaggcgagccattgtgtggaattcagaagacctaatcccaccaagtgaaaagtacatcttcaattttaattcaaaagatgagctgaaaaggtggcacttgtattcagattccgagtatggaggtttatcatctgcatcattggagataactgatggtggtgctggtggggatacttcatcaactggtctcttttctggcaatctctctttggatatgtctgagggatcaacatggaagataaggcgtagcggtttctgtggaatgagaacaaagaagtttaatggtttcattgatcttgatgcatatgatacta

SEQ ID NO: 433274 - DNA, 358 bp, Oryza sativa
ccaatatatctcataaatttatcacttgaaaatttttaccctactaaaaaccttcatatcatactccccataaacaaccctcaaacaatttccaaccctaacatacccatcacatacttcatacccagctctgatgccaaaacaacctgcacccaaaaactgaacataattaaaaatggaagcaaaaaacaaattaaatgtacatttataccaaaaacaacaggtgaggtgaacatttttctgaaaccaaaaaatgatatccatacaagtcattcaatgttcttgagcaatttcccttttcccaaagtgctcatattgttcacaatttttctccaacgtccttcagggcaaaaatcaa

SEQ ID NO: 433275 - DNA, 68 bp, Oryza sativa
tttggttttttaaattttttgggtttttttttttttttttttttttttttttttttttttcggccccc

SEQ ID NO: 433276 - DNA, 329 bp, Oryza sativa
ggggcgcttaaatcaaaacaaaaagcttttttttaaaaaggggaaaaaaaaaaccccccttttttttaaaaaaaattttgttaaaaaaaaaaaaaaatttccccctaccggaaggtttcccaattttccccaatataaaaacccctttttttgggtttgtttaaaaaaaacccccacccttttaaaaaaaaaaagaaaaaaaattcccaatctttcccttggaaaaactttttcccccaaaaccccttccccctaactaaaaaaattcttttttccccctttccccaaaattttttcccccccccccggggcgcccccctgggcccccc

SEQ ID NO: 433277 - DNA, 368 bp, Oryza sativa
tctagtcgcaaagtctgcaatccgaacgatgcgggggcgcgggatgcatgcggactcactgccgcgcgctcccgccatgcagcaggggagtcgtagcagcagcagcatactggaggagggtatgactggcgcggagggaggatggtgtcttgtgcggcaatggcaaccctgccggactccgcgggcggaggcagcggtggccgggcggactccgagctgatggtgccgcagttgcacctaaaggcgctgcaagccatcctcgccgagcgcgcgccgtggtcgatcgcgggcgcgcccgcgccggcggcgtttttccggaggcgggacaggtggttccacctgccgtataaagcgccgtcgtcaacgga

SEQ ID NO: 433278 - DNA, 386 bp, Oryza sativa
tagtttccccacctccgatccgacggttcggggggcctcttacgcaccgagaccgatcgccacctgcacggccgattgcgcaccgccaccgagtcctccgcggctgccaccacgtggtgaatacgggctcccaccagcccatcgcacggtggcctgcgtcggcgacagtttgagtcttttctgcccttgatcaccgagggacatctgcatctaggaaaaaaagacactgaactatggctgatagactcaatgtccgggggtatgctccccttcctacagaggacagggatcacagcagtgttactggtgatgtttgaccatccggtcaattacactccaaaatcctttatgaaaatcccgtggaaagcaattgccctggcattatt

SEQ ID NO: 433279 - DNA, 185 bp, Oryza sativa
ttttcctgagagcttcttaaaggtgaaaggggaaaaaaaagaaagaaaaagaaaaggagatgagatgggtgactcaagatgcatcaagcaaaggaagaacaatatgatgatgatgatgttgttgttgtagtggtggttgaggttggaaggtggatggtatgagggatgtatgtagacagctctgg

SEQ ID NO: 433280 - DNA, 536 bp, Oryza sativa
gtttcttctccccggccgtgaaccgggacgagctgctacgcctgctgctgcacacaagctcaagtggccggccgagtcgtccgttcaccgcggcctactgcatctgccggcaaggagctcaaagatgagggctgcggggaagccgacgagcggcggcaggggagcgttgagcacgatcaacatccgtggcctactgcagcacttgctggagcacaaacgattgctggacgtgctactgtaggcagcgctggcgtagggcgcgcaggagcgggcgggcatggtgcacacagggagacagcgctcataatgcgctggagcgggagaggctgatgctcgagcaggcgtggacctagcgagaggagcaggcctgggtcagggaagaggcatgggctgagcggtgggacgagctattggacagctcgctggacacgctctggcacgatgatgaattgttgggatgatgtgagatgtctaactgaaacagagaaaggaccatgtctaggatcatagctagatgggaattcttttttctagat

SEQ ID NO: 433281 - DNA, 94 bp, Oryza sativa
tttttgacatagcaagcaagtacagtagctcatggggaagcaatataagctgtccgtggtcgttacaggtggtcgtgtgtaggatagtggagct

SEQ ID NO: 433282 - DNA, 73 bp, Oryza sativa
accgcgcgcttatttaggcaagcaaggagagaagcgggtgggccaactgactaaggcaatccagacaatggcc

SEQ ID NO: 433283 - DNA, 307 bp, Oryza sativa
gttcttcttctggatgtatctgtcttggttacttgatctggagcttattagcggccatgtgcggcggaccaatcatctccgggttcatcccggcgtcagccgctgcggcagcggcggatgcggcggccaaaaagcatcagggcaagagggtcacgggcgacgtgctgtggccggagatgctgcggaaggggaaggcggtggcggctgacgaggactatgaggatcgcttccgcgagttcgagcgtggcatgagctacaaccaggccgtggggggcggcagccatgaagaggaggaccacaacgacat

SEQ ID NO: 433284 - DNA, 559 bp, Oryza sativa
cacgactccacccacctttttatgccctccaaaccctagcccataacccctcccgcctcgctgccatgccagatctgagcaccgtctgcctccccctctcgccgcaacccccctccaccgccgccgccgccggcggggagctagcaggcgagcagcccgccgccgtcgccgtcaccaccgccgcggcggcggtgtctgcgtcggcagaggcggaggcggcgggggaagcagaatccgcctccggtggcgacggcgcgcccgttctcccggtggaatgccgatggagcggccgagttcgcagcttcgcgggcgctggcgagggcgcgggcgcggccgctgtccccgcgtgccccgccccgcgccgcgggggcgggaaaaagccgtcctccgcgccgtcgccttcgtccacggtggcgaccgcgccggctcattcatcgggtcggccgttcgaggagtacgttaaggagtggaaggcgaagaaggcggcgctcggcgtgccggtcggacgctgcgagctgccttttctaaccggcacgcctaagcgggtgaatgtcattat

SEQ ID NO: 433285 - DNA, 493 bp, Oryza sativa
accttgtaattactaattgtttatgtagcaagacacatgtacattagccgtatactcaggcaactgtagcgtacaatgaagcaaacctcatatacaacaaacctttacatcaaagtagacgagatttgtttgtttattcaaaggtactcctatataaaccttactccaataaaaacggaaagtagtatgcatgatagatcctttttacctactaataattgaagtggcatgaatagtttactcggcagcaaccaaccaaccagggagattgattgattgattaatcagcaggcatgataagatgagaaattaagtcgtagtaataatcttgacagcgtccaagatgttcttgccctggagcttgctggagacgacgagcctgacgtaatcctccacgctgatgctccggtagcgcgccttggcgacttccaccatcttcttcagtggtccgtacgtcgacccgaacgtggcgttgtggaacgccgtcacggac

SEQ ID NO: 433286 - DNA, 375 bp, Oryza sativa
gttttcaacaacgtaatggctcacagcttacctcttgatgtatggggttggatcaccaacctgcctccgttctcccaatggcgctccaacgccatgtccctttgcatctgccccacaccatcagcatcagaatcatcacagccatcggtgaacctatcagttgtcaaaacccctcccacccagccctcctttgtcaccttctccatctttgcaaattaccgtgtgccaatttctctgtggacgtcaaaaccagtccacctgaaatcatacacccagcagtttttagacgaacaagagatgttagagttgtttgttgacattgtggactgggtgctgagatccggaccaaacaaaaagctgttctttcagtttccc

SEQ ID NO: 433287 - DNA, 582 bp, Oryza sativa
tttaatgtttctttatcaaagcgatctaagactgtttctaaatatgtcaaacactaacaatcgacctgctacggcttccgatattcgtgttgatgttcaacatggtcaaaatcagagtcaaacatccggacaacaattgaaaaatgatgcagagcgtaaaggagccgaactggccaacgatgcatcacgaaaagctgatcaagccaaggccgctggagcccaattggcaaatgatgcctcgaagaaagctgatgacttgaagaatgctgctggagagaaagttgaccaagcaaaagctgccggtgctcaagcggccaacgatgcctcgaagaaggcagaagaatggaagaatgctgctggagagaaggctgaccaagccaaggctgctggagctcaattagcgaatgatgcttcgaagaaagccgaagaattgaagaacgcaaccggagagaaagttgaccaagccaaagctgccggtgcccaaacagtcaacgatgcgtcgaagaaagccgaggattcgaagaacgcggctggggaaaaagtgaccaggcgaaagcagctggtgctcaagcgcgaatgaca

SEQ ID NO: 433288 - DNA, 321 bp, Oryza sativa
tttatggatgcaaccagtcctgcctggacaaacacgagatagctagctagctagcaaacaatggcggcggatcatgaattgctagctgcatcagaggacctggtggaggtggtggtgctgggcatggtgtctgcacatagtatgcacaaactcgagggggcgaacaacacgactagccctaacgcggtggacatagtgtacaaggagatgaacaggagttaagcgagccgactgagcttgccgaccccgagctgaggatcttcttactggactgttacctggcccgatagaagggggacatcctgctggccaactatatga

SEQ ID NO: 433289 - DNA, 376 bp, Oryza sativa
gctcgcactcctgctttgtctgactgtgtgaacaactgctgccgacgactgccggtggtgtgctccggccgctcacgcacatgatgggtgcacagcgagcgaactggccgctggcgctggcactcgcgcttgcgctgtagggggaccggaaagcttgagacagggacgggcacaagcccaactgtacggacagcctgagaacagcctcagttacccaggccgtttaggcataggacagaacattcacacttaccaaagatgcagggctatgtgtcagttcggcggccgtatgccgttcatttgggacgactttttgtacacctccatatatgttgaacgaaatgacaatggagatgcattcacttaccaagagcat

SEQ ID NO: 433290 - DNA, 349 bp, Oryza sativa
tagagagagggagatttattggccgtggcggcgcgggaggaggaggaggcgtctacggcggcgaggagccggcaggagagcgagggggaggaggaggaggtgatggaggtgctggacttcgacatgctgtgcgcctcggtggcgctggcggcggagaggaggaaggattcggacgctgcggcggcggccacggtggaggccggtggtggaggaggcggaggaggaggaggaggggtgcataggatgtgggaaggggacgtggagctggattgcttggaggacatgctaattgcgcttgatgcccattgctgcccatgctacatgttcggcatgaacatgcggagagcca

SEQ ID NO: 433291 - DNA, 431 bp, Oryza sativa
gtcttttccaggggtgccgttggatgggcgagcgcgggggccatgccgcaaatccatgtctggtgtagctttgggccgttgcgccctgcgctagcaggcgcatgaagacgctccgcacataaccccgttgcttgggccgctatggtgatgttctgctgtaaggcctataagcatatgaccttggttcgattgcggttaaaagcggccccctcggaacaagagggggggcaccgtcttcacctacctggtcagcgcgtgcttggagagcgcaagcaagctcaaagcccaactggggggcaacaacagttgcgacgacccgcgtggcattctagacgagaaccaggaggcatcagactgcttcaggggtgcccgcatggggtggaagatgtgccccaaggtctctaagaccgggggagcaccatcatcagctt

SEQ ID NO: 433292 - DNA, 469 bp, Oryza sativa
atttttcttcgcccatgtttaccggggcaactcccaggttattgacataggctactcccacgaaacggtttcaagtccggaggagtaattgcgttgtggatcctatttcgatagcgaaacgattgctctcgtctatggaccacgcgaggctatcaacttatggccccaatgtggcggctgctggcgatctacaagccggggctttggccttctcagctaggaattcgtcacactctgctcccttgacagtgaagttcatcacaagtgcctacaataatgtgttcagcgggctcttaaaccgtcacaagcacgtcttgtcgccctgatggacatgtctgcacaccattgtcaactggataaacagacttgggcaccgttcatataggttctgcgagctatcaggaagctcgggccatacgtgctgaaatgacccgggattaaagcctcaaaatgcatttgtgggatttcc

SEQ ID NO: 433293 - DNA, 530 bp, Oryza sativa
ctttattctctcctagctcccagagaccagagtagtagagagagagaggaggccaagcagcatcagcgggcgcaggccagacaagaccgatcttgctttcaccgatggagatccacctatagagctgatcggagcttgaggatcacagctggccccggaatggctagaccccagctagcgtaggtctggagcggtgctctgatcaatatcgtcaggcaatggcacatgactggtatctacgctggcatgacgggggctccattctgagacacagagaacttcacattagaagaacttcttgacgaggatgaaataattcatgagtgcaaagcgctgaatactcgtctcataaaatttttgcgagacaaggctcaagtggagcaattggcttcgttacatcgtggaagaagtaccagaagattcttgaaagaaacggtcttttaggttccattcattgcttgtgagatatttacctgggaattgacatcatcttgaggaccttagtagagatgaaagctaatggatttgct

SEQ ID NO: 433294 - DNA, 445 bp, Oryza sativa
ttttgttcaagtcactgtattgagcttgcaggcgacagctacagcagccagctaccaccaggcttgatcttgtcggttcctcaagctcgggaacagagcagagagagaaggaatcctggtgctttgtttgatcatccctcagatccatggcgcagctgcttaatagagaagaggaggaaagattgatggagaagaagggtggtccaatttgaaacttttataaatttattagtccaaagttgctcttagccaccagcgccgttccaagcctcgttcagtcgttcctgcgagccctaccgtgtgctcacgacgccaccagtgctcacgacgcgcgcgcgttcgcatatggccaccgttttcggcaccgaccgtcttcgtgacctccacgccttcgacgacaccaaggccggtgtcaagggcctcgttgacgccggcgttaccaccg

SEQ ID NO: 433295 - DNA, 462 bp, Oryza sativa
tatttcctcttcttcttcttcttgttcttgttcttgtgtcctgactgttcttgataaagctcagatttgggaattggaccacatcataacattctttggcagagtttgtgaaggtacatttggagtttggattaatttcaggtggttagctgttcttgatcgttcttcttgttgttggttgctggaagattcgaagattttttttgtgtgtgtgtgtaaattgtggtgttcttgtttggcattgttgctcagttagttgatcatggcgagccgggaggagagcggcaatggcggtggcggtggcgcgactcctgcggcggattaccggagctcggacagccggagctcgagccggcggagcacgcggttcaaggaggacaacgagtacgtggagatcacgctcgacgtcaagggcgacgacacggtcgccattcagagcatccgcaacggcgccgacatgcc

SEQ ID NO: 433296 - DNA, 318 bp, Oryza sativa
caggaaacctgcatccatatccatttagggagtcaaatagtgtaactaccatgggggtgatggggataaactttacatgtcaatcttggcgaatgaggaataaacaacgatctaggcacagaatcaagaatatcaacatgtttgccgtgtcaatcctgaacgagggagcatgagtttggaagaaacttgatggctgccagatatagttcctaacagattatacgcaaaaacttcctggccatatgggtaactattttcaaaatctcagcagaaaaccagctgcagatgcaaaagggggaaaatctacatgaaagcacc

SEQ ID NO: 433297 - DNA, 471 bp, Oryza sativa
atttgtcaaatcattcctggcttcaaaaccgatgcaggttgctgtttatcactgcttgcataatggtttggagtctgctattcatgcttctcttcagctaatctcaagagcttgtctactggatgcttctttctgtgctatgatttgtggcccaataaatccatcatccaatgtcaatgaagtagaacatggtggagatggaacaattgtatctgacatgttttctctattgtcactgtgtggctcatatttgaataaggagtccaagcaaaacagtaatcagaaatgcaggctatccaatcctcatgccctagtagtgcactgttgccttgcactggcaacaatagctgcatgcctgaagtcagaagggaattcttcagcatcaattatcttaacgagttcccagaagaaacagcggtcccgactttctgttcttgcgcatctctctttagttgatgatacagtcaagag

SEQ ID NO: 433298 - DNA, 520 bp, Oryza sativa
tggtgttcgtccactcgcgctcgcactcccgtcgttacgcgcgcgcgcgccgccgccgccccgacctcgccgcgcgcgccgactaacctagatgcggtgatgggaagaaggggcgcgggcgcgggcgctgcggtggtggtggtcgcggccttcgtggcggcggccgtggcgtcgggggacacgctcgccgatctcggcggcgccgccaaggggatcgacagcgtgccagaagtgaataacttgggaccatgggcgaaggggcttctgaaagggatgccggactcggcggcagggccagcagagggccccatcgcaaagtatccgctggttctggcagaggagaggacgcggcggccggatgttcttgaccaccttaggatgtatggaggagggtggaacatcacttacaagcactattgggcggctgtttcattcacaggaattgctgggtgtgttcttgctgctgggtggtttaatttcgcttggaattgctgtagctgcaagctgcttttggaaatca

SEQ ID NO: 433299 - DNA, 419 bp, Oryza sativa
ggttacatataaccccgcaaaggataaggtatatgctttgctcaaggatcaagcaaagtcagatgacattatcaaagcggctttccatgctcacgtattactgcatttcatcaatgcgtcacatgcacggaagcagatgaactccaggagatcagatccttatggaaacccatgtaacatggatttcatggcacacatagctgagtcctgcaaaattgtttcttcctcttatggaactttcaagaagaaagctagagaacagggttggataatgtcagaatcactgctcaaccctgggaaagctcggttgtgtcctgcaaggccataatgattttactgttactgggatggcaacatctttcagactaacttctcaactagaccggatgctcggttgtttgtagtagctgaactgacaa

SEQ ID NO: 433300 - DNA, 115 bp, Oryza sativa
gacagcgggcagccgcccttttcaaggggttataatttaaaacggaggaaaaccatctataccgtcgtgaagtggttcagaagcaaatcttcctcgtgataaatgacgtggggaa

SEQ ID NO: 433301 - DNA, 368 bp, Oryza sativa
attactttgtctggtccgagctcaagccgtactcaaaagcggtgcctctgacgacagcagacagcagattgctgaccgagcttgccaagttctgccaggcagtctgaccggaccggaccaattcaagcacatacccatacaagcgaagcgtgatcagcgcttggcaaggttgccgcataagccgtggtattatgtccatggcgtgtccttggaatgcatagtgggcagcacacgcctgagattgctacattcactgctttgtggcactctggtgcaacagcaggtggcttgagacacatcatccaacttgtctttagtgtgttcgcttcagctaccagacatttaaacagggcgcttgaacccggaac

SEQ ID NO: 433302 - DNA, 352 bp, Oryza sativa
attatattggacaaccagttttggcgcattgtgcatgatgtaacatatagaacggctacaaacccagaaattgatgatcctcttaagtattcatcttgtgcaacaacaccagcacatcccgataaagctggatatatttgtcagacgctccctttcttcactagcctgttgcttggcaaacttccttgcaaacttgacagatcaagtccatcatatgacatattgtttatgctaaaagttctagaggggttgaaccgatactcttttcacctcgtctctgatgagagaaaccgtgcttttgtacatggaagcataactgaccttgatgatctgaaagttgatgtttctgtag

SEQ ID NO: 433303 - DNA, 147 bp, Oryza sativa
atcggccgtcctttctcttaaccctttgttcatcttcttgttcctccttttgtctcgtcttgatggccggtgatggtccgatcaggcaggactgggagcctgtggtggtgcggaagaaggctctcaccgccgccgccaagaaggatg

SEQ ID NO: 433304 - DNA, 412 bp, Oryza sativa
  unsure (1)..(412): unsure at all n locations
gtcttgacatgctgccgccgggcgacgacttctactcgtcgctcttcgcgtcgccgcgggtgaaggggacgacgccacgcgccggcgccggcatgggcatggtcccgttctgaggtgacggcgacgcgatcgaacaggtggtgatcgatgctgcaacgtgtgtaaatatacagcgccggctgggtcaagagatggctcgggtgacgcgcgcgccgcgtgtcctggcgttggcgccggggcattctttagtttttcatcttttcatcatctcagatggtagataccaaacagnggaatggatgtagcttctgtttcttctctatagaaccccaacaaatttttgttgttgatgttgtttatcttcaaaccaaaaagggtaatttcttgcttttaactaatgatttaatttttt

SEQ ID NO: 433305 - DNA, 84 bp, Oryza sativa
aattatttttgtattttaattgtttttttcgtttttcatgcttaaaacgaggctggtgtaggatttcaaaaatgacgctgatgc

SEQ ID NO: 433306 - DNA, 370 bp, Oryza sativa
gtatctcacaccggaacaaaaacgagaagccagcgaagaggcaaatcaaatcgaatcgcccaaaggaggcgacgagccaccggctgcagcctgcagcgggagaggtctcaggtgcgggggagcagaggcctcgtcggcgagcgcggggacgccccatcgcggtgccccaccgccggcgaacggggcgtcgcggggttcggcggggatcccgccgtggagcggcggcggcggcggcgtcgtagccggagcactccgatcgtggcgaatgtcggtggggagagccgcgaaatcgctttcggcgtggagctgttgcctgtaggagatgtggagattgggcattggagtactggagattgaagttctgcgaggg

SEQ ID NO: 433307 - DNA, 466 bp, Oryza sativa
  unsure (1)..(466): unsure at all n locations
ttccgctgcttggtcaccgacccctcggaacgccgttcatctgagaaaggatggcggtcctggcggagatcgccggcgacgagtccccgccgccgcttcctccttccgaaggcggcgaagcttccggagccccgtccacgtcttctccctccgatgccgacggcggcggcaagccttcgccgcgcacgtcgaagcccggcaggaagcgcctcgtcctcaccgtctccgtcctcctctcgttcctcatcgggctgcccttgctgctcaagtccaccgagatccaccgctcgccgctgccgtccgacgcaatcgccgacctatcccgccgncttcacttcaacccgccctcgttcccctgcggcctacatgcggtctttctccgcttcggccgcgaccccttcgaggccttcgtcgcacatcgcatcgagcgggaaatcttcacccacctcggtgaatcttcctgacg

SEQ ID NO: 433308 - DNA, 273 bp, Oryza sativa
tcgtttttactgagaacgccccctttcctttccccctcctctcgttggaggcggccggggaagctggtgggcatatggagtgcgcggcgaaggggctggtggcggagccgtgtgccggcgaggcccgccggcgctgcggcggttgcggcgccgtcgactactgctcgcgcgcccaccagactgtgcattggggatttcattaaagaagaatgcgcaaggctcgcagagcagatgagccgcatcgatatgctgaaacaatttccattcacgttc

SEQ ID NO: 433309 - DNA, 223 bp, Oryza sativa
gttttacattaagaaggggggagaagtggaggaggaggtggcgcgcaagggagaggagaggaaggaggaagaggtggtggtggaggagaagagccatcatcttcatcttcagccaggtgaggaggagcttgtcgtcctctcgctcgccggctgcttgcccaaagtttttccattgccagcccttcaccttatccttctcatcttacaattttctatggtggat

SEQ ID NO: 433310 - DNA, 345 bp, Oryza sativa
atcttctccgcttctcctcctctcctctccctctccgcctttcccaaacctccccaaatcccccaatcccaatgccctcccagtcccatccctagctcgctccaccccaatcccccacccccaccatggccctctcctcccgcgccgccgccttcccccacatctccctcccctcccctcgcccccgcgtctccctccgcccgccacccccggccccgcgctccctgcgcctcgaccgcgtcgtcgccgacaccaccgccgagctgggcctcgatggcggcggcggcggcgggctgctcgccgccgccatcgagcacctcgagcgggagccggcgttcgcggggg

SEQ ID NO: 433311 - DNA, 308 bp, Oryza sativa
gtatcccttccggatctatcagccccgtcaccaaccttcttccatccacgcttccatctaaagatcggagcaggatgatgggcgatttcctctccagggtcctactgttggcctttggttatgcttatcctgcttatgaatgctataaaaccgtagagctgaacaagcccgagattgagaagcttattttctggtgtcaatattggatattagtcgcgctactgacggttttggaacgatttggtgattttgcaatatcatggctaccactgtactcagaagcaaagctgatgttctttatatactta

SEQ ID NO: 433312 - DNA, 345 bp, Oryza sativa
gtcatagcaaggggcctagactgcggtgaagccctccaactcacaggcgccatgtcgatgtcactgtaccctgggatggatcttacgaaaatggatgctcctaactcttaccctccttggagcagcctgctgtgtaatgctatcgatgcatttaacagtacagctggtgtcacagcatcttttctattgtaagaatcccaaggagcacaaaggttatacttattatcgcacaaatggctcccttatatgccataaatcccctggttgggcttctggatatcaagggaatcaaaacatttttcacttttcttggaagcctgctaagaaaagcttcggggcaaatga

SEQ ID NO: 433313 - DNA, 440 bp, Oryza sativa
gtttttcaactgtaattttctatgaaatatcaaaaaaccataaaccaaattttagatttgccaatatagaaacccaaaatgtaattatactgcttataaggctaagtacaagcctgattcaagtatgctttgctacaaggtaatcaaacaaggagtactggttactgaggtttaaaaccttatagcaaatttgaatggttggcatctactgatctgtaaatgatgaaagttatacatgtgaaatatttatcaatgactagttgcctactgcttgcactttttaccttgttgtagtatattttctaggaatatatggctacttatttttacttcagttccctttttctcttattgcaagcattgaccattctttgacttctgttgttcttttcagtaatgccccttatctttggagcgatgttctaaggctttattcaact

SEQ ID NO: 433314 - DNA, 296 bp, Oryza sativa
ttatatccatccatcgatcgagaattcctcttctccctcttcttgttcttcttctcctctctgaatttaacaagaaatcaagaactaggtgtttgttttgactaacatgaactctgtcgaacactctgcgtgcgtgattgtttgtgtgtgtcatgtgctatgggccgtgcaagccgttcacaccgccggtgccgcaacagcagaaggaggcgactgtgatggctgagtacttgcttcttgagctggcggcagcggacgacgtggcggtggtgaggagggtcgtggtagatgagaat

SEQ ID NO: 433315 - DNA, 243 bp, Oryza sativa
ctttttactcttctcctccccacattcccaaagagaagcttcgcggcctcctcctccgctccgctctccacgcgtcctcctcctcctccacctcctccgcatcctcctccgagcccccagatccgccgcgcgtgctctcgcgggtggtggtgcttctggtcttgggggaggggaggggcgcgagcgagcgagcgaacgagcgagagagagagagagagagagaggaaggggagggagagggag

SEQ ID NO: 433316 - DNA, 432 bp, Oryza sativa
gtaattgctcctcttgttgactttgttggaaacaccattcaattcccaccaacttacagacctgtaaagtatggttttgctggtcttcctcaagctaatggagaagtcagtccaagtcttcttgcaagttattataacattgaatcaaacacttgtcaaactgattccagtactatgtcagtctttgaagctcttgctcaaagttactccccaactgatttaacttctttccaaaccaagttcagcattcctcaacaagctgtcgcaaaggttgttggaccaaactctggaaacttttgcaagagtaacccaaataactgtgttgaagctggtcttgatgttcaatggattattgctgttgctcaaggttgtcctctttggttctggtctattagtggaaacggtgatatctttctttgaaggattcttgct

SEQ ID NO: 433317 - DNA, 60 bp, Oryza sativa
gttatattccacgagcacgctcgcttggaggggtgggatgcgcatagaagctaccccttt

SEQ ID NO: 433318 - DNA, 392 bp, Oryza sativa
ctttccgactagagcagctgacgagtgaggtgcgtgcgagtttcctcaagttccacatccggctggtgggcaaggtgctgggagagttcccgcccaaggggctcacgcggctgtcggagaaggtgcccttggcgttgggggccaaccccaacggagcggcaaggccagggggcaaaccggacgcaagcagggcatgggtggacaactcacaagctccgcaggggggggagcccaccaccaacgtggtgttcatcctgcacctggaggacgagaaggccatgcacggggcgagggagacgctgcgcaccaccgtgctgaggcagcaggccgcgcataggttgggagaggacgcggagatggtgccctacctgggctttttcctcctggaacct

SEQ ID NO: 433319 - DNA, 312 bp, Oryza sativa
ttttagctagctatagctagaagcctagcacatgaacccggcgccgtcgagggcgccgcagcggcagcagcgcggaggggagatgtcggcgcgctacggcggcgggctgcagttcttcgctgacgccccgccggcgggggtggaggggggcgccgcgaccgcgcggacgttctttccggtgccgggcgggggaggggagcagcagccgccggagcgcgcgatgaggcagcagcactacggcggcggcgggagtggtgcggccgagatctcgctggggcacggacaccgtcaccgcggcaagcaccattttca

SEQ ID NO: 433320 - DNA, 431 bp, Oryza sativa
cctatcctaatccccgacgctcgcattgggtggtcagattcacgtggcagcagcgccgcgggagctcgatggcggtggcagagcaggagctcgggctcgggggtggtggcgtggtgcaacagtttcgtggcggctcgccggcgaccgggcgacgcaagctcagattcacggaggcagtggtgccatgtgcaagaagctccatctggaaggtcctcctcttctgaacctcgcactgtccatcttaatagcattgttgaaccaaccattgaggtgcgctacatttttttttactcctctgcatttaatcagaaggaggcatggaatatatcggaaataattctagattgctggcacgttttgctctatttgattatttttctctgttcacaagtatgtgaatactgtcaaataatatgactaagtcatcagat

SEQ ID NO: 433321 - DNA, 301 bp, Oryza sativa
gttgtccatttcttggatcttggatgtgtagatctggccggagctgagctgagctcgtgtttcttgttttttttttggtcgttgcagggatgtaagccgccgccatcgtcggctgggggagcgtcggtggggatgagcccctgctcgtcaacgcagctgctgagcgcgccgtcgtcgtcgttcccgagcccggtgccgtcgtaccacgcgagcccggcgtcgtcgagctttccgagccccagccggatcgacaacccgagcgccttctgcctccttccgttccttcgggggctccccaacc

SEQ ID NO: 433322 - DNA, 121 bp, Oryza sativa
tatctgcgccaaaccaaccacccaccatccaccggtcgaacacttggcgctctcgcccgccttagctcgctctgttcgtggcgctcgacccgaacaagaacggacatggtttccatgaacg

SEQ ID NO: 433323 - DNA, 356 bp, Oryza sativa
ttaacccttgcgaggttgccagagctccgctgccttgtgctgcgtttgcatgagaccgaattggttagcataaagattcatactgaagatgttggctactttcggaagttgagaatcttaaggatacttggtacatctatctggtttgatctgcacggcagcaagtgcaacatcacagacaatagaagcttagcatctattatcatgccaagtcttgaattcctcgagtttgctgtccatatgcggttcctgaaagatgcaacccaacttggttttgacaagctgcttagcttcgagaagcttggaagaagttcgcttcagaaagtcaccataatactgaaatgtggagatgcccg

SEQ ID NO: 433324 - DNA, 485 bp, Oryza sativa
cactcacgagcaacaacggacccaaacaccaaagggacaaaacaaacccctacaaaaataacaggaaagaaaaacgaaccaccagacaaaaccaaacattccttgttctaaaattcatcacataaaaacatacgcacaccgagaaagacaaaagacttgaaactataacaacacgctcggaaaaagcaaagaaaagaaaaaacaagtgagaaagaaaagctacatttatcctgcgtatattccaacgtcaaagcaactatggtatcgagaaaaaagaaaacgaaagaagaccattctccttatcgcagatccgcccgaaggaaagaaaccgtatccccattaaaaaaaccccgatgcgactcatccagcagcggcagctgatgcctgatgatggacatgagcatgggcatgggcgtgaggataaatgcctcgcacgttcgccgacggccgcggatagtctccggccacgccgacgcccgacagca

SEQ ID NO: 433325 - DNA, 319 bp, Oryza sativa
tgggggttttttttttttttttggttttttttttttttttttttttttttttttttttttggcatcggggaagcaacacttcgatttagattaagcgccagaaaattagacacaaaatttgagccctggcccggcccaaccaacccccatgatccaacccagtttagttttagggtttgacgggcataaaaccctaccgaatttaaaatttttttttggaagggggttcatttacttttttttgggggaaaacacaactcccctgtatttggaggcccccatgaggggggcccgcctaaatggggctgggcatgggacg

SEQ ID NO: 433326 - DNA, 162 bp, Oryza sativa
gtactagatcgcgagcggccgccctacttggtgggtacttcatacctttcgggcgcgcacacccatcctgaacttattgtcaccatacttcatcaccggtgggactggaaacaccgtgtgcggacctgactttagggcgtgggaacacaggcaactaacgcc

SEQ ID NO: 433327 - DNA, 475 bp, Oryza sativa
  unsure (1)..(475): unsure at all n locations
ctcttctccttgaatcctttaatttgctccgtttgttggcagtggccagccaatgatgatgggtggccagcagagcgcgctcaaccagctggtgtcgtttctcctcggggtttcggcggcggccgtgttgatcttcttcttctcgtcggccggcggcggctggtcgacgacgacggacttgtcgagctgggcgaatgggactgtagcggcgacggccaaggagaccaacctgacgagcaccgctgctcatgtcgaggagaaggctaacctgacgaacagccaggcggcggcggcggaggcggcgaaggaggaggaggagaaggagctggagaagctgctggcggcggtggccgacgagcacaagaacatcatcatgacgtcngtgaacgaggcgtgggcggcgccggggtcgctgctggacctgttcctggaggggttccgcgccggcgaggggatcgcgcgcttcgtcgaccac

SEQ ID NO: 433328 - DNA, 149 bp, Oryza sativa
actagatcgcgagcgagccgccctatattattgggggggtttttaattttattgttggaaggataattttttgtttgttttgggcagaaccccaaacaaacgggcgcgaaccaaacggcgaggaagaaaggcacgggccgcggctcaca

SEQ ID NO: 433329 - DNA, 101 bp, Oryza sativa
ctcccgtctctcgtctcctccgccgccaagacgagtcgcggctgaacaggggaggggcgccgcaatctccatctggcgagcagagcaggggaggggagggg

SEQ ID NO: 433330 - DNA, 86 bp, Oryza sativa
tgatcctacaacctccatttcctgccaatcggggggaaaccatataaacgaggggcttctcacccctccactacccggaaacatca

SEQ ID NO: 433331 - DNA, 288 bp, Oryza sativa
tgatgtagggaaatgggggtcgggaagaaacggggggataaacgtattccaggaaagggatacctgcacagttcggggacaacattacaagctgagaaatgcgagctgcgaagggcttaccaagaacattaagtgatggccaagagataagggctccatcattatgacatatcctggtgattgtggcgtgctcctctgatacatggataccaaaagacacccacggaatctggaataaatacatgctgaacagaccttgtgctctgtattgctgttcctgatcgcttt

SEQ ID NO: 433332 - DNA, 531 bp, Oryza sativa
gtgattggcccatgcagcagtctgatgataccaatttacgtctccacagagacaaacagtgggcggtgcaggacaaacggcaggtgcttcagaggactctcactgaaatgcacacttttatcaaacatgctgaatggtggttccacaaggacgtctttgcccaggtcctgcaggatgctaaagatgcagtaaactgtgcagaggacctgttggatgagatcaattaccatgaactccagaataaagtcgagggtcatgcaattctatttcatgtccaagattatcatgaaacaaaaattgataaaatccaaggaaagctcgaacatctcgtaagacaaatggaacagctgggcttgtatgatgaacggcagcagtttattattgagtcaatcaaccgagaagacgatcttttcggagaggagcaaacaatctttgggcgtcagaaagagatgtcggaattgattgagttgattggtttgcaagagaacagtccaactgataagcaagtcactgaggtacatgcagtatctg

SEQ ID NO: 433333 - DNA, 457 bp, Oryza sativa
gcatgctcaatgggctggagatcatgaagctggggcgcgccgataatttgaactccgccggatcgcacggcaggaggaagaagattctcatcggcacgctctcggcggcgctcggcgtcgctgttcttgcgtgcgcgctgctctgcttgctcgccgtgctgcgcaggcgtagacaggcgccgactccggcgccggaggagaaggagagcacgcagctgccgtggtcgcagcacacgcaggatggctccagctgggttgacatgtcgaacgcgtcgggcgcgggcatgaccggcgggctgcacaggatgagcatgcagctcaacatctcgctggcggacatcacggcggccacggagaacttcaacgagcgcaacctcatcggcgtcggcgggttcgggaacgtgtatagcggcgtgctccgcgacggcacccgcgtggcggtgaagcgcgccatgcg

SEQ ID NO: 433334 - DNA, 540 bp, Oryza sativa
ctttctaccccccacacgcgattcctcccctccaagtctccaactaacagagaggggtggtggtggactcattcgcgcgaccaagtatccgctagtacgcgccgcggagtggaggagacggagagagcccgcgcgcgcgcgcgcgatggtggcccgccggttcgtcgtgcggcaggggggcggcggcggcggaggcggcgaggcggaggagcacgaggtggagtacgacacggagcacggcctcgacatcctccgcctccagatcttctccctcacctccgtcccgcccgagctccagaagatcgtggtggaggcggacgggtccgtggtggacgacgggaccgacctggaggccatctccgagggcctccgcctcgtggccatcaccggggaggaggaggaggctgaggctgcggctgcggcggaggcggcaagggcgcaagagaagtcggatgaggagctcgcgcggatgattcaggcggaagatgaggcacttcttctacaacagtacagcatacgcaatgatggaggggaggaatt

SEQ ID NO: 433335 - DNA, 412 bp, Oryza sativa
tggggtggttttttttttttttgggggtttttttttttttttttttttttttttttttttttttttttttccccccggccaaaaaaaaatttattgggggggggaaccaaaaatacaaaaacggaattttctcaaaattaaacccgggggcccaagggggaaaaaaaaattatttatgggggcgggaaaggaaaagttccgggggaaacccaaattccttggaaaaaccccaaaaaaaaagggccccgcctattgccggtattgcggaagggttggggactgaaaaaaaagccaaaagaggggggggggggggaccccccccccccaaatggaattggccaaaggggaaatcaaagggggcccctggaggttttggggaggccgggaaagacctttcccggggggggggggg

SEQ ID NO: 433336 - DNA, 298 bp, Oryza sativa
tttatttttccccacccccgcaccgtttcctatgtcggtttttaaagctagcgggggagatgccctccacaagctcaccttactcccctgccatggatcaactgcacggtgagagcttccagaccacggtggtcattgacgttttattctactaaggtctgtctcggacgtctcctccctcctcctccgtttcagaaatcccaaaggctgtttggatcctgacaacttcaagaagtatataacatgttgaaaaataagcaaataatgtcatatcgtgggctgattaaaattttgcttt

SEQ ID NO: 433337 - DNA, 504 bp, Oryza sativa
attgtagaccaccgcagggcaggaggactgagcaggagtggactgggcttccatgggacttctgctctccatgcatccccaacagcagcagcagcaaaagccaggcctgctgagctccaccttgctcaaactagaacagacagcgaggtctgcagctccaggcctagctcaccatgtagataaattgctggggtcagtgggtgtctcctcctcccacccacccacagccccctaccagcagccccaagtgctacccccatacccagcaggccagtaccagcagtgctggccctacgcgcagcccgggtcagcttacccacagcagcactggcagggaccccctccggcctaccagccccagtacccacaacaaacaccagcgccagtcacgcagctatacccccctgcaccagtcactcaggtgtaccctgcccctggaggctaccagacaggtggtccgcagtacccacagcaccagcagcccctgcagcagcagcagcagta

SEQ ID NO: 433338 - DNA, 549 bp, Oryza sativa
ctcttgcaagccctagccgccacatctcctgcgtgctaccaccgccgccgctgttcctgtctccgccggcgccgccgccgccgccggttcagccgtcgtcgtccttcgccaccccatccgctcgtctccttgcgtggcttgctgcttgacgctgctgcatcgatcagagacgagaaggctccagacagcacaggaagcagttgaacaggagtaacaagggaaggaaaaggtatgaagggttccaacgttgaaggagttgagtcggagtatcgaaggagttaaagcaagtacaagacggacttgtgcgatggataaactgtgttgctttgttggttttatttacccaattattattcgaagcttcctattatcaattgtgtggttttggtattatgttacatattcatatttcacttcatgttcaagttcacgacgttattcatgtttctttcttccggaagtttctgtttacgttattcaagtaccatgcgtagttatgggagtgcaatttggatctttattcatgatccttaagaagcgctgatcacg

SEQ ID NO: 433339 - DNA, 525 bp, Oryza sativa
tttttcgttggaggagctgctcttggcctgcgccgtgagcaggcacggcacggggagctgggactccgtcgccatggaggtgcagacgcggagccccctcgccgcgcgcccgggcctcacgcccaccagctgccgcctccggttccgccacctccaccgccgcttctccgtcggcggggcggcggaggaggacgacgacgacgaggaggcggaggagggtggccccgacgcctccgccgcggacgggtggatggacgagctccgccgcctccgcgtcgccgagctccgccgcgaggtcgagcgatgcgatctctccatcggaacgctacagacgaaagtgaagcggctgagagaggagagagaacaaagcatccacggcggcggcggcggcgaggggaagccggagacggcgaacggcgacgagcggctgtcgagcgaggagcccggccggtcgtgcagggagtccaattccacagatctgaaacccgcggcgcgcgccggtgaccatagcgtcaaggcggagga

SEQ ID NO: 433340 - DNA, 405 bp, Oryza sativa
tttaccccgtatcgccggcggcgatgcgcagacgccaatgacgacgactacgacgacgacgaaccacagcgccaagagcatactgctgctcgcgctcctgctagtgccgcacctcgccgcggcgttgacgggagatgcgctgatcaggcagcgccgtcgactgctcgactaccacggcggtagatggctgcatggagggggtgacttgtacttggacccagcgataacgttctacaacgcgcggctagtgctacgcgtaataccgcagaagcggcgcgtggaagcagcgccggccttacggacccgcacagacgagctgacacacaggatcgctgccaacgagcgcgcctacgctggcatgctctgtgcggacaagagacaccaccgccagctacgcagctatac

SEQ ID NO: 433341 - DNA, 340 bp, Oryza sativa
actttttggggggtaatttaaatgtgtaggggatatgtactttatttacatttgacaccttcaaaatcttattctatttcagtaaactgggtccagagatatactatatctgatacaagtatgttcatcaacatgcccactacacactgatcaactcttccttggatcttttgctctgtggcaaaacactcaaggcaaaagcttaccactgccgatatgcatctctctatactgaattatactaagctagagtggtaacttacacggctgctctatgctttatgccatactaaattctcttcaaatttaaaattctgtatctccaatcagaaaacaagaa

SEQ ID NO: 433342 - DNA, 437 bp, Oryza sativa
atctttcttgaaatatgctgaacataacgggcgtgtagccacaccagccagtatgagtgaggccttgggcatctcatcggaggaactttcagaccaaaaaagagttgtgccaacaaacatttctcctccaggagctgcccgtagtatgactgttgtaccaccttctccaacgagattgaacctgactgctcacgcagctgcagatcctgtaacctaatggttcatataaagtataaacggtgccgactatccagagaataaatctaagcgctcctttgacagaacggcctgcctattaggactagcgacttagtgaagctgcaaagtctcatatgatgcgaggactctcttttcaagaagaactggcactttgcttggcaaagggctaggattacagacagtatcaaactattcacgaataagaacatgaatagcca

SEQ ID NO: 433343 - DNA, 446 bp, Oryza sativa
tcgctcgcatgataggctcgtagccctcgccgtcggcgtcttcctcctcctcctcctcgcgccgcggagaggattccatcctcctccctctccccgccgccgccgtcaatcccgaatcccgagggctcgggtggtcgtcgtcggtccgggatggcgggaggaagcggaaggcggaggcggctcgggcggcggaggaggaggccgaccgggcgctctacggcgccttccgcggcgccgtcaactctctctcgcagctatacacgctcgtctgtgcccaacagcgcctttccttcacgctagcaacttactgaaccttgcaaaaactctaccaagcgaggtctttctttccaagaaaaacttggcactctccttggcaaaaggcaaggattacaaacagtttcaaactttttacgaagaaggaactgaatagccatctcggatctaat

SEQ ID NO: 433344 - DNA, 510 bp, Oryza sativa
tcttcttcccccaatcgtctccaactctccatgggccatagctttctctcatcttcggccctgcaggctgcggcctcatcgctcgtccctgcagcctcccgctgtcctgccagattatctgcctttgtttgtttgatggcctcacctgcatcaccgagagagttcactcaggaagctgcccgtcagtctctgattgcgatctcccggtctgttccagcggcaggagaagccgtcaacatcaagtcaccgagcggcgccatggtgaatggccaccaccacgacgatgacggggcagagaagtacagatcaaagctcatctccatctccaacctgtcgcctgatgcccagcctacgccgtgctctcccaaggacaccgctgctgcttaggcttaattaaccgtgtgaccatgttactgcttacacttccaagtgtggatatcgtgtcccagcgtgtgtcgctaaatgctgagactgtgatcaagaccctttgccttaataactgccatgact

SEQ ID NO: 433345 - DNA, 134 bp, Oryza sativa
ttgttgactcaaacacaacataacgtagaacgttacatttccaatatcaaatcaccatccgctccatcctccatgaccagggccacggcgggcgccggcgacatctgcatcgtgggcagctgcatatcccgatc

SEQ ID NO: 433346 - DNA, 411 bp, Oryza sativa
tttgtgtttttttttttttttgggttttttttttattttttttttcttttttttttttttttttttttttttacattttttctgtttctttttttttttttttttttttctgcggggaaacaaaccccgggggaaccttccccaaaaagggggaaaacagcaatttttgctcaaaaaggggaaaaccaaaaacttggggggggccctgccaaaaccaaaaaaagaaaaaattccagcctcaaaaaaactacaaagaaaaccggggaaagaaaccccggtggacaaaaaaaaagggggggggaaagaaaaaaaaacccccaggaaaaaaaaaaacgggaaaaaaaaacgcttgaaatcggaggcgtcaagggccctaaaaaccaaaaagggggttaagaacaattaaaaaca

SEQ ID NO: 433347 - DNA, 163 bp, Oryza sativa
gtgagattgtagcgagggtagctcgccacagcgtgttctttgctttgaggcgccagcgcagtcgagcctgcaggctgccacgcccggaggatactatctatcattttggcaccgcgatggaactctaacagagtaccctggtataccatgacagagaccctgt

SEQ ID NO: 433348 - DNA, 168 bp, Oryza sativa
tttagtgtccgcccttagtatccaagcatgcaggggcttaaaccaactgatactgtaccatcactgcgctgaataccgacgcacaagccgggatctgctgataagagtccaatatgaaagtcttcaaaacgccatcatggcgagacgttcatcacattcacagcggtt

SEQ ID NO: 433349 - DNA, 268 bp, Oryza sativa
ttgttgttttttttttttttggggtttttttttttttttttttttacataaaagaaaaacggaaaaggaaaacaaaccaaggggaaggacaaaaaaacaaaaaaaccaagccacaccagaacgcacccggaaccccagggccaaagggaaagggaaggcgggggaccaagaaccataaaccaaaaagggaaaacgggggaaagggcaaaaaacccaaccaaaaaaagaaatcaaaaacaggatggaacaaacccggggtggggggggg

SEQ ID NO: 433350 - DNA, 397 bp, Oryza sativa
agactgaaaacattcacaaatcgctatatttttttcccagaacgaagcatcaaccttaaaatgcaaaatatcacgcataagcaagcaggagactccttgttgcttgcttgcttggtcttttcagcttccttttcttctacttggtccccacacagccactcctttttttccccggggattaaaaccgaggggttctcacggtcgcggcatgaggcctcgacggcgatggcctctacggccttgggggtcgcatcgtcgtgtcgacgtccagggcattgacgacaccaatccaggcaacgaggagcccgcgtcatatcgtcgccatcttgacgcagctccgggctcaaccctggagcatcgccgcgccccacatgcggagctccggcccaaacacgcg

SEQ ID NO: 433351 - DNA, 478 bp, Oryza sativa
ttattaacaaaaaaaaaaccctcctcgcctaccccccaccgacgtgtgggccccactcccccggccccacccgtcatacaccccgggtgtacggacccccgccggaatcccgcaccgccggcgatatatagtaggggagctcgaggcagctagattttttttttctccccatcgagattcgcgtggccttgtggtcaccgtcgccgccgccgcctagatctctcgctgcgtctctccctccctcccctccggcgatccgcgtagatctgggcgggaggcggcggagatccgcggcgaggaggggagggaggggaagcaagcaagcaaagcggaggggcatggagctggcggtgggagcgggcgggatgcggaggtcggcgtcgcacacttcgctgtcggagttggacgacttcgacctgtcggggctgctgaacaagccgcggatcaacctccagcggcaacgctcgttcgacgaccg

SEQ ID NO: 433352 - DNA, 298 bp, Oryza sativa
ggttggtttttttatttttgggtttttttaagctaattttgcattcttttatggcttcatctataaaggattacaatcaggaggtgtacaaaacaacatacagacaatgctactttctctttgaacaattagctgttttgcaaaggaaacaatcagcatataatcatggagtcccgcaaacatcagggattagcctcccttgcctacaaaatttgtacagctaaagatatctgtttgagcttgcaacatcctggtggtaaaactttattcactcagccaaactggaagcacttttcaa

SEQ ID NO: 433353 - DNA, 85 bp, Oryza sativa
aggaggttttttgaattcagggggcgataataattttccaagaggctacttctgaccgaccatgaagtgtaagcggaaatcaaaa

SEQ ID NO: 433354 - DNA, 377 bp, Oryza sativa
ttgtggtttttttttttttggggtttttttttttttttttttttttttttttttttttatttattacgttttttatattttattattacttatatcattaatttaccggttgattattaaaaaaaaaaccccctaaaaaagaccccccgaaaaaaaaaagacacaagaaaaaaaacctttccaccccggggggaaaaaaataagggggggaacaaaagggggaggcaaaaaaaaaaaaccccaaaagggggacttcccaaccgggggggggctggggggtaaaaacccccccaaaaaaagggccccccccccaaaaaaaaaaaaagggggggaaagacctgggcttagaacgggcccccccgcccggggggtggggg

SEQ ID NO: 433355 - DNA, 277 bp, Oryza sativa
tttccattcgcgagaacttgtcgggatatttatgagcgctggtggagtggcgtggcgagaatggaatggaagttattcgatgatttcccaggattttgactaggccacagatggttacaagttgcattcatggtcaaaattgtgtctgaacatagagattctttggagttcatagacgaagtgatttgttttgttcaatacttccacacttataatgggtgctgtctgctcaaggaagagaagccaattagtgcacgaggatgactctttccagaca

SEQ ID NO: 433356 - DNA, 318 bp, Oryza sativa
gaacacataaaagacgcttttcaatagcatataaggtccagaataaagttgcacatggagcagctcgcaacataacatgaataaaccggataaatattggacacccaatgaactacatatgagaataggaacccatcaggtcatcttggagatgatcctcccatcgctgctctgaacattttaagggcgtaaaccttcgcaggaatcataactattatactatcaaagaagcaaatcatcgcctgtattgtcctgccctatcactggacaactcatcatcgatttcgatgctgtccaagcacatcaggttgttgttga

SEQ ID NO: 433357 - DNA, 183 bp, Oryza sativa
gaaaggaaaggggggcccccaggggcgattgatcgccccttagcattgcctctattgaagaaccattgaccaacaacaactgactccaattacaacccggtcgatggaccctttaaaacaaaacatccgaacttacggatcattcaattcgacagccgactaattggacccaatgccctaaga

SEQ ID NO: 433358 - DNA, 79 bp, Oryza sativa
taggttttttattttttgacggttctttttactcctaccattttttttttttttaaaaaaatatcctctattcaaaaac

SEQ ID NO: 433359 - DNA, 365 bp, Oryza sativa
ttgttttttttttttttttttttttttttccccttgagttgggattcttactatgaacatactacgtccaaaccgagataaatatacacgtttaacagaatatttaaaccgagagaaatcagaaattagaaagagaattcacatcaacattgacacggggggttttggggctgcaccaatcacgaagcacccaagcacgaattttggagcgccgatgcctcaacgcatttgagaaaccgttccaagctcgccgccgacaacccggccggagcagcgtgggcgcaccgccctttacctcccagacgcttgttccctccctgccgccgttaccgccgatggccttggcgagcgcggccgggatggcg

SEQ ID NO: 433360 - DNA, 245 bp, Oryza sativa
ttggtttttttttttttttgggttttttttttttttttttttttttttttttttttatctttaaaaaaatggaaggataaattaaaaaaaacaaaagacagcaaaaggcctatattcaaaggaaactaacccaaaccccctttttaaaaacaaaccggcaaacatgcgggccccaaatgaacagttaactgggggccttggctacaaaatttattcagcaaaggggccgaggtttaggttccaaa

SEQ ID NO: 433361 - DNA, 213 bp, Oryza sativa
acaaccttaaggggcccggattttggtggcaggaacacttccaaaagggtgaacaatggtttactggttcccggatggaaattaccctgtttaaaacttcccacagggaccaccttttgttacaaaagaaatcatgtaaacaggtgttcaaaaagggattccctttaaccctccacctagggagggagctcaaatgaaccgtcccctaaacaa

SEQ ID NO: 433362 - DNA, 437 bp, Oryza sativa
ggggaaaacccccaatgggccggccccaacaaacccaagcggggggggaaaggggagacccccccggcacctttaccggggttttcccgccccaattttaccccccccggggccccccccaactttggacccggggcttaacgaacgaaccccaaatggggtggagagaaagaccccccctacccctgtcccgaaaagggggaaccggggggaaaacccccccccccatgggatcccccccccccgggggccggcaccccccagggcccccctttttggggggggggggggggacccccccagcccccccctttttggggggaagggggaccccaaggatggcccgggcccctaagggggaaagctttgatgggcaaaaagcccccccgggtcaccccccggctcagcttaagccccggggggggccccggggcccc

SEQ ID NO: 433363 - DNA, 437 bp, Oryza sativa
gaacgctggcacgcccgcgggcaccggtccgggatcgccgcacgccccgtcttcattttattcacgcgattgacgcgagcgagggacgacgactccgacgatcttactccggcgaggcgagacgacggcgactgccgaccggcgagttcgctccatcttccccagagaaccccctcattctccctccggcgagctttcttcgacggagaagacgagacgcggacgagcgacctccctccggcgacgacaacagcctactccggcgagccccctcctccctacggtgagtccccttctcctccctccggtgagccgctaccgcctcgccgcgcgcccttgtccgccgtccaccgtcggtccgtcgactaccaagaccattctttttaggccccgatcccccacttttcccctccaaggcgccacccttccccccaacc

SEQ ID NO: 433364 - DNA, 327 bp, Oryza sativa
ggccaatcttataaaactgattaaccccatgttccggcctaaataaaatggaaaggattccatgatacatactcagctaacagtaccccacaatggaaacaattttcatatcctggcaaaggaacccccaggggcaaaaattgacccaaattttcatatgccccacacaaaaaacggacttttcctggatttatttgccttcctcccccaaattaagacaagaaatgaaccgattttgcatcaaacttgtgggggaccccccattggtgaattcattaaaaccaaccaaattgcgtgtgctgttggaccaaatcccaccctttaggc

SEQ ID NO: 433365 - DNA, 382 bp, Oryza sativa
acacctttttcgccttttccaccttttcttcttttctcttttttgtttaaggcataatgagcatcatttttagcataaattggtcccccgcatcttaagcgatgcctccattgtaaaaattacaaatgtattcatctgccaaattgttcaacatgttcccccaaaaaaaaagttttgccgagcattactgaattgaagttctaggggatacaaccaacaaaatccaacttttccaagggcggctgttcctttttagcaccaagttctgatgaataaattcaatcttggataattagcaaatctgggaaaaacaaaatgccaaaatttatcttgaaaggatgaatttttatgaagaataattgggaaatatttggctttttgg

SEQ ID NO: 433366 - DNA, 90 bp, Oryza sativa
tttttgttttttttttttttttttttttttttttttaaaactaaaatcagattggcatagcattcttcatttacccgccctatttgcaac

SEQ ID NO: 433367 - DNA, 291 bp, Oryza sativa
ttcgtctttggcgccgccgccagccgcgtaggtggtggcggcggcgggtcgacccgggtgagcttaccgtccggacgcgtccagcgcctaggagcgctggggatgctgacgcggtcgtcggtggccgatcgagaaggagacgcccgagagcgagccgacgacgacgttcctgcggtaggacggctacggggcggggtcccggtcgatgcgggagcggatagtggccgtgatccggcgtgatgcagggggaggtgtgcgcggagctggacgaggcctacgggagcgggcccc

SEQ ID NO: 433368 - DNA, 125 bp, Oryza sativa
acatagttttttaaagtcttttgggttttttttttttttttttttttttttttttatcataacgacaaaaaaaaaattgcacccaaaaaaaccagaacaggggaaaaaacaaaaaaaagggaaaa

SEQ ID NO: 433369 - DNA, 336 bp, Oryza sativa
ttttgtttttttaattttttggggttgtatcattttttttttttttttttttttttttttttttttttttttttttttttttttttttttttttttttttttttttttaaaaaaaaaagaaaaaaaaaaaatcacaaaccaaaagttcaaagtacctttttttcaaccccaaatattttttaaaaaaaaaaaaaatttttttaaaaaatcccattcgggaaaaaaaaaatttgttaaccccaaaaaaaaacaatgatttttgaaaaaaaaaaacaattttgggaaaaaaaaagcccctttaaaaaaaaaataaggtgtagtgaaacacacaaaacc

SEQ ID NO: 433370 - DNA, 256 bp, Oryza sativa
aataaaaaaaagaaaaaaaaacaaaaaaaaaaaaaaaaaaatataaaaaaaaaaaaaaaaaaaaaaaaaaaaaaacaaaagggaaaaaaaacaagcccccaaaacaaaaaaaaaaaccaaaaaaaacaaaggaaggataaaaaaggaacaaaaaaaaaaaaaaaaaacagcaacaaaaccccccaaaaaaatgcatagcaaaaaaaaaaaaaaaggtaaaagaacacctaataacaaacaaaaatacctaagaaaa

SEQ ID NO: 433371 - DNA, 361 bp, Oryza sativa
cccaaaaaaaaaaaaagaactttttaaaaaaaaaaaaaagaaaaaaccccaaaaattttttggggggaaaaaaaaaaaaaacccccgtttaaaaacaaaaaaaggggggggcctttaaaccccttaaaaaaaaatcccgggtaaaaaaaaaaagggaacaacaaaaaattggggggggttttaaaaaaaggggaatcaccttaaaaaaaaaaacgggcatcaattttttagagaaaaaaaaagcccccggtttgggcccaaaaagggaaattttccggaggaaaaacctaaaaatgttcccccattgttcacccccacccatgggggcccctcttttttgccccccccaaaaatttttttc

SEQ ID NO: 433372 - DNA, 287 bp, Oryza sativa
attgcttcgtttgcgcttggccacccaccatttcggcgcggagaggagaccgcttcacccgccgatctgcgagaaaccctctccgcctcgcctcctccacctcccaatcttaacccaacctccccccttcctctcgcgtcgaccccttgctttgctcctccttcaaccttcttctttcttggagtttcttgagagaaagagagagagagagagagagagagagagagagagagagggggcaggcggccccatgaggaggaggacggcggcgtctgctgcgactgacg

SEQ ID NO: 433373 - DNA, 451 bp, Oryza sativa
tctctctctctcctcgcggatgcaaatcgagaggaagaggaagacgagaggagaggagagcgcgtggcgtcgagaggaaaagccggagccattgagccgcaggcctcctcctcgcgcgcgagcgcggccggcatctccggctcggatcgagcttgaaggagaaattgggggcttgagctgaaagatcttggtacaattctcccgcaaaatgcctggaattatcgtggatggagttgtcacagaggaggcacaaaacgaggtgaactcctcgcagaacaaggacaattcgtccgccccaagatcgccggtggcttcgaaaagcatgcacagcgaggcgctggagatgcatgtggagggtttcggcgccggggagccatcgattgagcagctctacaacaatgtgtgcgagatggagagctcaagcgagggtggatcccccttgcgggagagc

SEQ ID NO: 433374 - DNA, 310 bp, Oryza sativa
aaaaattacattctgaaaataaatccgccatgagattactgcgccaagataatgaagcccaacaaattggtcacaaactatgaaacagtacaagaaaggtcaaagcatctccaccagtaaaattttccacaaaggaaaaaacttcaaactattgatctaccaaaactaggctgaccaaattagggaacccttcacaataaccggtgaggcgttcgcaccatggacgggggctttagacagctgacatttggctggaccttggggtacacaaggggggagctgcaatttccacagtgggaatgcctggagc

SEQ ID NO: 433375 - DNA, 137 bp, Oryza sativa
ttttggttgtctttttttttataccttttatcgttgaattggttcgttctcgaattctttggaattagaatcagctaagaacattggtttctctgttcttttaaatttgggggggggaagaaaacctatacaaagag

SEQ ID NO: 433376 - DNA, 195 bp, Oryza sativa
acgtttaccctttttccccgtccgctccgtcttgggtgacggagaactcgaggtcgcccactgagatgtgcgctatacgagcagaggtgtggcgggcgacgagatgcggctcacggacaccaagctgctcacccggatgtgagccaaaaaggtgatgcggatcagtgatggtggctcttgacgcagcccggaaga

SEQ ID NO: 433377 - DNA, 463 bp, Oryza sativa
tttgtttttttttttttttttttttttttttttttttttttttttttttttttttttttttttttttttttttttttttttttttttttttttttttttttttttttttttttttttttttttttttttattatttttattataaaaaaaaaaaaaaaaaaaaaaaaaaaaaaaaaacttttaaaaaaaaaaaaaaaaaaaacaaaaaaaaaaaaaggggggttcccggttttttttaaaaaaaaacaaaaaaaaaaatagcgttttaagggggaaaaacacacccctttggggggaaaaaaaaaaaaaaaaaaagtgaaaaaaaaaaaaccccaaaaattttttaaaaaaaaaaaaaaatggacccaaaaaatggtggaaaaaaaaaaaaggtggaaaaaaaaaattttttttaaccaaaaaaaaaaaaaaaaatgggaaaaaaaaaaaattttttaggcgg

SEQ ID NO: 433378 - DNA, 174 bp, Oryza sativa
tttgttcgtttcccgtatcggtagggtgaggccaatattctctctctctggaacactctgtgggctggcacttgccaaaatgattgagtcaaacacgagtggtgatgggacatggagacggatgaagcgctcggatccgacgacgcactcggccaccggatgcaactggcggcc

SEQ ID NO: 433379 - DNA, 348 bp, Oryza sativa
ttttggttttttttttttttttgtttttttttttttttttttttttttttttggcaacgcaaaaaaaaccccaagcctcaattcccacagaaggggcaaattgaaatttccacatttatcacctaggagctttccacattggaaacccaaaaaaaaaaaaggaaacccattttgctttatggaattgaatcggggcaaaaaatttaaacgattttttcaattccaggtaacctaaggccctctaaaggatgactcccccggcccatttccaaaaaactgaaccgatgccattgacattgcctgacaaacatgacccttgagcccgccccaaaaatttggcttttataa

SEQ ID NO: 433380 - DNA, 371 bp, Oryza sativa
ttctactgtgccgccggcgctcccctctctctcccacccaccgccgacgcccctcttcgcccctggatctggcggctggccagcggcgatgcggcgccgaggcggtctcggcggtgtgcctgcgacggacgacgcggcggagatcggcggcggcgcgggagctcggtcggtggcgcggtcgtcctcgcggagctcggtggtggcgcgggaggagtggcgaggtgcgacggcgactgcgcctcgagaagcggcgaggtcggcggcggcaggcacccggcggggctttcttcttttggcatcaccatggtcgctgggcgggggcttacttcgggccgaccggtccttggcaactttattgttttccctcccat

SEQ ID NO: 433381 - DNA, 348 bp, Oryza sativa
ggagtcctcaagcatcgagataatttttattagattcgcttttccagatagcctatcaacacgaagaatctgtacccagctgaaagatattacatttcagtggattccattccaatgacgggaaaggacacgctggtcaccttgattgcgaataggaaacagatcatcctcctgcctgtaaccatggccacggctattgcccaaattatgaggtcgcccatgggtgtcaaatggatgaacatagtctcggtcaggtccacctcttccaatggaggctttgttcaagggcctgtcccgaaagggtgaacggcttctctcccgtaagtctagtcccctgttcatgggctt

SEQ ID NO: 433382 - DNA, 416 bp, Oryza sativa
  unsure (1)..(416): unsure at all n locations
tcggaacagaaagcttcccccagaaaatcccatctcacggcgatggcccccgccgccgccgcgaagctctccgtctccggcgccgccctcgcggcgctgctcgcctgctgcggctcggccgacggcgactccgacgggctcctcttcggcgtggctagccgcgcagccgcggctcccccgtccttctacgacgacgacgacgacgaccaggcccgcgcctcctcgggcccctccctctccatctccgtcgtggggcacgcctcggtcgcgcagccttcctccctcgccgatccgctcggccgcttcaccaggtcgtcctactcccccgacccctccgncgccaatcggttttttttcctcctcccgccgccgttcgccgttgcgcccctccatgcgcgaggccgccctcgcgcgct

SEQ ID NO: 433383 - DNA, 374 bp, Oryza sativa
aaaaaaaagaactacgttgtaattgcatttggatagaacaaaatgttggaaggtccatatggtatggaatttggggggcatcagttaggtccaaacatgggctttgaagacccagaagaactactggccaccaacaatcctggtttccaacacccccaaaaaaatactgagtagatgaaggatgatcagtttccttatcttttctacgcttgtaaacgttgaaacttggctgacattgcatttttcacacttatattcgggaaatgaactttacttgacggagaaatcagaaattcctctggatcaggcctacaaaacagggaactacttcaggccttcagggctttatgcaatttccttaacttttgatcttg

SEQ ID NO: 433384 - DNA, 375 bp, Oryza sativa
ttggttttttttttttttttgttttttttttttttttttttttttttttttttttttttttttttttttttttttttttttttggggggggaaatcagggaaaaaattttttgaaaaaaaaagggggcccttaccccccttaaaaaaccccccccttaataaaaacaccccaaaaaaatcatttttttcccccgggaggcaaaattaaagggggggaaaaaaagggggggcaaaaaaaaaaaaaacccaaagggggaatttccaaaaaaaggaagccttagggggtataaaacccccaaaaaaaagggccccccccccttaaaaaaaaggaagggggggagggctggggtttggggggggccccccccccggggg

SEQ ID NO: 433385 - DNA, 303 bp, Oryza sativa
ttgtttttttttttttttgtgtttttttttttttttttttttttttttttttttttttttccaaggggcaaaccccgattttttcccatttcggttaagggggcccaaaacctaaaaaaaaagggctgggggcaaacccctgaacatgggcatacaaaagcccggccaaaaaaaaaaaaaaacccccaatgggttatttaggaagaccttttcccccccaaaaaccaccccccccaatggcccattttatgctcccaaattttcttttttctccccgtttggttcccctgtttttgccaaaaa

SEQ ID NO: 433386 - DNA, 328 bp, Oryza sativa
caccgccagaaaaagaattacatgatttaaataaggcgattgttacaacttacaaagtcacaagacaacaaacattggaacgaattacaatacgcgcgtgctacagattaaccttaaaagcaggctcactactcactaggcactaacttcacttgagataaaactgaaagaatgtttggtagttgtattctacagaacatacagaagcttaggagccaagtgagagagcaccagccgcaaataaaagatttcgccgagaaaaccgcagagtataaacaggagttgtttttgtacggagagttttgagcatccttagccggttagttga

SEQ ID NO: 433387 - DNA, 335 bp, Oryza sativa
ggatacatacaacaactagctgcccaccgaggtatgagcaaataaggggagcctcgtggttaaaaattacaaggtacagtcagtatcatacagccttctacacgtgtgtttacacaagaaagcaagtgaaggactacaagaacacaatgaaaccctatgagattctcaacatcaaaactcaccagctgctgttcctgtaaaaaaagggggaagccgataagatgcacacacaacaaattcaatacccatcctgccatccacacactcaacacggtcaggctcaagctcaagctaaagcagcagcagagtcaccggcagccttgtccggctggtta

SEQ ID NO: 433388 - DNA, 363 bp, Oryza sativa
ttttggttttttttttttttttgttttttttttttttttggtttttttttttttttttttttttttttgggagctgattccacattccaggaaataatatataaaaaattcaaacaaagccctagcaccaccaattgggggctttttggacagggaaaggggcaaaggctcccagttcttcactatcccaaaactggaacccgctagggtgaggcttgggcatccatgccataccaaacgggtcggcgttttcaaaccccccggggttggggaaagggggacagccaggaacatacacgatgacgaggatgaccagccccaccattttgaggatgggaaccttacaccagttttttttgatgc

SEQ ID NO: 433389 - DNA, 210 bp, Oryza sativa
tgccgaccgcggtggaacgatcggggcgaggtgacgcaagaggccgccagtgccgcgcgccgtgagtattgacctcgagtgccggagcccgacgggccgagcagctccgggtcttgctcggactcgcgactgcagcaatatattactttcaatgacatgatagttaattacgcatgcagatatctctaatacatgagagcatggttctct

SEQ ID NO: 433390 - DNA, 350 bp, Oryza sativa
aatggcactgaatcatttgtatttcctcatcctttatattcatccctcccagagagacggttccatggaagatttcttgcccttatcaggcaagcacagcacacccccccgggggcaggggaattggtttgaacaagacgctaaccaacatccagagctaaaacaaacctgggggtcaaaggaactcccgaaaaaaaaaacccaggggaaaggccccatttttttgtggtccccaacgcctccgtgtcaccaccacgttttgcggattttttttcaccctgttttattcgctcaggcgtccactatcccgccgacggcctttgaccccaggatcagccccgggtgcgcct

SEQ ID NO: 433391 - DNA, 526 bp, Oryza sativa
tttgttttttttttttttttttttttttttttttttttttttttttttttattttattaataatattaaaaaaaaaaaaaaaaaaaaaaaaaaaaaaaaaaaaaaaaaaaaaaaaaaaaataaaaaataaaaaaagaaaattataataaataaaaaaaaaaaaaaaaatacaacaaacaaaaaaataaaaaaaaaaaaaaagctaaacaaaagcaaagaaaaaaaagaaaaaaaaaaataaaaaaaaaacaaagaaaaaaaaataacaaaaacaaaaaataaaaaacaaaaaaaatataataaaaaagaaaaaacaacaaccaaaatataattctaaaaaataaaaccaaaaaaaaacaaaaattgaaataaaaaaaaataacaaaaaaccaaccaaaaaaaaaaaataatcaaaaacaacaaaaaaaaaagaaaaaaaacaaaaaaaaaaaccatcaaccacaaaaaaaaaaaaaaaaaaacccaaaaaaagaaaaagaaaaaacaaaaaattaaacatcatatc

SEQ ID NO: 433392 - DNA, 280 bp, Oryza sativa
  unsure (1)..(280): unsure at all n locations
aannaaannanaaagaccgaccaatctcatagcaaagcaaacagtacaatgtttttttttcagaacacgagtagaacaatgtttacaagcctatttggagcacaaaaaatctcgtaaaattgtgcagaaaccttcaccttccccatgaaacaattcatttttcacacaagttataaagtaggatatccacatactttctccgttgcacagaaaacaaatctagtatcgggtggaacaaattctagtactaccaatctgatagtagaattggagaattagg

SEQ ID NO: 433393 - DNA, 353 bp, Oryza sativa
tttttttttttttttttttttttttttttttttttttttttttttttttttttttttttttttttttttttttttttttttttttttttttttttttttttttttaaaagaaaaaaaaaaaaaaggaaaacccaaaaaaaaaaaaaattggggggtaaaaaaaaaaaaaaaaggggcccccaaagggaaaaaaaaattaaaggggaaaaccggtggggggaaaaaaacttttcccctaaaaaaaaaaaaaaccttttaaaaaaaaaaatatttggaaaaaagaacaaaaggggggtcagccccccaaaaaattttttattgggaaaaaaaaaaaataataaaaacccggtgtt

SEQ ID NO: 433394 - DNA, 329 bp, Oryza sativa
ttcgccgcgccggttagacacctcatgcctccggcgcatccgcctccgtgcggggtcgcgcccgccgcggcggcgacctgccccctcttcctcctcccccgccggagcctgagccggagcctccacctccgcctccgccgcctctccctccccgccccgcgcgccgtcttccacgcccacgacgccgtcctccttcgccgcgccgccgacgcggacgaccgctccgcggggctcacctccccgcaccccaactttgggtgcgtcatcggcagggcccaactcgagaccgacaacgcccaagcatgggtggtgggcgaagggttccttta

SEQ ID NO: 433395 - DNA, 349 bp, Oryza sativa
cccaaagggaaaatcaaacaaaaaattatctttttacgggggaggggtacatcagcaaccctggctccgaacgaaaaattacccatccatacttttaggggcaatcacaaggaaaaatttttggttaggtagcacagccaaataaacgccggggggatccccacttgccggggaaaagtctcggggaaagcttgcagcgggttcaatcaaaggaacctctaaagaaggaaccgggaaacaaccccaccagaaggctatgggctttgcaggaagagaattccatttacgatctaaacactcaccagtggggcctggcgatatccgggctggaaccgaaatggggggcccc

SEQ ID NO: 433396 - DNA, 392 bp, Oryza sativa
tccttctcccctcatacgccgcggccatggccaccggcaccgccaccggcgcgctcgcgctcctctctcctccgctccccgcctccccgacccctcctcctcctcctccactccgcgccattctcctcaagcagcctttcctccgcccgatacgccagcggcggcgtctgtctccgcgtcctctcctgcgccggcgcgaccccgtcgacgactgcgcacccaccgccgatgcagagaccgcctacacctggcgttcctacgacgcgctggaggccgagcgcgcctacctagacattgttcgtgagcacagggcctcccccgatgatgcgggttccatcgccgcgcgcgcgcccgggtacgccctcatgcttgtcgacggcgttcgcgagctc

SEQ ID NO: 433397 - DNA, 198 bp, Oryza sativa
tttgtttttttttttttttttgttttttttttttttttttttttttttttttattttaaatttttttaaaaaaaaataaaaaaaaaaataaaaaaaataaaaaaaaaaatttatattaatttttgggggggaaaaaaaaaaaaaataaaaaaaaaaaaaaaaaaaaaaaaaaaaaaaaggctttaatggaggggggag

SEQ ID NO: 433398 - DNA, 357 bp, Oryza sativa
ttttggttttttttatttttttggtttttcttttacttttttttttttttttcattatttttttttttttttttttttcttcccccagggcccccgggaaaaacgggaggaaaaaaaaaagggcaaaaaacaacaaccagggggggggggtttttttcaccagggaaaacaccgaaaaccgggggggggaccccctaacaaaacgggaaaaggggggtaccccccccccgggggcctaagccaacatcgggggggaaaggggcgcctcatggggaaaaaaaaacctggacggaaacccgggggcccacccggaaaacccggaccggccccgggaggggcaccactttcccctaaaag

SEQ ID NO: 433399 - DNA, 473 bp, Oryza sativa
ttcacgtttggtgagtcgagtgagctagccatagctagctatgaagaaggcggccgccggcggcatggcgcctcttcctccgtcgtcgtctcctccgtcgtgcaaagccggcggtggtggtggcagcccgaggtggtcgttgcttcacggcggcggcggcgagtggggcgtcgtggtgcggcggaacgtcgtcaagtcgtcgtcgctgctgctgctggtgttctccaccttcttcgtcttctccgtcttgcgctcgtcgcagacgagcttagtcccgccgccgccgccggctgctgccggccccggcgagccggcgctggcgcagagtggtcacgacgttgccggcgatgatggcggcgaacatgttgccgtcgcaatcaacaatgtggcagctgagacgcaaagcacgcccgatgacatctcgctgccgtcgacgaacttattgggtgcagctgtttcacaacaccaacaaa

SEQ ID NO: 433400 - DNA, 469 bp, Oryza sativa
ttcaagggagtgcattgctgtggcaagtggccatgaagcagcagcagcgccagcaggctacggcctgttcatcagaacagcagattgttccatggctgaagcagctgcacaacaagaagccgcagcagcagcgaaagggtaccggtcttctccctcctcgccgtcgtcgatgtcccccactccgtcacctccaccggcggcagctgtccatggaggaggaggagcggaggatgccgccgccgccgtcattgcaacgccagccgcgcggagtttgggtgcaggggacagcggcagcatgcaggtgagtggccatggcgagcatgctgggttgagctccagacggcgtcgtggccggccgaaagggtccgggcggcgccagatccttgccaatctaggggaatggtatgcgttatcagttggagggagcttcacgccccatgtcatcatttgtcgccacaggtgaggatgt

SEQ ID NO: 433401 - DNA, 337 bp, Oryza sativa
caagcccaacaaggcccaacaacttggaccaaccggggaatatccaagaggggaactaattcacactgcaacaggaaaccgggaaaaaacctttaatttaacaaacaaacgcccccaagccaggggccctactaaaaataaattagccaaaagtaagaaggtcacaagccaaaatattgggggaaaaaaccccaaaaaccagggcctgaaaactttttaaatttggccactaaaccccacatgttggaaaagttcactttccaagaaggccccctttggcttaaaaccccaaaattccccttggaaaccgggcccccttaggcccctcccccaaaaa

SEQ ID NO: 433402 - DNA, 396 bp, Oryza sativa
tttgttttttttttttttttgtttttttttttttttttttttttttttttttttttttttttttttttttgggggaaaaggaaaaattaccaaaacccggccccaaaggaaacaggcccaaccgggggaaacacccaaggggggggcccacaaaacaaacgtaaagggaaaagcggggcttattacaggcccaaaaaaccccttacgctccaagggagggatccccccccctttattattccaaggtttgggcacaaaaccctcaggggttcatggaaaccggcccttggccccaacggtgacaaaaacccaaaacgggggggtggaaatttacagggtttttgggggtgggaagaccccctccggggggaagcccaaccccggggagaacttccc

SEQ ID NO: 433403 - DNA, 190 bp, Oryza sativa
ttgttttttttatttcttgggtttttcttttattttttttattcttttttcacttttttttatcatttattttttttttccaacaaaaaaccaaacccttttattatggccttcaaaaaaaaaagcccacttcttttactaaaaaaaaaaaagccaaaaaacttccgccaaaaattaaaaataccaaaat

SEQ ID NO: 433404 - DNA, 355 bp, Oryza sativa
tttgtgagttggtaattgatagtagcaagacaatgtgtgggggagcgatcatcgacgacttcgtcccgcccgccggcgcccgccgcgccgacgcctccgacatctgcgacaacgccgtcctctccgctgccggggccggtatttctatctatctactcctattcgacatgaacagatgtttcccatgttcatttctttgcagtcctcgcatgcgcaacgtgtccactgtttagatggatgcacacggatatggaacgtagctgcagagtcctatcctatatatgcgtggttaatcttctaattggctgctttcctgggcaccgtcttttttgtgcaagtgacgagtcgttcgcgg

SEQ ID NO: 433405 - DNA, 300 bp, Oryza sativa
tttttgtttttttttttttttgtgttttttttttttttttttttttttttatttttttttttcattttttataaaaggtattaaggagttttttttttttttgggggaggcccccaccccccccagggggggaacttggaagccccgaacaattccccaaacacacaccaaaaaaaaaataaaaaccctcgggcaaaaaaaaacccggggaagaatcaaggaaaacccccaaaaaagggcaaaaaaaccaagttttttttttaggaaaaaccccgggaaaagggaaaacgcacaacccac

SEQ ID NO: 433406 - DNA, 393 bp, Oryza sativa
ggcgacgctcggcgacctgcgcgccgtcctctccgacgcggagagggcgcgcgaccgcgacgcggccgtggaccggtgggtgcgggagctcagggacgccatgtacgacgccgacgacatcctcgacgagtgccaggccgacgcggggggcgaggccgcgacgcccgttgccatggcgggctgctgctgctgcttccgcggcgtccgcgtccctgccctctcctgcttccgcgaccccgtccgggcacgcgagatcgggaagagggtcagggcgctcaaccggaggctggacggcatcgagaggaggagctcccgcttcggtttgtctcccagactaggaacatcttctcgtctccctccccttgctgctctcggcgcgcagattcaggcgac

SEQ ID NO: 433407 - DNA, 197 bp, Oryza sativa
ttttccgtttacttgtaaactcccaaaaagcaatcgcgcactcggtgaaccctagcccggcgatggggtgcgcgcaggggaagtgctgcgtgccgcggcggtagaggggacgcggtggcggcggagcggtgggtgggcgcggcggcgcgacgctggggcgggtggcggtgccgggggcggcgctggtgctggagtac

SEQ ID NO: 433408 - DNA, 358 bp, Oryza sativa
ttgtttttttttttttttggggttttttttttttttttttttttttttttttttttttttttttttttttaaaaaagggggtccccaatcccaaaacctgggaggctcccaaaacccccccgttaccgggaaccctttgaagacaggcaaaaccctgaaacgaacccggagcaacccaaaagcccgaacctgtccttctaagagggctcccccaggcaatggggtgccgaaccctttacttgtttcccccccaaaataaaaacccaaccttgggggggccccagggcccggccctcggggggtccccaaagggcccaccggggcgcatcccgacccaaaaccgcctggggcggttttg

SEQ ID NO: 433409 - DNA, 308 bp, Oryza sativa
tttatagagcgcgagcggccgccctgccttttctccattgtatacgactgcatatacatataaccacagaagctaaagcattgctctcatctcataacgggtagtgccgtgcctatacgggggatcagcaaaagatgctactatgacacataacctcactctgctatattaccaattactcccaattaccagttgccgattgcaatatatatatactcactgacctaccttgctagagcatttagtaacaagctaaggagaaagagagaaaaaaaactaacaatgacccaagtttaagggaggaagaa

SEQ ID NO: 433410 - DNA, 288 bp, Oryza sativa
gatcctaaacaaggccactgacaaaatagattggcctaatctaaattgggcgcggcaaagccgcacgttgtttctagtacattctaagaaacaatcaaattgctcagaaaatacatgcctttctttttcctccatctataaacggcagcagcactaactaatgcccacgtacctttgtacaccaatgttccagttcttgatggaactttacacagaaagagttgctaaccgatgctaaaattttcttggtctatataagagcgcctgcgattattttggtggtttttt

SEQ ID NO: 433411 - DNA, 310 bp, Oryza sativa
ttggtgttttttattttttgggggcttttttttttttttttaatatttgtttttttttaattattacataggtggatagtttttttttttctttcacaaaaaaaaaaaggggggcccccgggctaatccggaaaaaaaaatagggaaaaaaaaaaaactccacctggaaagggggcgagaacaagcctgaaaaaccaaccccaaagttaaggggggggggccaaaaaagggggggctaaaaaaaaaaccaaaattaaccaaatttcccccggaaaaaaaattaaaggggaaacacaacccggaagggaaa

SEQ ID NO: 433412 - DNA, 203 bp, Oryza sativa
agtactaacaaacacagctcttaacacttacttttagatagcacatcttatttcttctttttatataaccactggctagcacatggctgacgaagatcgaccatcctccatcatgggattattcattagcgatgctgctcctggctcgtcgttacagccatgtagacggtgggggagtccccttcggcggtcaagaggttgcc

SEQ ID NO: 433413 - DNA, 327 bp, Oryza sativa
ttgtttttttaattttttgggtttttttttttttttttttttttttttttttttttttttttttttttttttttttttttttttttttttttttttttttttttttttttttttttattattttattctttacgacaaaaaaaaaaaaaaaaaaaaatacaaggaaaatcttaaaaaaaaatgcctctttaaattatatagggaaaaaaaaaaaacagaggcaaaaaaaaaaaaaaaaaataaaaaaagggggaaaaaaaaaaattgttaaaacccaaaaatttgggattaaaaatataattcattatagataaaaacagcgttaat

SEQ ID NO: 433414 - DNA, 70 bp, Oryza sativa
aactggaccacaaaaacacacttgaagcttggagttcattcaatgaaaatcattgggggggggggggggg

SEQ ID NO: 433415 - DNA, 475 bp, Oryza sativa
ttgtttttttatttcatggggctctttttgtatttcctttgcttaaggacgacacagtcagggtgttacaacaaatgaaatgaagattacatcagttgcacttcttctcaaacagctaacccttttggaagtcactgtacagtgagtatctcctccaatccccaagtccatatttctctatacgtttgagatgttatgatggtgtttaaaacggccaaattttggttatctttgcaatgaaaaactcttgcgaatagttgggatgatctgatttggcagctcggtaccccgcaggatgagatacaatacaaaagaagcataagcaagtactgccacgcagagaattgagccagataataggcctcttatttctgaagagaagaaatccagcaagagatagccattgatcgggccaatagtgtccccactgtccaggtcacagcttgagtatttcgacctatttaaatacccccat

SEQ ID NO: 433416 - DNA, 248 bp, Oryza sativa
cataaacaaagtgggttaacacacaccacaagttactaacactccaacatttaatcaacctcataaataataaacatatacttaccaaactttttgtggtacaactcaacctatcatacaacgaaaagactaactcactccacatacttcatagcaatccaacaaaccaaataccattcctgacatacaaacaccttaaccttcaacccaatccgccaaaaacaatacaccataaacatccctccctg

SEQ ID NO: 433417 - DNA, 502 bp, Oryza sativa
cgatttggtcgcccttcctttttttttttttgggtggattcttaaataagggggggtgaatcacaccaaaggtgaccaatactacaatattttatcaacctctcagaaaataaacaggaaatgatgattttttttgtggcataactaataagttcatacaattgagtcactatctcactctaggttatcctttacaagccatttaattgaatagtagtgttcacagacaagctgcagagcttccaaactgctcgacgtcaaacagcaaacaatatagtactaccttgatagcaagatgtcgcattggcatgtgatattccaatgtcattgtctaagacaaggattttcccacatttttcccaaccagagaatctggtaatctgctgttgatgagatcccgcagttcaaactcactagggaacctctgctcagctaattttgagaaaaccaaatctccattgcagtaaacttcaaaggcaccagaactttgtaggaaagattg

SEQ ID NO: 433418 - DNA, 137 bp, Oryza sativa
ctcctatcggcgcactggccggaggatgtggatgatggctgcccgacgcgacttgatctcactgactgatgaagtcggtgagggaggagccgaccgctcgactccgtcatggagaagtggagccattttgatgaacg

SEQ ID NO: 433419 - DNA, 488 bp, Oryza sativa
caggcaacaacggggttcattttatcagcctgaagaaaagaaacaatctgatgctgatgccatcacgaacgaacgaaggaagccaattactagcagtaacaatccggctgtaacagccggacgacgatggacagtggcactgacagagacagtgacacgccaccacagttcaaagaaccggtacacactggagtacggtacatacaatgtcatcacataggcagagaccgcagctgctgaattcatggcgatccaatggaccaccctgctgatggctgcagcatcaccaggacatgaactcgcaccattataacacgagacaagggccaaaaatgggggcatgattcatcacacagaggaggaggggtcaggccggcgcatagctcacatgccatggcaggctaactttagaggtgacgaacatgaacccccgttcacatctctgggtgatggatgccttaaccacaccaacactcactgtgtgattg

SEQ ID NO: 433420 - DNA, 292 bp, Oryza sativa
  unsure (1)..(292): unsure at all n locations
cgatttagttgcccttccttttttttttttttgttggtttaatacaacattgggtgacaaaaccacccagcaccgggcaaatcagacagctacaaagcgattgataaaaacaaaaacttcgggccagcnaatgttcatcagctaatattcttcacgacaaaaccaaggccctggcttattaaaacaaggcttttagatcaccaccgatttattgtgcccccatgttcgatttatcccaaagggaaaaaatcctgaaattccgatcccaacttgtgaatgcttttagagcctc

SEQ ID NO: 433421 - DNA, 383 bp, Oryza sativa
gacacccccaaaacctttaattttaaaaacttgacatgggagatttcgactttaaccagacctcccctaaaaatccatcccccaacgggctcaaacgataatcccatttcccccggggccccccccgaaaaagtacccaacatttaatccgggcccaacccccccgatccaacttttcacgagcgcccccccaaaccccggagcggggggggcggacccggaaaaaccgcccaacccttccccgccggcccccggggggtatccccatccccccggagttccccccccccccctggaaatggaaaaaaccccagggaagacccaccgcccccgggggagtgaaacccccggccttttcatccaaataacaataaacaatcccc

SEQ ID NO: 433422 - DNA, 314 bp, Oryza sativa
atattgggggggcttccaagctggaagttggaacaccaaacaaagtaaaggttgtcacagaaacagcagggagcacctaacccagaaaatttgcctagataggcctgctggcatcgggccaaaggccacactgatacatagttttctcggttgtttattacaggatcatataatactacaaacacggccgcttcttaatgtttttttaacaaaatctatgtttttaaatttcttttaaattcaatttttttttaagtggagttattttgttctttcatccctaacctctttaaccttattgttttatttatttt

SEQ ID NO: 433423 - DNA, 335 bp, Oryza sativa
catgcaactgggggggtaataacaccgaccattaagcacacaatcaaggctgcctatggctcatacgaaacatagcataacgcaattctctacaataatcacaccctgtatttaaaacaagacaacattaatgagccacaataaccaattggaagacataaatccagaaacccctgtataaaagaagattaaagatcgaggtatacgtttaactaacatgactttggactgcacttgttttatgagtagtatgcaccggaacagcgtatgtccaaggtgcagaccaggctgacgtggcctatgccgattgtccctggaggcaagcgccagatgta

SEQ ID NO: 433424 - DNA, 333 bp, Oryza sativa
aaacaactggttgattgcttcaaacaatatatttccaaattaaaccttaaagctaaaacaaaacaagtaactcggtccccttttctattcacactaagcttttgtttggacttttcccgggccccacgggaccccaaaacctcatgctttgttatttattcagacaccaaaattttttggtcatggagttcgagctcatttacagtgattgcaaccaagcaagatttatctctggtcactaatcattcaacaaacagaactggcacccggtttctgaacaggtttactccagttcctttgcaaagtccatgatgtcgacaaacaccgatttcc

SEQ ID NO: 433425 - DNA, 236 bp, Oryza sativa
aaaccaaaaattggcccaaaccccccgaaccgaaaaaaacggccccccccacctcaaaaaaccttttttgggttccggccaccccccacaggggaccgtttttttcaaccctaaaaggaaccccccttgggggccaccccccccaaaagcccctcaacaagtttgttccaccccccaccctctttagaggggcgttttccctccggtacggaagccaaaaaaaaacgcttttccct

SEQ ID NO: 433426 - DNA, 175 bp, Oryza sativa
ccctccttttttttttttcttgttgctttataaaactttggtggcaccacccaccacattaatacccacaacaaacactgtctataaatctcaataaacaaaatatcctttctacccatacaccaaccattattgacccaacaaaattaagacatcaaaagagcatcaacaaaaa

SEQ ID NO: 433427 - DNA, 469 bp, Oryza sativa
catgcacacgtcagcttgtatgcctccatgtttagtcgccctcctttttttttttttatgatggatctaaaaaaatttgtgggactaaactcataaagtttcaatactttattaattgatcaagggagagaacggagggggaggtaaaaatattataagtaaataagtcgtaaaaaatcgatcagctggaagaccttcttggcctactaggtgatgtcttagggccactctcggtgggcgactcgccaggaggagggcttgcggcggtcgccactcatgacccgtaatgagcgctactcgccggagaggttggcctatgccttgcaccgctggacctttgttccctgcatcatagtacacttcacccgcttggtgcccttgacctacagcttcaccacttaccccgtgcctcccacgttctttaccatcaccatgttgtacgacgggttccccaacatcgtgtacttta

SEQ ID NO: 433428 - DNA, 370 bp, Oryza sativa
aaatattattggtggtttttatcttatattttttatattttatttttttttttatatataaaaattttatttttttcattttaggctaaggggaaaaatatcatttatgtttcattggcaaacgaactaggggaaaaaaagaaaagaaaaaggggggaaactaaaaattaaaaaaccccaaaacacaattttcacccgaaaaaaaaaaggggtggccctacgaccagtcaccccaatttagggatacacgacgtgaaaaggccctaaacatgtgacccatgcaccataaaaaggaccagggcacgcaggtttttttccctagcaaaaaaaaaacaaaaaatgctttataaactacaaaaatggggtgaaa

SEQ ID NO: 433429 - DNA, 214 bp, Oryza sativa
aattttatgttttcttcttatttttttctttttttttttttttatttttttttttggccaaaaatacgaaactgaacgcttgtgttagcccaaattgactggcctttcgggctgcgttgccccccccctccttggtttccattgtagggggcgctccacccggtacaactccttcttttcccttgtgggagtgtttttcccacatttatctcgc

SEQ ID NO: 433430 - DNA, 220 bp, Oryza sativa
ggggaaaatgatttgagaactggtattatactcatggaagaggcatctgaatttctcatgtactatacaacctgtcactcctgtgtatgaaatggcagagggtccatccatccacatagaaaaaggaatgggtgcccttgcgccgtaaacagatgctaatcttccatatgtacattacgattttgctttttcttttttcactttacaagttacagatctt

SEQ ID NO: 433431 - DNA, 71 bp, Oryza sativa
ggcagggattgaaccagataggagatataaccactaccatagtgcttcacgaaacacaggcataacatcag

SEQ ID NO: 433432 - DNA, 399 bp, Oryza sativa
ggatgtaacgtccagcttacgtggcagtaacacggcccattaagcacacagtcaagcctgcatatgtatcaaaagtaacataacataacgcaatactaaacaataataacaggctatatttaaaacaagtgaacattaaggagccacaaaaaacaatttcaacacataaatccggaaacccctctctaaaagaagcttaaagcttgaggtgcaggtttaactagcaggactttgggctccactgttctcaggagcagtaggtgccggaacagcggttgacgcaggcgcagccccggctgcaggggcagaagcagattggtcctgggaggcaccggcagatgtagcttcagtagaataagcggtggactgcacagaggttccactgccataaggatcacc

SEQ ID NO: 433433 - DNA, 189 bp, Oryza sativa
cataaaaaacgggtgtaacacaacactggcaagaggataaaatggatattcctaattggcctgatagaaaccgaggcccctcccatgggaatagaaatgggctaagggtcctttcttcaaattatgaaaagaaggggttcccccgtgtcactgacaaaaatctatcctgcggaggttacatcacctttg

SEQ ID NO: 433434 - DNA, 521 bp, Oryza sativa
gggctgaggaaggagaggtggttgcagtggccacatgggacggtcacggtgtccatcagcctcttgcatgggactccaacctgcagctacccaaaagacgaaaaattaattaatcacatcatgcaattaagccaatactttcttcgttaatttcatctctttgttgcatggcactgtccttaaggagaaaaagtagaggagaacagcatatctgtgtggaaggaatctagatggagcaagcaaataaagtgggatatgcaaaacagagagggaaaaagaaaaggaagaagagaagattcagtagtacttgttttttaatggaagaacagaagatgcaggtactactaaattggattcttgtccagtttaaaaatgcagcctgcagctggtaacaatgaaagaaggggatataatggaagcgaaagatggaacatgacactgcgagagaaccagctgagtagaacattctaccacaaagcatcatatcaagagctatggcccatgaatcttatctaagaaag

SEQ ID NO: 433435 - DNA, 367 bp, Oryza sativa
cctatttattgccctcccttttttttttttaggatgtttacaaaaaaaagggggtgaaaaacaaaatctcacatactgaacttatgttattcggccaggcacaactccaatgatatcacagaccccatggatagcatctaccttgaacacaactgtgtttttcaagaaaaaacttttatgtaccatttcacctggtccacatttcctactaacacacatgaggcctttcctcacacctactgtaggaaacacaaaccattttttcatgtatctacttgctccacctacgtgggcatgtcaaccctgaatttccactttatatgcccatataatgattaactagagttcaagggcctccaatctatct

SEQ ID NO: 433436 - DNA, 233 bp, Oryza sativa
gggggtgcgaacaaaactttcgaacccttttttttccccctggtttctatttcatttcattcccaaagaaagcaacaaggggttcaaaccccattaccaaagggaacccaatttatgggaccctcccgggcgaaaaccccccaccctgggggggggggggggggggtttttcccctgggggggcctcggggccaaaaaaacccccccccctaaaaaaaaaattttcccccccc

SEQ ID NO: 433437 - DNA, 315 bp, Oryza sativa
aacccatccttttttattaatttatacatatacttatacatttattacattctaaaaaagctcctcaccccgaaaaaacaccaacaaaccggccctattacacacaaaaaaaccgcaccccaaaaaaatccacccccccacaattaaaacaacaaccaaaaaaccccccccccccttggaaaaaccataaccccccccccctttaccacccaatactttcaaaaaatcccccgacacctaccaaaaaaaatctcccccaaaagcaaacattaaaaaaaaaacaccacccactcctctccccccagcctagaaaaa

SEQ ID NO: 433438 - DNA, 435 bp, Oryza sativa
gtatttaaaaaagaagggagaagagatcacagcagagcacgcacgtagcagcaacacagcaaagcaaaggcattcgatttcagagacgcatcttcgctttttgcctcggcgtcggtgctccacggcggcggcggcggcgggggcggcgccggagttccaccgcgcccgcctacatccgcgtgtgtgagagagagcggctacaaatggcctccgccgccgaggaggccaagggcgtggaggatggagatggaggggccagtgccaacaggggatacatcacacatatacgcttcacgatccgactacacagcggccgaggacacatccagtttccccgatgatgacaggggtctacgtagatcaagcgctatgtcatgtgggactgatagggttgtacacaccgaaggaaatgtctgcccgtctaaagaggagaga

SEQ ID NO: 433439 - DNA, 356 bp, Oryza sativa
tataataaaaaaaaaaaaaaaaaaagaaagaaggaaaaatgataaaaaaaaaaaaaaaaaaaaaaaaaaaaaaagaggttcgcttttttagatatctcactgccattcttccgcacactttgctccataacttattattggggggggctctttttggggtcccctgtttcctcccgtccctctcccgccctacttctctttttttgggtcccccccttttttattcttggggcggtttttccccctttcggcggggggaaaccccttgggctccccccctttggccgttttgcactaacatccccttttcccctggggggtagtacgcaaggcgcctcctgccttttctctttttc

SEQ ID NO: 433440 - DNA, 177 bp, Oryza sativa
  unsure (1)..(177): unsure at all n locations
ttttgtagatttacaaccaatgtggtgcccgcaaaatcaagttatacagtacaatcagttgttcaattattagagggcttnacaatgatgtccaactgatttgttccataaagctggccactactgagatcttcaccatacgttgaacgcttaaagctaagcacagttgagatacct

SEQ ID NO: 433441 - DNA, 458 bp, Oryza sativa
gtatcctccaattagttgccccccttttttttttttgaggtagaatttatcaatttatgtggataaaaagctttatacattatagacttgtatacaattacactgccactgtaatatctgaacaagaaaacatagccaggtttaccctggctccctggatctcaatgctgtcctcaaaggattggccggttgaattgttgtacagggtgaaaaagacccacatatccgagccaagctgcgtaaccgcaacggagactgccacctttttacggggactcgtccctgcagtgtggaatattacacaaacttttccctcgaaaagcagctcaatgtccctacatgttggctaaagccaacaagctgatgggcacgagatccaaaagtctagcaatctaacctaagtggccagaatctgaagattcacaaagcaacacacgatgtccaagcttttttctatc

SEQ ID NO: 433442 - DNA, 438 bp, Oryza sativa
tttttttgtttttttaaaattttttttttttttatttttttttttttttttttttttttttttaaaaaaaaaataaattattaaaaaaaaaaaaaaaaaaaaaatactaaaaaaaaaaaaaaaaaaaaaaaaaaaaaaacaaaaaaaaaaaaaaaaaaaaaaaacccccgcaacaaaaaaaaaaaaaatcctaaacaaaaaaaaaaaaacaaccaaaaaacaagacaacccccccactggggaaaaaaaaaaaaacaaccaaaaaaacccacataacaaaccaacacacaacccccccacaaacaaaaaaaataacactcacgcccaagaaaaacaaaccccaaaatcaaaatttccacccaaaccaacaaaatgaaaaacccccccccaaaaaaaaaaacaaaaaaacaacacaacatcaacacacaaacggatccc

SEQ ID NO: 433443 - DNA, 499 bp, Oryza sativa
gtttgattttttttattgaaagaggcgggatatcacagcttctctcaaagtcttcaggcacttatcgttccagaagacacttgcgtgtgccgttgtttggtgcgaacataagatcatataaagtatagtcaaggctgataagctgacacagctaccagcagtgcactacactcgtagcttattaccagccccagcagtccccgagattagcaaaggttgcagatggcaagcacagcttgcgaaaggacttgctcggccaatagttttgatgcaaagcctgctgagcctgcggctggtgtgcgcaagctgaggcctattgtccagcgtaaagcaaggtatgactcggcagagtacaacctgctccaagaaggcaagcagcccaaggatgggattgtgctggttagcctccagatgacagcaattcctcttaaggcccgcttgacagaacctacatcaaacttggcaactggcaacaggcctagccggctttccaggagtt

SEQ ID NO: 433444 - DNA, 480 bp, Oryza sativa
ttttctctctctctcccgtttccagatcgccaaaaaaagattccgcgtagcggcgagaggggagggggcgcgcgtgcccagatctgcggggtctcgccggcggagatggcgtgcatcaagagcgcgcagagggcggcgctgacggcgctggcgccggaggcgccctacctcgccgccggcaccatgagcggcgccgtcgacatgctcttctccgcgtcggccaacatcgagatcttccgcctcgacttccagtccgactcgcccgacctccccctcctcgcctccgccccttcccccgaccgcttcaaccgcctctcctggtcccgccccggcgccgctgacggcgactccttctccctcggcctcctcgccggtggcctcagcgacggctccgtcgccgtgtggaatccgctgagcatgatcaacttccgggggaaagcggaggatgccttggttgccaggctcgagaagcacaccggg

SEQ ID NO: 433445 - DNA, 398 bp, Oryza sativa
atttttagggggcggcctttttttttttttttttttcctgatcacctcattttatgggagcataacatttcattatccaacacatacacacgcacgataccctaatgttcaatgatatcatttacatgtttcatagtgcatgcacgatacatgaacattactatgtttattagggcacgcactaatagtagcttgggcatgaatccagtgtattggtcagtgactcaaagagaaaatggatcaaggtctggataattaccacctgttcttgaaagaacctgagccaggagaccaggctcattaccagccgtacattccgttttcttgttccagttcctgatccataccatgatgccataatagttgggcagtttgttgatgaactgtatcacggcgta

SEQ ID NO: 433446 - DNA, 438 bp, Oryza sativa
aatgtcgccctttattttttttttttttgttgtttttaaaaatttttgtgttttaaatttttattttttttttttttttattttttttttatttttttttttttattttttttttaataacaaataaatttattttaataaaattgatttttttatttttataaaaaaaaaaaaaataaaccactaaaatctcttaaaaaaaaaaacccaaaaaaaaaaataataacatcttttctctaaaaaaaaaaaaattttaattagaaaataaaaaatgtctaattctcttaacccaaaaaaaaaaaaaccgaaaaaaaaaagaaggggtacctaaatcttttaaccaaacataaaaaaggtccctaaaccgccaaaattaaaaaaaaaaacccccccctttttttttttaaaaaaccccaaatttttttaaaaatttaaaaa

SEQ ID NO: 433447 - DNA, 423 bp, Oryza sativa
aaggtgaaccatcaatcaaattccagatttccagtacaaataaaagctgtctccactacacaacacacgaccacacaacccccggcaaccgatgccgggccggtaggctaaaataaactgcccgcttccgaaccacacgaaagcgccatcgacgacgatctactgggctactcccctgctggtgtacgatcgatcgcgagagatatatacgaactgtacctataggtcggtaaaatcaaggaccaccaccaacaaaaacgcttaattcggttgcccaaccaatgcacgccgcagcgccggacgcgcgcgaggatccctacctagacgccaccgccgcggccgctgccgctgcgacatccaaatcgtctgctagtacagtacacggaatgcatatatatgcgtacgtgcgatgaactgagtagg

SEQ ID NO: 433448 - DNA, 172 bp, Oryza sativa
gcgggctcatcaagcatttggtttaggcacggtccacaattaatacatggatagtgggtacgtctcgttggcagacactaacggaacagaaggggagttgtgggtacagcgttagccatatctttgtgcgtctttggaggcccaaagttggaaaaaaaaacagggagggggt

SEQ ID NO: 433449 - DNA, 332 bp, Oryza sativa
ttttattgggggttttttcacttcgcgggggaccgaacaaccaatcataaaaacaaaaatattgcatcactcccacaaaattagctctggaaacttttccccctattgagatcactttcttttgttattacttattcatgatcttgcaactcagattatgagtaattgctagtgtaaaattttttcacgaagtcttaagacccttggtctttctccatatcctgcaccagtccctttttgccgaccacatattgtccaatgacgtgattgccctgcttcgcgtgttcggtgatgttgcccagctccttcatccccttaaacaggagcatatc

SEQ ID NO: 433450 - DNA, 317 bp, Oryza sativa
gggggggcaatcaaatcgaaggggtcgattcccttcttttgcatttgcacatctgcagctaatagtacaaactgaataatactaagtaagaaaacagaaccccagagggctcgtaaactgaactacagaacattgctactacatatctgctgcttccactaagctcccctcgattcagctcacgggtaacactttctcatcgcatctccatttctccatccaagctgctacccacaagtgtacatctgttctccaatctgatgaaactcacactgaccattcttgtgcagcattagaatttaaaacaccccgccttt

SEQ ID NO: 433451 - DNA, 314 bp, Oryza sativa
acacaaaaaaaaagccaaaaaaaaaccaaccccttttttaaattttaaaagggaaaaaaaaaaaataaacccctttttattgcccccccccccacttaaaatttttccccccttcccaaaaagatttttaatttttccaattgccaattgaaaataaaatatcccgttgggcgaaaaaaaacttaaaccacaaaaaaaaaatactgctcactaaaaaaaataaacggagggcccaaaagggccccaaaaaaaaaaaataaaaaaaaaatccccccccccttttttgtttaaaaaaccccacaaacttttttaaa

SEQ ID NO: 433452 - DNA, 459 bp, Oryza sativa
tgttttctcttccaggatccaaaccctagaattcttctctgcgttcctttccccaaatcaccgaaccctaatcccgcttctttcaccccaccaaccccatgccactgtttcgtacatacagccggcgccgtcgccgtcgtcgtgacagccgtctcagtcctactcgctcgcgcgcaccatatcaggaggaggaacatgtggttgagactgcatctgcaaaagcgcgcgccgatccgctgtatgcaaaggaggggcatgtgccatcttacatcgctgcttcttcctcatcctgtcagcaagcagatgcagtagctcaggacaccgaggtcttgccaccatcaggaagctgccttttcttatctctggcatcacacgtttgggcccgacatgtgaaagattggtgactcatatttacatcatggttgatctttacggattctttcacacatttcctgatgt

SEQ ID NO: 433453 - DNA, 383 bp, Oryza sativa
ggtgggttattatttaagccaaccaacgaacgaacggggaccctaacataatgcaggacaaaagggtaacgcaatacccaaaaatggaactatttgaacaagaggggttcactagaacagattgaagggagaagacgcatcgcacacctgggaaaggaacatatgaggaccccttgcctacaaagggccagcaaccccaagggtggggacggtgctcatcaaggaaaaccaccttttgcaagaaaaacgagaggatgccaaaaagaacagactcttacagcaaggtcccaccccgaaaactgagctgttgagcaaaaaaagcccaggatattggctaacatccactcttccgcagttggcccgccaacccctattgctgtggc

SEQ ID NO: 433454 - DNA, 424 bp, Oryza sativa
tcggttttcttgttcagaacagatcaaataaagaaaacaaccatacccaaaatggatatgtaaatggttctaacagtgaaacatctgctggcatggatggcgacttgtacaagaagctgtaggatggtctgagtaacattggatattgtaaagctgaactttcagatgaactgtataccaaatacaggcacatttggtacccagtcaaggataatgatgagcgtagtgctgacatgcgagatctgatgacttctttctaagcacttgaggagaaagtttctggaacagtatacatttgctaagtagaacttgatcagaaatgctgcacgaaacttatctgttggataatgggattaactggggagcagcacccactataaagggcatttgaaatgcaatttttgatttaatgaacatttcttta

SEQ ID NO: 433455 - DNA, 358 bp, Oryza sativa
ggagaaaaaaaaggggttttttttttttaaaagggggcatataatattttgaaaaaaaacccggggggaaaaggtaaaaaaggggtaatattgaaaaaaaatttaaaaaggggggaaaaaaaatttataaaaaaaaacaaattgccaaaaaaaaaaaaggaactgggaaaaaaaagggggggttccaaaaaaaggggaaaaaaccttggtcaaaaaaataaaaatttttttgcaaaaaaaaaaaaaaaaactccccgttgaagtggggaaaaatggggaaaaaaacctaattcaaaaggacttcggggccccggttccttatttttaaaaaaaaaacttttgaaaaaagggggggcct

SEQ ID NO: 433456 - DNA, 457 bp, Oryza sativa
gaaaacaataccagtagtagcttttagcctttaaagctatcccggtgatttatacatttcagccaaatatttcacaataaacaaattatcgctaaatccatcgggttacggctgagatccttgagacttatctctatctacaattaattaacctgggtgtcaagaaaagcttacatatatttcgtgctcatggcataaagctgacctccaaatgtcatatgttatccatatcaagtggacagcataaacaacgctgtaatatagaacttacgaggcgttgaaatgagcaaaactgaccagctgctgggagaccttgagagaaaaagaatcttttaccattagcagagaagtggtggccaataatttcagtatttttaggaggaacacacaaccattgtttaagttaacgacgcccaaactattactaaacatttcattttatcaacaattaaagtga

SEQ ID NO: 433457 - DNA, 440 bp, Oryza sativa
aaatccttggggtttttaaaaaaaaactttttcctttcaaaaaggattttaacttttcattttcaaagcccactttaacttccacccaatcttcattaccagaagggaatctacaaccacttcagttttaacatacttaggcccccccaaacaccggaccccccatcccacaaaaaaaaacgcggcgcccccccccccgggaccctcggtaagcccccattaaccccccacagggcccacaaacccgcaaatctcttctcctggaaccccaaagccacctcaagacccctcgtccccttcttttatcccccaatgccaaaacccccccttaagtgtccctttttttcggcacaccacaccacatttttttttttaaaaaaaaaaaccccaaacccgtggccccccacctttataaaccaaaagaaaaccccttcttaaaa

SEQ ID NO: 433458 - DNA, 211 bp, Oryza sativa
ctacataagctagcctcctcaatagttgcccccctttttttttttttttggtggttttttaaacacaggggggtctcaacaaaatatttttccctattcattttttttttttactctacacttgaacatttgacgctttttaaattttttaccaccttttgtctcaaaaaaggacaacccaccattggatgttttaaacaaacttggccca

SEQ ID NO: 433459 - DNA, 313 bp, Oryza sativa
ggagttacataaaatatatggggaatgaaaccctcattacaatataacgccccacatacaaacacacaaactaatcacaccaaaaaaaaaaacatacgcacaaacaaaccacacacaaaaaaaaaaagaagcacacgcgcaaacaaaccgcacacaaacaaatgtcccaaaaaaaaagcacacgcacaaacaaaccaaaaaaaaaaagggacacgcgcaaacaaaccactcacaaacaaatgttaaaaaaaaagaaaagaaaaaaaagcccacgctcactttgaagccggtacacacatggcagtggtgacaa

SEQ ID NO: 433460 - DNA, 369 bp, Oryza sativa
  unsure (1)..(369): unsure at all n locations
ggttggttctcacacccattttctttttttttttttaccttttcccaaaaaaaaaaaaancccttcccttaatcaatcccacaacaaattcaaccccccaccctcctctnccccaattttgccaaaaacccaccccgtccccaaaaaaataaattcctccaaattcccccctttttttaccctggcccacaccccaaaccccccaagttgttggaaaattccccaaaacaatttccccccctttttaaaaaaacacccccaaaacaacaaaaaaaggccccccccccttttccctttttccccccccacactatacacaccgccggtgtgacaaacaccccccccccccaaaaaaatctcttttccttt

SEQ ID NO: 433461 - DNA, 353 bp, Oryza sativa
aaagctgcttcacattttttttttttttgatcgaattggtctctcgcttgcatttcactccatggatagacgtgcatgaggtttagtgtggtgattagttcttggatcttgaatcggcagctgatcaaatccgcgccgaaaggcggtggtcggcagcaacgcctggcgaaggggatggagaaggtcgcggttggcttgttgcccccgctgcggttcatcgccgtcctcgcccgcgtgtcgtggacgtcgttcatctactgccatttctccttgctcagcggcggactgctgctgggccactgcggccgccacaactgatccgacccgtgccgggtgaggtacatctacgtgca

SEQ ID NO: 433462 - DNA, 461 bp, Oryza sativa
atcttttgttgtctcgtgacgacggagactccatccgacccacttgtattggacgactcctctcgctccccgaggcggacgcggaccgcttcacccggccaatcaaaacgcggcatccatccccgcgtccgagctcgcgtaggctgcggctgctgcatccatggccgtcgcgaggctggtggccgctcgggcccttctcctctcccccgccgcggtggcggaggcacaccgatcgcccccggcgctgctgcggttggcgttcgcgccgatcccggcgcggtggctggccgtccccttgcgcgtggcggtgggtgagccggagccagaggaggatgcgcggagggcggcggcagagcgcgcggtgcggaagcaagcggagcggcggacgtacctggtggcagcggtgatgtgcagactagggatcacgtccatggtcgtccgcgtcgtatactaccggttcc

SEQ ID NO: 433463 - DNA, 316 bp, Oryza sativa
ccctccttcatcatgtatcctccacagtagtcgccctcctttttttttttttttgggggattctaaaaccatggggggaaacccatcaacacctaatccaatttttctattttctcaacaacaactcacacaacataaggactctaaaactcaacataacacaacccaaaaacacctgatatgactgaccacaaaaacatccaatcaccattaacacattttaaccaccagacacccacataaaccaccacggactttttttacaggaaacccacagtacattcttgttgacttcttacacaaagaaaaaacccac

SEQ ID NO: 433464 - DNA, 372 bp, Oryza sativa
gttatgagaaaaaaaaagacaggtccattttgttaaaacaccaattgtttacaagaaaaacaatgttttggaactttttaaaatactttgaaaaaggggtaaaaggggatccctttaatcgtaccccggaagttaacatgggcaaacaagaaaatctttttggaattaaaaaggggggctattttcttaaactttaaatggttaaaattctatgggacaaacctctttgaacctttttcccgttaaaaaccccggggagttttgcaaaaagccacaacccccccctttaaaaaccttttttgaaaaaaaggggggggaggaaaaaaaaaactattttttaagggggatttttgttaaaaaccctttaccctt

SEQ ID NO: 433465 - DNA, 553 bp, Oryza sativa
ggtccatcgtgcccattattagcaagatggacaggacctcgatccttggtgacaccatcgactacgtgaaggagctgacggagaggatcaaaaccctcgaggaggagatcggcgtcacgccggaggagctcgacctgttgaacacgatgaaggattcctccagcggcaacaacaacgagatgctcgtgaggaattccaccaagttcgatgtcgagaaccggggcagcgggaacacgaggatcgagatatgctgcccggcgaaccccggcgtgctgctgtcgacggtgagcgcgctggaggtgctggggctagagatcgagcagtgcgtcgtgagctgcttcagtgactatggcatgcaggcctcctgcttacaagaggacgggaagaggcaagttgtcagcaccgacgagatcaagcagacattgttcaagagcgcacgctatggcggaaggtgtctgtagctagctagctatacaatccattggacgcttagcactgggagcaggtacagggtgcataaatatgatcttcatcatccatgaataagaagtat

SEQ ID NO: 433466 - DNA, 217 bp, Oryza sativa
cttctcccccccccccctcattttctctctcctctttctctctctctcttcctcccaatctgcgaagcgagagagagagagagagagctcgaggcgagctctccccgcccttctcccaaaccctaatccttccgccgcgcggaggagagccgcgtctcgggcgcgcgcgtggaggcgtgaagcgatctgtattggtggaggggaggggaggggatgg

SEQ ID NO: 433467 - DNA, 417 bp, Oryza sativa
aacgtttttcaaccgctctaaaccaaaccatggtgcgccacagtgaccggctaggcgacgtcgcggtgttactcctgctcctgataaactcctgcgccaaactgggtccatcgtagccagaggaagatgagcaccgctgcattgagcagggtgtctgtctagcgtgaggagggggaaccacagcttgacggagcggggtacttaacgggcgtggagggggctgacagcgggaacaaccaggacgagaataagcaggcgtaccgtaaggacgacaacaccgtcaaccttcgacaccaaaaggggtctcgcaggtctgtacagcaacgcgatgcaggacgaaactaaataaggtgggcccagcctgggtaaacgacgcgaccgttaacttggactacggggaccaatgaatggaaggac

SEQ ID NO: 433468 - DNA, 341 bp, Oryza sativa
ggggacccccaaaaaaaaaaaaaccggggtttaaaaaaaaaaaatttcccggaaaaaaaaaagctcaaaaataaaaagggtttttaaaattttaaaaattaaaaaagggggcaaatatacaagggcaacttttttaaaaaaaggtttagggggaaaaggaaccctttttaaaaacgggaaaaaaattgggttttaaaggaaaccctttgaacaaaataaaagggaaaaaaaatagggggggcgtttcccccccaactaaaaaaaaatggacctttgaaaccaaaaaggggtttggaatccaatagacccggaaaacccttttggggaaaaggcttttgccc

SEQ ID NO: 433469 - DNA, 474 bp, Oryza sativa
ggggaattgtttattttttgtgggtacaaatttttttaattcattttttttttttttttttttttaggggaacaacccaccgggcaaaaaaacaaatttttggggggggacaaataacccccaacggtatacccgggggaacacaataaaggggctaaactactaaacgggggggcacaccggggcccaagagggaatgggttacggggggaaacccccccccccccccccgggggcaaattcggggccaaaacccccaaaagggccccccccggggccaaaccccccaaagggggccaaccccggggggcccccccccaggggggcggggtaccccccaaaaaggcccccggggggggggtttccgccaaaagccgttttgggttccccccccccgggggggcccggggggtttccccgggtcccccaaacctagggggggatgaaccccggcggcggaacccccacgggggg

SEQ ID NO: 433470 - DNA, 123 bp, Oryza sativa
gtttttgtcttcttcctcctccacctccacttgatcccagcatccgcatccgcagctgcagcagcagcggcgaggtggaggtagctagatccgtgggaggtggtggttgtggtggtgaggggg

SEQ ID NO: 433471 - DNA, 475 bp, Oryza sativa
gtgacaagttttgagttttccaaaatatgtttaaattcatcaaaaatgcatttaaatttgaatatgcaaggtgggtaaactcgttttcttttcctcacaaagttttatctctcaatttgaaggaaacatattaaaaaaatggttagagtttctttcgggaaaaaaaccacaaattagagtgtcctatggtaaagccataaaactagagtgtcttagataaaatgtcacaaaactagatcaagtgtgctagagtgttacattagttatttcaaaccgcatatgtctgttatatggtaggcatggataaaagattactgttatgttgggatacttgatgttcaatacagatattgatgagtgtcaactccgaacacttgctatggtcgctgccggaatagcccggtttctttgaaagttggtgtccaagggtattccaggctgatcattcaggaacgtgcacccaaatttcctttcc

SEQ ID NO: 433472 - DNA, 324 bp, Oryza sativa
aaaaaaaaaaaaaagggtttttatataaatgggggaaaaaaaaaaaaaaaaataaaaaaaatgaaaagggaagggggaaaaaaaaaaaaaggggaaaaaaaaattaaaatttaaacaaaacccaaaaaattttatcgggaaaaaaacccaaaaaaagggagagggggggaatttcaaaaaaagggcccctttggagaaaaccaaaaaaaaaaaggagggccttatttggaccaaaaaaaaaggaaaacccaaaaaggggggggcaaaaaaaaaaaaaggtcaaaattaatgtccttaaaaaaaaaaaaacttaaaaagggaaaa

SEQ ID NO: 433473 - DNA, 474 bp, Oryza sativa
cacgccgcgacgcaggtatggctcctgatgtagttgccctcctttttttttttttttggggaaatgtgtattctggggggcaacaaattgcatcaatacaacttacaaattacaaaaatgaaaaggtgaagatataagcagaagaaaaatagaatgaaatgaaggaattatatataatcggataataatacttggacgacatcaatgtcggataacaacgtataaataggcgatcaaaacgggatatatatatgtatgtgtttaccggcgcgaggacccaaacgcacgtaggggaaataataagcggacataaaccccataaatggtcccctattaacccatggccatcatatggtgcctgccctgggggtgccccaggcaacgggcccggggaccccactaaaaaccccccgggggccggtttgtccccaagaaaccgccttggctcccgccccgccccgggggccggggggg

SEQ ID NO: 433474 - DNA, 425 bp, Oryza sativa
cacattgtcgcccttctttttttttttttaaggaggcctctaaaaaagtgggtgtttcctcttataaacgcaagtccaacaaagccacaaggcgccctctattcaaagagatcggcatcatgaacaatatcgactctcttcagctgtaggaaacaacatatgcaattagctgctatattcttcctcttatttgaccaggacagctacaaggtgtcgtaatatccacaagaagaaatgctgcctcataaaagagtgtacaaggcccccggttccccctaataaaatcttctgtgtccatcgttgcatacaggcccatttgtttaatttccaagcatagcaagtgttcatcgcttggagaacagaccttgagttaatgatgaaaaatcatattctctgcctgattgagaggggagggaagaagaggt

SEQ ID NO: 433475 - DNA, 126 bp, Oryza sativa
ctactaatccgcctcctcccccaacgcatcgccggagcccatccatccagatgcctcccttctcctcctactccacttgctccacccccgatgccgcccagatgcgatgcccccccggcgcgatcg

SEQ ID NO: 433476 - DNA, 400 bp, Oryza sativa
cttttatttgatcctctcctctcctccatcgccgggcgggacacccgccgtccgcctgcgaccccctcctgctcggcgtcagcattcttgggcgggtttcggtttcttggggtcgtcgtcgtagcggccaccgagaggggatcaagaagctgaggatcgcggtggggcaacgaggattggaggcgcgtctgccctgatcacggcgcattttatgggtgaagaggcttcggagttttctgtcgagagcgtctccttggaatccaaggactgtctgcagaatgccatagatataggcaataagacgtatgttattaacagatcagatgaccccaagttattgattaccatcaaaattttggacaaactaactcagacttggggtgtccctacagcactttgg

SEQ ID NO: 433477 - DNA, 230 bp, Oryza sativa
cggtccggaatttctggcaaactatatcacgtttgattatgcccgtgtaaaagctgtggaactgggggtatttgatgctcagctgagcgcgcttcatccctgcccaacgggcaacatcaccatccttttgctcacagaatacacaatatagctattattttaccttgaaaagattccaaagcagctgtgcgtgctactgctggcctgcctggcaacactagcagttgttt

SEQ ID NO: 433478 - DNA, 104 bp, Oryza sativa
ctaatactcatcctggagaagataccaatccttggggggcatttgtggaggcttctcaagactgccctgaaggcactaactatgcgtgggttggggagcgccca

SEQ ID NO: 433479 - DNA, 328 bp, Oryza sativa
cttttatcccctcttcgcctcgcggggcgggggccggaggaggaggaggagggcggcctgacgctacggcgtacgggcggaggaggacggagagggaggggccgacggctcgccgccgtcatggagaaggttagtcatctgatgaacggtggctgcggcggcgtggggaagaggaggggcctttcggcggcgggggtggggctagggctgtagaagcagaattcgtggtcgtcggacatggagagggacgaggcgttggagtggcagcgcggtatgaacaagggatcgttgtcgttgtcggttctgtcgcaggtgaggagcgttacgg

SEQ ID NO: 433480 - DNA, 435 bp, Oryza sativa
gccgaccaaagcacgcggttaggcaaatcgacgaacacatggcggccatggccatggaccacgaccacgaccacgcctcgtcgccggcgccgcccgcgaggctccccgcgccgccgtaccaccactccccttctgctgctgctgctgcggcggtggaggaggtcgcgacgccgccgcggaagtccgcggcgggggcgggggcgcagaggtcgtcgcccatgccgtcgccgctgcagctgtcggggtgctcgctgcaggagctcctcctgatgtccccgccgcccgggtcggcgcgccgcaactggtcgcggcatcgcggggctgggttggacgagagcctggagatggtggcggcgccggcggcggggacgccgccgaggcggaggcggcgcgtggccgcggagcaatgcgcggcgcccgcggtggcgtcgccca

SEQ ID NO: 433481 - DNA, 133 bp, Oryza sativa
cttcatcccctcctcctcctctccccgccgacgacggggccgagctacatctccgccgtgctgatcgcgtggagccgaggagaggagcggcggccaacgctacgaggagaggagagtgggggaggggagggga

SEQ ID NO: 433482 - DNA, 373 bp, Oryza sativa
gttatttaagcgggggctcccgaccggcagcccaggacaaactgtatatggtctgagcgacaggatggttcggggtgcgatggctgctgcagaccagagctggcgagcgacagatgcttaacatgcgaccagctacggaagcagttatgggccggcacatggagcgaggtgatgatggacttcctctccggaaggaaaacgacgcaacagcatgagactaccggaggcacgctaacgctgtgaatgttgtggacatgggtggtggcctccaccggaaggatgaaatggagaggagagatgttatgtcaagaggggtgacatccacggacccgaagctgatgatgttgaggctgatgctgtctctaacgaagca

SEQ ID NO: 433483 - DNA, 97 bp, Oryza sativa
tatatccaccgccgtccttctcctctctcccgcgatcaccgtccacgccacccaccaccatggcctcctccgcatacgaatttcccgacgatgccta

SEQ ID NO: 433484 - DNA, 485 bp, Oryza sativa
  unsure (1)..(485): unsure at all n locations
tatgactgacctaaccattatccaattgaatctagcataaccggagaagtggcaaacattgctattgctatcaacaaaaagccattgcctttattaggttcctgccatgtgtgaactccggaagccaggatcggctagtcatttgttcttacactagatttggatatcaccagtattacttcgaaacaagcacgtcttatacagatcagactaccagttttgttctgcttctgctgcaagaacgccatcgacaacatcaacggcgtagccagaaacctgaatggcccggcactcatcggctccggaaagctcgccttcggcgccaccaaggtcgaccgctacaacagcgtcaacctccccgtcgacaacaacaacaacaacaagttctacggcggcgccgccaagatcaacaacaacaacgtcaacgccttcgggatcaacaagatggggngttacaacaacaacagcaacggcggcggcaacta

SEQ ID NO: 433485 - DNA, 122 bp, Oryza sativa
caagtacgcgagcggccgccctattaaattatttgtggtgatattaaatttttatttgggcgacacaccacacacggccacaaacacaaccaccaatacaaaaaagcaaacaacaaccaacc

SEQ ID NO: 433486 - DNA, 129 bp, Oryza sativa
  unsure (1)..(129): unsure at all n locations
taatgnagcctgcgagcgtccagtcttggtacggtggattgattttgcaccaagacgggaccaccgcctgaagcctcggacattcttgtatctgtagaatcgaaggggcaccttaagtggcttattact

SEQ ID NO: 433487 - DNA, 316 bp, Oryza sativa
aatatttatcaaaagaaggcagatacaaggggggggggctcaactctgcacgccacccatttgcatcccaagctcgaggaaccgacccatcaaactatgcctgtgactatgcaaacgcattttggccgtccctccttgcatatgatagcacctggctagactgggtacatggcaacagtggctaaactgaaagaccccgctaacaagtggcggtgatgtagctgctacttttactcaattgatgagagtcaagaggcattcgctaggtcctggaataattcactataggaaagcctgctatccatccttctacatt

SEQ ID NO: 433488 - DNA, 352 bp, Oryza sativa
ttctttttctgctcctcccctctccgccgcctcgcgctcaagccctcctcctcccgcgccgccgccgccgccgccatgtcgtccgcccccgccaccgccatcgccgcgccggtcgagcacatcgtgctcatcaaggtccgccccgaggcggcggcgtcgggcgccgccgcggcgatggcgtcctcgctgcaggcgctgtccagcgtggtgcccgggctgtcgtacattcacgtgggccccgcgctccggctgaggtcgccgggaggtgcggccctggggggaggacatgttcgccactcgcgctacgccaccaagcccgacctggcggcttacgcagcgcaccgggcgcacg

SEQ ID NO: 433489 - DNA, 458 bp, Oryza sativa
cgagctcacgctacactacacagcctggggcgctgtagcgcacagggggggatgctaacttgaggactaccatgggatggatgaggttgcgctgcagggggtgagctcttatggtctctacctatgctcatggaaacgtgtgtgccggtcctggcgatggatcgagccggcatgttaaggagaatactatcactcaaggcaatggataccgcgcaagaactccaatcacaagatcaacgcagtgggacgaaacttggatggccctgggccaagctgcatccgcaagattgccttgtgaacgaccgaggccgagcggtgcaacatggcaacactacccgcatacaacaacaacaacgactagtactatagcatgaacctccatgaggagcaacgacgacgtcaacgtgttcagggtcaacaagataggaggttgcaccaacagcgtcacctgtggcggc

SEQ ID NO: 433490 - DNA, 434 bp, Oryza sativa
ctttattgacccggccggaatctcttcctgctgctcggaatagatcgcgaaatactaaccaacagcatctaccctttattgttactaatcaaatctctaacccgcctgaacctcctggaggaaaagaagtcattaccttcaatggttctcgtaatatctttatacataagataatggaagtctcaacaagctcagagtcatcatctggatctaattctttgtcatcatcaccaaagaacaatatttttcctttatatggaccaatgctcaaatcctcacctcttatccctacagatatgatgaggataacagaaatcaagagtatatgaaaacctcttgatcctgacgagatcatccaaaaattatcttaacaacaaaaatttcaactctgaataatcgcaactattatttttataataataagcgaatgaagg

SEQ ID NO: 433491 - DNA, 255 bp, Oryza sativa
cttcatatccgtgccgactgcatatacccgccacgggctacttctcctccgactgtgagtttttgctcttccttgatctttggcccgcgagctgatatctgcagattgcaacccagaagagaaaaaaaacgaaccgagttttattttaggtcggcgggcggctaaagaaagaagggagctttttgggtaaaaatttagacttgtttttttttccttcgctggatggggctggggttttcagggatggggggaaag

SEQ ID NO: 433492 - DNA, 285 bp, Oryza sativa
cagaggtggacatccgaatatctctggcaaacaaaaaaaaaggaagggatgtgaagtttacatgcagggacgcttattgaaaaggtcaaggagctctgctcttcctgaggccaaattctacgaaagcatgtggaaggagatgaccaagcacacagccgaagacggcaaagctggatctggagctgaatcgaagcaaggatcggaacctgttactgctgcctaaggacaggacactcacgacatatcttagattttgcgtgctggctaatctttgtcctattgtaa

SEQ ID NO: 433493 - DNA, 360 bp, Oryza sativa
gcttgtgaacaccgacccgcatcgcatctgatcggggtccgcttaatcctcgacctcggtatcagccgcagcaagggaagggtaggaatcctcgcccaaaaggccgtcgtctacccttgcggattcagaccaggattttctatgtacgtgtctggtcgactccggcacggtggacgcttccgtctccgggatcgcggggaccaccggagcctgagggacgttccatggctaacaggaccgttgcaaagagcctgccacggtgcgctgaaccaggactcctcgccgcccacgacacaatactggctgcacgtttacctcggccagggcttttacatcgtaacctacagactttggacctac

SEQ ID NO: 433494 - DNA, 189 bp, Oryza sativa
aatctctctgccaaacaaaaaaaaaggaaaaaaaaccaccgcttttcgcagtgcgcttcttctctctccctctctgctctgctcttcctgagctccgcggcaaggaagcttctggaaggctctgcgggatgacgacgagcagctggggtggtggtggtggtggtggcggtggcaccaagcttctgtcaa

SEQ ID NO: 433495 - DNA, 454 bp, Oryza sativa
tcttgtacaagcactccatcaaaactaagctagctactacaagtcctagggcttttgctacctatagctagctagcttccggtcagaagaagctaaggagaattagaagctatgtctacctagcttggaggaagaagaagaagaggaggagggattgcggcgcgatcgatcgacacgcgtcgtctaccgataaattcctcgcaaaatcaatcgatatcatatcgatcgagtctagaggtgatgagatcagatgtgaagtacttgaggagctgatttggtgataggatcgatttaattgctagctgaggtgatcatcatcaaggagaagaaagagatagtttatttgctactggggatcagtgtgtttgcatgggggataggccatggcagcagcagctgcagccacatgatcagcaggcggcttcttgctcagtcacggccgggatgatgatgc

SEQ ID NO: 433496 - DNA, 109 bp, Oryza sativa
tgataattaacgacacgagctgcgacaagcggggggactttataaacctaaagggcgcatgctacccggcagatgcaaggtgggcgaactagtatctattgccacacag

SEQ ID NO: 433497 - DNA, 82 bp, Oryza sativa
tataagttgagaggtacatcatgttgtaacactagtggtacagacaggccttttgaattagaaggcgatcattcagagcctc

SEQ ID NO: 433498 - DNA, 497 bp, Oryza sativa
ttttctttttttttttctttttttttccaatggaatctgtacaaatattattatgcaaaggattgttttctggaagtaaagaaaccgggcaggacacatgtaaatagatgcatcaagacacgatacgtcttaaaaaggtttgtctattagctcttgaataaaaagtgaagaatgtgtttgatagaaatgattctgcaggcggattgttcttcatgtacctttgtttggttttagtataattggcggggttgttcacagagtcagtggacaaaaaaaatatatagcagaacacagctgcttatccaaatgagattttgatgactggaaaatagcttctgagcaatacaatgccggactagtggtcatagaagcatcagtgaaagtggcatcacatattcatttatgttagctaaggtccaatgtttgcctcacattgtggtatctgccatgtgcccatgcctgaaaacgaaaatggatgaatgtagtcagtgagatgc

SEQ ID NO: 433499 - DNA, 317 bp, Oryza sativa
aaacaaataaacagttttgaatgtggtgtgcattttatctctaagcacttcggtccccccggtacaattggttaattctcagttcttgaaagccatagctataaactagtatcaagaactctcatccattttcgaagattcctcgacgcccttgaaagtaacacgcagcttcctcagagaggatactttcttcccgttgttttctgccattccagttacatgcacagtcgtgcgtgcagctcctttgagtagctcaaacattgggacacccaggtttggtcgggtcatctgctctaggacttcaggtgcctgcatgt

SEQ ID NO: 433500 - DNA, 117 bp, Oryza sativa
ctgtccatcaccttgtttcttggagaactcctccaggaaagaaggtgatggacagaaaataaaaaaaaaatcccccctttttgttcacttcctgctactatacacaacaaaagctca

SEQ ID NO: 433501 - DNA, 369 bp, Oryza sativa
acgtgcactgcaccgtaacgtaagcatcgctattactgtaggagcggcctgtggtgtactacttttaccaccacaggtgtgcccggaaccgagggccttatcggtgcgcggatggcatgaaaaaactgtaccaattgcttgcaggttacctgattatcatatagaacgacaattggaaatggacaatggcttatgagagcgatcaacgatgggaatccagcatctaggattacagaatcacatagaaactgaacatattgtgaactttgtaacaattcgtagaacaaggatggctagacacgcgactagcggtgcatgactcacagctggtttagcccgtcaagcaagcatgagctgaaccgagccatg

SEQ ID NO: 433502 - DNA, 376 bp, Oryza sativa
ggggcgaattcttacatattcacttctgcaagcagctagctttacaaataatctcaagcacatttgagaatgagataatctaaacaatggctacgttacaagtagaatccaaaaatcttaataagggtcaagcttgactatctgttgaaatctgcaaagcttctatactactccatctagctgttgagagagagagccttcaggctcgggcaatcttcgacgcacggggtggatggcatgatgcacccagggcacgacatcacgccgttttcccatggcgcggcggccaggccggtgaggtcctcgcggcagatcgggcagggggtccccttgaacagccccctggtgatgcacggcgggtggaacgcgtgccccc

SEQ ID NO: 433503 - DNA, 359 bp, Oryza sativa
atcaatatatatgcgtggatatcgatattatatcatctatcaataaatgtcaggaagcaagattatccttgcttgccatacaaagaattcgctgcaacattttagctacagttgcttaacaatgcgaatagcagaaatgggatgctaggagtacaatcttctcaacttctcaagcttgtcaaaagaattggggctcaataatctgaacaccacatgtatccttggctctcatctgattctcatcagtttatcagctgtcaccccttcgtgacatgaaactgatccccaattcaagttcagagaggcctggtccggcgccccgaggcccgaccgcagaggagcgcgttctttgggatcgg

SEQ ID NO: 433504 - DNA, 129 bp, Oryza sativa
  unsure (1)..(129): unsure at all n locations
tttaataagaatggagnatnattggcaccaacatgaggcacgctgcagctcatgccgaaaggctgcgttattaaaatgtacacattcgccatacaaaagattttaaagtaaacagctagacatttgatt

SEQ ID NO: 433505 - DNA, 493 bp, Oryza sativa
ataaaacaaaacaacctttttttttttaaaattttttaatataatttaaatattattttttataattttttaatttttttttttaaaaaatgaaccaaaaaaaatttaaaaaaagagaaaacaattttaaaaaaaaagggctgtttgaaaaaaatcaaaaaccaaaaaaaaaatccaaaaaaaaaaatgagaaaatattaaaaaaaaaattccaaaaaatttaaaaaaaatattgaaaaaaaattcaaacaaaaatcaaaatcaaaaatttaggggaaaaaaaaaaaaattttttgaaaaaaaaaataaaaaattaaaaaaaaaagaaaaaaataaaaaattaaaaatctttccaaaaaaaaaagcctaaaaaaaaaaaaacccgcaaaaaaatttaaaaatctcaaaataaaaagtaaaaaaaaaaaaaatgtaagggggtaaaaaaaccaaaaaaaaagtttttaaaaagagaaaaaaaatttttggaatt

SEQ ID NO: 433506 - DNA, 263 bp, Oryza sativa
ggcaacgttgtccctttatttaaaagtataatccttgtgcatatatactccgtacaaaccacacattatatgacaataatatattacgaattcttattgcaccgacacgcatatatatcatcagaatatcagaacctttagcccgctggcactgcccggattactgcaatttaatttcgcttgatatttccaaaggggatcgcgtaaaactgggctcagcgtggacgaggtggttacatcgggcttcttttgacaaaccggcg

SEQ ID NO: 433507 - DNA, 237 bp, Oryza sativa
gaggatcaccacgatgctgcaccctcgttgcttggctcttttggccgccgcctttttttttgtttttttttttttttcttttttttttttttttttggttcaagagagaaaaaaataacccttcatgattccgtttggaaaaccaaagggttcacaatttcttggaagattcccatggggcacttacctggacccgggtgaaggggccaaagagacccctctcaattttacagcgcg

SEQ ID NO: 433508 - DNA, 304 bp, Oryza sativa
gggacccaaacaaaaaacccttctttattaaaacccaaaacattctttaaaagagtagtaaaaaaagaccatagagcagcagcagattaaagccttgaaattttcaaagcagccaagagaagaaaaaaggtgaagactttttggggccaaccacagtttaggtcaaagctcactttcccatgggggggggttcgttcaatcctggaacatgggcccggggggggggcaggggatctgccatggccggagcaacgggtcgctgggggggcactcccccgggatgtccagggggacccccctaaac

SEQ ID NO: 433509 - DNA, 596 bp, Oryza sativa
aacactatagaaaaaaaatccaaatcacatacacacatacataaactagaaataccactaaaaaaaacaaccttaatatttttttattatttaaatttttttatattttattttttattttatttatatttttttttttttaaaatgaaccaaaaaaaatttaaaaaaaggaacaacaatttaaaaaaaaaaggcctttttaaaaaaaatcaaaatccaaaaaaaaaacccaaaaattaaattgaaaaaaataaaaaaaaccaaatcaaaaaatttaaaaaaaaataaaaaaaattaaacaaaaaacaaaccaaaatttggggaaaaacaaaaatgtttaaactaaaaaattaaaaacaaaaaaaaaataaaaaattaaaaaaaaaaaatcttaacaaaaaaaaaaccctaaaaaataaaaaaccccgaaaaaagttaaaaaaccaaaaaaaaaaataaaagaaaaataaataaaaagggaccccctaaaaaaaaaaaaaaaaaaacccaaaaaaaaataaaaataaaaaaaaaaaaaaaaaaacccaaaataaaaaaactttccacacttttaaaaaaaaaaattttaccaagag

SEQ ID NO: 433510 - DNA, 237 bp, Oryza sativa
tcgcggccgcgcccgcgccggcggcgtcgttccggaggcgggacaggtggttccacctgccgctccacgcgccgccgccgccggcgtcggccgagcatctgccggagccgtcccccggggagccgctcgtggtggatgtctacctgaccccgtcgggcggcggtgggggagctgaggcggtggtggagaggtggacggtgtcgtgcgagccgtggtcggccggggcgaggggcggcg

SEQ ID NO: 433511 - DNA, 415 bp, Oryza sativa
ttttgtttttttttttttttttttttttttttttttttttttttttttttttttttttagggggtcaaaaaccaaaacccccgtttacatgggtaaaaaaaagattgttattacatttgggccttccacaataatgataactaccctggtgcctcgatctcatgggatcctggcacaaaaaccgcattaatgggttctaatggcaaaaaaaaatttacagggtgaactgaaatacagattccacgtttgtcccgtcccgcttaagattaacatagtccaacctggcattttttatggaggtgtttttttctccgtttccacagttcccttggggggaaactaaaacatttttaacagttacaagacagcaggctcaataagggcggtttcgccaatcaacccttgatctggtact

SEQ ID NO: 433512 - DNA, 440 bp, Oryza sativa
ggttcatgccaaaatttatactccggcatcatgccacagaaaatgtactctcttttttctagtttggagggacaactccagaggtcacagttattaaaatccatagttacaaccaggtccaaccggaacgcagcacaccgaaaggctgcaacaatctcaccttctgttcttgagatttctttaaccaattcatggcagcttccagtaagcatcaaggcatcaaccactgattctaccagtatgcttcaatggctgtagcgatcaattcatggttcattccagccacagatcatagcagattttgtcacccccagaaactcagatatggtttcttgaaggagatcctcatgtaccattttcccgacctcactagcaacaagatcgatgccatctttagaaccaacccaccccaagtccatgaataggcccttatgagcata

SEQ ID NO: 433513 - DNA, 415 bp, Oryza sativa
ttttttttatattttttttttttttttatttttttttttttattatttttttttttttttataatttttatattttttttttttgaaaaaaaaaaaaaaattaaaaaactcgtaaaaaaaaaaaacaaaacctaaaaaaaaccactgaaggaaacccaaaaaaacaaaaaaaaaaaaaaaaaaaaaaaaaacttaaaaaaaaaaaaaaaaaaaaggaaagaaaaagttgggcgggaaaaaaaaaatttaaaaaaaccctggggaaaaaaaacgggaaaaaaaaaagtttggaaaaaaaagggggcaaaaaattaaacaaaaacccttaaaaaaaactttcgggaaaaaaaaaacttttaaaaaaaccaaaaaaagggaaaaaatcctcaaaaaaaaaagaaaaacccttttttcc

SEQ ID NO: 433514 - DNA, 180 bp, Oryza sativa
tgggcggccggcctttcttttgtttggttttactctaatgctgcaagaattacaattattttgaacaggatgtttgtcaaacaccacaaacagctggtggcaggcaaataaaaagaattgccttgagaatgtatgctgaaagaggacaacattagagcacgaacgcttaaagtgtaaaac

SEQ ID NO: 433515 - DNA, 343 bp, Oryza sativa
ccccacaaaaaaatgtaaacaaggggaagaagcccgggggggcccctggggggggggggaaaacggggcacccccagcgaaaggggggggggacccccttggtttgttaccccccccctggtctgggaaggggcccggaccatggccccggggaggagggcggacctttccctgggggttatgggggggcccccaaaacccagctggcccctggggggtttttggggggagggggcccccccggggggggaattgccccccctgaaagggaaccccctgggccactggttaaagaaggggaaccctcaccgtgggcgggggtttaaaaaaaaaaagtgggggc

SEQ ID NO: 433516 - DNA, 318 bp, Oryza sativa
ttttttgtttttgaaaattaaagagtttctttattgattattacaataaacgcagtaatgtaccactattctaccacttgcatttagaaaccacaccagagagtacttgatttgccagagcactaatccttcatctatagagtcattacagtctgacagcagcatgactctcttatcaccacgagtccatgacctaacactatgcataatcaacactaaaccaccatgaacatttatctaaagtctaaacagcaactttcctaatccatttccagtgatgatgagatgacatgggcaaagaaccaggaacagagagag

SEQ ID NO: 433517 - DNA, 354 bp, Oryza sativa
agagacacaaaaaccaccgttagtatttccagactaattatagacggagggggcagacagcaagcccacgctccgatgctccccaagaccactaatgaagaccgcacgatactaggacaggaacacccggcaggcaagccatgagcccaacacactattttacgatactcgaatgatgggcaccaggcccacacacgcacagcacaactgtgtgtccacctttaatgccaaatggcatacctgcactatggcttccatcagtggctcaccctactgaacaggcactgggcacatgagccggtgcgccaactaagacgtgctggacagggttatgagcccatcgaaccctggagg

SEQ ID NO: 433518 - DNA, 219 bp, Oryza sativa
aaataatataacgtgataaaaacaataaagttagttagactttattcttttatcggattaaaattaataaaaagaactaccaatttattaaattttaatcaggaaaaatcttattaaatctagcaggtttaataagacccaaaggttgctatattatggtttttttatttttttttgtcaatgatttttatataatatattatatatacatgaatatta

SEQ ID NO: 433519 - DNA, 369 bp, Oryza sativa
gaataaatacgatttttaattgatttttacgttttttctttgttttgatctacaattaaatttgttatcactacaaataaacctgatcttgaactatataaaaacccttggaatacatttttttctatgagagcacttaacgatgacgacgacgacgttatcaacaacaatttctttttgactaaatcctatataaccaactgctttggctctggctcctcattgatcaactaaactctaaaacttaacaaaaatattaagcgtttaagatttctttttttgtagtctacttttaggcgattcaattttcaagtcaattgtctttgttttgttattttgaatggattttcggtttttttttgtttggtt

SEQ ID NO: 433520 - DNA, 333 bp, Oryza sativa
cccaagaacaaagctggtaacaccaaatttcacaaatacatttcaaacagattaacagatcaacaatgacatagcttccaaaaggaaataaggcaaaaaaaaattaactctcacaagttaaaaatgaaatagagaacacatgttacgcaaggagggagcacatgcacaaatgaagaatagacttggacgactcccatccacagtgtcctgatttacaaggtactccagcaacgattagaatccaatctttacattagggattttctttactctctgggcgcccgtgttcctgcaccaactctccagatccggacattcacttaatgtcagata

SEQ ID NO: 433521 - DNA, 126 bp, Oryza sativa
tttttgttttttttttttttggggccaaactttgaattattacagttcatggataatacagttgcagcaacattattcgagcagtacagaacctcaaacaatttcattttcgtgctgcctaatcgc

SEQ ID NO: 433522 - DNA, 303 bp, Oryza sativa
ttttttttttttttttttttttttttttttttttttttttttttttttttttttttttttttttttgggaccaattaacgtagggtttagttaacaaggaccccctgttttattgtttttacgaaattgtttagaaaaacagggggggccctacctacttttactatttattatgaccccaacttttttttttttgcaaacccactaccctttttaacattttgatttattaaaaattcctaccctggtttcacaaaataatgtcttaaacttggggaaccccttaacttgggggtgcttttg

SEQ ID NO: 433523 - DNA, 249 bp, Oryza sativa
tgctttcccctccctgccccaaatgctcccggccacctccaccgtcccacccacctcgccccttccccactcccgcgctgccccgcgccgccacctccgcgcagggcttctccacgggtccgtggcgacggcggcggtggttcgggcgtgcggggtgacgacgggccaccgtcggaggatgggctcggttcgggcgagccccagggcaggcggatgggaggtggcgatggcggataaggagggggtagg

SEQ ID NO: 433524 - DNA, 134 bp, Oryza sativa
tgttgtttttttaaaccaacggttcgatttataacctcaagaaggcacggcctggtaaatgatgatagaaacaacaatgattcaggcacatgaacatgtttaagccacgaataatgaagggggagaaatgaaat

SEQ ID NO: 433525 - DNA, 181 bp, Oryza sativa
  unsure (1)..(181): unsure at all n locations
ctagggtatgcgcatctctatgtgaccgccccgttctttttttttttttttactgtccatgaccttntttnttggagaactccttcaggaaagaaggtgatggacagaaaataaaaaaaaactccccactttttgttcacttgctgctactatacacaacaaaagttcaacccaaaaataa

SEQ ID NO: 433526 - DNA, 413 bp, Oryza sativa
caagcgacgccgcaagtttctaagcagcagcagcagattcgtccgcgtcgctctgtctgacagtgtgggccctccccgagatgcaggcgtggttctccggcacggggccctccgcctcgtcggcgtcgtcgtcgtcgtcgccgccgcagccgtcgctgctcgcggaatggaactcctacgccgccgcgcgctccgcggaggaggaggaggacggcggcgggggaggcttcgggatcgacatcgaggccgccgtccgctccgccaacgaccgcgtctccggcaccttcggcgtggtatctaaaggtgttctagggttgccaggcagcttcaagtccacaacaagcagtgttccatcgagcaaatcacttgtgtattttggcctttttcttgctagtggaatattcctagttttc

SEQ ID NO: 433527 - DNA, 79 bp, Oryza sativa
aacaaaaagactgaaaaaagaagtctattacccaaattttcttttctgtgggggaccccggggccaaaaaaacaaaacc

SEQ ID NO: 433528 - DNA, 330 bp, Oryza sativa
cccctgaaatattggtctcatttaatgacatgctgccaaccctgaaacaaattgccagcgcgtccatgtttcgttaacagtggcaggaaattcccaaatttgttcagttttgagcaagcttgcatgagaaacccaggtttccataactcgtacaatcctacacggtcttgtgcactaaaattttttcaggtttactaaaaattgtttcaattgcatacattttgtagatttcagcacaatttaaaggcctttaaggaccaccaaattaccaccggtaaattcctggtttcttagtccggcaaaggccgagcgtttaatcgtacttggaag

SEQ ID NO: 433529 - DNA, 315 bp, Oryza sativa
tttgattgcaagaaggatatcttgctgggagttgtgagctaattaaatcttctaacattgaaagggagacaacgcacattaccacatccttcattggttacaagccataccttgcggcgctcactagagtccatgtgaactacatgcttggcggcttgtacaagcaggtgaacatcaggatggcgcatgtaacatccttgcagaccctatgacgctttaagtaccaccaatgactctggatgttatatgactttcattgaagaggatttgacagtaacataggcctgcttaagatcacgaccacctaattctact

SEQ ID NO: 433530 - DNA, 334 bp, Oryza sativa
gacagggaaaaacaaccaactttttcctccaaaacagcatgtatggggttttgggacaccttttagaaacatttgggggggtaaaacagacaagcgaccgaccgaacgacccctatttttccctatcctaaaggggacgaactttttgttgggtttaagcttacaattgcaatacaattttacaacccattggactgctgtggcaccagatttttttaaatggtctatccaataaaagactctgtgcaaaatttccacggacatacaaattattggcgatggaattgaccctaaaccctcatagtaggggacccgaggggggcggggcctttgg

SEQ ID NO: 433531 - DNA, 293 bp, Oryza sativa
gtgccctcctctcctctcctaccctcttcttcctcctcctcctcctcgcctcccaccaaaccctagcacgagcagcccaatccatctccagcctcacgagctccagttcggagcagcctcgcggtgggacgagtcgccagttggggagctcggaggaggtgaggccgtggttgggggttgggaagggggggaaggccaacaaatggcggagatggaggagggcatggtggcggcggatggccgagcggtcgctggggtctacaagatgcttagtactaagttgcacctgttgc

SEQ ID NO: 433532 - DNA, 355 bp, Oryza sativa
ggggtcaacatctttttaaatatataaatttgatacatgaaaatcatacatgtcgattttgcatcaaaaagcactttcctagtataacacattgagcgagttctattaagtattttacattgtatattagtgatcaaagttgtatttgagagaacatattgatgcccaaaatgaagtctatttgcgactttgagggactacaagtatgtacagtaaacataagatcaatcatagcatccaatctacttctaataaatggtcaagacaaaaaaagcgcttaccataatctggcaaaactcttctttacatttaccagcagtcaaatgccatccaacatataagtgccagtttccca

SEQ ID NO: 433533 - DNA, 487 bp, Oryza sativa
ttcaacctcttttgtcaactaggtcaatctgtttgtccatgccttttgttgtactgtacagctgtgctcttgaaatgttctcttttacagatgtacaatggtttcaattttcttttcctttcagtgaagtagaaaggcacaattttattgaaaaatattgttatgtgcagggatagtattcatgtggacctgctggtttgctattagttggaaatttgagataagaatagtttgtttccttattagttggggtttcctctttgtacatatctcctaggtattagaggagctaatcttagagagagagattctctttgcagtagtcattccaataaaaaattagcacatagccattagaaattaagcaatgtagatgaatcaatctggcctctctcccacaagtttttcattccaacctatagtcttctcttataccaaccaagtcaatgctaccctgtcaccctttaagtggtgtttggccataaca

SEQ ID NO: 433534 - DNA, 448 bp, Oryza sativa
agattaagtccgttttggattagtaatccgaatggtgctttaggaaagttcgtgatcagagacaaaagaattggagcggaaaatgtgcaagagcaccatcatttctcttgatggaaccattgtatttaatcagtctactcacattcccttggccacaaaataagcctccctcaaatgaaccttttgctatcagaacgactaatctaaggtttacatcatattcgtatatacccaagacaagagaaagagaaacgtatcatggcaaaagaaaaaaaaaacgaggaagaatcggtatatgaagttgctttggttaagtttttcatcggtacaaatctcccaatctcagatgagcctctggggactaacagctcatgcgctgatgacacctgacatccaaggcacaacgacaggggcagtgggatgagaatctttggatgactcggaatac

SEQ ID NO: 433535 - DNA, 316 bp, Oryza sativa
ttgaagaccccctcgcgcagaaacgaaagcggatgcttctccggattccagacgcttatacgcctcacagtaggagcagtcgccggcctcagactgcgagtgttaggggtgctcgcggacaggggagatccaggcgagggagctcggaggatcgatcgacgggtgaccgatggagcagcagagcgcaatgccacgtggaaggccgtagggatggcgggggtggcagtggcggaagcggtagtatggcaaggggcgtagcgcgcgcgggagttttcggtggtcgcgccgagaccgcgagggggtgctagtaccggcg

SEQ ID NO: 433536 - DNA, 210 bp, Oryza sativa
atcagggggataacaccaagttacaaaaattatacagcggaaccagtatactgaaactacttaaaagtacatcatgtaaagtcacctttagtcacctaaggaaggtaaatgacgtcgcagaaggaaacaagcctacaattggatgccattgtgtaggaacattgggccttgaagcttacctgggtcaaccaatgagcctcgtccaagggc

SEQ ID NO: 433537 - DNA, 160 bp, Oryza sativa
gtctatatatgagtgctcccgggtacagtggtgtgtcagctggactggtacgaccagatgcacacgggaaccctgatcctgcttggtgtcttcacagccgcgatcagtagggcggatgggatgacatgcgcctgaaccagagtaaagggaattgtggaga

SEQ ID NO: 433538 - DNA, 387 bp, Oryza sativa
  unsure (1)..(387): unsure at all n locations
cgcgaaactcgcggtgggctcccagacctaaccggcggcggtggcggcggccatgggaggagcctacaacctcaagctcctcgccgccctctccgcgctcgtcctcctcctcgccgcctcgcgccccttcctcccggggctcctggaggcggccctccgcgcccccgtcctcccgcgcgacctcctccctctcctgccctggccggtggcccagccgctgctccgccgcctcgcgctggcgcggcgccgccgacctcctcccgtccttcgtcggcgtcgcgcgggagccaggtgtgggcggcgcccgcgccgncgagtggaagggcgcctgcttctacgataaccgggcgtggatggagttccacaacgggactgatgggggccttg

SEQ ID NO: 433539 - DNA, 386 bp, Oryza sativa
attggagttgctcaggggtaatgaaggcacccttattactattaaaaatgcacacatcgtacttcacaaggattggtaataaatccttgtagctctggttagaactttgattcaaaaattcgaacgaatccacatgagtttgtccagaaaatgttaccaatactgctccttttctaaaggtataggtgttgtgcactggtttccaattgggatggaggggtgcagtaggtccatttggactggtgtttaataatacatattcatatcctctagatgctaataaatggtatgcttcttccactggaatctttttggtcgataatggtacatcagcttttgggatcgctttagattgacgtttgcttcttaaatagctttcacgtttt

SEQ ID NO: 433540 - DNA, 438 bp, Oryza sativa
tttcaaatgagcaaaaaaccagaaacaggagcacgtctattcataggaggatttcctcgctacacagagaaaacagaattagaagaattttgttcaagatttggtaaagttaagcataccgacctcgttccttttagacaagtcgcttttgttacttttacctccaaagaagaggcaactttggctatgtttgggatacaacaacaggtttttaagggttctcatttacgcgtcgattgggcaaaagttcgtcaggataaaaaagatgcaaagtccgaatctgcacctgctgctggtgtgaaggctgatagtcaacctggtgctaaagattctgctaaagatgtcgctcctgctaaagaaagatatatccccggagatacgaaagaatctgctgttaagtctcaagaaaatatacaagttcaagtaacagaagatgtt

SEQ ID NO: 433541 - DNA, 241 bp, Oryza sativa
ataacccgaactttatttaaacaagggaaaattaaaaggggataactgggtttttacatttaaaggtggtcaaaacttcctggtcccttttgggggttttaaaccccctaactggggggataactggatccttggtgacaatcccttcaattatttgggggaaaaacagtaccaatatcttaaaaacatgacagtttttcaggaacccaatgggggcatttttggaaccatttaaacccca

SEQ ID NO: 433542 - DNA, 434 bp, Oryza sativa
  unsure (1)..(434): unsure at all n locations
acggaggttaccaccgcccacacgcccccgctgctgctcctctcctgcaccacctgcgctgcttgcgctccacgccggcgccgcgccgcccaaaccctagcccagcccagccaactcccccccatgccgaacgcctctcccctccaccacctcgcctccctcctcctccttgccctcgccctcgcgccgcgccccgccgcgcccgcggccacggaccgcgcggcgctgctggccttccgcgcgtccctcccgccgccctcccgcgcggcgctcgcgtcgtggcgcggcccgctctcggagtcctggcgcggcgtttcgctccacccgccggccgccgncggcgcccccgacccggacccgtcgccctacgtntacgggctcgcgctgcgggggctcaacctgtcggggcagctcccggcggcgccgctcgcgct

SEQ ID NO: 433543 - DNA, 373 bp, Oryza sativa
  unsure (1)..(373): unsure at all n locations
aatgggaacccacatgtcattgagaaaaggggcaaaagttaaaagcccctttgctggagcaaaatgtttttcgctggcaaatttgtacaacctaaaaagaaaatctactagagggggctttcaatcaattggaattacacacacacacactatgaggaaaaatttttttctcacacttcaggttttgcaagcctaaaaagaggggcttggtcattcttttcaacaaactaatgcctttggatacgaattaaacncgcacatttagaaacggttcaaaagggaaaagtctagatttaaccccccaaaaactgggcaagaaaaaaaattttgacaacaaaacagaaacagcacaaaagatcattggcaatggcaa

SEQ ID NO: 433544 - DNA, 371 bp, Oryza sativa
ggtgatcccaagaggaattgttataatgacatagtttatcactttacataccacaaacaccataattaacccttacaaaaccccacatggacccagacaaaagaccatcccttattcagccccaaaacaataatcataagagtcgtacaagaacaccatttagcagcggcagattaaaggccttgaaattttcaaagcagccaccagaagaacaaagatgaagactttttgatgccaaccacagtttagctcaaagctgactttcccatggcgcggccttcgttcagtcctggagcatgtgcccggcggcggggtcaggggatctgccatggccggagcacaggctcgtggggggggcactcctcctggat

SEQ ID NO: 433545 - DNA, 468 bp, Oryza sativa
  unsure (1)..(468): unsure at all n locations
gagtacggcatacccggcactgacttggatccaccacctgcagtcatcgccgggtccatgccagcgggctccatggccggcgcggcggcagttgcccccgtggacggcgtcgccgacgagccgccggccggagcagagcccgacgtcgaccctgtcgcatctgcgcaggcattgggaggcaggttgcaggcggttgggagcagcgactgcaccccgccgagcaccggcgcgagcggggacggcgccgacgccacggcggcgcagaggcagggcgcctgcgactggaacatggcccgcatctgctcgcagcacgcgtccgacggcgtcgacgagttgccgatgaagtagctgacgcacggcgacagcgaggcctgcaccggcgggcagctcggcgcgttcgccggctgaccgggcggctgcggaggctgctgctgntgctgctgcggctgcgccgaggacgccatgatc

SEQ ID NO: 433546 - DNA, 331 bp, Oryza sativa
ggctggaagaaggaaaaaacccaggggcagtggcttcacaaactgccacgaaaaagggggcactggcccccacactacacaaaagcatcccacaatgggggggaagcgcaaaattaacaatttggttccttcccggaacgccttgggggggccccggggggaaggaaaaccaagcaattttttcaggccttgaaaacgaaaagaccccgaaaaaggggccccaccggcccttgcaggggctagaggaaaaactcccacattgaaagtttaggggggggggcccccacgaaaagggggaggggccccttggcccctgggggtgattctgggg

SEQ ID NO: 433547 - DNA, 332 bp, Oryza sativa
aaaaaagataaacacctttcattagaaaaaggaaagaacaaaaaaatatatatactcagccaacaacactctccagccatcaccacctcacataagttacattagcaacacttgctgtggtgatcatatggttgggagcttgggggcagtagtaggagctacaagcaaaagctatacatatgtgtacattacaatggccccggtttttgtatcagcgccagattagtctcacgcccatgaaaaacagggcatgtagttgtgatatgagccaaaagatgctactactactctgtatgcgcatgttgagcaactattttcaaacccatggcctt

SEQ ID NO: 433548 - DNA, 356 bp, Oryza sativa
ttttgctgcttccctcgctgtcgactcggctcgggccggtgcttttttaagtgacgtgagaagaaagcgaggcatcgaatccaatccaatccaatccagagtgggggtaaaaccagcgatttttgagggggcattttctttcatttttttactttttggttggcttgggattcgccgccggtgtccgatggagcggttcgtgcagttcttgaggcggggcaatggtttgatggccggcgtctctggcggtggggagctgcgcggaggaggtggcgaaggcggagggggccgggtgcagggacgacgcggcggcgctgaggctcaagggggtggccatggcaacgatactggtggcc

SEQ ID NO: 433549 - DNA, 485 bp, Oryza sativa
agcaagcaagcaaactgacctttcatcaaaaggattattattccagtgccttggtaggcatcactaggtactactagtagtggatgctgctctgcttggtattatgtcaacaagtactacacagcaataccaggggcaggcaggataaggaaagaattgacattgccacacacactagcagattaactgaatgaatgatatgcaatgctccacatccatcttctctcacaccagccacttggaatgaacagatggtaaaccctaggaggggtagtcaccaccatctctgcatggaataaattcagcactagaaattgcaacatcttgcaatctactacaaggaggataggaaaaattcagatatgggcacttggagttaaaactaaagcatgatcactataattaaatctcaaaatgtgtttcatggaaaacattttggccgctttacatgcacaccaactagcaaacactaacatgggaaaggg

SEQ ID NO: 433550 - DNA, 353 bp, Oryza sativa
ccccaaaaatggaacctttgcccccccttttttattattattaaccccttgggcaaacaagcgtgcaaaaagttggggctcggggataataatgaacaaaatgggggggttttacataggggatgaaacctttaaacaattaatttggcccaaaccggggaaattccttggagttgcaggttttaaacccggggtttattccatggaaacagttttccccgagctgaaattacctgcccaattttttgccgtcccctggccaaaaagaagtttccggatctccggaaattttttggggaaaaaaaatttcaacctggaataaaaggggttttaacaccaaatttttccatttt

SEQ ID NO: 433551 - DNA, 387 bp, Oryza sativa
aaaccccacagcctacaatatcttatcaggaaaaaagactcagatcttcaccaacaatacttcaaatatatccttcatggccagcaactaaaaatagcatttacatgatcaccaatgaggtgtatacagctcctgccgtgggtccacagaagttcatgtgatctgcagttgaagtggcagccacgaaaggatctaccaatcttaaaatctggagaccaatatctttcatggaattccctcaaggaaagggttccactattagactggaaaaagggaaacatatcaaatcatgaaaaaggcattatctgaaattggaatagcgtatatctttttaagatttaatttaatcccggagtccacacttttttcgtgaagcttcaaattaat

SEQ ID NO: 433552 - DNA, 472 bp, Oryza sativa
tcgtacactccaccgcagctcggtcatccttagtcgcacaccgatacacgaaggcgaggtcggagcccctggtgccgccacgagcgagaggcaattcgccgttgcggccgcgctcgtcgtgcaaataccggaacgcaagtggtccctttcctgccgccgcaagcgagcagttgcgtcgctacatgcacccccaaggtcttcctccaccgatctgtcctgtaagtacaacgattggctacaactcttgttcatcgcaatcccttttcttgttccttctagctttacaaattttgagtgagattgaaggcgacctgtccgggttcaggttctgcttggcgcatatgttctgcatgaatacaatacgcagaacaaactcatgattggttcctcggccttgctaggaacatgcaaatgctgatgtgatgttttggttgctcagatccatcagtgggatttcatcaacgacaaaaca

SEQ ID NO: 433553 - DNA, 443 bp, Oryza sativa
accaaacaaatggacaatgcgatagctaactacatagatggacgaccggcaatgaacgccgaacagcatgacggttctgaaggcacagaactacggatccatggagctacaaacaaccccatgtacggattatcatcactacgcaattatctcggctaatgaccatccacactgagattgaggacccgaaactttagtcatagtacgtgctcattctgtataaggccaaatgctcttgaaaaaatagttccccttgaaaacaaatactcttgacaaaaaaaaaaagaggtgacctcatgagggatcaccaaccgcaggcgggggtcatatgcgacaagaccataccgggggaaaagccggcgcctttggccgttttaacaagtgcacggtcgctttcaatggaagaacagcatacagagctttcccttttttcttgagaaaat

SEQ ID NO: 433554 - DNA, 248 bp, Oryza sativa
tatgtatatttttttttttttttttattttgtaacccgagatagccgaccacgtcacttgcatgtttgtgcttgagctgagcccgccaacgccgcgcgccatgcgcccaccgagctgaggcacacgagacgccgagaggcagggcaaggcaagaacgccatgcgcgcgctccggccgccgacagcaccggctccggctgtgacgccgtcgccggagccattaccaaatgctgagatgtttgaaggggg

SEQ ID NO: 433555 - DNA, 135 bp, Oryza sativa
ttccttatcagtgtgagggagcttgtcacagcgcgcgctcaacacgaatacagggcagcgaaatcggacatttcatttcccgcattagagtgggatcttcagcaacggaggaatcatagcccacatgctactctt

SEQ ID NO: 433556 - DNA, 469 bp, Oryza sativa
  unsure (1)..(469): unsure at all n locations
tttggcttcctcttcttcgctcttgagagatttgagctgagagagagagagagagaggagggctctcgatcgtcttccttgttgcgcgcgcgcgttctctaatcgaagtcgataggataggaggatagtctcccccgcttgactcgatcttctccttcctctcaaccggggaaagcaaggccatgggcaactgcgccagcgccatagattccttcttcttcaccaaaagggccaataacgagaacgacgatgacgatgctgccccaggaatgtctgcatccaagaggactactagctccaccaccaccgggaagctgtcaacacttagtaacagtactttcattccatccaccattagcggtgtaagcactgacgatgcttatncagacggccagattcttgagtccccaaatcttangatcttcacctttgctgaactcaagatgctaccaagattttaggactgata

SEQ ID NO: 433557 - DNA, 208 bp, Oryza sativa
gcggtttgggccgtccgcgccgccgccgccgccggcgatgttgaggcggtagcgccacggcggggacgcggtggagggggcctccacggcgaggaggtggcgctcgaagccgaaggagtaggagcgcttgaggaggaaatcgtctctcgggccgacggggttccgggctttgccggggttgatcctccgccggtcgcggcggtatggg

SEQ ID NO: 433558 - DNA, 399 bp, Oryza sativa
tcttcgcactcaacctcatgcagatgcagttcactctccatagctaggagtagctactagcctaccactccactagctgcttgagcttgagctgagcccgccattgccgcgcgccatgcgcccaccgagctgaggcacacgaggcggcgagaggcagggcggtgcaagaacgcgatgcgcgcgctccggccgccgccggcaccggctccggctgtgtcgccgtcgccggcgccatcgccgtatgctgcgatgtttgaagggggtggcattagctcgccgcctgctccgaacccggcgacgtcgccggtgccagggccggcgccagccccggtgccagggagtgtggcggagcgggagttcgcgggcggacggcggggcgcggcgtcgagcagcctgagc

SEQ ID NO: 433559 - DNA, 175 bp, Oryza sativa
ttgttttggcactgatattatgctatattaagttgtgatgtcacttatggcagtactttacattatacaagcagcttatttctgaagagccgctaggctgtagaattgctcctttcttactcatgaggggaggatacagcactcacgttccactaccttaccctttttctaagaa

SEQ ID NO: 433560 - DNA, 409 bp, Oryza sativa
ttggtctccacgcgagtcgacgagcggcgccgccatggagttcgacgagtacgagtacctagagaagacggtcgagccctccgcgccgtcgaccaacggctccggcgagaaggaccgcgccggctcccgccggcgctcctccggcggcggccgcgacgacgaggagcgcgggtcgaagcgctcacgctccggggaggaccgggaccgggaccgtgaccggcaccgaggcggcggcggcggccgggagcaccgggatcgggatgacgggaaggagaaggagaggagcagccgcagccgcggcaaggatgcggagaaggataggggcaaggatggggagaaggataggagcaaggaagcggagaagggaaggagccgggacagggacagcgagagggcaggccccaggaga

SEQ ID NO: 433561 - DNA, 367 bp, Oryza sativa
ccttgttatttgggaacagcccctgtgaacctgccacatggacctattaggggtcttgtaatggccagggttgaggatggcaactgcttttacttgcgctagatagtaatacatgaaggaacatgcacaacatacatgcctgatgtataatacttaaagcctgaactgtctacattaattaatcactcacataaactataaactgcttagtggaagcattacaatccatacaccagaattaccaggaacataaacgaaattttcaaggggccatcagagactgaccgtgcatggggctgccttgggtggatcagcagcaccagctagacgggtaccaggatagcggcctccaccggctatggctaag

SEQ ID NO: 433562 - DNA, 241 bp, Oryza sativa
cgagcgagcggtctagctgctagcttgcgctatggtggatgtgctatattgacccctaataccacagtccagatcgctgtagtgcttcgaaagggttttgacagcgatgaagaaacgatatgcactgagtgtttcaacctgaagacggacaacatgctgtggaaagctactgatgaacatgctgaacagcgtgacctccaaggccattaccaactgggatcatatagagttgaagagaaac

SEQ ID NO: 433563 - DNA, 388 bp, Oryza sativa
gacacattccatcacaatacaattcactgcattgcatccctatcatttgagattcatcaagacaaattttcatcacaatacaattcaccaagcatagaagagatgccaaatcccagacataggcatatattttggtaaaaattggttgtaatgaataagcatacaagctgatcatggtccatgtcacttaaagcaaatactcaaatctttgagacaatagctagcaccagattatttagttcattggtcctagaacatgcagttgaaacttgagaatacaccttttctgatcagctctaatgatgctacttatattgcttcataacttagcaagtcagcacaaaagtggcccttgtcgttgtcatcttcatcggttttagaaatattc

SEQ ID NO: 433564 - DNA, 363 bp, Oryza sativa
ttcagctcgcgacgcgcgccaacctcgccgccgaagcacgacacgaggacaagctagcccggcgcggtgtgccattggcatgggggtgacgggcggcgccggggaggccgtcaagccgtcgtcgtcgtcgtcgttgtcgccggtggcggggctgatggcggcggccatcgtgaagctgaacgcggcgttcctcgccttcttcttcctcgcgtacatggcgctcctcctccaccccaagtactcctacctcctcgaccgcggcgccgcctactccctcgtccgctgcaccgccttccgcgacgcctgcaccccggcgacgacgaccaccgcccagctctcttcgaagcttggaggcgtggcggc

SEQ ID NO: 433565 - DNA, 461 bp, Oryza sativa
aaaactatcttacatcaattttcttgaggtctggaagcttgcagcttccataaaattgtctatacacgtacatcaacagtacaaaatctttgtactcaacacaaaagttcagaaaaaaaaaaaaccatgaacttctctactttgtagctgaaggagcctctccattgttactttgcctttttttatcaacaaaggagctaatcaatgtaagaaccaattctgttgggacatacccatcaatccacattactcaccatcataatgtgaatcgattcatcatcatccatccatggatccatgattcatccagatgatatttattcgtttcttggcatcaagaatcggatgatttattggagccagcattgaccaagcttgccagcttcactttgggcttggagtactcaccactcatcgggagcttagccgcgaggccactgccaaaatcagtgaagtgcaca

SEQ ID NO: 433566 - DNA, 381 bp, Oryza sativa
gagaaactcagccatagtcgtcttcttcctccgcgaaggcgagagctcaggcgagctcgcgcgatggccatggcgagccccaccaacggcggaggcggaggcgggaacaaggtgatcagcctgcgcctgcagtactactgcgtgctcgcggcggtggtggtggcggtcatggtgctctcgctcgcgttcgtctcgccgtccgccatgggcgccgccgtcaggcagaacctcggctccgtcgtcgccgccaccgccgtcgtcggagagggagcggacgcctccgccgtcgacgccggagccggagtggcggctacaacggccgcagaggaggagcgtgagcaggccgcggcggccggggtggtgctgttcaacttcggcgac

SEQ ID NO: 433567 - DNA, 145 bp, Oryza sativa
actgaagccacaaacgggcttttccttcagtaaaggtcaaaaaccccatacactgctaatctgcgaactattattgtacagaagggaaaaaacaatttctacattctagacagaagggaaggaatgggggttgttggtgctgctt

SEQ ID NO: 433568 - DNA, 244 bp, Oryza sativa
taaatcccttctccctcccctctcgccgccctcctcctcctcctcgtcgccgtcctcctcctcctcctcgattcgaggggtgccgccgccgccgcagctccagcatccgcgagaggctcgcgttggggatcgccaatttccacgccacggtggccaatcccccgcggcgcgcgctggtgggcgatgcgatcggatgaggtgttggcgacggcggcggcgctgcgtggtggtggagaggagaaga

SEQ ID NO: 433569 - DNA, 456 bp, Oryza sativa
gaaacataaatttagttctctctactgactaatacacccatctttcatttaggcagaaaaataataaccgatagttagccagcaagcctactggctaccaacagagccttcagttaaattattcagatttcagaatatgcagaggaacgaggcctccccgttttggttcatttaaacgacggaggagaggaatttatccagctgttaaccaacgcgaaagcatcaacactgtcatcgctgacattctcgtccatattcattagtccagtcaagttattgcctccagaagtagtttcagctattactggtagagcctgagatgattgagcaatacagtacccaatagcagtcatgtcgatctgtctcatagtacctgcttgattaccttgatagccattgaagaatgatggatcaacaggaatttgttctgatcctataatgaacccacaagcacta

SEQ ID NO: 433570 - DNA, 260 bp, Oryza sativa
ttgtttggagaggtagagatgagagcacccgctggccgccgtgctcatcatggtgctgcgacgttcgcacgggagctcacaagcgggaggctaggccagaatatggcacccggagcatatggcgacactgcacgcggtggacagagcacgaaaaagaggagctggcgacgcacagtgcgagggagaccaacgcaggcgccgtggccctgaaagttctttagtgcctgcactgcggaggagccaacagccatgatttgtac

SEQ ID NO: 433571 - DNA, 386 bp, Oryza sativa
ttgggtggcgaggaggatggggtacctgccgtcgtcgctgggcagcaaggcggcgcacttcgtgtccgacctcaccaccgtcatcctcaacccaatctccgagcgcgagccttcctccccactccccgaggtggacaaagacgaagaaaaatcagaggatgacaaagattctgagcaaaattctgacacccccgatggccctgacacatcttcctttagagcattcttgatctcattcctgtcatcatctggttctagtaatggttccatggagataattcctgatcagaatggggaattgggatacccaactttaacaccaatggggaagtcaaaaaagggaaagtctgggctcctaagtagaggaaaacattccattggaaaaa

SEQ ID NO: 433572 - DNA, 177 bp, Oryza sativa
gtcctccgcgctagcgccggggacaggacccgtcgacgaccctccgcgcggactgaagcgagaattttggccgcctggtgagaccgggctacattgcttcaccaacggcttcctcgacctgacgaccggcgtggcatgcccaccgggcatgatgaggacgagctccttcaccgacag

SEQ ID NO: 433573 - DNA, 322 bp, Oryza sativa
ttgggtggcgaggaggatggggcacctgccgtccgccctggtcatcaaggtggtgcacgttcgcgcgcgacctcaccagcggcaggctaagcccagtatgcgaccccgagcctatctccacactgcacgcggtggacaaagacgaagaaaaatcagatgatgacacacattctgagcaaaaccctgacacccgccatggccctgacacatcttcctttacagcattcttgatctgattactgtcatcatttggatatagtaatgggttcatggagataattcctgagcagaatggggaattgggatccccaacttgaacacc

SEQ ID NO: 433574 - DNA, 157 bp, Oryza sativa
tttcggccgcccccccaaattttttttttagcataaggcacaggctatctaccctaaatcctttttcctatgcttccacatcttttttcccgacgcatgctaattgcggcagtctccagtttctcacctagccgcttttagttcacccatgttttca

SEQ ID NO: 433575 - DNA, 220 bp, Oryza sativa
ttctctttctctgataataacttccccccctcgtaggttctcgaggacggcgcgcgctttttcgcggaggagacatccgcaggatcctaggatcactgggtagcttcggagcgtgatatacgacagcaggcggagagctaacgcggggatgatgagatcaataacgaataacatcgagcccaactagctagccggggttccaaacacaggttgttgtttg

SEQ ID NO: 433576 - DNA, 264 bp, Oryza sativa
ttataggcgcgcccattctcttttttttttttttattattttattttttttttttttttatttttatatttttttttatgaagtttttttattccacaagggaaaaaaaacgcgttttaaactcaaaaatacggggaaaaagaggaaaaaaggtcaggacaaaacaaaggttcttaaactaaagaagtttccccttcataaaaacttgaataaaaggaaaaaaaagggaaacaccaatttgtttaaataaggtttttaataaaa

SEQ ID NO: 433577 - DNA, 463 bp, Oryza sativa
cagattcgttatgaaacaaagatggcatatatagcatcatatacaaaattttctttcgaatttctcctcaaattgcactccatgagcaaatgggaggctcataacatacaaaaattgatgcttaagctctgaccaaaaaaaaaagcatcataattggtcccgctgctctaatgacgccgtagagaagatgaagttgtgtggtgagtgcagttttgctttcagatagctacaatgttcaaaactatttgatcttgagcatcacgctgtcgtgcaacatttccaagagcatagcacttactcaagaatatagcctgtgtttggaaactcctgtaaccacttcaccaaaaagaaatttcaatatcttcagctatctacttttaagataacagagatcttgtagccagcctactttgcgacaacattctgctcctctaaacctccagttgccttggcatgggcaaca

SEQ ID NO: 433578 - DNA, 363 bp, Oryza sativa
attggcgaaaccctagcagcagattgccccgccatgctctgagcccgccgacgatggccgcgccggggccggggtgggtggtgccgtcgccgccgtagccgcagccgcagcagcagcagcaggcggtggtggtggacggccgggacggcctcgtcgcgtggctgcgcggcgagttcgcggctgccaacgccatcatcgaccttctcctcgcccacgcccgctaagccgccgatcccgccgggttcgacgccgttgccgccgccgtccagcgcaggcggcaccactgggcccccgtcctccaccttcagcattacttccccgtcaccgaggtcgccctcgagctttaccacgccgacgtgcgcc

SEQ ID NO: 433579 - DNA, 337 bp, Oryza sativa
ttttgtggttttaaatttttgggggtttttttttttttttttttattttttctattttcttataatttttctttttttctttacggggaaagagtcttgcacaccacttatttggacccgggaaaatcaccccgttgggaaaatcgagcaacacaagctgaactcaccccttcacccgacagggtgtcactggcccaggccggatactcttgatataaacagtagaacctcgcatgcagcaaaaaaaatggtattattcaccctttgcgactacacggaagaaaaagggggattgttaacccccccccaggccttattttaaaagggccaaaacccc

SEQ ID NO: 433580 - DNA, 491 bp, Oryza sativa
  unsure (1)..(491): unsure at all n locations
tggtcggcctctggggctccggcggcgtcagtggggctccaccagatggtccgcgacaactacacgcaaggactcatccgggcgttcggccgccgccgccatgacgaagctctcctccacaagtggttctcgcagctggacgtcgagtgggttctgctcctccacgccggacaaagagatctagactcctcctccgtcgaagatttgatggcgttgatggagcggtggatgagagctctcctaatcatggtgcaggtcctctccatgacgctgctcgagctccgagacagaaggtcgtcgtcatcactcgccggcaccgacgacgacgatgccttcctgcttcgcacaaagggatcggcaggcaacaggtcaccggcaccggagctgccggacttcgtgtgcgtgcaggaggttgtgcagttcgcggaggcgagcatcctcaggatgctggccttcgtcgacgccatcacactagccgntctcaacgacga

SEQ ID NO: 433581 - DNA, 424 bp, Oryza sativa
agaaaaccaaagtataagcaaagcgatgataatatatactctgtacagaggataatgaaattgtaatgcaaagattaaaactaaaaagtaaagcatctgggtgacttttttttttgagtagtttccagtagtctgaagtgaaattcaaactttttttggcaggaaattagcctgttaccatcatcaccaaaagacgaccatagagtgagtgttgaccagagcacaaacctttaagcgcgtaaccaatggtgagaaagagtcaactgaaatgcctaagttattgaggtgaattttccatagcaattgcattgaactcatcatcatccttcaaataattcatccaacaactcctttaactgctcgggcgtggacttgggcagttgattgtgcattccccttgctgctcgctcctctagatacatgc

SEQ ID NO: 433582 - DNA, 476 bp, Oryza sativa
tttggttacaaaataagtaagcattattattccacaagaggatgcaagctcatatacatattgttgtttataaaaatacaaaaaaaagtacatagcaaaggacacttgaacatttaaataccgtgtcttaatatgacaaacactttaccaaaacacgctgaaccgttgtatacttgcagttgtaccattatctaaaaaaaatgcacctgtaccgtttctttactcatcttgccgatggaccaaattttgacaacacatccatggcatcactaactgagcttgtcgtgatgtccctgctgtcacgggcttcctccagtgccaagctctccttcagctgtagaaccacggtggacattgttggcctttgagtagcaacctctgatatgcagagcattgcagtatcaaccaccttccacatggagctaatgtcgtacaaatctttgagtcgtgcatcggcaaccaagctgatattacca

SEQ ID NO: 433583 - DNA, 166 bp, Oryza sativa
gcaggcaccggacccgacacgcactggccgacccacgcggctccttacctcgcattatcctcattgggagaacatgttttaaattcacataatggggcgaaaagcccgcccgagcaaatgaattacgaaccaactgaatcagcaaacttttgccccacctcagccg

SEQ ID NO: 433584 - DNA, 485 bp, Oryza sativa
ttttgttttttttttgaaatgaggagcacacagttgaatctgtaacctcagggctgtcgcatactggcataataacacaatgagagaccaaggggtgagacgttaaatgtcttatttgagacaaaagatgcactactacaatgcaagactttgacaaacaccagtctcaaatcttttcaacccttccatattctttttcctatcctcatcatctgtacatcgtctacacagcttcagtacaacatcaatccgacgtggcgaaggggaggggtagaagtagtagcagcaagaacattttcacctcttacacaaactgtcactttcttttttttgtctgattttcaagacatcctctccaaccacctcaaaccgggcaacacaacgaacaccatccagagaatttggcttagccatcaatttgacctcattggttgatgcaagaatgattttatcttaggctttcgggatcgatcgcgaagaaactc

SEQ ID NO: 433585 - DNA, 524 bp, Oryza sativa
gaggctgtagccctcccttttttttttttttttttttctctcttctcttctcttctcccaattcacacaagattcactcaccagctgtgccctcccattcccctctgatccaagcctttcactcaaagcttccagcttttccaattgcttggccacttcaagaatcaaggaatatgttcttgctcttggggttcctctgatccgactctccatcttccagcttccaggcttctctctcgttctgtgccatttttgctctgcctgagctctgtgcttgttgcattggtcactccaagaaaaggattttgaaggctggctttattgctcttctgttcctgggatccgaattgcaggcgagctcgctgttcgtggggggtttctttctttcattcattcgcttgaagaattcggcaaagccatgcgagcaattcgggatgatttctcgggcctttggacgcgtgatgattctttgacccaccattgcttcgttttttttttctggagaatctgcaattcgcgagttg

SEQ ID NO: 433586 - DNA, 472 bp, Oryza sativa
tttgtttttttttttttttttgttttttttttttttttttttttttttttttttttaaacaaaccccataataatttggaagaaaaaacagggggggttacaaggtacaggcttccaagggggacctttaacgctgggataaatttaacattataacatggttttgccaaactaggtaagttccatccacaatcacaaaacttggctttaggggcggggggaaacaacaaaaaacttacagaaacatgtttcccccattgccactagacccaacagggttcccagagcccggaggacaaaaggaaatgggttttcacttttttttcccgggatcaccagccttggtttttttgaccccacggatctttttagctttggtcttggggtctttcatttggttgggagatttctcaaccttgggaggcagaccattcctgaggagggggtacttggggtcgtactttttcggggg

SEQ ID NO: 433587 - DNA, 477 bp, Oryza sativa
ttggttttagctgcatccggggtattaattgcaaaaagaagaagaagaaggaatcaagaaaacccaaattgtgatgatgagatcgagacgcgaaatatatatctcttctccgatcgattgcgacgacgatgacgacgacgcagtggatatgatgtgcgtttcaagccattgctgctgatcattcttcgccatgacaagcttcagacgaactggctctggctaagctggggttggcgaaagatgatcagcaccaggttggtgtatatcacatatatatttcacatctcaggagaaatttttttttgatcattagcctctgtgattgccatctaatcatgatctgcaccgtgccagtcaggcctccctagagtgaactcgagactagggctactcagctcatggttggacacctgcgagctgctcgatctgcacggttccaagttctcaataggagaagacaatcctacggagcgatgg

SEQ ID NO: 433588 - DNA, 280 bp, Oryza sativa
cttggccaaagcaagcaaccaagcaaagcttcctcttcttctccaagaactccaagaaccttctccttcatcttctccaccatgattccttccatcgcatgagctccatctccggcgtgtcgatcgagatcaccgttgctgctgccgaggtggagaaggaggtgtttgatcgatcggtcgatggaggcgagctcggcggcgacgccaccggacctgtcgctgcacatcagcttgccgagcagcgcggcggtggcgacgtcggggggagggcgtggcggcg

SEQ ID NO: 433589 - DNA, 484 bp, Oryza sativa
ttttgttttttttttttttttgtgtttttttttttaaacggcgaaacatgcaccagcatgggccactaagattaagcaatatacaaaatgcacccacatttccaactaaaaaaacactcacatttttgtaacaacagggttgacagactggatccaatgctacaacaggtcaactcattgacagtaaagccccttactgtcaatgagatagcagagacaatacccacatgtcagaacaaaaaaaatatcagcagcccatcatattatcttcagcaggaaaaggggtaacctcaacatttccagacccgtatcaacaaggtttgatatttgcaggaaaggtagactgattatccaagatggatattcaaattgatgttagcacccgtcatcccccaaaaaagaaaccccgacccactgtacttttattgatggccggcttttgctatcagaatactaaaggggttagatcgactataactcaaat

SEQ ID NO: 433590 - DNA, 473 bp, Oryza sativa
  unsure (1)..(473): unsure at all n locations
ggcaatcgctccacttgtcgcctatatacgccttggcctctcggcgtccgatgctagtggtagtggcccgcaaatcctcctcctccgctcgcgtcgccgcccaccaaacccgatcccaccgcgccgcgatgccggccggccagccgcacgcgcacgagcccgacggcggcggcgcgagccaccgccggccccagtcgccgccgtcgctccccgcggaggtggtcccggcgttcgcgccgccggagtcggaggacgaggagtcctgggtctggtcccagatcaaggccgaggcgcgccgcgacgccgacgccgagccggcgctcgcgtgcttcctctacgccaccgtgctctcccacccctccctcccgcgctccatctccttcaccttgccaacaagctctgatactccaccctcctctccacgctcctctacgacctctttctggcttcctttaccgngcaccccttccttc

SEQ ID NO: 433591 - DNA, 77 bp, Oryza sativa
ttggtttgaagttgcaaaccagaagctttattagaagttggtaccggcacacaagctagcaccggcccttacaacaa

SEQ ID NO: 433592 - DNA, 120 bp, Oryza sativa
cttgctttcgccgcagctcctcccttcgtcgtccgtacgacgccggccggccgatgcgccgccggtccaggggcgccgcggggtggtgctgttgtcggtagggagggagtgggggtgggt

SEQ ID NO: 433593 - DNA, 449 bp, Oryza sativa
gtgtaaaataaatttttttttcttttatttttttttaacatttaatttttgtgaccatacttgttttggggcggacaaggaaataagacgagagcctccctgaacctggcggaaaaaacgtgggcgcggaccttggtgacacagctggccagaaaccgcgagccggcgagcggagccggcgcccgcatgacgaacaccgacaagatgaggtcggagctcaccagcggaccacgcgacaacggcgcgccgcacccgaagtcgacgaagatgaacccgacctggctccagggcgacacgtccacggactcgaagtgaaacctaatctggaacgggtcggcgccgccggtgcgcccctccgcccagttaaagcactcgccggccatccgccggtttgcctcccggaccacgccgacgagcttgatcaccgacgacgccgccacctaccccgc

SEQ ID NO: 433594 - DNA, 415 bp, Oryza sativa
aacaaaagaagatattaagggttcttacaaccttatctcattacatgatgcacatagagcatttgaaacggggagaggaaaaacagacttggtcagtatgaggtttgaccagctaatgcaccgcgatgcactctatctaggaaccacacgagaggatatactttctattgagaaaactccccggcaactacagatcgatcggccctcggaccggctccagttatcgttatcagaagcagcattacactgacgctacacgagccttggtttttccctggttgaacattttacctactgcaccactactacccgttcgacggcatgcctgagaggacgtacatgtaactctccacgcatcggcagtctcttcttctatgacgtgcttctactttgagcaggccgacgccaactgcac

SEQ ID NO: 433595 - DNA, 463 bp, Oryza sativa
tttttgttttttttttttttttgtttttttttttttttttttttttttttttttttttttttttttttttttttttttttttttttttttttttttttttttccccccgggaaaaaaaatatttttttttggggcgggcaaccacccccccaatttggggtttattttttggggccaaccccccccccgggtaggcccaaaaagacccccccgggggccaaacccagaagggcccccccctttttttctttttccaaaaaaaaaaaaaccccttggggccaaaaaaacgggaaaaaaaaggccctttcacccttttaagggggcccccccccaaaaattgggggccgcccccccccgggggtaaaaaaaccccccccccacctaaaaagcccgggggccgggaaacctttcccgggagctgggggggcaaaaggggaaaccccaaattttttttaggggcccc

SEQ ID NO: 433596 - DNA, 335 bp, Oryza sativa
ttttggtttttttttttttttgggtttttttttttttttttttttttttttgggttttttttcaaaaacaccaacaaattggtcggtctaaaaaggacacgacctattaaaaaaagggggacaaacaccaaaaggatttaaaccccttttttacttccaaaaggaaggcgggaaggaaaggattaccaagggaagaaaaaagggggccggggccatgggaacaaaaaaacatccccatgagcggcctgtcatcgctggggggcccccggcgggtggaaccgggggggacccccggaacaccccgggggtccaggagccgggggggagcaacccgg

SEQ ID NO: 433597 - DNA, 224 bp, Oryza sativa
acatcaacaaattgtctgacctaatatgtacagctcctactaaaagtaggggtgcattcaccataagcatgtcctccccgcttctacctctaacaggaccgctggaatgaacagacttccctagggcagaaacttgcgttcagctcctattgaaattaaatcttatgaagacgagtggcatgtcgcgtggctctctttgcccggcttgctcttcgcgtacctcc

SEQ ID NO: 433598 - DNA, 69 bp, Oryza sativa
ttatttttttattttttttttttttttttttaacacacaccacaatataataataggtgtgggggggaa

SEQ ID NO: 433599 - DNA, 483 bp, Oryza sativa
tttgtttttttttttttttttggtttttttttttttttttttttttttttttctttttttttttgtttttcttttttttttttttttacaaaaaaaaaaaaactaccccattaggggcccaaatttcccggggggccgggagacaaccaggttcccccaaaacttcccacgaaaaaactttccccccccttgtttgcccgggggggggaaccaccaagtgcccccaaaaatgccccattgaaaaacaaaacaggggagggaacgataccaaaaacctctcccaggggccaaaatcccggggcccttgggcgaaagggccggcaaaaaacataccccccaacgctgggaaaaagcatttcctttttttacccactcaccgtttaccccccccggggaatccctcccattgcccccagcccaggggggacggggaaaaaccctccccggctaccccccccctcgggcttttcctaggccgggggg

SEQ ID NO: 433600 - DNA, 486 bp, Oryza sativa
tgttgacgaacgaacactcggtagcgagcgaagatgggaaagatgacagcgaaggggaggagaagggttcaaagcccagctcctcctcctcggccaacggtggagccgtcccgggagaggccgaggccgaggatgagaggagcacggacatgaagagcaccgccacggcggcgctcagggcgctgagagagatccggagcgggagctcgacggtgagcgtcttctccctgccgcctctgcacggcagcaatgggcaggatgaaccggggaggtgaaaacgagaatgggaaagaaaaggaaatgatcttgacgctgcgttcggtatcgatgtttcgcctgcacttctgctcaaatgctcagtgatcttggcacttggtaggagattgtaactggctatcagttcatgtttcgttttaacttgggtatttttcgtgtaatctgttagtttcccacctgctgtaaaaatgagagggaaaaatagattag

SEQ ID NO: 433601 - DNA, 461 bp, Oryza sativa
ttttgtttttttttttttttgtgtttttttttttttttttttttttttttttttttttttttttttttttttaggaaaaaaccaggccttaggattcaacacgggctttgggggggaccttttttccatgggccctttgtggccggaaaaaattttccagccaaccagggtttggtatcccccgattttccaaacggggcccaagcccataacaggggggaacccgggggatttttacccccccccaaacgggagcccaagggcaaggtgccccccaaaaaccctttttacattgtaggagcccaaatcaaccagggtgaacgttttaaccattttaaagggaagcccccttgaagggccgagacccttgcccccagcaggcaacaagggaccccgggtttccaaaacccgaagggcccagggggggcaattaaaaaaccctgcaaccccccatggaaacc

SEQ ID NO: 433602 - DNA, 346 bp, Oryza sativa
attttcaagcgggagatcaggcggttcaacggcgagctggaggcggcgctagatgattcaatacggcggatcagggagatcgccgactaggggaggtctacagacgcgacctacagcaggggggtgctggctctgcttctgtcggggatggaggacaaggagacgaatgcaggcacgctacgaggacagttcagctacgacggaacagatgatgagcgacgagtgtaaaaccttacttgttaaccaccactagcacgtgttgactgctgctcacgtgggcgcaacatggtgattaccaccaaccctgcttggaccgagaaggccccccccgaggcaccttgcatgc

SEQ ID NO: 433603 - DNA, 520 bp, Oryza sativa
  unsure (1)..(520): unsure at all n locations
ctaagctttgcttgatttgcagcagcagcagcagcagcagcagctaagcttgcatccatgggcgtcttcgccgtcaccaaggtgtccgagggccccgtccggccgtccgccgcgacgccgtcggagacgctgccgctcgcctgggtcgaccgctacccgacgcaccgcggcctcgtcgagtccgtgcacgtctacctccgcgcgacgacgccgccgtcgaggcggtggcgccggtggccgacgacggcggcgtcgtagtcgaggggaagaagaaggagaagaagccggcggcgcggtggtgcgcggcgcgctggcggacgcgctggtgcactactacccgttcgcggggcggatcgtggaggacgagcggtcccggnggcggcccgccgtgctgtgctccggcgagggcgtctacttcgtggaggccgtcgcaactgcaccctcgccgacgtcaaccacctggagcggccgctgctgctgtccaaggaagacctcgtgccgtgcccgacgcccgagcagt

SEQ ID NO: 433604 - DNA, 458 bp, Oryza sativa
tcattagtgacatcaaccatgtagtggtaattacatattgcaccagtgtgcttctcctatcaccaacatctcatctcaagacacacacacacgcagctaaccggacgattgaaatccgatgaaagaagtatcaagaaattcatgaaacttcaaagaattaacatcacaccgtaagtaatttcctaagacaaacacaaggacgcagccaaaaaaaatgaaatgaaggaaaaaaaaaattcaggacctttcatagagttaccgaacgagcaactatgctgagtgatcaacgcttcagctctcgcgggtcgacccggcgggcctgagcggccggtcgtcggcgtcgtccatcgacacgctccgggcggtccgcgcggagcccgcgccgcccagctgctcgatgcgcacgacgatctccggcatcgccggccgctggtccggcacggtcacggtgcagtcca

SEQ ID NO: 433605 - DNA, 488 bp, Oryza sativa
ttttgttacaacaacattttctggatatattccatacatatatattcacacagcactgaagccgtctgaacgtatcaaaaaacaaatgatgatacaacatttgatgaaaacccatggacatgctattcggctcctaactgctgtcgtgcagcagatggacgacatactgaccagaattttctcgagtgaaccaactcctgcaacttttattcactagtatctctacaaatgaccaacatccaatgtacaacagcataagatcatccaatgtacgacagcatatgatgatccggcatgaaaaaggcaaaaatagctcatggagaaagcaagcattatccccttcttgattcggagataatatacaattcccccatgcactgcatagcgttccgagtgcctcttatgagtcgaattgcaaagaatggccgacaatttatatgtagcaatattcttatcggtgacctctcctccttgatgcaatgcgggct

SEQ ID NO: 433606 - DNA, 336 bp, Oryza sativa
atcttacccaaagatcaggtcggaggcggaggcaaacacgagaagaagatgccgcggcggcctagcggcggcggtgtatcatgtattaccacagcacctttttgtagacaagaagtaaactacgaaaactactttatttgtcgaattataaagcaccatcataattatgatgtcttatgaaaaactatatattattactatacctaccttagcttgtaatgaagtagagttcttctttaaaagaaaggttataacgagctatgttatgtatattaatgaataggatgatataatgattagcgatctatatgggactcattactcatggtgtatact

SEQ ID NO: 433607 - DNA, 315 bp, Oryza sativa
  unsure (1)..(315): unsure at all n locations
cttaatggacagcgtaacaaaacgcgcttgcgtcggctgccccggcacgaaggcgaggctcgacgacgtcgactggtgctagggcagcctgagaggctgcagagagacgctggatgacaccgaccagctgatgatggacccgatgatgctgttgcagctgccctactccgacggttacgaggccatcgacagacgtcttcngcgtcggtgaccccaacagcgcgaacacccacattaacgccagcgtcatcatgtggagctaccacgactacctaatcgacggcgcccttttctgatgtactcttccattgatgc

SEQ ID NO: 433608 - DNA, 449 bp, Oryza sativa
ttttgtttttttttttttttgggtttttttttttttttttttttttttttttttttttttttttttttttttttttttttttttttttcatcccccccccaaaataaaaaaaataaggagggggggacccaaaaaaacaaaaacaaaagccccccaaaaaaaccccacgggcccaaaaggggaaacaaaaaaaataccgcggccccccaaaaaaaagaaccggagggaaacccccatttccaggacaccccccaaaaaaagaggcccccgcttctggggctgcccagggcagggaggggaagaaaaaaaaaccctccaacatgtggggggtggggccccccccccccccacggaatttcccccaaggggaaaccaacccggccccccagggtttcgtccaagagcccgaaaacacccctccgggggggagaggggggcccccaaccatt

SEQ ID NO: 433609 - DNA, 319 bp, Oryza sativa
acgaagctagacccttttgagcgcgcccctttttttttgggtttttacgacaggggggaacacatcccaagtcaaattggctacgatggggtagaaacgcgctaacatctaatgcatgttggcctcgaaattctcactctatactagctggatgatgccgagccaactgtaggcaccggcagctgctgttgttacgttattagccctagcttccgagaatggacgcggggtctgcacggctctgtcgctgtccccgaatgatgaatgtgacgatgtccagcaaggtcctgggggccaccctcaacttggggttcccggt

SEQ ID NO: 433610 - DNA, 425 bp, Oryza sativa
tgtgtttttttattgattggggtttttaacgccactctttgggaaaaggctcaccggctatatttaattcactcgaaaaaaagagtgaagctgataccaccgttccaaagctcaaccaccttgacagatgaaacaaaacaccggcattgcatcatacactaattaaggattctccaagtaaaaaaactccacatgttcggggatcgtaagggtacagagcgcgaggacaggtaacaacctattgggccaacgaacgaaattgggctgtgcagagaccgagcctttccttggggtttttggccctcaccaaaagttggacatgttcatcttccttttcaggggtctgatgattctgccatagagccgtcagggggagaacctccagaatgctcccaacgctctcagcagttttgagggcaaaaggg

SEQ ID NO: 433611 - DNA, 236 bp, Oryza sativa
tttgtttttttttgatttttgtgggttttaattttttttttttttttttttattattttattttttacaaggggggcagaaaggactttgtaaccggggtatgtacaggtaatttccatcatcctagaaggaggaaaaaaggccccaaaaacaagggtcaaaaattaaccgaccaaaaagaccccgtaaaaaaaattggccccccccaaaaaaatgggaaaaccagttttttcatt

SEQ ID NO: 433612 - DNA, 238 bp, Oryza sativa
tttttgtttttttgaatttgttgtgtttcacataacatttttgcaatattcattgtttaaatcataacaaggggcccatgatccaatacttggccggaaatagaaccatccaaacgcatcacaatccaagggtgacaaccggctcttaactattggaaaacaaagggcatcaaaccagttcgagctagcaaaaactttttttactcccgcttgctaaggctatacagtttttacaggg

SEQ ID NO: 433613 - DNA, 65 bp, Oryza sativa
ctttataccataccctctgaagccagtcatggcggagcgcgtcttaaagcgacccaccaagcccg

SEQ ID NO: 433614 - DNA, 480 bp, Oryza sativa
ttttgtttttttgattttttttgttttttttttttttttttttttttttttttttttttttttttttttttacccccccccaaaaacaaaatactggttattattcccggacaaggaaaggcccaaacaaaaaaatcctcccccctggattcagaaaaaaaagaaagaaagaaaagggggaaataccttttttttccccaccaatcctggggggtttggacaggccccccccccataacaaacctgggggggggataaccgcggtaacggccatgggggagccccccaaaggtaaaacatttttggcggggctccactgggggcacgttcgggcccggaaacccttccaggggggtctttattatatttacaaagggggcaaccatttcaagggatgggttcaacccggggggggggaaggtttttgaggaacgaacaggttcgggaacctcaaaaaacctcagggaagggcccccgggg

SEQ ID NO: 433615 - DNA, 478 bp, Oryza sativa
cagcgcgcacgtgcgcttgtcctctattgcgcgcgcgccctttttttttgggttttttttatgttcgaggggatcaaaagctatattgaaaatgttcatcatgtcatttataacaaggggggcagaaaggactttgcagccgggatatgtacaggtaatttccatcatcagagatggagtaaaaaagttgttagtagcaatgtctcaagagttaacggaccaaaatgaccctgtaatcagattggccaatccaagatcattccgagaaccagttttttcatttgaaaagaacaactcttcacagatggagccgctacaccaacaatctaccactaaatgagctagtctactgaggatttaatcacaggtaccgttccgtttctttgctgatgggccttcttattacctggggtttttgaatgccgaacaacatctttgctgcatctgcttcttgccatttcgtttttactgcagatac

SEQ ID NO: 433616 - DNA, 484 bp, Oryza sativa
gttggaggtcaccggaggccggccaccgcgcgggggagatccctgcctccccccgcctcctctcccgcgctcgccgagtgcccctgcccggccgctccgcgcctctggacccctccctctatacccgcgtgaatttttagcatgtgacgcggcggggggcgcgcgcgcgggcggcgggaggaggcgccgccgggggaaatcgggcgcgagggcggcggcggcggcggaagcgggattgatccagagattttttttttttggttatttgtttggattggttcggaaaatacttttgagggcgacgcagcctcttcgaaattcgttttttccagattgatactacaaaatggttcgcatgtctggacattttcaaatggctgctgagctgaaacttgatatgatggcaagtcatgcaacaccagatgacctgaccggtgataagggtgctgcacagatcctacacaggcaactatttgatgcacat

SEQ ID NO: 433617 - DNA, 444 bp, Oryza sativa
cccgggtgggaccgcacgcaggccgactggttcagatcgcgagcgcccgccaccgcgcgggggagatccctccctccccccgcctcctgtcccgcgctcgccgcgtgcccctgcccggccgctccgagcctctggtcccctccctctctacccgcgtgaatatttagcacgtgacgcggcggggggcgcgcgcgcgggcggcgggaggaggcgccgacgggggaaatcgggcgcgagggcggcggcggcggcggacgcaggattgatccagagattttttttttttggatatctgtgtggattggatcggaaaatttttttgagggcgacgcgtactcttcgaaattcgttttttccagattgctactacaacatggcttgcatgtctggacattttcaaatggcttctgtgctgaaacttgttatgaaggaaagtcatgcaac

SEQ ID NO: 433618 - DNA, 363 bp, Oryza sativa
tgtgttttttggaaaacaggggggtattacttttttttttgctgttttttttttttttctttgtatattttttttgtttattgagagttggttgctggcctggcccaacaaactgaggacagaacccaaagggtgctgaaaaaccccccccttttgggggaaaaagagggggccatagccgccggcggatggccttgttggctgcacggtccggccgggggggaagggttcgtttttaccacctccctggttttctggggggcccccggcaaaaaggggggggggggcaccgagaccgtgttcagcggggtcaagaccttcttgggggtggccgccggttgcggacgggacggctatgacagg

SEQ ID NO: 433619 - DNA, 276 bp, Oryza sativa
aggggggaaccagttttattttattctactttctactatctaaactaaactggtttttctgatttttggtttttttttactgcaacaattataagggtaatgataatgattatgagcccaaccactattactatgactattattgcccacactgggaagccagagttattattatttcctccattcaggccagcattatcagaaggggacccaggtgtaattggatcaggggcaaccccagatggattatttggtgggggaattgggggtttttcc

SEQ ID NO: 433620 - DNA, 423 bp, Oryza sativa
atttgttgtcatcttcttgtttatcatttccttacattttattggtgcaaccgttataggtcctgctgatgttgctgcctttattgccccaatgaacaccgaaagagctatctatggactatctagtttcacagttgatccatatttagttacgcttgcccaaaatttcacagaaacgtgtgtattacaaaacctggataccaatggttatcgtactattctacaaactgcatatgctgggctaaaaggacaaacctatactggttctgtagaacagagtattggggctacttacggttatgcgttaatgactgactatcttgttcctttaatgtggttggctcaaaaagttaattggacttgtattaataatacctgtgtagaacttgggaaatgtattgcctatactcagtctatatggca

SEQ ID NO: 433621 - DNA, 300 bp, Oryza sativa
ggaaaaaaacgaaaaggaaatattttccgtttttattttttgggagggggggccacttttaagaaaacggggcacccaaaaagggaagggtttattccccaaaggggaaaaaaaaaatggggccacaacggaaatgaaaaaatcggggggggattttaaccccccaaaaccaaaaagggccaagggggggccaaaaggggggggggccctaacccccaaaaaatgaaaggggggggcccgtttttatcagtttcagggcccccctgcccatttggaccggcggggccttaaatgaaaagg

SEQ ID NO: 433622 - DNA, 344 bp, Oryza sativa
acacatatggggaaattgcatttcaccattatattgacctatataatccttactgagtccaaaaaagacttgccatacacacggtgatacgctgatcctgagagaaaaagaaatgcgtgcacaacttcccagagtatacaagcgcgggagcctgaaccgccaagcctgaggcgcccaatgagagagctagcacacagtaagagcgtggtacagactgccctgggtaacccacagaaaaccggacaggccagagggattaacggatcagacaaccgcgagtgcgaggctggccgcgcaaagcacgtaagcctggaaacttccttatattagtgagacaaaccaac

SEQ ID NO: 433623 - DNA, 281 bp, Oryza sativa
acttatgctgtttttgttcaccaatgttgtgctgtataatcttttgatttttagcccaaaggcttctgttatatatattgcgtccagcagctcaccaataattataagatgttggtactacagcggatttggaaggcacagcttgcaattgtaaggagaggtcaggagcacggtgatcaactcagaacgcggaaaggagtaatcgaggagatgcacgctgagattggagaggacatgctcacgaagatattggtgaggctgacgaacaatacgatgacgag

SEQ ID NO: 433624 - DNA, 450 bp, Oryza sativa
  unsure (1)..(450): unsure at all n locations
tttcaccctctccctccgccgtcgccatcgtgccaccgccgcctcctccacctcctccgccaccgccgtcgcatcgccgtctcggaggtcggagctcgtccgcctccgcctcgcgccgtcgccgagcgcagccgtctccgccgagcaacggtgaaggcgggcgcagccttcatcagcgacgaggtcgtagctccgacgaccacgccacaggcggcgcaaagagctgacggcccagatcctggcatcgggagccacgccgctgcgcccgccgatggcgacggcgaggaggaggaggaggccccgtcgccgcgtccgtcctccgccggctgctacaccttcctccgctccgcgtctcgccgcggcgggcactggcgcctcgactcctccgcctccgcgtncgcggcggcgcatgtggtcagggtggaggtggggacgacgaagggagagagg

SEQ ID NO: 433625 - DNA, 523 bp, Oryza sativa
aatattaatctgttcatgatcaaaatgactcaacaatgactacaaatatctacattggtatacattaggttagcattcttctgggttgcaaaagtttctttcgtcctctgctgtcattacccataacactgaatctggatcaatagctgttatgtcttctatttctgcttcagtagaaacctcacgtatacaaataggagcaatgcctagtttatctccagagatttggattaaatcatgtaatgtcgagggtaatctgatttttttgcctcctcgtcgtccgtaacgtctaataatcacccatgggcgagtagaatcacttgtgatagatacactttttgtaacatgcgcatgtactctttttccagtagtaggaatagagaacagagatttactatagtgtcgggatataaaggggcgatgctctggctcaggaagttgtagaggaggtaaatcaattaaagctttttcaatacacatggcattttcttgatcattgtttgaatctgaatcactcagaaaa

SEQ ID NO: 433626 - DNA, 443 bp, Oryza sativa
ctttgagatgagccttattatagtctgtagattcgattagagatattctctttatggttatggataataaaacattgatttctagtgataaattcaagaaagcgaggaatgattttttaaaatcaccatcggatttgaatgctcagtatcgttatgcattggctatggtttattcaaaagatagaactcatattgaggaaggtttgaaattgcttaaagatttgtctggtaatgctaattttcctgagatttgtaattgtttatatcatatttgctatggatattttcgagttgagaaatatcacgatgttaagctttatgctgaaaaactttacaaagaatcacctaatttattgatacctgataaggattccatggctgttatcatgcacaaaactcaagcattggtactattatcggatgaatttttacagaaaccccat

SEQ ID NO: 433627 - DNA, 415 bp, Oryza sativa
agagacaaaatctggatctctctattatgttaatcacaagggctccatgtccaagtatataaatctacaatacatacaagggggggggtatatactagtataatgcaagtatccgctacacatatgtactacgccaaaacgaatcaaggtatcaaaagaaggggagggagtaggtacacacacccacgtcagtcgggatcctcacgccgtcgccggcggggtgccgggcactggacgcccttctcactaattttttagcttaagcctaattaaccacgaacgagccaaccagatgcgagcttgggccaggtcaaccgacgacgacgtttttgacggcgacggggggggcaaccaccgtgcgccggcacagggggcacgacgcgtgcctgagcagccagctgtcgatgcaacggag

SEQ ID NO: 433628 - DNA, 343 bp, Oryza sativa
cttaattcttgctagctagatccttctcttctctgcactctgctagagcaagctcgatcgatcgatcagtgatatttccccttatccaaatccagcacaaaccaacaatatccatggaggccgtaacagtgcacgccagcttatagtactactcccctacggtggtcgccggcggccgagacgacgccggcagcagcaacagcagcaggagcatgtcccgcctgccatctcgcgtcgccggcgccgtaactcggggcatcgccaccttccactttgccacagtgggcacgatcctgggggcgatcaccggcgggctgatcgggctggccacggagagcggaat

SEQ ID NO: 433629 - DNA, 432 bp, Oryza sativa
ggaaaccaataaccctttttgcctggaaaacgttttgaaaaaaaaaaatttttcctatggggattccccaaagcgcaaggggggcccaggggcaaattaattagtaaaagacccccaagggcaatgcccttttggcaaaaaagggttctccccttaaaaaacgggcagaaacattggttcctataaaaaaaaaatccgggcgcccccaattttgaaaccccttgggggttttgaaaaacgggaccccccagggtaaaaccccttttggggggtaaaaaacccggactggggccaccccctgcctttggggccgggaaccccctgctcctgaaaccttgggggcagcaggcacctttaaaaatttttggtttttggtgggaaacccccccccttggggaagggagggaaattttggtcccgccccaattttcc

SEQ ID NO: 433630 - DNA, 432 bp, Oryza sativa
gttcattgtgagtttcggactggctcggtgggaaataagttgcatggtaattggggaacgaacagctcccacaatgatgttcctgtggtgggaagttcagccgatggtgcagatgatgaagcacctcctggatttgagtctcagcaggaaagtcggcctggacaagcttgtttagaatcgggggtttctccaggattatacttggagaggtatcaacataacttgactatttcatacgggattccaatcgcttttgttgagcattttggaaccccagaagttgaaggagggccatgtcgcaaaaactggaaagtcgcacctggtgtgcctttccagccctttccaccattgccgccctatccaagagggagtccttgtccttccactcagatgtttcagcatgaacacaacagtttgggacattgtggcagg

SEQ ID NO: 433631 - DNA, 355 bp, Oryza sativa
gggggaaaaagggaacccaaaacccctttttaaaccaccccacttaaaaagggggttcagggggggccacaatggagttgggcaaaaacaccccccgggaaaatggaaaccttctggggggggccaaaggcccaacaaaatttaatacaagggggccccaaaaggggaggccggggggtaaaactgggcccagcctaaaaggaaaaaaaggggtccccgggcaatggaccaacagtggtaaactaaaaaccctttaaggatcaaggaaccccagatttgaaagggtggggggggccccctcgtgggttccaaaaaaaggccttttcaactgggaaaaatattctaccaggggggg

SEQ ID NO: 433632 - DNA, 436 bp, Oryza sativa
tcgattacattcctttgtctacaacaagatcaagaaacccaaaagctaagcattagctcatccatcttaatccatcagagttgattagctagtagttgagagttgattagtagcttgcctttgaacatggaagggggcaagatgagcagcatgggcatggatgctgcttcagcttctgttactgtccctcccatgcagatgcaggcaggtgatcagagcaacaggatcgccatcatcatctctccaagagccgggagctccaagatcctgccattcgagcttgtcaatggtgccgccaatgccggctcgcaacggcacgctgatccagcagaatccactcctgaagctcatcatcatctatggcatccagtagacctcccaaagataaaaccaccagttcctcttgtcaagaaggtgggtgcagagttctttggca

SEQ ID NO: 433633 - DNA, 422 bp, Oryza sativa
gagtaactaaaactgaagaacatcctaaatctgactaagcaaaatttataaggatcgggcgagctacaatactgcattgtttgggatttgggcacctgagcaacaatactggttatatatactctgacgccctggtgccaactcaagtatagggtttcagaaacagagtgtagaatcctcaacgaattttaagattacttaagcatacggggatatcctctacattttcttctgaatccccggggaaaccaccaatgccagttgaagttgaagggctttcatttttcatcccacttcgggatggcacttgaacccaaaccccactatttctgactttgaaggggggactctttctatctttaactttattgggctcaattttgggcttagcaagcacacgggagatatccttatcactgttt

SEQ ID NO: 433634 - DNA, 440 bp, Oryza sativa
tcgtttgctttccctcgcaattttctcctcttttttcggccgtctccccgcacaagcgattctctttcgactcatcaactccacgaaagcggaccgggcctatctgcgccgccgccgccgccgcgcgcaagctagattagattcgcggctgatcgctcgtcgtcggagatgatcaggcggggcggcaaggcgcgggggaaggtcgcggaggaggaatggccgagcctggtggatctggtgcttggctggaaactcgaggacgtcatgaacgagaacctctttaaggacaagatgaaaaggataccgtccacattcagcgatctcaagagctacttagagccctacacctatccattgctggaggagacgcggacggagatgtcttttagcatggatgccatatccaccatgccttataccaaaatttcgtggatcgagca

SEQ ID NO: 433635 - DNA, 241 bp, Oryza sativa
tttctctccaccaccaccaccttgatcgcatgctgcgtttttggctgcggtgcgcgtgtaggatgcggaggatggacgagcagatgggacgcgtggggttcgactaactggtgctcttgcatcatcagcaggagcagcggatgctgagggagcagcctttggaagaggaggaggaagaggaggtgcggcgcccgatgtccggcgcggtggactgtgggctagccgcgtttcctgtggcggc

SEQ ID NO: 433636 - DNA, 153 bp, Oryza sativa
cgtactcttgggacttgcacgcgatctacttactgggactttcatcttacgatgctaaaggtaatcactagctaatagctcgcttaagttacgaactagccatgagcagacgagaagcaacagctctacgatttccaccacaagaagcgacca

SEQ ID NO: 433637 - DNA, 422 bp, Oryza sativa
tttccttgcttcttcctcctcccccctccctcttcatcctcaaccaccaccaccaccccgcgcgcgacgccatgctccgccgctagcccacaccctccccccacccaggcgctcggcgaaatgtcccaccgggcgccaatgccggggggctcctcctccctctccgacgccctcgccgccgccgcgctccgcgacaagcccgactcgctcccgccgggccgcctctcccccgtctcccccctcgtccactccaggctccccactcccacctcctcctccggctcctccggctccgctccgccgaggcccgcgcggcgtggtggtggtgactaccacggcgtcggcgaggggttcggcccgctcatctacacgtcgtgctcgacgagcgcgggtggtggtggcggcggtgtcggagcgagcac

SEQ ID NO: 433638 - DNA, 389 bp, Oryza sativa
ctctcctctccgatttactcctctcctttttgccctatcgccttggcgatagggttccgcttcgctgctgcagcagcggcgtttcgcctgtaaatgcttcttgttgttgttggggggaggggtctcttttaggtgattgttcttgttcttcttcttcgacatggtggctttctatggactcggagatggagggtgtctcgtgtcggcgccggcggagctggccgggatgttctgccgcggcggcgtggtggtgcagcagcagcagaggaagcggtcgctggtggccgcgtcggcggtcgccggcggcggactgcgtcgtgagggcggcgaaaaggtataggcagcagcggcagccgccgtcgttcgagcgctccccgacgagtgccttt

SEQ ID NO: 433639 - DNA, 536 bp, Oryza sativa
tttttgttttttttttcaacaagctttgcaccagtcaattacagggtgcatatgcagctcattctcctgtacagcagcaatcagtacatggaacaaagcaaacaaacagtccatggaagatggaacaaagcgctgtacaacaaaatggcattcctattcctattgaaaagaagtgccaacgcttcagatcccagatttcaaacaacataacccaggaaaacaaaaattgctgggtggttgattccaaacagcaaagaaacaaccggaataacaaaaaggaaatactaaaaatgaatgaatgggttaagcaaaagaaataattgcatagcccagccagaatgacatatcaggaacaccagagacggtggtagtttcaaagtttacccactcgatcaactagtttggacctgactgactgactgactgaatgcaactcaagaaggactcaatgatagttcgacggacggacacaaaagggagcctgctactgctaacaattacaaggcagacgcaaaacctaacaagaaagaaactta

SEQ ID NO: 433640 - DNA, 424 bp, Oryza sativa
tcgctctacgaatccaatccgaattccccccccccccccatctcttctccccttctccaaaatcctaacccccactccccatcggagagagatcgagaggaggttgccatggcgaagtgctcctcctgcgacgactgggtcatgctggactccgacaaccccgcggactcctccgacgacgacgactacgtcctcgcgctctcttcctcctgcaacacccccgcctgctccgacgaagaggaggacgacgacaacaaggtggggagcgacgctgtcggtgacgacctttacgggggagaacttcaggaggaggactcgccgcgcccggcgccgtcgaggccgctcttgggcctcttttaccacaccggcttcgacaaccagtccgggtacctcgcattcgacgtgatccgtagggccaagcacc

SEQ ID NO: 433641 - DNA, 434 bp, Oryza sativa
tcgttcatcgtcaccatgatgaatcaaattcaacggtagaaaatttttcaaggaacccaaaacaagaggaagaaagaaaaagagatcggcacatgcatccacatatgtactactctgtaaaaaaaagtcaatcctagttataaacctagatacatatgtatttagattcgtaattaggattagtttttctacgagacggagcgccttccttccattgatcctcttggcatgtatttcttcaccacttccagtcctaattaatcttatttgtgccgttttgcatgacgtcacaactttttgtttgtttcattttttgccccttttgtgttttgcacgtatggacacatgcatgcatgcatgcacgcacgcacgtgcgtacgtacgtgtacacaccttctatccctatccctattccttttctattgtatgtctgc

SEQ ID NO: 433642 - DNA, 348 bp, Oryza sativa
aaaccaggaaaacaaacgggggcgccccaaaattcccttggggggccccaaaaaaaaccagaaccccttttttctacgggggggaaaaaaaaaaaaacccccacccaggaacagaccaaaaacccaggggggtttaaaaaaaaaaaaaaccccctttggggggggctcgagcccccaggggctcttccctattggggggggggaaaaaaaaacgccaaacaaaggggcattggccccaggcaatcgttaaaggggttcaggggcctttgaaggaaaatccccactttgccggaaactttaatttttggttgcgaggggatacaaagaaaaaggggggtccctcacagc

SEQ ID NO: 433643 - DNA, 231 bp, Oryza sativa
tctttttatgctccatgtctttacctccaacccctcggttcacaaccaatgctctgctaggatttagcgggctgagatggctgctctagaaggcgagtaccgttgatacgtcaggaggctgttgctggggcacacaggacacggacctcgaggccgagttttgaagcttacggggagaatcttgacatgccagatcatcaactactgggagactgtgaagtcacggaagga

SEQ ID NO: 433644 - DNA, 507 bp, Oryza sativa
gccgtcgaagttgctcgtgcccggcgggctcagggcgctccccatcccggtgccattggtgccggttccgatgccgcctccggggctcaaggtgccggtgccggtgccgactccagggctcaagccagttgtcccagcagcactgcatgaacaaaggtggaataaagagctttagatcatcatgctcctgcttcgagttacactgactgaagagaatgcagtcaacagtgcataattcagtcagaagactgctgatggcttgatttgttaacatgctaatcgagtgaaaattatgaattcggttgtccaagactggaaagggatcactttggaaagcctgtcatctcattattgtaagctgcaaagtgcatttctaatgcaaatcaggctcatcgttctgtcagttatgtccttcacacatgacgcacatgcgagaaaggctgtccaactttttgttaagtaagagttaagacggcagcaataatcagccttcatgaaaataatact

SEQ ID NO: 433645 - DNA, 433 bp, Oryza sativa
ttcttcttgcaggtttctctggatgcactttcccttccagtgccaggtaacatgatgaatctctttgctcctcctgcattaagttgtggcatactctttattttaccattttagtttgtaattagctattagtactaccacggaatacggtcaaattattctggaagattagtcaaatgtagtacacctgctgaatcagcatcttggaaccattgattgatcatgctccatccaccgacaccagtaaattaaactagtactaatagcgaaatgcaatatactactataataatattctttgcagctcgattagtctagatcaacttgatgtgataacctaccctcgcactaattacttcaaagatttactgacaagtttgttgcaatgtctgaactggagtgatgttcctgtgtctttcctttgaagaatctg

SEQ ID NO: 433646 - DNA, 340 bp, Oryza sativa
accgaaaaaaaaaggccgtacttttatttatgataaaaaccatatttatagatacaaataatgactacggacttttttattcagcatatattggacgtaatatatgtatcttaggggcattcatgcatatagaaacggatcctttaacttagtacgctttttaactaaaatggaggtttttaattataccgaacccatatagtattagctagtaacccacgttagagggcagtttattagaggagacttgatcggcttaacgtagctaggaggggcgctccccgtaaatgttgccacccgggttgtagttgcaggcgatcagcgggctgttgcgaccgtt

SEQ ID NO: 433647 - DNA, 431 bp, Oryza sativa
tcggtttacagtctcagatagctagccaagctgagcaggactaagatcactcgtgaattcggagataccatgggaagtgtaccgaagaaaggagctgcctttgctctggcggtggccattgcgaccatcgtgatggcgaccaccacgacgatggccgccgacctgtcggacgccgagaaggcacagttcgtcaagctccacaacgacgcccgggccgcggtcggcgtcaaggcgcaggtgtcgtggagcgaggcggtggcggcgaaggcccgggagcacgccagcacgtgccggacggaccacatacaggggccctacggcgagaacctgtggtggtgggtggagcagcaccgccggctgggtcgggaagccagcggacgcgatggggagctgggtgggcgagaagccgtactacgatcgcagcagcaaca

SEQ ID NO: 433648 - DNA, 524 bp, Oryza sativa
acataaagacaccttctttttttttgctagctgctcacggattaaaaagcaaccctacataacttacaactccggcaaagtaaaagtcgatctctctagcaacgcacaaatgcacacggctacacataccggaataattaatatactgtattataataataataataataatcgaactatcagctaagatcgatcggtgtgcataaacacgcggaaatacggttcggtcggtcggtcggtgttcgccatgcacgcaaccgtcgcatgcaacacaaaatgcaatatagagatttaggataaaactcgagcgagagctaaggtagagctactctatggagtagcagctctgcttgaatgcctcgaggctgcggtcgaagacggggacgaaggcgtcgacgctgccgtcgccgaggtacgacggcaccaggaacagcatcccctccgtcgggaagtaggacggcatgaagtaggtcgggcagccgccgccgaagtcgagctcggagaacgggaaggtgagccagctg

SEQ ID NO: 433649 - DNA, 422 bp, Oryza sativa
tcgtttcgaacaaaaaaaaacgttgctggaaataatggaggtgaaggtgttgagctctaggctggtcaggccgtcgtacccggcgtcggcggcggcgccggaggaggagttcgtgccgtcgtcgatgttcgacaaggtgacgtacgacatgcagatggccatcatctacgcgttccggccgccggggccctccgtggccgacatcgagaaggggctcgccgcggtgctcggcgtctaccgcctcttcgccggacaggtggtccgcggcggcggcggcgagctgcggggcgtcgtgctgaatgaccatggggccaggctggtcgaggcctgcgtggatggtagcctcgccgacatcgcaccggcgaagccgtcgtcggtggtgctgcggctgcatcccagccttgagggggagatcgaggagg

SEQ ID NO: 433650 - DNA, 425 bp, Oryza sativa
ttttgtttttttatattttttgtgttttttttttggggaccattccatcctcaattatgtgcataaaagggaatacaaagagaacaagaataagggaactggaatcctgagcaaataattgatggattttttttttctgtgaaagaacttgaacgaatatagggccaaaaaaaaaaaggctttactaacgaaaaggaaaatggtgcagttaggcattcaaaaaaaaaaaatgttgcagctggtatttaattacagcggccttgggggatggagcttgcctttactggaggtggaggtaatccatggggtccaggaggaggggctcgaagcggtcgagatcgagggggatgtccaggttgccgaggtagaccttggctaccttacggcacccactcggggggaccgactccgggtcgtgcaccccc

SEQ ID NO: 433651 - DNA, 385 bp, Oryza sativa
ttgttctttggaaggcactccatgtgccatgtgagggtgttggtgtctctagggtacctgcctcggcaggcaatcacacacacatatttatcacgagaaagagtacagctgcagagaataggaaggatccagacactcaaagagagaggagaggtaggagagatgggaggctatcataggaagctgatgaagagctggaagggtgcagctcataagtatctaggcatggacttcgcgctcggcttattgctcgttttccagacatactttaccgtctccaagcagtgagtgatcgctgcacccaacgcaattcggataacattgccgggacacgcctacctgacgatccacacgtctgtggaagagaagaggccacagctgcccc

SEQ ID NO: 433652 - DNA, 506 bp, Oryza sativa
ctacacacaaatgttacccggtccaactgctataaggcacagtagcaatgaccaataacacaactggtgagtggcaactaaacggggcgtaaggcaacgtccagagtgatagaaccaatattggcgtaggggatgtcgttttgcttgcacatggcgtcaatacgctccagggtcttctcaatgataacagcgctgatagggccagcattgttattgccaccaccaccaccacgacgcgcacacctgcctccccgcatacagttttcgacctcttcggcaacgtcttgggggccaggcagcaaaaccgtaccatcaaagaacaccattggactctcaaaggtgccatcataagttaattgagttgctgtggaatcaacagggggatcaactgtaaccacaactgggcccttggcaacaagggtgagttcgcaaaggcttccatccttctcatccacgcggtagatgtagttagacccagatacatacttgctaccgtccggtgcagt

SEQ ID NO: 433653 - DNA, 442 bp, Oryza sativa
  unsure (1)..(442): unsure at all n locations
gtttttcactgctcgtagctgttgagagcggatccatccgcccagcgtccgtccacaagcagcagacggccaccatggctcagcgtatcgctgcactgctttttctggtcagtttcgttgtcgttgctcttgctgacaagcctacagccgaggttgcgaagttcaaggattacaaggagcatgaccaccagcatcaggacaagcactaccaaaaggattacaagcccgagcactatacaaagcccgactacaagcccgactacaagcctgactacaagccaggctacaagcctgactaccatgacatgcccggctatgagcccggctatgagcatgactacaagcactcaccatacggtcatgaatacgaacaccctccttacgggtatcagcccccccacgcgtatgacacatacagtgctccgccttctncatatgatgg

SEQ ID NO: 433654 - DNA, 424 bp, Oryza sativa
ttcttattttgggacaaacgaaaggatcccaaaatgatcttattatgggacggaggaagtattgaattatgcttagtgtgctgacccatatgaagtgatattttcaaagcatgtctagtttaacatatattattttatcatgtctcatgtttatgcataattatcggatgtgacctctctattcacccaatcaacaactcaagatattgggtcggttggagctgtttgttacagatggggttcctggtttcattttagtggcaaaaatagtaaggtcttaaatagcttatttggttcaactggaataagtagctaccttagttggttaccagacagatgaagcacacatttttagaaactttaagctggtggagcaagccagcagctgtatacttctatgctgtcagttcacgccaaaacagtc

SEQ ID NO: 433655 - DNA, 363 bp, Oryza sativa
atatcaatggaaataccaaagggactgaaaatgaaagagaggtttgtgggagggcgacacaacaagcccgaaaggacaccattactccctttttatcatcaaactttaagacgtaacggcctattcaaacccaacaactggagtaataaagtggagctccacaggtaggcgcacagagggggccccactataagacctgttttttgcacttcgtgttgttcccctaccacctttgagaagctctcctgaaaggaaaaaatgaaggcccaaacttgaaattttgaagggaaggaggttgccacaagaaggaaaaatgggggaaacttgagggtggttacccccggttgattcttttagaaccta

SEQ ID NO: 433656 - DNA, 433 bp, Oryza sativa
gacgccgtggtctggctcaggaggttctccgacggcgtcaattgcgattgccagcggctcgagggggttctcgggatgatcccgggcgccaagaggatgataatggggcacacgattcagaccgaggggatcaatgcggtgtgcggtgcgcaggcggtgagggtggatgtgggattgtctagaggatgcggtaatgggctgccagaggtgctcgagatcaatggtggcggcaccaatgtgagggtgatcacgacggatcccgcggaggcctggcagtaccggaagcagggggcggagaaggccgccatcgctaccgcggtgaaggagaagaagggggaggtaaaggaagggcttgcattgttggtaagggagagccatgggttgaaagaggtacaagctaaggcggtttaattagctcagtgcggtcacttca

SEQ ID NO: 433657 - DNA, 439 bp, Oryza sativa
ctagaccgcgcgcggccgtcctttttttttgtttctttctcgggccggttgctgtcttttctgctctgtggcttttccttctctgtgctcttgttcggctaagcctcgcgggctacctggctttctcaacaggaaagcagcgcccccccgttggcccatagcagcctcgggggcccccccccccaaaaaaccgggcggtccgggggggcgccccccggagggggcccccccccggggccccccccccgcccctctgagcccgggccccccaggaccccggcccccccagagggggccccccaaaggcccccccccccggggccccccccccgcgcaaggtccgccccctgaggcgggcccactgccaaccggggggcctccctccccaacagggcggccccccggcgacccccccccgtcaccccccccccgcgggcgc

SEQ ID NO: 433658 - DNA, 209 bp, Oryza sativa
tttgtgttttttatttttttttgtttttttttttttttttttttttttttaatatcaaacgctcttaaaattaaatgattttgtttctaggaggacaacacaacaaccccaaacggacaccatccccccttcaacaaacaaacattaaaactcaaccccctcataaaccccaacaacaggaacaacaaaagtggtgctaaacagctagg

SEQ ID NO: 433659 - DNA, 457 bp, Oryza sativa
caaggaaggggattaacttttacattccattttccatttcatttggtggtcactaattaacatatgagatggccagcgcagggcgatggaggagggacccctcgaggtaattaagcttcaaaaaagggaagctgtatagcaagcacggcggcgcctcgctgcgccgccggccggagctcgtgcatgggagggggagcatgtacatggccgtcgatccgtcgtcgtcgccggcctagctcgcctctcaacccagacccttctcgtcctctctctgtgtgtttgattacccatttttaccacgatcatcctacgtacgtgcacacgagcatgtaggcacatataaacatgtgagtatgtgacctttacgccacctgctgcacgccgaggctaccgcccggcgagtggtggtgctgctcctcggggatgctcgcgagcgccgggcgccacgccacccgcg

SEQ ID NO: 433660 - DNA, 411 bp, Oryza sativa
caaggacggggaaaaccgcttagaattcgtttttcataacatgtggagcaaacgctacagcaaattatacgctttgaacaggcccagatttagcagggctcttggctggtacccaaattacatcacatgaacaggtgactttctacgcaacggggaagcctgtggtgaccacaaaatatctcaagcattttgcatgggatgggggtggctattccatggttggcgagacctatttgtcccagccatgcttgttgtgatcgccaaacacgccattctttgggggcagagggtccatatagtggaggctgcaccttcgccaagccatttcgttctgaggacatagcgcctatgcgggtctcggctaataacaactgaagaaagcttggaagcgccaatagcccaagccggggg

SEQ ID NO: 433661 - DNA, 444 bp, Oryza sativa
gttagttatatcggatttcacctgtgcatcgtttcaacctgaaaatgcgcagatattgaaccagcatatggcaggaatatctatggtaccaaagcaaggctcagtagacgaaaacagggacagacacactatgctttggggagaaaggtctaatgggaattgggaatgacggtatcgctgtgcattcatgacttgacgacaatggcgctcaacaggaatatacacatgagggtctacactctcaagctacaatggacacaccgacaaatgaggctagaatctggaacctgaaactatacgaggaacactacactagatgtgagacacccagatagatagttgttgcctggaacaaaggctaccatactaccagggacgcctctgaatgaacagtccatgtcagaataggtgtggaagaaatcaacgtgagtaacaaccgagtga

SEQ ID NO: 433662 - DNA, 501 bp, Oryza sativa
cccacaaaagaatggaatttcagtacaaccaataatccaagccactggtacacaatggcaccaatccgtacacaaattctcctatacaaatcaaaacaacagcacatacacagatacactcaaacacgccacaaaaattatagcaaaataacacaaactaatttaatcgattggtcaatcaaccaacagccaaatgaataatctgatgatgagaagttgaggctttcagaacagcatggcagctagcagcagcagaaacgcaggaaaaccggcattggtggcgaccctccgtgcagagctgggcaccacctgcggcctcgtctgcgtctggctcgtcgccggcggcgtggcccgcgccgtcggcgatccggcaccggccgtcgactccggcggacttggcggcagtggtggcatggccggagaaactgcaacgggtacttctgccgctggaatctgagctgatgtatttttgcattggaggggaccagacatgcagttgca

SEQ ID NO: 433663 - DNA, 167 bp, Oryza sativa
atagggaacaataatcaccaatggatcaacaatgcatagcgttatggattgaacaacccatgtcacgaacagatgcatgagctatcttctatatatttccggggctacatataaccttcgtgttcatttgtggtatttacatgggatgactattttccaggcttaca

SEQ ID NO: 433664 - DNA, 444 bp, Oryza sativa
cttttctcaccctcatactcaggtattgttgccgattgttctgtctccgctcgtcgccggcccctcgtagcgcaaatcgtcatcctgcatcgtcgattgcccacgcctcgatctcccgttggtcttcccgccgttcgccattgaccatcgcccatggctcctccaagagtcaccggcgaatccaccccacgcacccgcgccacctcccacccgcaccctcgcccccgcccactccctcgctctccaaaccctaaccctaacctcccctcctctctccacgactccccgccgcacgccgacagttcgtcgccgggcgccggacccgcactcccctccccgctcaccggtttcctcatcacgccttcgtgccgacaccactccgatccccatctcgcgagcagagcacgggagggatctactacgcggacgctgccgaccggcacc

SEQ ID NO: 433665 - DNA, 242 bp, Oryza sativa
gtccttgctgctgcatggcagctaattccggtttatgtttgctctaatttacaaattacattcatctctcgagaccgatttcgtgctcaatttcgcgtgcatgaataagatataattcatggaggcgacgatcaaatacacagcaagaagtcgagaagagatcggggaaaaaaagacggcggattcgtggctatggctagtagtgaattgatcactaagcttagttggccttcttggtggtg

SEQ ID NO: 433666 - DNA, 360 bp, Oryza sativa
tttcatctttcttccaacctgaaatgtcagtcaggtctggtgaaccattcttccttcctcatcacctcatctactaaacacaaaagaacacaagctccagataattatatgcaactatccttcactccaagtactcactcaagaacacaagctcagacagtttgtgtgtcagtgaggcaaggaggaagaagaagaggagccaagaattgcggcggtggcggcggcggcgagaggaggaaggagatgaaggggatgtccgggccgaagctgctcgtcgtgcacccggcgtcgaaggggtacaacggcgtgtgtccgctgtccggcgcggcgtcgtcggggccgccggcggcgtccaatgcc

SEQ ID NO: 433667 - DNA, 274 bp, Oryza sativa
gttgctcctgagatcgtctcgtctcgtggtggtggtggtggccattgccggagcttccaaggtgtttgatgtcgatggcggaggtgtgctgtgattctgcggtggtggtcggggcggaggcggaggcgagggcgagggcgcgcgccgggaggcggcggcgggcgggagttgagggggcagggaggtggaacgccacggcgacggctgcgggtgtggcggcggaggaggccgcgacgaggaagcggagggcgagtggtggtgaggccgggttggt

SEQ ID NO: 433668 - DNA, 348 bp, Oryza sativa
gagcgcggcgcctccgcctgcgcctcccgccgctggctcgccctcctctgcagcatccgggcttccgagctcaaccaggccaccgctgctgccgccgcggcggcgccgccctcccttcccgacctcaacgaggagttcgtcatggaggaggacgacgaggaggaggagtcgtctcccgtggtggatccgcgcgtcgagagggtcctcgagggcaaggaggccaccgacgttccgcctcgcccgccatggccgtcgacgccggctccccgccgcgggtctggagaagcctagccggctcgcgggagccccccccacggcgctgcgctatccgacccgccacccctctct

SEQ ID NO: 433669 - DNA, 377 bp, Oryza sativa
aagcacattgcacaaacgtgggatagagacatattatctctcaggccatgagcacgctctgggatcagcctatcgatgttgtgcacggaccggtcagggggcttaggcgacgcgacagagctctgcctgagatcaaccactcgcgcgacctatttccaatgcagttctatgacgctcatggccgtgcagatcagcgcctccacctcgacgggccacaagtcggagaaaatcttcgcccacatcctccattctaagcgcttgaacactgagatagtctaggtgttggcgaagaacctgcaggagaccatgacgacgccggcggcgatgatctacagcgaggacatccagcccgagtgggagatgaacacccccaccgt

SEQ ID NO: 433670 - DNA, 347 bp, Oryza sativa
  unsure (1)..(347): unsure at all n locations
aatcatatagagcacaaggtcaaatctttagccaccaagatcccatcagccacaaatcgatccatctccaagctcaaaatcccaattctttccaagaaagatttttctcggaggccatgtcgaccgccggcggcggnggnggtggtcggggggtcaccatcaggtccatctactgcaggggcgtcaaggcgttagttcccttccagaagccgtcgctctacgccggcgtgtcggtcgccggtcggcgggagaagacgagcggagacccccacggacgggagaaacccgactgggacgccgacgtctttcactttgaccttcctcgtcggcgacgatggtatgctgca

SEQ ID NO: 433671 - DNA, 463 bp, Oryza sativa
ggaaaaaaaaagggaatatggggggaaaaaggcatccgaggaatttttcccctttttttccttgggggaaaccgtccttttgccaggacaccttcgtgggaaccggtaaaaaggaaaaaaaaggaaaaaaaaggcttcctaaattttttttttttgccattggcttgggttccccccggcccagggtaaaaccgggggcccgttgggtttaggggggtatttgggggggggggcaagccactgggcctccccgggggggggggccccccggcccaggggccccccctggcccttgggggcgcgtttccagtccagggcttggaccgcccggaagcaatatttggccgccccgaaaacggagcaccgccggaactggggggggggggtttccttcgggccgacccgaacgggggagcaagggcggagttcgccccccccgtctttgtccccggggggggaaggg

SEQ ID NO: 433672 - DNA, 425 bp, Oryza sativa
tttatcccgcgctccgctcgctctccaccgctcgccgcgcacgcctcaccggagaccagcccgacggcggcggcggcggcgtcggcggcagcagcgggagcttggactgagatgaggacgaggagtggatctctctaccgcagcggcggcggcggcggggagacggccatggttgggcagaagaggaagaggtcgtcgttgccgccgcagtacgccaccgccggtgactgctgcggcggaggaggccgccggaagaggctggccggtggtggcccggattacctcgacgagctccccgacgacctcgtcctcgccgtgctctccaagctcgccgcctccgcctcctccccttccgacctcctttccgttcacctcacgtgcaagaggctgaatgggctggggcgccatgacatggtcttcggaaa

SEQ ID NO: 433673 - DNA, 420 bp, Oryza sativa
tggtgaaggcgacgcgaaaagcagaaaggaaaaaaaaaaaactccgttctctcctggaagaacaggttggggaaggagaggagaggagaggagaggttgttttttttctgtttgtctggctttcatttttctgatcgatcattcctttgctgctagtcttttctcctttttatatttcttctttatctatatttattttttattgcatggtgttatgtttttttccttgttgttctgtctgtttatgttttccttttttttctttgactatgttctatacttttttattagtttttatttttttttttttatttttgttgctttttattctcttttttgcttttattcttcctttttttttttgttttcgtttttccttctttttttgtttgtttgttttttttctagtctttttttttt

SEQ ID NO: 433674 - DNA, 427 bp, Oryza sativa
attgcatcctctgcaaacaatttgtagaattgcagtgttctctgattgaatcatgcatctaccttgtgcaattctttttataaagcaaccaggaatactgatgactttatttagattgaacattttacggtacgggtgcacagtagtgggaagcaacaaagagtgcaattgatcagctaaccaatccactcggaaatcctattcctgtgccagctctaattagctgtgtataaggtcaaaacgatgttggcactgtgccttctgcactattggtgttggaaattggccttttgtgcttagcctggctctttgcttggttattcagctagtgttttatcataataaatgtaacactggatggcatcgttgtatcgatttccagttattgtactgatttaagtgttaagttgtcatgttgttacataca

SEQ ID NO: 433675 - DNA, 457 bp, Oryza sativa
ggaaaaaaaaagggaataatgggggaaaaaggctcccggggaatttttccctttttttcccttgggggaaaccgcccttttgccagggccccttggggggaaccggtaaaaaggaaaaaaaaggaaaaaaaaggtttcccaaattttttttttttgccattggcttgggttccccccggcccagggtaaacccgggggcccgttgggttaaagggggtatttgggggggggggaaaaaacttgggcctccccggcgggaggggccccccggcccaggggcccccccgggcccttggggggcgggtttccagacaaggcctgggccccccgggaggcataagttggccggcctcaaaccgggcaacctccggacttgggggggggggttctccttcgggcccccccgcatggggggacaaagggggagtttcgcccccccttttttttgctcgggggg

SEQ ID NO: 433676 - DNA, 81 bp, Oryza sativa
ctcttttctgcatctctctctcgtcgggaggagaaaggaaggaagagggtggcaggaggaggatgactccccttccattct

SEQ ID NO: 433677 - DNA, 419 bp, Oryza sativa
aggaagaaaatatggcaagaaagggaccctgtccactagaagttttgtacatttcgatttcgttcgatgcaagcaatcaaatccagcgactttgcatttcggacagcgacttccttgcgccaataattcaatcgcgagacgcgaagcttcgtttgattcagagatcggacggctgaggtgcctcgatggggtggagggcgcggatcttgatgtcgtaacgcggcggcggcggccaggaccaccgcggcgagcgggcggcgcggtcgtcgtaggcgaagccgacgtgggcgccgcacttgcggcagaggaggcgcgtccgccgcgtgaagaggcggtgcgcgcgcacgtccacgcaccggaactcgttcacgtgcccgaacctcgcgtcgtcgatggcgccgaaccttaccaccccccgc

SEQ ID NO: 433678 - DNA, 316 bp, Oryza sativa
tttgtttaatcccctctcccaagccccaatccgacgcaatccatacgattccccactcccaagccacaattgcaaaccgtcaacgcaagccagagaggcgtatcttttctactcatgttctccgctgagaggccgtgcatctcgagctgccattcgattgatgaggtaaggggggtgccggcgcgagaagcgaggttggctggccggtggagggcgggctgtcggtcgcgggtgcgccaggatggggctgatctcggggatggtgatggggatggtggtcggcgtctcgcttatggccgggtggagccgtgtgatg

SEQ ID NO: 433679 - DNA, 482 bp, Oryza sativa
gtttcgtctcctggaaacaccccacccgcttctcgtctcctcgtctcctcgttcgtctctcgcctcgtcttccccgtcctccgcgcgattccccaaccctccccgaagccgcagtccaccgcaagtcgcctgcctcctccgccccgcgccccctccccccgtgcgccggcgatcgccggtgcccgccaggttatttcttgtggcatggcaaggatacatattggtcttggcttgttctttcatgaatgatgtccttccgttcgaaggacagaaatgtgcaaccacgatttaattggccatggagaagcgaatcaccattatcagcacaactgctcattgatattccacctgaaatagagttatcggactacagaaggttgccagggtcaagaagggagagcccatgtggacttctccatggtgaaggcttcaaggacgaaccaattgctgacttgatattttctttgaaggctttatgaata

SEQ ID NO: 433680 - DNA, 459 bp, Oryza sativa
  unsure (1)..(459): unsure at all n locations
tttgcctcgacgacggctgcgccgactccatctccctcttcatcgacgtcgccggcggcggcaacggcagcggcgtcgccggccatgcccggttcagcgtgctcgaccacgccggctcgccggcgcgccgcaccgacgacgcctcgtcggaggtggtggatttcaggacgcacttctccggccagaggagcctcatcacgagggaggagctcgagaggtcgccggacatcctcagggacgactgcttcgccgtccgctgcgacctcaccgtaatggacgaacacttgctcaccgtcgatctggatcacgaggcggntctcgccgccgatgccgacgccgccgccgtcgtgccgccgtccgacctgcaccggcaccttgccgagttcctctggagcaaggaaggcgccgacgtcggcatcgaggtaggcgacacgacgttccacgcgcaccggtgggtgc

SEQ ID NO: 433681 - DNA, 438 bp, Oryza sativa
  unsure (1)..(438): unsure at all n locations
ggtcagaaaacaatcttcactaaaacatggctacccaataagcgtttaacaactgtccatagctgctcttaggcacgaaacaatctacctgcccaaggtttgcccagcaaaaagatttcaatagttgaaatgggtaaacgaccgcctaaagctctctttcagtgaaataaacacaggtgttcgaaaataagtgttgagatcactgaagatgaagtgccttttcactggaacataatgaccatgagcatattccaccgagggaattgaaccacactagcacacctttcgttttgcatctaattgttaagtttgcaactgttcccacatttgctatccagctcgcctaatggggtcttggaagtattggagagagatgagaagtgctttctgaaaacgttgcttttgcaaataggaacanaccctgaaaaaatgaacttt

SEQ ID NO: 433682 - DNA, 178 bp, Oryza sativa
gtaaaactaaactgatcatacacacaaattaagttgtgatcatccgagcaaaagcaaagcaagagaacggtagctagctagttgacacaatgagggcgggcaggttggtgatcctcgtggcggtggcggtggtggtggtggtcgccggcggcgttgcggacgagggcgccggcgagtg

SEQ ID NO: 433683 - DNA, 211 bp, Oryza sativa
ttatgtggtggttttttatgcttggatgctgtttgtatgggtgcttaaccttgcaccacgacggcggcggcaagaggaagaaaggcggcggcggcgggaagaaggcgaagaagaaggtggcggcggcggtgagccataagcagcggaagctgtagagccggctgtcgttctacgacctgtctagcggagggatggtgtcgccggaggacct

SEQ ID NO: 433684 - DNA, 95 bp, Oryza sativa
aattggttgtggaagggattatcattgctgccatactgtttcaaattttcagggatagctacaaaccttcaaaaaaatcatttactttaagggaa

SEQ ID NO: 433685 - DNA, 437 bp, Oryza sativa
ctaggaagaggcagcgccggccgagtagtggagaagcaacccatcgcaccgtcgccggcggcggtgcggcggcgagcacccatggaggtgaccctccgccggttcgagctctccgacgtggacgccatgatggcgtgggcgtcggacccggcggcggccgccttctgccgctgggagccgtaccagtcgacggagcccctgctcgcctacctacgagacaccgtgctaccgtacccgaggttccgcgccatctggctcgccaccggcgctggcgccagcaactgcgactgccgtcccgtggcgaagaagacgatggacactacgggtgacgcgtcccacgtcgagttttggtacgttgtggtccgcgcgcatgtacaaagaccaccgccgtgccactgctgtcgatcagtacctcgtctccgccctcctcgcggtct

SEQ ID NO: 433686 - DNA, 157 bp, Oryza sativa
gaatagaaaaaagaagggagaagagatcacagcagagcacgcacgtagcagcaacacagcaaagcaaaggcattcgatttcagagacgcatcttcgctttttgcctcggcgtcggtgctccacggcggcggcggcggcgggggccaaatcctcgatt

SEQ ID NO: 433687 - DNA, 481 bp, Oryza sativa
ttatatcttacagatttctataagaattaataaccctggccggagagagagttgatgagagtcgataataatgaaccaacactaagtcccactgcgcaaatcagcgtgtgtgtctattaatgttaatcctccttaatgcacttctactgctttgtggtaaggcaagtaagttgcggtcaacattgatgtatgtgaactttcgcatgtgaatcagtcagtctatatattaagaaaattcgaaccaccgcatagttgaaacatctcgagatctgaagaagcctagggaaactgcagcgacttcgaagtcaactcgcctcagagtatgattaaccatccagatgtgaacttcactcaacagtctatcgcggtctaacaactatatcaaacatccagtctctaacaattctagcatctactacaactcatcactctctctcaaaaaatattcagtaagtcagacgctcagtcaaacaaaggtcac

SEQ ID NO: 433688 - DNA, 481 bp, Oryza sativa
ctttgtccccgttctgggtggtttctgtcatactccaggaactggcttgatctagctctttgcttggtctgaaagtcgatttctgcacaggtactgcgaaagctttgggaatagtattgcagaaagcgcagcaatctgaagcttactgtccaaggtagacagctgacataagcagtttagcacttgagctatgttggattcacttactcgtcttcctgacatattccagtttttcctctcttctttcaagaatcggaattacttcagttgtactaggaattctgaacttcgtttgtagttgctgtctgaatttgtggctactgtttactactggactcatcgtcacgtctctgacaaaactcagtacaccatgttgatgcacgagatgattttgctcctattaaatcttctgtggatttttctctgaaacgtctgactcaagtatgaatgttactaagaagcaacaaccttaaatcagatt

SEQ ID NO: 433689 - DNA, 505 bp, Oryza sativa
ttttttttttttttatttatttttttttttttattattttttttatttattatataaaattataatttttatatatttatatttaaaaaaaataaattaaaataacatactaaaaaacaacaaacaaacaacagaaccaaaatacaaaaacaaataaaaaaacaaaaacaaaaacccaaaaaaaagaaaaaaaaaaaaaaaaaaacaaaaagaaagaagagagaaaaaaaagaagagacacaacaaaagaacaacaaaaagaaaagtgaaaaaaagaggaaacaaaaatatggcagaaatgaaaagacaaaaaaaagaacgaaaaaacaacaaaaaaaaaaagaataaaaaaaataaaacgaaaaaaagaacaacaaaaaaaaccacaaaaaaaaaaaagaaaaaataaaaaaaaaaacaaaacgataaacagaacaaacacaaaaacaagcaaaaaaaaaagaaaaaaataacaaataaaaaaagaataaagaaaagccacacg

SEQ ID NO: 433690 - DNA, 473 bp, Oryza sativa
  unsure (1)..(473): unsure at all n locations
tcccctccgccctcctcctccgcttccttcccttccttccttccttccttccgcctcgcgtctcctcgtcctcacctcacctcgcctcgtcttcctcctcgcatcgccctagccctaggccacctcgccatttgatgcgggggcgcccgccatggcgtcgtgggggctgggctggaagcggagctccgagatcttccacctcaccctcgactacggggacctcgcggatggacctcctcaccatcaccagcagcagccgccgccgccgcagcagccgggctcccctcccacgccatccagcgcgggctccacgccgacgtcgtcgtcgtcttcgccgacggcgaggaggagcggcggcagcggcgagttcgggttccggatcgagctcgactggtcggcgggcgacgacgaggaccaggtcgcgctgcggctccagtcccagctcatggtcgcgctccccccgncgcacgacg

SEQ ID NO: 433691 - DNA, 527 bp, Oryza sativa
tttaatatgtgcaagtgctgacagatgtgatcaaaaaggtgtaagcgttgatgaacgtctaattagagttgctgaagcacttgaaaagttggtagaatcttatacacaaaaagaccttccaaatgctgttggcagtccagatgttgcaaaagtatcaaattcaagcatcaatgaagaatctgatggcccctctccaaaactctctgattggtctagaagaggctcagctgatatgcttgactacctccaggaggctgatagcactatttcactggatgacataaaaaaccttccttccatgacatgtaagactcgttttgggccaaaatctgatcatggaatggctacatcttcagcaggaagtatgacccctagatctccactaacaactccaagatctaatcacatagacatgcttttagctggccgaagtgcaattaatgagagcgatgatcttcctcagattgttgaacttgctgatattgcgcggtgcattgcaactactcctctagatgaagaaagggcac

SEQ ID NO: 433692 - DNA, 508 bp, Oryza sativa
  unsure (1)..(508): unsure at all n locations
ttttgttgaagaggagctgtatggacggacgtctcacgagggtctttttcaactagtgtttagtagtttggagtagtgtgggcgcttgctgttgagatgttcagatggcatcttctctcattctttctttgtccttttttcccttgcatcgccatcaaggcatcgcccatgctgtggatgcatttgacagaaaaaatgacgattccatcttacataacactgtgaaaaccgaatattcatgattgagaatccacattatcgatcaagacaacttgtgggaatcgagatcgaatttgtgaccatttgcatgacatttttggatccttgattatcatgccaaattgtttctggttacatacacanaattttctcagaacatgcatgccaatgtatcatactgatcgaattcttcagagctgagctaacctcaagttgcatatgacttcagatcaccaaattcacctgcggcgggttcgtgatggggcttccgttcaaccacgcgttggcg

SEQ ID NO: 433693 - DNA, 154 bp, Oryza sativa
tcgttactccatctcactggcagatggggcattcgccctgttgccacaatgcatgcgggggcggccgcggctacactaacacactgtcctcacacattccgccgagcttttgttagctgtgctgggtcatgagtttggacatcagctagcacgc

SEQ ID NO: 433694 - DNA, 230 bp, Oryza sativa
tttcataagagcacaaggtcaaatctttagccaccaagatcccatcagccacaaatcgatccatctccaagctcaaaatcccaattctttccaagaaagatttttctcggaggccatgtcgaccgccggcggcggtggtggcttccgccggtgcaccatcaggtccgtctgggagcggtgtgtgatggcggtcgcgctgtttcatgaaacgtccgtctacaggacgccgt

SEQ ID NO: 433695 - DNA, 378 bp, Oryza sativa
gtttctatagctaccactactgcccagcaacaagctagagagatttgccaaaagaaaaaatggcgatggctaggcgcggcaatggcggctaccagtacggcgcctacagctacggctactgctacagcaagccgcacgtgaactaccacagccagagctccgagagcgtcaccaccgtcgtgacgaagatggacgagatgagcgttcacgagaacgccgtgcataagatgttgttgtcgctccgggaggagaaggtgtacgagcagcatggcggcggtgccggcgacgtgcaggtgtgccgcaatggtggcgctgctgcaggcgccgtgcagaagcacacctactcggagaatgatgaggaggtgttcgaggagagca

SEQ ID NO: 433696 - DNA, 477 bp, Oryza sativa
acataactcacatgaccaaccggatctccgccatgggaggcaaccaggagtacatgatccgattcgacggccacatcgacgatgcctcgccgagctccgccactgcagagccaccgccgccgctgccgccgccgcgtcccttcgccgggagggcgatctcggccgagagggagcactctgtgatcgtcgcgacgctgctccatgtcatctccggctacaggacgccgccgccggaggtgttcccggcggcgcgcgcggaggtgtgcggggtttgcgggatggaccagtgcctcgggtgcgagttcttcgccggggagtccggggtggtgtcgttcgatggcgcggagaaggtggcggcggcggccgccgcggcggcggctggcgccgcggcggtgcagaggaggaggaggaagaagaagaacaagtaccgcggcgtgcggcagcggccatgggggaagtgggctgcggagatccgcg

SEQ ID NO: 433697 - DNA, 470 bp, Oryza sativa
gtagagagcaaagcaagagaagagagggcaccaccagaaggggggaaaaccgccacctctacgcgtcgccggagagcgcgccggtggcatgccggagcgccgcctaccaatatccactccggcggcggccggaccccgccgtcacccccgacggcagcggcgtcactgccgcctactcgtcctcccggccttcgccctcgcgcttgtctccctcgcctacctctccttctcttcccaccccaatctccccttccatgcaaaacatcatgatatggctagtataaaggatgttaaggagagaatggatcaaagacaaactctcgatgctaaggttaaggcaaatttgtctatgactaaagttgagtcggaacccttcaaaagacgaaagaaatctcgcaagcattatgtaccatgtcaaattgagtttttgccatcagttgatgatctagtggagcctggtatctacaaca

SEQ ID NO: 433698 - DNA, 117 bp, Oryza sativa
gacttgtagcatgtagcatataagcaactttaaaatttaaaactttcaaagttgcttatatgctgcatgctacacgtctccaaaagaaacctggggcggccgctcgcgctcaagaac

SEQ ID NO: 433699 - DNA, 276 bp, Oryza sativa
ttccaaagcactacccgaagtaacaaaccggcgcgtttttgcagatagatcgatcccaccgaccaagtgcaagccgaccacgtaagccagaggggtgtgagacctaaacctcgactgctccgacgcgaagcgcgatgaatctgagctggcattcgatagatgaggtatggtgggagccggagcgagaagcccggttgcatgatcggaacacgactatgtgttggaatcggaatgcgactggatggtgctgaacatcggtgatggtgatagtgatgg

SEQ ID NO: 433700 - DNA, 414 bp, Oryza sativa
tttggtttttttttttgtgttggttttttttttttttttgttggtttttttgaaaaaataaacaccaaaacaagtatatacctgcaaaaaagggccaaacccaaattaggcccgaggaaaagaattcccggaggggccccggtttaggactggaaaactttcactaaaaaacaaagcctgggtaccctaaactaaaccacctttacctaaaaggaaaaggctaagaatttgggaccctagaccggaaaaagctttttaatctaattttcaaagggaccagcacacggttttttggttaggggaagctgcttagggggcccgaccagggggtggttttggggacccaggatgggccgggggtggaaaaatccgggctgggggggggttccggagggaaaaggggggcattctctc

SEQ ID NO: 433701 - DNA, 405 bp, Oryza sativa
ttctttctcctttaattcattatcctttgcatgcccctctccagctagctaagatgagtccgaggattcagcagctggccgctgtgttgttggcggctgttgtcgtcgtcgcagccgcccaggatgaacctgcagcagcaaaaaactaccaaactcaatgggatacagtaatgtcaatacttaactgtaagagtgattcgttaatcccaagctacatctgcagcgtgattagcaaaagtcgctggggttgggcgtcagatgatcccaacgacgacgaccagtacacgccggatcatccgctgccggcgccggggcggggggcggcgggccgtgggtccgcgatgaccaagcttgaacctgaccaagtacgtggacgcgctgtcgcggatagccaagattcggggc

SEQ ID NO: 433702 - DNA, 349 bp, Oryza sativa
tttttgttcttgcggagtgccgcggtcctaacggtggcctgtgacctattccatagcattttgctcgtcagaccggtatgccggactggaatctctgcctacaaaggcctgagcatatggtgagaggcctcctgggaagctcatgatctggagctcggtagcggttggaacccgtgacggccatctgctagctgcaccccatccaccgagacgtgattggcaggagcgccgccaagctcgccatcatagccgtgatgccggacaacggatgctccactcgacagacggcccctctggtaggatccggccaccacgcctttaactacagcgtacagggcccggcgccctg

SEQ ID NO: 433703 - DNA, 160 bp, Oryza sativa
ttttggttttttaaatgatcagggtttttaatttcaattttatgggaggggtgaaccaagactgaaatgattactatattaaaaagatgcagatggaggctgttttgatcgtggtacaaaaggccacagcggggacctacaccaatggatgaaggatcag

SEQ ID NO: 433704 - DNA, 234 bp, Oryza sativa
ttagaaaccccttctttttccctcctaccacaccacttcctgatcctgctcccatggcgatctccgggagaggacaggtacgcggaggacggcggtggcggcgactccggcggggggaagctttggaacctctgccgtatgcccttctggcagcccggaggcgcgcccgcaatgggatacgggcctgcaacttctatgttgtactaggcggctgccgggatccaccaccatttc

SEQ ID NO: 433705 - DNA, 85 bp, Oryza sativa
ttgtttgacagaattcgcatggagcgtggactgcggtggatactaccatgagagggctggcttaccacatgcacgtccttgaact

SEQ ID NO: 433706 - DNA, 406 bp, Oryza sativa
ctcgtagacatagcagtgatcgcaagaaatcaaggaagcatacccatgcttcggactctgatagtgaaaatcggcacaaaagacacaaaaaggatcgagatagctcccgcagaaatggcacacgtgatgaccttgaagatggtgaacttggagaagatggggagattcattagtcattcgtttctccgctgagatttatcacaatacagtcccccctcctgttttggacatatgaaatggtgcattttgatggcaactataaatgctttcctccagagaaggacaatttctttatggggattatcttcttgtcttgatctggcttgttggaaatggacaataatagccttcattgtttggatgctcacaatgtagtcatgaaggttcttgtactgcaaaacctttg

SEQ ID NO: 433707 - DNA, 380 bp, Oryza sativa
aggaccgtttttttttggttttttgggtgcaagccaggtttctattcataattaatggaagtgtttaactaatccgtcatagttttaatattaaaaagatacgaaaacatgactggttttgatcgtggaacaaatgggacaagcggtaccataaaccaatggcgcaagaacagatcaattctgaaacgaattagtacacacaacgcgtgccatgctcacatcagagacaaaacctcaaatgcgggcaccgatgatgaaagcttcagacggtgataggctggacctggtaagcatttacaccgagctgaatctgacgaaattgcgcagaccgcgaataaccaggtgcggactgggatccccaacggggagatacacagtga

SEQ ID NO: 433708 - DNA, 390 bp, Oryza sativa
gtcgtcgacgacgacgacgagctcgacgaggggaggcgcagcggcgatgactcagacagcgcgccgtcggtcgggagcgacctgtacaaggacgaggacgacaaggagcagctggagaagatgtcggagctggacagggagatgatcctggcggagcgcggcgcgcggatcgacgactacaagctgaagcagctggcgagggcgtcgtcgtcgtcgtccaaggcggacaagtcgcggagggacagcagccctccgccgtcgccgagccgcgcgcggtcgtcggccaggaccgacaggtccgccgccaagagcgcgctggacgagctgcgggccaagcggatgagggcagcatgacccggaggggtacccgaacaaggttaaggatttgat

SEQ ID NO: 433709 - DNA, 428 bp, Oryza sativa
tttatttttttaaaattttttttttttaaatattataaatgatcatattttaaataataatgacaggtcatataaaaaactacaacaaatggttaaaaaaactaataaaaaaaaaaaaaaaaaccacaaaaaaaaaaagacgaaaaagacacaaaaaaaaaaaacaaaaaaaacgtaaaaaaggaaagtgtgaaatcgcaaaagatcaaaaacaagcacagacaaacagaacatttataaaaaaaaaaacaaccactcataaagaaaacgacatcaagatagaaaaaggaaaaaaaggcataataaaaaaggcctgacaaaaagaaaaaatacaagccctaaaaataaaacctgccaaaaaaaactcaaccataaacaactataaattttctacgaaaaaaaaaaaaaccattggaaaaaccttccac

SEQ ID NO: 433710 - DNA, 93 bp, Oryza sativa
  unsure (1)..(93): unsure at all n locations
ttntggtttttattttttatgtttgtgtttttttattttgtttttttaatgtttggttcttggttcacattgttagcaccggtcctacaacaa

SEQ ID NO: 433711 - DNA, 450 bp, Oryza sativa
aaaatggaagtaatgttacattaaggatttcattggtttacattccagtacatctgacgagtgcaaaaaggaaagggaacacatcaaaaactcttggctgtgatacatcaaaattgctattgcaggagtataacacagtagagcaatccatttcccgatacaagagaaataaaaaaaccattgccatgttggtgctttgttggggagattgcaaaaacatttttccaagtagctttcatgcaagtgacgctccgtctccatattgctaacaagggagttctgaccatctacttttgtatttcggtgtgtccacaagctagaagttacaacaggcagttaaaatggagcatgcaaaggccattcgctgtgtctaaatctccagtacccaagaaagatggtgaactgaacagcattggggaatataatcaatatatttacacacactaaata

SEQ ID NO: 433712 - DNA, 437 bp, Oryza sativa
ttttgttttttttatcttacaaggaacagtttattgtttgagtgtttcgatttaactatgtacaacaaaagttaaattaggatttagaggattgttccaggtttttcgtcattacaaacattttcatagagtctgcggaatcgtccagcattaatattctgtagtccttggaacttattcacactagaagttgttctttcaaagtctgaagatacttgaattcttaggaatttggataatactcgattgtcacgaatgagtcgggcaatacagttttgacctgatagttatttggtgtcaatatcgaaatgttggacttgttgcattgctttatatgatacagcgagtctgtcattacaatgatgcacctagcgcaataagaaagttcctggctctcgatgagatagcatcttttgtgcgtttgtcgtagaaataaa

SEQ ID NO: 433713 - DNA, 455 bp, Oryza sativa
ttgatgacttatcttcaacaagagtgtctaggaaaagggattgtgaggatgtgggcgaatcttcccttaaaaaatgtaaagtaaacccagttgaaggagcttgggattacgataagggaagttcgtttttagagtcggactggtttttcggtgatgatgagtttggtttagattccaatgagtataaagtggatacaattcccttagatcagatttctgaacagccaatcgagccaaataacaacgttgtttacataacggcgactcaaccccaccaacatccgatgagtatggggtctaattgccctgtttcagttaaattcggagcaattacccgtcattaccgagaatgatgtcagctgataggctttcttggcctaatcaattgattttatcagttcctcaacctttgttgcctgtttctctcagagctgggtcgacagggaataatttga

SEQ ID NO: 433714 - DNA, 465 bp, Oryza sativa
tttggtttttttattttttttttttttttttttttttttttttttttttttcttttcaacacgaatgcaagagagcgccccctcttcttttgcaaaagaaaacgaggcattcaacgttctgttcgacgaccacttgtccccaagggcccactccaggacttagctggggctgggcgggggccccaaattgcttgacaaaaatgtttaaacccaaattacacacatgccctttgaaggccccaaatgggttcacaaaaatgcttaaatccaaacaccccccgtggcttgttaaggcacaacacccgggatcatgcaaatgatcaaaccatttcccctcatagggaacaaaaactaatttccttttaccccccaaaaatgggggttatttctgataccccaccgggttattcagactgaaaggagctgcccctcgaacttggtggtgaaattccaaaaattataaac

SEQ ID NO: 433715 - DNA, 389 bp, Oryza sativa
tttgtgtttttttttttttttttttttttttttttttttgtttttttttttttttaaatagcaatgcaggaggggttcccctttttatttgaaaaagaaaacgaggcatacaagggacttttttggggccttgggtaccaaaggggccactccaggaataaaattggggcagacggggggcccaaaatggttgaaaccaaagattaaaaccaagggacccaggccggactgtgagcccccaaaagggggcacaaaaatgattaaacccaaactacccacccccttttttaaaggaaaacgacacggtggagggcaatggacaaaccgtgtcccagggtatggaacaaatagcgatttcctttaaccgccccaaaaagggggttattttt

SEQ ID NO: 433716 - DNA, 438 bp, Oryza sativa
ttcctcctctgcttccattctcgactccaccaagtgtttgcttccgagccctagctgcgtcgaggcgcgggagcaatggcggaggcggcggcgaggaggtgggcggcggcgctggtgctgctggtgcttctcaccggcaccgtcgagctcatcggcggcggaggcgggagcggcgggcggcggcttctcgctggcctccgggccgggagcacggcggcggcgagcggcacgcggcggtggctgcgcgactcggcctggccggcgacggggggggccgcggcggcggcgagcagaggagatgacggtgatggcgatgaggcgttgtccgcggcgatgacggtgcccggcgcggtggacgacccggaggaggtggtctcgcaagtgcacatgtcgatcaggaacagcacggcgaggaggaagctgggctacctgtcgtgc

SEQ ID NO: 433717 - DNA, 461 bp, Oryza sativa
tttgtttttagaaaaaaaatgatggaatattcttattttaaatccaacgcactgaacattgtttacaacgtaccaatctggaatattttacatacagaagttccaaaggtgaaactgctgttaaccaataaaagccaacatgccacaccttacgatgcaggcagattagactgcttttatgatcaatctggttggagttaatcctcaacaaaatttctatgatgggccaggtacctatcaacttaaaccagcaccatgcctgctaaagaacactatcagttgctggtagacaccaagatgcgtgatacttcatgtccatggcacatctcacctcagagtgtatctgacctcatagattcagaatgatgcatgacagtcaggatcaatagagcccaaacaagttgctaatagcttagccaaaaagaccacggttgccaatgttcccttgtagttctttcaat

SEQ ID NO: 433718 - DNA, 470 bp, Oryza sativa
tcgtctctccctacctcgctccgccgccgccgctcccctcccgacccgcctcgcttcctccctccgccgccgccgccgccgccacggcccggccggatcccacccggccgctcgattcgaggtcagatccaaaccccagccctcccaggtccgaatcgcgccgaatttttttctaggttttggtacggatctagggtttggcttgccgtgggaaattttcgtggggggaattctgtcgaatttctctcggcttccacggtctggttggattcctgctcatggccgctgggcgccacggaggatacagggactacgaggcaagggagcgggagctcgacgcggaggcttccaggaggagcaaggagcagcagcaccaccaccacccgagcggccgacaccaacgcggcgactccgacccccgctgcgaagctgaccggcgccgtgacggcggtcgcagcaggggcggcagg

SEQ ID NO: 433719 - DNA, 457 bp, Oryza sativa
gaacggcgccatgccggggatgctgcagcagcagcagccgtggtcgttcatcgactaccaccaccacctgatgcaggagagcgcgccgacgacgccgccgctggactacgaggcattcgccggggagttcgacgacgacgtggcgcctctggaggaggtgaagagggagctggtggtggacggcgtcgggttgttccctgggggtggtgcttctgctgctgcggcggcggcggcggtggcggggccgatgactccgaacagcatgtcggtgtcgtcgacgtcgagcgaggcggcggcgtcggcggcggcgccggaggggacgaggagtcggccgggaagtgcaagaaggaggaggagggggacggcggcgacgacgacggcaaggaaggatcgttgacgaccaagggggatggcgatggagaagacaagaacaagaaaggaggtaaggggaagggga

SEQ ID NO: 433720 - DNA, 473 bp, Oryza sativa
ttgggttttttttttttgtttgggtttttttttttttttttgtgtatttttgtggattgtttttttgttatttatacatgaaagataaggaccaaaaatacttacagggtaattaaaagggcatccaggagcgaggggacacgagaaccgggaactgcagaggagaagaaaaaacagcggggaaaaaaggggaaaaaggggggaaaacaaccagacccagacatcaaagccagggccctccactataacgtaggggaaaacaacccaggccacgcctctaggatcagggcactaccaggccgtgttgtggggcaccgaggggcctgtaaaggggcccgcctccaagacagaaatgacgaacgcaacgggggctgagaaatagttagctacatggacaggatggagctagcggcgggagcagcggcggacaaggccggcggagaggtgggaagaagcgagcgagcgagcgagag

SEQ ID NO: 433721 - DNA, 467 bp, Oryza sativa
tttgttttttttttttttttttttttttttttttatttttttttttttttttttttttttttaaaaaattaaaatttaaatttttaaaaaaataaaaaaaaaaaaaaaaaaataaaaaaaaaaaaaaaaaaaaaataaaaacgaaaaaaaaaaaaaaaaaaacaaaaaaaaaggaaaaagaaaagaaaaacaaaagacgaatcaaaaaaaacgaaaccaaaaaaaattaaaaaaaaattccagaaaaaaaaaaaattaaaaaaaagaaagggaaaaagaaaaagaaaaacgagaacccgaaggggcacaaaaaaaaaaataaataaaccaggaaaaaaactaaaagaaaaacaaagcccaataggaaaaacagagaaaaaaaacccaaacgatcaaaaagacacagaacaaaaacacccggaaacataaagaaaaaaaagaacgggtacctaaaagaggaacaaaat

SEQ ID NO: 433722 - DNA, 368 bp, Oryza sativa
tttgttttttttttttttcccggtttttttttttttttttttttttttttttttttttggaaaaaaacccggccatgccaccggcaaaaggttaaaaaaaaacaaaaaaccggggccaaaattcaaaatgggggggcaaaacccgggggccccaacggcgagggcccgggaagcccccaacccaaacgcaagcctgacgggctttggaatgagctggagggcaccagtcaaaagcaaaccgcatctttgcccccccccacaaaagacagcccccccttcggatcaacccccaaacccacggcgggggctgacactcccggcctgggggcaccggccggggcggcacaggaaaaaaccagggccccggg

SEQ ID NO: 433723 - DNA, 374 bp, Oryza sativa
gtttatcccaagtcaagcaaaacagctcacaaaatactccagcatctagagagaactattccttctcctacagcaaagccactagagctaaggtggacttcagcaaagagaactacttcctctgttgtcaccaacatccagcataatgggcctgctactgatagtcatagacatagcagcatcaacgatagtggtagtgctcaacaggaaatttcagatgcaaataaggttctggctcctccaagcagctccaatgctgtggaatctagtccaaagatagagaatagtgggaccaagtcaatgccctcttcacaacatacttcagaatctgactcggcaaccacatcagctgctcaggtcttggataaaagcac

SEQ ID NO: 433724 - DNA, 504 bp, Oryza sativa
  unsure (1)..(504): unsure at all n locations
ggagagcagccggcattggggtgcggccgggcgccgtcgctaagcgcgtgtatcgggtggagctcggaagcaggcgcagccttcaccttagcatagcggggttgccgggacacgcctgggcaagacacccgggctcgaggttgtggtggggtcgtgtggcacgcgatcctcctgcgcgccagccatgaaatcataggaaggtcgtntgttctcggacgaagctactccggagccgcgaggaccaaggcagaaagcagcgaagaggctgcagtcgagcccctcgccttcggaagggtatatattcttacttttacttctgccctctttccccacattgtattttgtggtgccctcttgctctttcttcttctcgcgggattcgtatggctacttagtagcttttgtcttccggatccctaccgataagctccgtgctttgttttgctcgcgcgttttgcttgatgtaaccctaggcattctgaacatacggaaatggtgctgaca

SEQ ID NO: 433725 - DNA, 303 bp, Oryza sativa
tagtttcatccaaagaaaggaacagctgcaactttgttggtcagaaaatggctacaggcgttctgtgctccagggaatgttgctctctgcctgctttttgaactcctggacgcgccattgctagaggcacatgacccttcaagccagttcattggagcactactcaacacgatttattcaacctttttagcatttatgcccggactgagatggaatgtgctctgcgtgcggattcccgcaattgcctctctgatagctgcgtcttcattaccatgactgttttttttcatggtcgccattcat

SEQ ID NO: 433726 - DNA, 351 bp, Oryza sativa
aaaaaaaaaaacccccggaaaaaaaaaaaaaaaattaaaaaaaaaaaaatttaaaaaaccaaaaaaaattgttttaaaaaaaaaaaaaaaacacaaaaaaaggaaaaaaaaaagggcaaaaaaaattaaaaaaaaggttttaaaaaaaaaaataacttttggaaaaattgggggggtttggggaaaaaaaaaaggtcaattggccttggggggggggggaaaaacccaaaacccaaaaaaagggccccggaacccccttttggcatttttaaacattctaaaaaaattgggggggggcggggcaccccaaaaagggagggttccaaaatgtccaaaccccccaaatataaa

SEQ ID NO: 433727 - DNA, 81 bp, Oryza sativa
ttgtttataaaggaggaacttcaaggctcatgaggctagctagctcacagcctgaagacgctctgacacctgtgaagagga

SEQ ID NO: 433728 - DNA, 385 bp, Oryza sativa
tcgtctcaacctcgactgctttcccgccggcggcgtcaaggtctgcgccggcgtgcgtgcgtaccaaggccaccttcacccctgcgctgttgactaccacagccgacgcgtgctgagcttggcggcctaggcgatcgaggagattgcggtggatgagcggaccatggtcgtcgtggaggccggtgcggacacggtaacacatgcataagtggagcggagtcaaacaagcactgatattattagttgattaaacagacttgaccgatctcgtgaatggccttcaagccttgggggcttctattatttacactggtggtacactatgaagtatggaagcagttggagtggatggtactaaagtttaacataataacaaaattttctg

SEQ ID NO: 433729 - DNA, 462 bp, Oryza sativa
ggagagcagccggcatttgggtgcgggcgggcgcgggcgcgacgcgcgtggcgcgggtggagctcggaagcaggcgcagcctccacgggcgcaggcggggttgccgggacgcgcctgggcgggcgggcgggctcgaggttgtggtggggcgtgtggcaggatcctcctcgcgccgccatggatcagaggaaggcgttgttccgggcgaagctccgggagcgcgaggccaaggagaagcaggagaggcgcatcgacccctccctcgtcaggtatatatctcctctactctccctcttcccccatgtatctgtgtgcctctgctcttcttctctcgcggattcgtatgctactagtagttttgtctccggatcctaccgataagctcgtgctgtggctgctcgcgcgtttgcttgatgtaaccctttgcatcttgttcagccggaatggttgctgacagaattg

SEQ ID NO: 433730 - DNA, 511 bp, Oryza sativa
tcgtctttatattgtgtaactaggtaatagagaagcctaacctcctcttcttcaaggcgatcatcaacttcctgcaagtcctcctgaatttccttctcaaattctttgaagaatatgatctaaaaagaagagaacaaatgtcatagttcacagaaaaaacataaacacgattattaaccctctgaccctcatgcaggtatgaacttgacaagtgcacaagtgcaaaaagggtgtggaagtaacagtagtaaggttaataatcagccttaattatattgttaaattctgctgacatcttccatgaaaaggaaaagcctgaaatttttatcatgaatgatgttcaaacttgccatttcaaaaggtatattcattcttccacaagggtatattatgtgagaataacaagtgtagctgcaagaggtccaagcatatacttaataaatgcaatgcatatgcaagtcgatgaaaaccttacttgatatcgatttttggaggttggataccacgagca

SEQ ID NO: 433731 - DNA, 445 bp, Oryza sativa
tttggttttttttttttttttggtttttttttttttttttttttttttttttttttttttttttttttttttatttttttttttttttttttaaaaaaaaaaaacctttttttattaaaaaagagaccaaaaaaaaaagtaaaaccgaaaattgggggcccaaaggcaccccaaaaaaaaaaaagtttgggaaaaaaatgagcccaaaaggggaaaccttcatgggttaaaaggaaaaaacttttaaaaccaggggcaaaatttttttggggggggaaaaaaatcaaactgaaaacacttaattccgggggggggagttttaaaagggggggaaaaactttgggttaaaacacgggggaaaaaaaggaaaaaaatcccgaatggggggaaaaaaaaaaaaggcccccgccccggggggccaccccgaaaatccgggccggacccc

SEQ ID NO: 433732 - DNA, 327 bp, Oryza sativa
gtgtatctagtttatgatcactcaattcaggcatttctgccatatgatcgacagtggataaagcaaaagttgttccaacacttgaagaagctagctcagcggtagtgagtggtttcagttcgatatctctcaccagcgagaagagatgtggccatggttgtcagaggtgttacctgtaaaacaatgagagtttcacattgtgtgctcatattctgacaaaacttaaatttcaatgggttgcctctggtacccaatatatcagttaaacttatctgctgtgtctctttgtgaataaaagaaggatttggctgttaaaaataaaacaat

SEQ ID NO: 433733 - DNA, 272 bp, Oryza sativa
tacatacaagcttgagctgggtgagagagagagagagagagagagagttcttggagggatcgggtgatcgagagatgagatcgagggtggcgctggagacgttggcggaggagccgggcggcggcgaggaggaggcggcgcgttcgaagtaattggatctgcacgtgcgtctgtaccggttggcgcgccgcttgctttccgactctgtgaagacgactgcacctatgttgacttgcgagtctgctatccgtactaactgatgacatggacac

SEQ ID NO: 433734 - DNA, 428 bp, Oryza sativa
tttgttttttttttttttttgggttactttttctttgtgtcattaggtttttttttttttttcaccaatagagcattggaagcaaaaggggcaaagctctaatggaccggaaacaaaaaacatcgttttttgggcgacgggcccacgaaggtaggaagaaaggaccctacaaaaaaagaaaaaaaaatgacacacttaagtaacgctcgacggggaagagaagaaactactaatgacgggctattgcaaaaacagaacggccgaacaaggccgaacgcatcggttggggacaggaaataacccccaccggggaggcacagggggggctcctgacacgggggggcgagaacacccttccgtgggagcccacattgggcttcagggggccccgggggcaccccaggagccttaccaaagtggctgacggc

SEQ ID NO: 433735 - DNA, 458 bp, Oryza sativa
tgttttttttttttttttttttttttttttttttttttttttttaaggtaaaaccaagcgtccccaaacttaagatttttcatggataaagcatcctaagcagcatttggacccccccatttttttttatcaacaaaagtccgttttgacgggttagacactacctagttcaaacttccaatagtcttatgagcaaagtgttttcatattcccccggggggggcgcagcaggccaaaccaactggaaactggcagccccccttggtaaaagctccagggctttgccctccttcggatttcggatttcgcatgggggcaggatttcattttctttcatgacaaccatacccaggaggcacaggttgccccccttggggatggccagtttccggatccggagaaatatcgaccgggcatcgggcctggtctgtagggaactttgatctgggtcagcaccc

SEQ ID NO: 433736 - DNA, 430 bp, Oryza sativa
tttgtttttttaattattttttgtttttttttttttttttttttttttttttttttttttttttttttttttttttttttttttttttttttttttttttttttgtaaaaaaccaacatttcaaaaaagggggccaaaacaggcccccccagacattaacaaaaaaaggggttgggcgccccccccaacctgaaaaaaaaaccaaaaaacaatttacaacaaacgtaagggggacaaaaaaaaaaacctaccccccggggagatagtatgaagtggggaaaaaaaaacaccgttaattaccggcaaaaaaaaggggcctgccctttttaaggggaaacctggggccaccggaaaggggcaattaaaaaaggaaggggaagccttttccgcggggccggcaaccgcaaaaaaaagccccgagaaggtaggg

SEQ ID NO: 433737 - DNA, 384 bp, Oryza sativa
tcgtttaaaccaagcggcgccgaaggaaaggcgagcgccagggccatgccccaaatcgatctcgcctcgagctcgaggccctcgcgcccgcggattccagccgattgaatcccccccacccctaaccccgttctctcggtgctctgctcgttataagcgggtggcctttagccctaggttttttgttcgattgggattttatatatcccgcttggttggggggggggggatccgtttgaatggccggagccggtggtaaccgcggatgttggcggcggcgagcgaccttatcacctcgaccggccaccgtgacgtcgtcgtcaggacagaggaggaaatgaacatgggccttctacacaacttcctgagcgtgcccttcatgtt

SEQ ID NO: 433738 - DNA, 389 bp, Oryza sativa
tttgtttttttttgcacctgaagtaatgccagagagcttcaaagtcgttcttctcatgcattgactacatattccctgtctcctaaaaatgccaactcctgactataaatctgaacatatgctgtgcttagattcatagatagtacttagcttttctaggtggatggagtatcaagtttgtattaatgtaaaataacagggtgtaacatatgtttgttccaatatgttgcatctgaacgaagttgtcctttcgatgcgttgttattgcatatcaagcatgtgttagtgtaacataatacactgtttcgatggtatactttgtggtacagtttcaggttacaaatcaaatttcttgtgcctttatcttagtatggaaaactctatcgcgt

SEQ ID NO: 433739 - DNA, 536 bp, Oryza sativa
tgcttagctagctagcacgacagtacaaatatatatactactacatctgaagaaattgttggtgtgttagttcatggctgctgctgctgcttcttcttcagcaatggcggcgaaggcggcggtggtcatggcgctgttcctggcctgcactctcgaccgggcatggacgccgaccggagcggcgaggacgatgacgatgatgatggtgcagagaggcgaggtttctgcggtggtggctgtcaatggcggcggcggtggcggtggtgaacgagggaataatggtggtgcgcagccggagcagaggaaggagttcgtcgggatggcggcgttcacgcggagcctcgccgtggcgccgccgccgccgccgagcgtccatggcgacagggaggtgccgagcgggcccgacccgatacaccacggcgcctcgccgtcgtcggcttcaccgtagagacatatgcgtgcatgccatattaatatagagagtgagactagtggtgcatggtgagtgtagacgtacgtgtcaagggaaaagtcca

SEQ ID NO: 433740 - DNA, 198 bp, Oryza sativa
agcttattagcggccatgttgcggcggatcaattatatacagggtcaaacatgcctctatttttgtaggaggtagctttataaattttaacaatgatggaagtttttaatacgaaatttttttgaagggtattgagggcagaatttgggaaaggccttgatgtgtttattaaatcttaaggacttattcaaagaattc

SEQ ID NO: 433741 - DNA, 441 bp, Oryza sativa
ttggttttttttttttttttttttttttttttttttttttttttttttttttttttttttttttttttttttttttttttttttttttttaaattttttttaaatttttttttttttttttttaggacacaaaaaagggaaacataaaaaacattttaaatttccccaaaaaaaaaaattttaattaaagggaaaaaaaaccccgcaaaaaaaaaaaatttttccctccattttaaaaaaaaggtgtctccattgaaaaacaatgggaaaaaaatggacaaaaaaaaaaaaaaaacagcaaaaaatattttaacggagcggggaaaaaaaaaactttgaaacccctttaaaaaaaaaaaaaacggggaaacaggagaaaaggttttcagcaaaaaaaagtacaggttgcaggtggccctaaaaaaaagagttttaataaaa

SEQ ID NO: 433742 - DNA, 463 bp, Oryza sativa
tttgttttttttttttttttggttttttttttttttttttttttttttttttttttttttttttttttttttttttttttttttttaaagggaaaggggccttaaaaaagggggggaaaaaaattcaaaatttgggtttccccttccaaaaaaaaattggaaaagggggccttttaaaaggcccggggtggaaaaaaagaggggaaaccggaaaaaacaaagccggggaacgtttcaaacccggggaaaataaaaaaaaggaaacctccaatgcatgcaaaccggcccggatacttaaaaaaatgggggccacccccttttaagcgtggccctgggggggaacgggggggtttgagcccaaaaaaacggggccgaacaaaagcccggggggggcccccccaaaaagggggcccccccaaaaaacccaggggccaaaaaaatttccggggggaacgggggggcc

SEQ ID NO: 433743 - DNA, 430 bp, Oryza sativa
tttgttttttttttttttttgggttttttttttttttttttttttttttttttttttttttttaaaaaaaaaaacaaggggttaatggggacattaagcccctagtttaggggggccccaaagaaaacaccttctttttttttcctaaaaggggggccccaagattggcccgaaaatccttttggccaacatattaattcaggggggactggataagggttgggttcccgggttagacacattccagccggccttttggttttagttcacactttcacaacttacttagggctcccggtgcccctgggggggttgggggaacaaaaactcaagggccctccctgaacccttaaattcaagcatgcggggggctacttggaagctttgggagactattgggtcaggggcctttgaaaacccccccagaagg

SEQ ID NO: 433744 - DNA, 70 bp, Oryza sativa
acccacgcgttcgagccttcttgagaggtcacgggaaacaccctatctatcatggagcactaggcgaata

SEQ ID NO: 433745 - DNA, 311 bp, Oryza sativa
gtctttattcacatccacgatccgcctgccgtttctgacacttaggccgaagaccgggaccgaccacatgaccgacaggaatgtcggttgcagcctatccaagcgcatgtccagcttgtgcgaatgaataagcgattccagtaacctgcggaccataacgccactcaacggcttctccaccaggctcccatatggcgagtcctactttgggcaccctaccggccgttcatgcgacgggaggcttattgtggattgcttagcggctgtcctggggcttccggacctgacggctatactgcatcctaatttta

SEQ ID NO: 433746 - DNA, 469 bp, Oryza sativa
  unsure (1)..(469): unsure at all n locations
ttgtttttttttttttttttttttttttttttttttttttttttttttttttttggggaaaaaagaaacaatttttttaatcataacacctaacaggaaataataataaaaagatttaagaatttattatccacagtccaaggccatggcctttccccttataaaaaacgggatgtattggtatctggatccatatggggccaacattttctttgcctttttttaaaaccccaattggggaacaaaaataaccctttttgacttattcccaatctgaatacacttaaattttttttttcccccctaaatgcccctntctctctctctctctctctttttcccagaaaatttgcccccaaaagaatttcaaacattttgtggggaagaagaagaagaaagaaagaaagaaagaaaaaacaaattttaaaaaaaattcctctcacatgatgaactgaactcatttagaagg

SEQ ID NO: 433747 - DNA, 474 bp, Oryza sativa
tttgttttttgaagatttaataaatgattactgtgggaataataaaaagattaacatacttggtagcactgactacttataaatagtatgcctggagcacatataaaactcatcactctaaactcctacatgtacgggacacaagtactaatttctagcaagaaaaaactaagatgaaatgctcaagcccagtcgcaaactcctcgaatctaactacagacatgacagtaaaacataatacatgataacaatagtccccgcaaaaaaaaaaaacaatagcataatatacatacatatagggtaactttggcaaacatgaccagcatagtacaatggagaagatagcagctggcagattattatgggattttttgacacataattacaaccatcataggcaggttgccaagaaacgaagagctttagctatgtaggccctagcttcagcagtagaacatgacccttttcacacta

SEQ ID NO: 433748 - DNA, 482 bp, Oryza sativa
gcgcgcgcgagcgcgagcgcctcgtcgtcgggctccagatcatcgtgcacagccagcaccaccacggccggcacgcgcacgcgcacgcggcgagcgtagtgctcaagcagatggtccggccgcgcgccgctgccgccgccgccgcagggcgccacggcgccgtctcgtgcagcttcctcaaggcctgctccctgtgccggcgtgagctcagccctaccaaggatgtctacatgtatagaggtgaccaagggttctgcagcgaggagtgccggtggcagcagatcgccgtcgacgaggcgcgggagcgggaggcggtggcggccgcgggccggccggagcggcgaggtctggctcgccaccacagccctcaccgtgcggtggcgcccgtccgtggcaggccaaggaagacactagccgtagcctagagttattactatgtagtggtaaagtacttactgagaagaggagcacgtactactact

SEQ ID NO: 433749 - DNA, 134 bp, Oryza sativa
gttgttttttagctcgggcagaccgtcggagaggagagagtccactagagagacatagaggggtccagacttccagagggttctttatgaaccgtatcggagtggaggtcttaggccaaactcacacccaacgg

SEQ ID NO: 433750 - DNA, 386 bp, Oryza sativa
ctttctcaagagacaagaaagatgctcagacaccttcggatggggatctgtgcatactcagagcagctggagcatgttcatgagacacacgacagcactgtgtctgtgaaggatgagcaaggaagggggggtagggccgctacaccatggccgcggctgccgtggcattggcttcggcgtacatggagcggttctgcgcgctggcgcggcggctgtccggtccacggatgcaaccgctcgtggtgaggctacccagcggtggtgctgaaccgtgcgcgtgtgcacgactggatcggcgacaacctgcgcgccacgtgtgacgccgcgacataccacacgtgcatcctgcctctgccttcctggcgcgtcggcaggggcctccttac

SEQ ID NO: 433751 - DNA, 402 bp, Oryza sativa
gacaccttcaataacttgcaaggataactcaaactacttgaatcagatcagacaaaaacatcataagaatatcacgatgtgtggaggagcactgatcccgaacgactatggcgacaagccgccgccagcgacgtcggagtcgtcggagtgggacgccacaacgaatgatgaagaagaagaagaagcgtggtggcggaggcgactacgactgggaggtcgccttgctggagttcatgggtgaccacggcgactacgacatacgtggaacatccatgtcatcttcctcggcagtgacgtaagactctacagagggatagcttctgcgagtgtgctatcaataccaatcattggatcccatgcttccatcagatatacgggttgtagctttcacttcagctacca

SEQ ID NO: 433752 - DNA, 457 bp, Oryza sativa
tttgtttttttttttttgttttttttttttttttttttttcttttttttttggaacaaataaccaggggcttttggcaattgccaagtgaagtattttcctaaaactggccctgggatttacaatctttcctgaccccaacatggtttacaaataggatggtcacaattttgaacttgcttgtcttgtaaatatccatggcaaatgaagaggctttgaaaagccgggggaccaaacaaggcgaaaaaaggaggggtccttcccgatagcaggggtatgggtggggattttactttaagggcatgcatatgcgggtcagcacacaagggggattgggggggattcctaaacattcgagttcggcaaatttggcagttttgggcttatggagaactttagccacggtgttttttccacgtacaccagaaccgggtgcggtactaacccaaccggattgc

SEQ ID NO: 433753 - DNA, 137 bp, Oryza sativa
acgttttctactacgagttaactgataggtggggcctgtcctttctgcgagtcctagcattgggcgacgctgagtggtgctacctgagggacggtgaggggtatggtattagatctgacgcccacggcacaggaggt

SEQ ID NO: 433754 - DNA, 503 bp, Oryza sativa
tttgtttttttttttttttttgttttttttttttttttttttttttttttttaaactcattttcatgtgttttgggtacaatactagtgaagtcttttttaaaaaaaaggacggggggaaatccaaaatatccttaaaaacaaagggggataaaccaaagcgcatagaccagacaatttggaagggtcgcaggacaaaaaaaacacccattgtgggaaagagggaggccctaaacaaaaacacggggggaaaaaaacaaaggggaaaaagggcgaatttttcttttctccaaagagggccccacaggggaggggggaccccaaaaaaggccccttttttttgggggggcccaaaattggtatggggaaaaatttcttaaccctaggattaggccaatccggcagatttgggggggggggtatcgggaacaaaaaggctttttgcacaaacaccacaaccggggggggggcgaacaaaactggaagggcaagagggggcccccc

SEQ ID NO: 433755 - DNA, 328 bp, Oryza sativa
gggtaaaaagcccactatttttttatttggggtcgtttttaacaagcagggggatctttgcgggctaggggccaaatggtgaaatcctttttacaagggcctctacaacagggggggacgaaaggtggtaccacgggttaatggtaaagaatagaccccataggcttaagatgaaaacaattccatgtgaccgccgccagtatggtgacatagtacacccatttttggaaagcgggcacaagtacatcactgggacactttcaaatccacctaaaggatgtgcaggcatgtcccattcgtttgaaaccatatttattggatttttaag

SEQ ID NO: 433756 - DNA, 336 bp, Oryza sativa
ctttattatcggctttcttaataggagctgtatatggacaaccaggagctgttacttggtatgtatatgattgtagctctacctacaacagtctagagtacaatttttgccacttatctctggacactggatattactggcaacaaaatctctatctcattgattccagcaatttacaaacagtttgtgcacctgtagttaaaaccgttaatctcgaattgaacgtttgacgcaatgttaaatccaaatttgctagttgtactggtgatagtccaattaatatggtttctgctgatggttaaacttgcacttctttaggagatttgagagttacca

SEQ ID NO: 433757 - DNA, 401 bp, Oryza sativa
attgttctccacttaactttcttgcatgcaaccttccagaatataattaatcaaccatatcggatcgtacgtgtataacaaacaaacacacagatctaacaacaagttgcatatcccttctaggattacaacacgcaaaaaatagaaacaaaaaatactgacccaatattctgatcaacccctttctactactccatgattaacctctgttgattaccactcaaattaactctcttatcacatcttcttcttcttatgcatgcatacacatatgcaaagtccttctgttattgacatacctggctaataacttcctctcaaagttctccatgaacagtagtagtacgtgctcctgttctcagtaagtactttaacactacatagtaataactctaggctac

SEQ ID NO: 433758 - DNA, 381 bp, Oryza sativa
tttgtgtttttttttttttttttttttttttttttttttttttttttttttccaacaatcaacaccataattaatttttacctcccaaaaaggcccaaccccaaattaagtccgtagcaaaaatttcccggaggggccccggtttttgactggaaaattttccctaaaaaacaaagcctgggttaccataccataaccaattttaactaaaaggaaaaggctaaaaattttggaccctagaccggaaaaagctttttaatctaaaatttaaatggaccaaaacaccgttttttggtaaagggaagcagtttaaggggcctgacaagggggttttttttgggacccaggaagggacaggggtacacaaatccagcctggggg

SEQ ID NO: 433759 - DNA, 386 bp, Oryza sativa
gtgctgcccaccttctttatcgttctgctttttttttctttctttctctggacaattgtatccagtcattcttttctacgcgaatcgatttcgctcacattcattgtcactctcactctctagttgttcctacgtggactatctacactctttctcccgacattgattgtccttgagattcttatcaactttcgctcaatatgcatggaatgaacaagctcgctctggcactggctgccgctgtggctgctgtcggtgaagccaaccttcacgatatgcatgctcgtcacccccatccctctggtctgccccagaccctcactcagacccgttgttcccgagcctgtcccaactccttctgagacttccttcgagaccccctttga

SEQ ID NO: 433760 - DNA, 112 bp, Oryza sativa
tttattccaaccagagagcttgtgtaagcgggggtttggtgcggtcgcgcgcacgtgatggggtagaagatttcataatattattaattaacacatatctatattctaattt

SEQ ID NO: 433761 - DNA, 359 bp, Oryza sativa
acctaccccaggaagatgaggaggtggggtggccatgactgatgggtcacaagtatctagaccaccgtatgcagctggacccataactgatgcttgtactagaacggttaagaattcaacatgtgagatatgccattggattgccttgcattgacctgtgactattccaacttttaggaaaaagcatgaatcatattgaactcttgagctgtcgcatgaatatgtactatccatgtttactattcgatgattaagcattgttcattaccactcaaaataactttgcttactacatctttcttcttttttatgcatgcatacacattatcaaagtcctttttgtattgacatacctggct

SEQ ID NO: 433762 - DNA, 125 bp, Oryza sativa
  unsure (1)..(125): unsure at all n locations
gagctgcccaccttcttttctgtnctggaattcattaccctgtgcatgcgcacatccagctagctaagatgagtcctaggctacagcatctggccgatgtgcagttggagtctgactctttagtt

SEQ ID NO: 433763 - DNA, 437 bp, Oryza sativa
ctgtagcagtatatattaatctgtcgcaactcgcaacacatacaaaatttacaattcatcacaagctgaaaaggagaaagaacaaaggaaaaaaaaactgaaacaaacaacaccctcatcaatttacaatctaatgatgactacttgggcttgacctcaaaatagggcatgtaatccgacgcgccatcgccggcgtacgatccccggctgatctccacgtcgctgtaggggtgcgccggcgggccgacaccgccgaggtggcggtcgaactcgttggcggacgggtcggcggagctgtccccctccccggcgccggcgtcgtcgggctcgttctgcagcatggcctcgatctccttcaccacggcgcccatggccgggcgcgccgccgccgactcgtcgacgcaccgcatcgccagctgcacgaaccgtcggaacac

SEQ ID NO: 433764 - DNA, 509 bp, Oryza sativa
gacattatagaagagctacgacgatggatcgccctccgtacgtatgggatgcctcttgttgggcggccgtccttttttttttttttttttaatttatgcacacagtgtcacatatatatctcacacagtacatgaatatatacagagtacagtacatgaaacaaaccgacactgcagtcggaaaaaaagaaagaaaaaataaataaaaataaagccaattaaccacaaacacatacatacacgttgcggccgtatgcagatgcaaagaagaaatacttattagaagcgagcaattaataattacgtatacgcacgtaaatacggtcgtacgtatactagagctcgcagacggtacgtacgtacgtatactgatagtctgatgtacgtatatatgcatgtgataatagtacaagtttcgtgttaattacccgcgtcaccgattaattagtataattaattaaatagtcgctgctgtggaagccgaaccttttgtcgaagaaatggccgac

SEQ ID NO: 433765 - DNA, 157 bp, Oryza sativa
ccaagctccaaccatggcgactaggccggagcggaggctgattcttaaagggaagtatctactccaacgcgagcaatgacacctacggatcaggaggacggcagcagcagcagaagaagcagcaggatgaagcggccgccgctggagacaagacgtt

SEQ ID NO: 433766 - DNA, 245 bp, Oryza sativa
ctttgtatctccacctcctcctgcacgatctgcggtcaagcagagcacaagcgtgtgctagctctcccggtggcttgcctcgccggcgacggcgcggcgcatgatggagccgcgggtgttgatggctctcgcgctggtggtggtggcggcggtcgtgccggcggtgtaatggccctaccatacccaggactgtgttgattctcacgagctgatggattccgtgatccactgagcaaggtgcacta

SEQ ID NO: 433767 - DNA, 454 bp, Oryza sativa
aaaaaggaagagtaaaaaaaattcattctcattgggagaattcaaaagagccacctggtaatcaatggaaccagcaacacaataaagtgatgatgaatccatcgaccacgactcagtgtggaaagaagaagaagaaaatggaaaagatatggcacccaaatgattggtccatagatcagaagagaaaggttaaaaatggtgaaaagatcagaagcgcttgtaccttagcccaatgctttgtcttgtcgaaataggtacaacaccagcgtgcagacgcacgaagaagaaatttgaaaatggaacgctctcaaatcatttgctgggatgtgtaacgcttctgctagatgagggttctatcagacgcgcatggcttagaaaaggcgggccagacgagcgaagaatccggtgggctcgggcttagcgggctcgttgggggcagaagaagcctggccac

SEQ ID NO: 433768 - DNA, 346 bp, Oryza sativa
aacggttctagatgagaatcggattcctcctccaccaccgccatggattcgccgccgccgccgcgggaggaggtggtggtattcgcggtcaacagcgagcgcttcgagctccgccgtgacgggggcgaccccggggagtccctcctcgagttcctccgctcccgcacccgcttcaccggcgccaagctcggctgcggcgaaggtgggtgcggggcgtgcgtggtgggtggtctcggtttacgacgcgtaggccgaccaggaagcgcccggcgcgggcagatgatgccataccttgaggcacgctcccccacatcgcacgaggacgacctcacagtgtgtattgagc

SEQ ID NO: 433769 - DNA, 485 bp, Oryza sativa
acaaaagacgaacttggaatttaaatagaatacaggctgatagtcacatatccagagcatgatctggcagtagaaatccccagaaatacagtacgggctactcttcgcctaaagattttacttctaacaacagctcaaattgatgaacgctaggccaagggaactctgcattctatcttatcctgcgtattaccacatcgttactgtagttgccttgccagggtgctgcgccatgacaaaactccattggcttctcttaaactcctagcccttctgtactcgatttctgcatctgaggaagatgactgtccaggctgaactttcttcctgacttctatgggttttagagatatttcatccatcgcctttctgaaaggatgacaatctttcacgaccccttcatcctcagatagatcccctccttttgttcctttgaatatgtccaagtgcaccacattatgtggagagtcgttggaaagctggta

SEQ ID NO: 433770 - DNA, 291 bp, Oryza sativa
  unsure (1)..(291): unsure at all n locations
gcgcacgccagcctcgacgcgctggtcgccgacgtcctcctctccggtggcaaggctcggtaggacaacgtgcactagtgccgcctgttgcatgctactccctccctcccataatacaagagattttgagtttttgcttgtaaaaaaaaaaaaaaaaaaaaaaaaaaaaaaaaaaaaaaaaaaaaaaanaaaaaagaaaaaaacaaaaaaaaaaacactaccgaacacaaaccatagatttggaccatggaacgcgcagccgtagctagtgaagctataaataacccaatt

SEQ ID NO: 433771 - DNA, 434 bp, Oryza sativa
attctcctgctcctcctccctgatcttccctctctcgctgccgctcctcttctcgccggccgcctcagcctgcggcgagctcttcgtccagccagtgcacccgaggagcttaggccggatcctgggatccgtaggagaaaccttgctcgggttccggagaatgtgaccggagcaaccgcggcttcaaatcagaaaaggctacagcaggggagcaacaggggcggtggtggcgcgcggcagcagcagcaccaggccggccaatggcgcagttgccatcaatgctgccgcgccggcggctggctcggcgccggcggaggtggccagattccactcccaaccaccacaacaggataggcagagtagatgggctggctgtttttctgccttgtcatgtttccggatcacagaaggtgggaaaacgaatagtttctgca

SEQ ID NO: 433772 - DNA, 314 bp, Oryza sativa
ctcctccacaaattaaaggtatgtggaacagcagcggtagatccttcagcggcagcagctactccaattcctccactgacacctacggatcaggaggacggcagcagcagcagcagcagcagcagtatgaagcggccgccgccggcgacaagacgtcggcgaagcgccagccgccgccgccgtcgcgcctgaagaagaccagcggcaggaacgacgacgccgccaccgccgtcgtcgttggctacgcaacatccggcggcggctacggcgggagcaccaaggccaacgccggagccaactactgtggctggtgg

SEQ ID NO: 433773 - DNA, 378 bp, Oryza sativa
atggctctatgtaaacccgggagggaaatggattaggactcacatagcgccacatacgctagcacgcgcatctgtaggacgcatgccatcaccactaattaccccgtggcacgcttttttcacgtacaacccttgagaatgaagattggccccaagctgcccaaatgttaagagcacagagactgaccctggaaaaaaaggaaggagcgatgaacattgacgcgaacagtggttagtgctttggtcaactgtgtcatttgagctattccagcgcttacaagctattgggtgttttgcatgactggagggttcttaagatgcttctgagacgccctagggtttttctgcaaatcgaccagtacctgacacatgatggga

SEQ ID NO: 433774 - DNA, 437 bp, Oryza sativa
gaaggtaactgttacaccacgtgcatgttcatgcactagcggtacatatgtacaacatgggaagggactttcaccccggctgcattagcctgggacacactgcatgaacgcacacatgcacaaaccctaccggcaggcacaacatcccgcaccggtttcaagattctggggttgacctttgtgcaagctgagtgtaggagcagcattgcatgcaaccacaacacgcagagctcacaacacctcagcatttctgaacgaaagggatgcaacagcagaacctcaagcacagctgctactgctgctgctgtgcaaaggctgcagcacatgcacgcatcatgcacacaacaacaactcatggttgtcaggaaaatgtacacgcacaacccacccttcaaggggcaccaaccgacacttccacaccatgcaaacttcaaact

SEQ ID NO: 433775 - DNA, 84 bp, Oryza sativa
agtcctgatcgcgagccgccctttttttttttttttggttcttttttttttttttttttgtgttcctccttttttaaaggaaag

SEQ ID NO: 433776 - DNA, 409 bp, Oryza sativa
gggcacaaaacattactgggtaatggctttagcagtttttacagatacatttttccctgacatatccaggaccaaccattcaccggactgaacaaaatttggtgcccaaaattattaaaaccaatggcccccaaaacaattaattttcctccacaaaactaagggtaaaagggatggaaggactcctggcctgggaagagattatattttgcagtttattttccaagcaaacggggtgccccaggggttgctcccttgaacccgaagttcaattcggcggaatccttttttgaaactcccaaagcctttggttggctggcaaattcagggcccatggaaaccgccatgcctttaaactggggcaaaatgttacttaaaacaaaaaggccaacaacctggtttggctttt

SEQ ID NO: 433777 - DNA, 306 bp, Oryza sativa
ctcagggtggccccgctcatgggccccctcccgggcatcctggcgcacctccacctccaccccccggtgcagggcccccagaaggtgcacctcccggcatgatgcaccagggggtcccgtctggtggagcgcagcagggtggcagcggcaaggtgctgaccatggctgagctggagaacatgatgtctgtcagtaggccacctcctggcatgcctccaccaggcatgccctcaccacccggcatgggcttccctgcaccacccgcaggtggttctggaggagggtcccctgacaagcgtgctgacc

SEQ ID NO: 433778 - DNA, 255 bp, Oryza sativa
tcttttagtggtaagctgtctagcgcttctgtattcattgagatggagatgtcgtatatggtgaatccacaaactgggtatgttaacaagcttaaggaacgggcaaagatttctacaccaagattctcatatttaccccagagcgggattttacatggatgaggctcattgctgataagtgcggtgcggcgctgggttaccctatttacaaaactgtcgactctgaggaggttctttgaccctagaattacactt

SEQ ID NO: 433779 - DNA, 479 bp, Oryza sativa
gtggtttttgttaacggaggccacgaattatgtggtgcacagccggtgggcaggaggtctaatggaggacgaaaaccgggctgcagatgtgctcgttccataacaccggaatactggaggtgggaatagggaccatagacgatttcaagttgaaacacctaccaggattgacctggatggtgctacttattaccgcacgagaatcaattgacaaggggttcgtgttacccggtggctactgatatacgtggtcattaaatataatggggatgctcatgccactcgtctgtacaagactgctatgaagggcttcttttttgatgttgtttgtgcatataagctagattaaccctggtacattgaaggggcactacggatgcacactgttgcctgaataactctagtggaactaattgcagcttcaaattatctgatgcggctgctttggttgcgattgaggctaggacaaacgacacgta

SEQ ID NO: 433780 - DNA, 303 bp, Oryza sativa
tcgcccgcctccattttaccaccaccccctcctcctcctcgcaccacctccaccacctccgccaccgccatggccgccgccgccgtccatgtcctgcttttgctgctgcctctcgctaccatcacatccgcgtcgtcggcgccgctcccgctgctcgcgctgctgtcgctgaggtcgtcgctgggcgaccccgccggcgcgctgcggtcgtggacgtacgccgcggcggcgtccgcgggcgccaccaggtctctggcgccgccgtggtgcgcgtggcccggggtggcgtgcgacagggcaacg

SEQ ID NO: 433781 - DNA, 504 bp, Oryza sativa
tgttgcggctgggggtgctgactcagcagcataaggcttgtggagggttgctgctggtgcatgcgggcctccttcagccatggacacacccacaggctttaggccagctgcagtggcagcagcggcggttgatgctgcatgtgctgctgcgctgccagggggccctggggggccctgctgctgctgctgctggtggtggtgctgctgttggtgctgctggtaaccctgagacggcccctgttgctgctgcatggggtgctgtggtctctgctgctgctgcataggatgctgtggcctgccctgctgctgctgggggcctggcccaggtggcccaggagggcctggtgggccgggcctgctgcctagaggccctggtgggccaggcctgctgccaggtggcatcatgggcggtccgcctggcccaggcgccggtgggccaggaggtgggccgccggcaggtggcatcattggtggtccgcctggcccaggtgctggtgggccacc

SEQ ID NO: 433782 - DNA, 242 bp, Oryza sativa
ctattctttctcactcggctcttgcaactcgatcctgtctgacatccgacgccgctgccccagccccagctcttcatttcatgacggatgcactcgaagttactgacaaaaggtcacagagcgtaccacacacttcgggacacacattggacgatcataacacacacattagatatctaaaggtccactataatacacaatgcctgagaacagcaacattagcatcagcaactatttccatt

SEQ ID NO: 433783 - DNA, 119 bp, Oryza sativa
cgccaccacgcgcgactctttactggatggtgtgcaggcgtggtacgagatcgagaggctgagccgccgcgttatgttcaggcgcaactgctacgccgtgcacgctcgccgtgtcgccg

SEQ ID NO: 433784 - DNA, 254 bp, Oryza sativa
gttaatggtctgatagtctgcttgaagttctgaattgtgctggttgtccaaatattaagaaagtaatcatacattcaatgacaacctatatacgcctgtctaaaatcaatcttactctgcacacatattcaaaggaagtggcttcgacatgctccaatctttatactatgaaggtgagcacttgtagctccctggaggctctggagcttgagtgcccaagactgtcaattctccaagtttatgccatgcaccat

SEQ ID NO: 433785 - DNA, 97 bp, Oryza sativa
gtgtccttgaagctgtgtaaagaccagtatacccttcatccccaaaagccccaaaccctatgaggcgagtggaggaggaggaggtgcttgttagcgg

SEQ ID NO: 433786 - DNA, 473 bp, Oryza sativa
gaatgacatctttgaatgcatatcatgagtggaagaactgggcggccaatgactgggcaggctgatcatcccaacttccttcaagcaactcatgtctaactagaaaagaaaaaaaagaagaaaataaaaagattatgtacagaaaaaaggccatcatcacaacatggacctctggcacaggcgatagcagttgttgctcaaaccctattgcaagcctgtaaaaggatggcttttattctacagctgcatagctcgaacacctgcaagaaagccacaaccaaacagcagcagccaaaccacaagtattcttcacctcccctactcctgcgctaactcaaaactggcaagaagtgccaagcctctgccttgccctttgccccgcagcgccgcacttgcgcgagcggaatgcctcgggaaggagctcctggaacttctcgaggaatagcgcccatgtctccgatcccatgtcggcc

SEQ ID NO: 433787 - DNA, 242 bp, Oryza sativa
ccttcatctccactccacctcacacgcctcatcgacctcccaagaaccaccaccgccttctcccatggccgccgccaccgtctccgtccgcttccacccggccgcatccgccgcgcgctgcggcggcggctcgcgccggagcaggcgcctgtccggggtcatcagggcgcagtcggcgccggcttcggcggcggcggcggcgctgacgcaggacgacctgaagaggctggcggcggtgcgcg

SEQ ID NO: 433788 - DNA, 313 bp, Oryza sativa
ggaaaaagggaaaaaagggtttaaaaattgggggggggggggggcccaaaaaaaaaaggggggggaaggcccaaaaaaccttggggtttggggggggccatttgaaaaaaacaaaaaaggggggaaaacaaattgggggcctttggaaaaacccccaaaaatttgtaaaggtaaaaggcccccccccccaggggggaaaagaatggggggaaaaaaaaaaacccgggagggggcaaaaaaaaattgaattttaattacaaaaaaaaaaaaggggggtttttttttttttttgcaaaaagggggggggacccct

SEQ ID NO: 433789 - DNA, 449 bp, Oryza sativa
tttgtttttttttttttttttttttttttttttttttttttttttttttttttttttttttttttttttttttttttttaaaaaaagggggaaccccaatttggtccccggggaaaggattaaaaattttttgggggggggaaaccagccattcagccaagaccccaaatttaaaagaaaaaaaattttttatcttttaaaaccctccaagggcaaaagggaaaaaaaaaaagggggggttctacaaaaaaattggaccccaagaaccaagaaaaaactggggtggggtattaaaaaaaacccccgggggggtgtcaagggggggagaaaaaaacgagggggaaaaagaaataggcagggggacccgccctgtttttaaaggggcccttggaggccaagaaataaccttcccaccggggcacccgctggtttttgcacacccaaaaatt

SEQ ID NO: 433790 - DNA, 204 bp, Oryza sativa
ctctcctccgccaccatcagcaagaagcagctcaagaaggatgcgaggcaggcggagaaggcctagaacgtgtccctgagacagcagcagcagcagccgcaggccgacgccgaccaccccttggcggtcaactacggcgacctccccgtcgaggagatccagtccaagaccatctccggccgcgtgtggaccgagatcgggggt

SEQ ID NO: 433791 - DNA, 342 bp, Oryza sativa
aaaggatcaacccattatggttaccacaacattcggaggggggaatggtgaggacttacttatacccccatacgcaggtacgcgacaatttcttacaaaagccatttgctctgacaacatggttgcacagttgactaacataattcacacaaaaatcacgagaacactataaacgaaacagtattaaacgcacaaaaaccgggcattgtaaagaatgaaggtgcactaaacgtatacacgaacagtatttttagctttggctccattctctatagatggaacgtttggaaatgttaaaggctattggatcttgggtaacactacagggaggtgaagatgctt

SEQ ID NO: 433792 - DNA, 442 bp, Oryza sativa
ggcattggcaaacaaatcaaaaattatgaaaccggaaggggtatatgtttatcatgcaatgacatttcagtttttaggggggcctaatgaaatgaatatacaaccgggctcacgggttaaaaaataaattaattaagaaaatggtgggcacaattataccggttaggcctgaagtttttaaatcccaaagtaggggttatttgtgccatcgcccagcagtcggcatgtactaatcattttccatcatctaaaataggaacaattctgcattttcttctaagcaaagctgttgccaaaacttttgcatttttcttaacttgttgaatctatgctttatattcaggggttgcaacttgcttcagagttatcaccaaggaagcaatatataccatggggaccttccgtcctggataattgttttgaatggaaaacaacaaaattt

SEQ ID NO: 433793 - DNA, 447 bp, Oryza sativa
gtccttttattcacgagaaatagatcgccttttgattgagacgtgagccatggctgcattgacttatgcagcgagatcctgagaatcaccctcagtggaacgccttgcccattacgagttcgtgaaccatccatttgtcgctgaccacgcttagtagagaaccttgagccggacaccatcggacataagaacaaggcttttcgcttattaatcagtagtcccacgaggaccttcaagtccacgattttcagcaagataggatgtccttttccctttggatgatgagtcaaccggacaggatgaaggctctgtttctgatagtaagagtgcaataaaatcctatgggtctgccacgagtaaaaggcttgattaaactttaggtcagagtccaactaatacattcaagcctggtctctaaattattaggggaaacaatttcccattttg

SEQ ID NO: 433794 - DNA, 445 bp, Oryza sativa
tggctcggcacgcctgaccgaccggaactgcacttgccggctccacgcatgcgatcagtttttggcttgctatgctatggttgcttgttgcagtggttttgccacggggaagggtcaccgggaaattattgtttaggctgacgtgatgctccagggagtcctgtcgtgagctcccggcgccgactcggcagcgatgaaggcgaagcgcgcggccgacgaccaggaggaaggctgttagcgggagcgcgcgcgtgggaagcggctggctgctgaggggaagcatgggttagtggtggtgagtacgggggaggaggaggttaccactacttgaattaacttctgttctgtcataaacagtttatcaacatgggaatttaccttagtacccgcaaaaccgataagttctctgaagacggtgaaaatgataagcttaaacttggttttt

SEQ ID NO: 433795 - DNA, 482 bp, Oryza sativa
ggaagaaaattacccttgttatgtacatcaatgctctagattgtactacagcattttttacgtcaaacaaaaattgtagagctatatactgtatgcgaagctacaaacctcttcatgagaacatatacacaccttgcagcagcggtagcagctagcagcagcagcatcatcatatctatcctaattaagtacgagagcatgacatcatctgaagtacacccctgaagcaaacaggcaaccagtacacagagtaggcagaggcggatcggatcggccatatcaacaatgcttgggcgaattcctccgcggcgagaagaggcggcgcggcgagagcatggtgaggaacctcggcgaggcgatgccgttgagcgaccggtagtccgacatgaggaggccctccgtgttctcgtgcaccctggtgcgcccgggcgtcatcctcgccgtgaaggtgctgtacttgaccagcttgggcagccacgcct

SEQ ID NO: 433796 - DNA, 463 bp, Oryza sativa
cttcaacgcctcgcgatcgatcgccccaaatccccgccgccgccgccgccgccgcgaatcgccggatgcccgccgccgtcgccgccgcgggggcggcggcagcctcgggcaccgcgctgctcgcctacatactcctcgcatgctgccggccgcagccggcgccggaggccggcgaggaggaggaggacggagttcgcggctgttgtcctccggcgcggaagcgcgggggagggaggcggttgatggctgtgagcatgctatgtttgagagccactgactatgttgcggcacatcatttaggtggactcatgttgaatctgtgcttggcctgattgatgagatgcttgcagtacatcgtaggcgagcagaacgtgttctatgatcactctctctctgttgaagacatggacgaaccttcctaacgtaagttttccataattgtacatgtcctatgatgagtgct

SEQ ID NO: 433797 - DNA, 334 bp, Oryza sativa
atcaagcagcttttgatcgcctctttggtctcaattgccatcttggccgtctactactcggccaacgagaacaagatcgacgccttcgaagagtggaaggcccagtacggtgccaacttcgccgctgaggaggaggcctacagaagactcatcttcgagaagaacctcgtcaagatcaacaagcacaacgctgatgccagccagacctacaagatgggagtcaaccaggtcaccatctacaccactgaggagttcggcaccagattccttacccccatgccccaggtcggtttgacccagaacaccgaagtcaaccacgagatgaacatcgttg

SEQ ID NO: 433798 - DNA, 339 bp, Oryza sativa
cttaatacacgagaaatacgatttccatctgattgcgacttgagccatggctgcattgacttatgcagaaagttactgcgaatcaattcagtggaacgccttaccgttgaagagtttgtgaaccatccatttctcgctgaacatgctttggagagaaccttgagccggacaccatcggacataagagatggctttccattcattaatagcagtcctacgagaccttcaagccaaagttctcaggaagattgtatgccttttcctttggatgatgagtcaactggacaggatgaaggtcctgtttttgatagtaagagtgcaataaaatcctatgggttt

SEQ ID NO: 433799 - DNA, 456 bp, Oryza sativa
ctttgttcacgggattttgcatgcttatccgatggggactggggacctggctggcttgcctgatacgaagagggagtggaaccatgtacatcggaacgcattcgcggagcagagtctgtgaagcatacctagatacctgaacatgctgagaagccagctgcttgactcagacgccaacggacgcatgacgtggcccgacacctattagtagtatgcctactacaacttcacgcgaaccatcctaggacagatttgtgcatttgcctactgcagacgagagagctgcacaggatgaagggactgcttctcgatcgtggagtgcgactatctggctcgagcgtgggacgagatcactgactacagcatctttcgcgatgacttgagcagactgtattcttctgcgatggtaagtttggatgctctattagtgcacttatagtatcaaactcctggagc

SEQ ID NO: 433800 - DNA, 556 bp, Oryza sativa
agcgaaactgaagggtgatgagaaaagcctgcatggtctcgcccccgggtactcgcaactggaagaatttgattgaagacggtctcaggaatgaggaaccgctgtctcaggcggaaaagtgacgacaagatggatgacagggaagaaagcccgagataggccgcctgcctatctattgagggccgctgcatgcctctcaggaggtagattctcaggaaaatcatgaaactgtgcaagaagatgagagcaaggcagctgaacatcatgatggacatgccacgagccatgaccatcacacaccagaaagggagtcatctgttgagcagcatgatcctgaaagccaagatgacattagcataaaagccgcacctgctgctgaatcaccaccagaggagacatctgcagcacctactaaagagcaggaatccactcctgctgactcagaaggtttatcaagagaggagttaggccgtctggcagcttccagatggactggagaaaaggttgctgaggtcagtaaagatgataaaatgagcatgaagctgagcatgatatg

SEQ ID NO: 433801 - DNA, 354 bp, Oryza sativa
ggaggaataaatcgctactcaatgctatattagttaaaccatgatcaaccgaattttaacaggtaaagaaaaaccggggacatatagaaagcctgcaccaaaacagatgtatgaacactaacaaattcacagttaaacgaacgacaagtaattggcagtataactaaaagcgattgaagactaatcatttacgagagtttctcaatcttgggccctcgcccgttaattacaccggcggccagcgcacaatgcttgtacatgcctacggccatgtcaatttcagcgccgtgggacataatgcctacgaggggggagcagacgccctgcagagagtttatcttggaaccgaactca

SEQ ID NO: 433802 - DNA, 469 bp, Oryza sativa
  unsure (1)..(469): unsure at all n locations
tttctcatctaactcagttactgccttgctaccctaccccagctgcacgctcaggtccactgccagcgtgcgatcgatgactacgattaccgtaggggccgcgcggtgaggtgaggcgaggaaaagaggattcgcaccctcctcatacggaccaattcacctgatcggagccatggccttggctagccgggccacgcccacgagcataatcttctacgtgtcggaccacgatcgccaggaacaccagctccaccacttgaagtacttgggaggaagcacgaccatagcacaaagaggtagtactgtaagcatgcatgatcctgaaagccaagatgacattagcataaaagtcgtacctgctgatgaatcaccactagaggagacatatgcagtcacctactaaagagcaggaatccactgctgctgactcanaaggtttttcaagagaggagcttggtcgcctggtagc

SEQ ID NO: 433803 - DNA, 386 bp, Oryza sativa
ggttgttttagtaataaacatggttgtataatggaccaaactagcagtggcaaattatacttttgatgccctggagcacctggtgctacaaaccggctaatgtgctaacagatagttgttgagttacagtgatcgagagcacccattttatgggatcagtgctgtaacactttctactataccatagaccccgtagggtgcctgactgctgcaaaagaggatgacaccgggcatgaaggatggaaatggtctctcagctgaaccactggatacatgaaggaggaggtttttgcattgctgatatcctctgattcagaggctgaggcacctgcaccttatgccaggggagggttgcctccacaggggtggacttgagggtatgcgtg

SEQ ID NO: 433804 - DNA, 352 bp, Oryza sativa
aaagggcaaacgaacggaaacccttgtttttttaaccttcatgggttgtcaaaacctttcaatttttccaaggggttcattagaactgggaactttttaacatttttttttgtaacttggacattgacccattttaattaaacttggaacagggctttacgggccctttttttttgggggcaacaactaatttcaggatagggcccttttttcatggtttcatgaacaaacccccaaaccattaaggagttttacatttccaaattttttgggccccacaaatccttttttgacaggtttttttttggagttctttaaagggttggcaatgtttttttcacacgatttttgg

SEQ ID NO: 433805 - DNA, 476 bp, Oryza sativa
aaagctgcatcgcctgcccgacccgaactaccgggctcgacccacgcacgcggcttatttttggagcaagacgctttatgctagctgcaacgaaagattcaagaaggagctgaacggcatccagctggaagtgcatgctactgacgcccgctaaatcagcctagatgcgctcaaagatcgtgtgaaataagcattgccatgcctttcatgatcttgcaatacggactggtccattatggattcgtgagtgactatagatttggtagagccagactggatgctagttggtgggctggcccatctctcgcataagcttgagactgtacacgaggtatctcaagcggtctcacaagcacgggacatgaaagcgacttaacagaggatggcgaaagatcttgatggagtggggaaaatcgctcgcatggcaaagacaaaagttgatgaattggaaaaagataactttatcaacagaccaa

SEQ ID NO: 433806 - DNA, 409 bp, Oryza sativa
ggggcctcctttcaaagttgttttaataatataatagatagatcccaacaaaagtacaccacccttaccctgatcacactatcacacacgtcggtatccatacaaccaatatgaccccaggcacgaacaatcctaattgtacggaaggaaattcgatctttagtgcaggagaattgtgaaaaggaaaaagacaatcattttggcacaagcaggacaacctcaccaggcagcaggaatcagacgcaattcatgtgggcgcgtacgctgggctacccaacggctgcggtggtagtcggtatcacgagggagccctgcggcggcgccggctccgacggctcgacgtagctggcaatgtccctcggcttgacgtgcactcgcagtccattctttatgaaaagcgttagcgaca

SEQ ID NO: 433807 - DNA, 184 bp, Oryza sativa
atttgttcagagctaggtatagattgctcggttgaaggaggggctgtgccacggcgactggccaccgaagaactatcgttaaactggacaggagtatcaacagtgtcctcgagggagctaaccgtgcgggatcagcaagaataaaggtccagcgcacagctatctccgaggaacatggcagaac

SEQ ID NO: 433808 - DNA, 468 bp, Oryza sativa
tttgttttagtcaatgaatctactatttataactcagaaacactcagattggtacaaacaacagtgtaacgtctttggggtggcatacaaaaatggagcaaatacgtttacagggaagaggggcaaaagaaaatctaccgacaaataagggtgaggaattaacagatatcctacagattttgttcaaaaattttttttgccaaactaatgctgattgggtggcaatacgggtgctgaacttcaagaattccaggaacatatgctattctattcatataataaacctgttaaacctgtgttgagagtatggctggatggtgagagtcgctttccttgacgcaagctcattattggctcaccccataatttagagatcatcatggacacgctggtttgaagatgccatgagctgctgtttcaattccttgagtttttgttcattgcaaagcgctggagttgttaatgcag

SEQ ID NO: 433809 - DNA, 77 bp, Oryza sativa
tttttttttggggggttttaaattttgggggtttaactatctatttttttttggtggaacatttttttctctcattt

SEQ ID NO: 433810 - DNA, 236 bp, Oryza sativa
tttggtagcaatcgtctccactctcccaccaccagagatcctttattcacacactctgaagctgagtcatggcggagcgcggtggttagcgtggctgtgagcgcggtgggttcggccgcggcttcggacgcggcggtggtggagaccgcggagggcgccgtggcgggctccgtcgtccgtatccaggaggaggagaaaaggttgcccttaaccaagtttggacgtctcgagaagga

SEQ ID NO: 433811 - DNA, 461 bp, Oryza sativa
tttttttttatattgaaaacatgtaaaactgcgcttcttcttcatggattaaaaatctaaaaaaaaaattaataatttattattattttttattttgttttttaaatcttttgaaaagaatattgtcaaaagcctttacggggatacttcatttttttttttaaattttttttttttattttacaagagactaggcccctcttgttgggataaaaaaaaaaatttaaaaaaggttaaggaatgaagcgatatcataaaaagtttattcttctttttaccttgttatttatttttttttttttttaataaaaataactaacttttggtttgttattttttaattaaaaaaaaaaaaaaaaaaaaaaagggtaaaaataaaaaatttaattaacttaattaattcaattaatttaacttaattttaatattaaattaaataatttttaattaattaattaatt

SEQ ID NO: 433812 - DNA, 131 bp, Oryza sativa
ctttgcgctctctctatctctctctcttccaaaaccctaaccctagcggcgggcgggagcggcggaggaggagggcgcggcggcggaggggtggtagaggaggtgggaggaaaggaaattatgcagagctc

SEQ ID NO: 433813 - DNA, 335 bp, Oryza sativa
ttcatggcgctctctctatctctatctcttccaaaaccctaaccctagcggcgggcgggagcggcggaggaggagggcgcggaggaggaggggtggtagcggtggtgggtggtatggaacacgcaatttttgaaaaggaagactctatactgtctttgaagtagatattggcttttgagatgtagtcctatctggggatgatttaaacacctattgttgtgatgactggattaactagtgatgttactgcttgtataccttggttgaaacttggatccctttacgagagcggaaatggtagaagtgtgatttaacctaaataaatgatggatcat

SEQ ID NO: 433814 - DNA, 420 bp, Oryza sativa
tttttattaaacgccaaactggattcctgacgcgtgcgcgcgcgcaaagccaccttctctacaattcgatagttccagaaccgcggtattaaggcggtctgactgccaggcgctggcctcatgcaaaacgggtgttatagcactagccatattatgcatgaggacttgactggcacacagggatgcctgcattaagatcggcatgggttaccctgcttgactgggttgcacgctggcgacaccgacgtgcttgctcatatgctgcaagagtcatagtatcatcctaggcagtgagataaaactctccgagggggagagcttgggcgagcgtgggatccacacgcaatcatggcttcgatgcttacatcagacatagggtttgaactttcactccaagtaccaagttaaacgatgtgattg

SEQ ID NO: 433815 - DNA, 231 bp, Oryza sativa
ttgtttcgcgcagatccagtccgtggcggggggggttttgcggatcagttgcgcggtggctgcgactacgtggttgcggcccgatgtgacggcggcggtgcggatccagtccgtggtggcagcggcggcgcggatcatgtccgcggcggtagcgactatgtggttgtggcccgacgtgactgctgtggttcggacgcggaccgtggcgacggcggcagacacggtatccag

SEQ ID NO: 433816 - DNA, 507 bp, Oryza sativa
tttttgtttgcctcaaatttagaagaaaatgcggcctaatggtgaccaccacgacgccggcgaggcgtggcgaggtccggtgaggtgacgttgttgatgtcagccctgggcctcgatcggcgacatcatcgccgagaaccggcgcttctggatgcgcggcgggaggtgcttgttgtacctcttgggcccgaccgtccacggcaggaagacgccggtgccgctgcggctcatccgcttgttgccgccggcgggggccatcaccatcggcctcgccggcgcgggcgcggcgaccatcatgacgggcgccgcgcgcacggtcatgccccacgcaggcgccagcacggcctgcggcgccgggccgtagccgatgatggcgccgccgtgctgcggcttctgctgcatgccgggcgccgggatcggctgctgcttgtgcggcggccgcgcctgccacagcgtcatggccttggtgggcgactggaggcggctgaggtccaccggcgtcgacgg

SEQ ID NO: 433817 - DNA, 471 bp, Oryza sativa
agacttcagcatgtgggcgagatatcccacagcagcatcctgtgatttatgggatgatgagctcgcttgatcccccacatcctttccaccactgctccctggtcgggaatcaggtgtatcaacatcatccaccgcaaaaggaaaatctaaatcatcagtatcatcctgcattgacaatctgcttgaacttcttgaaaacccaagccgtggggaaccactagaggaaaaaacacctgagaatctgccagattcatccctactatccttaatcttaatcttaggaacagaaggcaaattagtgtagagatcagccatccggatccctgtccggcctgtcttcatcggtgtcttatgccccccaaagtcgcctctgatggttttcggtgaaggtggaggtagcatgaacccccttgacgggatccgacctgttccgattgtgaacggggccttttccaccacccggtatgatca

SEQ ID NO: 433818 - DNA, 384 bp, Oryza sativa
tttggtaaaagccaaactgaattcccgacgcgtgcgcgcgcgcagatccgtcttctctccaatccgatcgctccgggcgcgcgggattcatgcggtctcactgccgcgcgctcccgccatgcagcaggggagttgtagcagcagcagcatcctggaggagggtttgactggcgcggggggtggttggtgtcgtgtgcggcaatggcgaccctgtcggactccgcgggcggtggcggcggtggccgggcgggcgccgagctgatggtgccgcagttccaccttaaggcgctgcacgccatcctcgccgtgcgcgcgccgcggacgttcgcggtcgcgcacgcgccggctgtgtcgttccggaggcgggacaggtggttccacctg

SEQ ID NO: 433819 - DNA, 296 bp, Oryza sativa
ggggggggtaagagtttcattaatgatttatagggactatggagaattcatcataatctccattgcttctaattcagatctcttttggttcattacatacactattgttccaatgatacccgctaagggtgaaatacataatataactataagtgctatgataccacctggtaaactgccatttggtgttttggatgaatcaaagggaatgttttccactggtccttttggaactggctgggaaggattaggacttggttgtttagcagggggagggctctgttgtggcggaattg

SEQ ID NO: 433820 - DNA, 447 bp, Oryza sativa
tttggttatcatgacttggagacatctgttgtcgatcatattagttttatccagtggggtactgggtagagatgtgattcagcaagatattggttttgtggttgaggctatcttgactgttcctgatccccctccctctccttctcctcaaccaagtcctgatgtagcaccaccacccaatcctgttcctaaccctattcctgtacctattcctgtacctattcctataagtgcacctcaacctaatcctaatcctactcctgtacctattcccataagtgcacctcaacctaatcctaattctaatcctgtacctgttctataaatacaccttaacctattcctactccaatacctgatccacagtcttgtaatgtaaatggttatgtctgtgataatgtagatcctatgagcaagtgtatgtgcataccaccacaacccaatgag

SEQ ID NO: 433821 - DNA, 288 bp, Oryza sativa
cacgcacacaagcgcgtgtcctctatagattgcgcccccttttttttttttttttggtttttttacaataaaaccaagttaacttttgtgtaaaaatggagcaatggatcatgcaaagctaacattagtttattattgggacccaagatttttactccaaaaaaaacttccaattggaaccctcttattgagtaccttcacaaatatgtgaccctgcaggtcactttggagaggtttccattcttaacttttttcaaaaactgttagtaaccaaaaaaattttaaaaa

SEQ ID NO: 433822 - DNA, 397 bp, Oryza sativa
ggcccggactgaccggctggacccacgcacgcggcttcttttatcacacttcccatcctagacttaacggacccatctagagtccccgcatcacagattccactccacgcaaaccctacgcctccttcgctcgctgaacactgggctcggttacccatccatggctggcatgaagttcttcgtcgtcctcaactggaaacgcaatgggacaggggaggacgcgacgaacatcgtccgacgctcaacgagatcctggtgccctccgaggacactggcaggagaacccgagcccgtccttacgttcctgccggagagacagggttgatccggccggacttctgacccggcccgcagaactgctggctgcgcaccgacttgtgcctacactggggagatc

SEQ ID NO: 433823 - DNA, 396 bp, Oryza sativa
gggagcccatcatattatattcatttatattagtatcaaataacaagtgtgctaagcccatataggcccaacaatcaaacacaataacaccccatatagcacaacccgccaaacatccaatacaacacaaattttacacccaaactaggttcagttgggtgagcaaaacataacagtcccaccatatcctagatggcaaaacaaagttttacatcactgaccatatttacaaagtccaatcatatcttgccctttttgggcaggattatcaatgaacttccatttcaacaggttcattaaaaactcgtattgctgttgcaatggcacattttgaaaaagaacaaatgcagggggtggagcatccttatcttaggttgcttcttttcttttttagca

SEQ ID NO: 433824 - DNA, 428 bp, Oryza sativa
ccctcattcgccacactcccatgtcccatccactctcctctcctctccggcggtgggtacaggcgatgacagcgtgcggcggcgtcctcctcctctattgccgctcgcggtgccggcttactctcccccaccgtttaccacgccgcctccgtctccgccgtcgccaggctcgggagcggcggatctgccgccgatagcgccggcttccgggccggcatccgtctccgccgctgctgggcacgggagcggtggatccgccgtcaccatccactcccccaccaccggcgatcccctctctatgcatgcctcacgccgtcgcataccctcccgatttccctctccaatgatggatggtttggtttggtttggtttggctgcttgcgagcagcttctggttgctgtgcgtgttcggatgtttctagtttctc

SEQ ID NO: 433825 - DNA, 401 bp, Oryza sativa
gggggcagatagaatgtacgagaatattgacgattattctatctggtatctacagcttcctttgaagaaaaagaaagaaagtaaccagccggtacaggtcgaactacatgcccaatctcctaataaccagacatgactaaactcttccggatgcaagaggtgttacttattggatttgcatccggagcagctcttgcgtcttcaaagagaaaccacccattggaggtgtttatatgttcaaaaaagttctgttctaagccctggcaactaagttcaggtggttcgaggcagcatgcatatgcgctccgaccagccaggcatggtaatgattcatcagatgagggaaaaaagaatcacgggagaattatcgccgaccatttgcccaacttctaaagggattt

SEQ ID NO: 433826 - DNA, 283 bp, Oryza sativa
gtcttcctcctcctgcggttgctatcggcacagataagatttggttaggagctgttttgtttgttgggttgaaatcgtcaagtaacgtggacgtgggggtgaagcaaaggaagggaggggagattgggtttgggtggtgtgaggattgatttgttttattttcttaggggggcaccttccttgatggctttccttcttaaccgttgttttatgataatactctcttatttagatcccactgttcgcttacccacacacaccttccgtttcttgttctaccatt

SEQ ID NO: 433827 - DNA, 370 bp, Oryza sativa
gggttaaacaattacaatttgcaatttccaaacacgatactaatacaaccaaacacccaaaaaaaggaccacctggaacacaccagttcacacaggacgcacatccgctggctttttgtgccagagttaaatcaccattaatttcaaagaaaccacttcgtaactggacgggatcattcaagcaccgaagctaccatatatgcccttgaattctccgaattcagtattttaggggcccaagcccatggcaatggcgacgttgagaatgaagccaacttctatggcggtgaggttgcatccgcccacctgttttcatgcgccgctgtagtacgggctgttgctaccagcggctgggcgccgaattcgaacg

SEQ ID NO: 433828 - DNA, 143 bp, Oryza sativa
gagataacacggcatgcgcacgcgcgcgagcgcgtgtcctctatattgttgcgccctctttttttttttttttaggcagtaacacaacaaaccatgaatttggaaatgaaggatgcgacagggagggaaaacatcagcaatac

SEQ ID NO: 433829 - DNA, 489 bp, Oryza sativa
tcctctagatttgtcgccctttttttttttttttgaaggggagagagtagtatgatgtatatatactccgtatgtgagaacaatatgatcttagcaccgacatgcagcttatactagcttagcttatggacaaaggtctccatatccgatctggtacaacatttgccatgattttttttttcaatttttaccagttagaatcgatgcgctgcaagaggccggttgatgttcagccattgaatttgcttctttttttttttccttgtttaagatccttccaaatcaagggagattctgattcggtttggcagtcttacttgtaaaattgctagttagtagtttagacactgcctccacaactggagctttcgaaatgttgaagtttgtctgacattctggtcccggcccgtactttcattgacaccgatgtataggtcccttggccatttcttccttgcttcaagatcctcccattccaagggagatctc

SEQ ID NO: 433830 - DNA, 344 bp, Oryza sativa
actcacaaagaaaactgtattgaatttggctattttaacatgttcatcaaaagctacagagaatcatccactttgaacagattatgatttacaaggctcttggcttctacccaaattacatcactaaacaagtcacttctaccaaaaaggaagttgtaggaacaaaaatattcaacaatttgcatgtgttggctgtctattccgccttgtcgagactatttgtcccagccatcctctttcatgccaaatagccatttctgggggagagggccatatatggaggtgaacttcgccaagcatttcgttctgatgtcatagtgcttctgcgtgtcttggctaataac

SEQ ID NO: 433831 - DNA, 346 bp, Oryza sativa
tttggtagaggggagattccgccgccgacgagaggtgggggggagtgggttgtgatcgtgaggaggcctctcatccctagacggtcgagttgaaaggcggaaaagacggatagcgttgaagcggtcgggcgcggccactcatctgcgtcgtccacgcccagtgggggagccataacttctccagcgacagcgatcatcccagacccacacaactagacccggggcgctttcctcgtccggctgcaatccctatgacctactgttcctcgcctgcctctgtcgactgtaagaccggtcgcccccgccatacaccttctctaacatccaatcaacaaaaatcttttcc

SEQ ID NO: 433832 - DNA, 385 bp, Oryza sativa
gcaaaaactcggcccttgttataaacaacactccaacagtttattcttatccaggttgcaatgcatagcggttttacagtcaaatccatactgtactggtataagcacaactcatgtgccaaaatttatttttgttcatagagcggaaaccttttttttattacattggactggcattcactccataagggtttcttctttgccttctaaaacaaatcctttggcccttctcttaatctttcactggagttcctttaaaaaagttggtttttttaatcaaaaatccttttttctagctttaaagggtcaaggaaagaggcatccttttgatttgagcccctggtagtggacttggttgctcaaaaaatttttcccccttattttt

SEQ ID NO: 433833 - DNA, 417 bp, Oryza sativa
tcgcttgttgcttcggttcgtttcggcttgtctgctgagtcggttattcaagtttcacttcataaggcttgtaaattacggtttattccacaggaaatcaagggtgataactgccatgaaagaaaccatgtgatgcataaatggtcagtcaaataggccatggaaccccgtaaaacagggcctgcgttagcttggctgttttttccaataaggctttccggccccccctcgaccgaggcattcacaaaaaaattcgatcgcttcaagttcagaatggtggtcgaaatcctcgacagggactaataaaaggttacccaggccgttctcccccctggaaagcttcccttcggtggcgcctctccttgtttcctgacccttgcccgcttaccccggataccttgtcccgccttttttccc

SEQ ID NO: 433834 - DNA, 432 bp, Oryza sativa
gtatgtagatcatgaaaaattccaatcactgtctttgaaccattacatctattacatttggtgtgtacctggaagttcaggtcttcaggcaactatatgctcatactttttgccaaaaaaagctgcaaaaatttgcatttatgcctgtgggtcctcttacaaatatttgaacatcggatgcacaagctaagcctcaaattagaaaggtacatgcatatgatacaggggaaaagcaacaggaaggttaatctaatctagcttcaactatgatgagtagttcctagacaagtacctctttactggcgcggcaagcacccctactctgtgtgggtggaaaaggacaacacaagctgcataacataccacagtaccaattaccacagtggtggcaagacgcattctcatggcaccacctggaaaagcaccaatgga

SEQ ID NO: 433835 - DNA, 113 bp, Oryza sativa
tgagacaaatgaaaccctgcaacttgttctttaacatataataacaaatttattatcattaagttaagtaccactgccaatagtaatctttatttattaggtacaaattatat

SEQ ID NO: 433836 - DNA, 473 bp, Oryza sativa
gggcccggaacttactggctggaccgacgcatgcgttgacttggaggaagaggctgcaagaatgcacaaaaccggtatgcctgggcggaccgatacgggagtggctgcggtgacgctaatattggccgtgtgacctcatgccggggtgctgtctaagattggtgaagcaccagaatacaagaacagggaatgacaatcaccggtggatactgcggaaaagggaaagtgctacactcggctggcacacatatagatgacactgaacacacactacctgaacgagtacatgtgaggtggtgtacacattgctcaagaacgccttctgtccgtaatcagtactctttcactcataggatgatgatgacgatcgttgttttctaccctacttcagttctagaaactggacttgatattctcttctgttggtagcacggatggtgatgatgggaacacaacttggtggtgatgtgccg

SEQ ID NO: 433837 - DNA, 273 bp, Oryza sativa
tttttatgtctgatcgtcagctagaaggttaacatagggcttgttgtccaatcatgagggatgacatcatcccttgaatgacaacctatatacgctcgtctaaatagaatattactgagtccacatatttaaaggaagtggattccgacatgcaccaatcttcatactttaaaacctgtgcaattgtagcatcccgcaggatattaagctcggtggaccaggatcgactaatcaacaacctctggcatgcactatgtagcaagatgaggagac

SEQ ID NO: 433838 - DNA, 350 bp, Oryza sativa
agggaaaaaaaaacactcaaggtataagtaaacagtgtatatatcaacagtttatgtgataaatttaccttttgaaattataaattataaagtagtgcttaatttactccaaaattatcattaacaccgctatttactacaatgatcatcagagagtcaaatattatcggttttggcatctagtttcttctcagcttcacttatgccctccagttcccgcaacaaagcagtgtgctttctaatattcccttcctggacactttgaggtgcctttttgcgataaccagaagcattcatcatgtgtgtcacagcatggtgtagtttttggattccatctttctttttcctta

SEQ ID NO: 433839 - DNA, 204 bp, Oryza sativa
atggggtagtgtatacacatatggatatatatttacattattatcaatcgtattctcatgatgttaattttttccccttaattaaaaattacatcttatgtctatatggcataccaaagttttatgtgcttctttcccgagaaatcggtctccatgaaaggagctcagtgtttcctttcggactattagtgaacgaacgaattg

SEQ ID NO: 433840 - DNA, 399 bp, Oryza sativa
gaaaaaacagcaattgtaaagaacattccaaacattttcagggcgcacaaagcccaattggggggggacgatcaacttttctttttaggaacaattaagcttttctaccacctgtcacgaataaaatttttgaattcctaacacgaccccaatcaaaacacatccccactagtacggggaatgtcactctttgaacattgaacaaagttagtttttgggcaaccttttttaaagttttctaaaaatcatcctttttctctttgttttttggtactttttgggggtgcaccaaaagaggcagccttttaaacttgatctgaactatccaagggcaaaagcattatttatttctttgccatggaacttttgggccgagttgccatttagaaccggaaatca

SEQ ID NO: 433841 - DNA, 408 bp, Oryza sativa
aacagccaggcagatttactgtcagatttttccttaattttatactagtataatttaacaggttctgctacatttgcctttttctgtatcacgtactccttcctactagatagagaaacgccaattcagttctttacatcattcaagcacaaaaatctggcttgaatctacatgcaaagaaaacaacataatgccactatagtatatggaatctcatcagcacaacatcctcacctcccaatataaaaccctatctggaaccatccaagaggctcctcagaatgtatatgcatctccttcactttccataaaaatcatcacaagaaatggaaatactcgatgcattttgactgaccgatcggcagcaatgtccttgacagagcaccagtggtactgggtgaagcactt

SEQ ID NO: 433842 - DNA, 54 bp, Oryza sativa
gtggtgttgtttttggggggatgaggagggagcggggtatcacatgaacacgct

SEQ ID NO: 433843 - DNA, 363 bp, Oryza sativa
tttgtatgcgagcggccggccctattattttggtgggggaagtttagcatgtttatcgcgaagctaccgccagcggtataaccattacacactgcttgctgggcaccgtcccatggccgaacgtgaaaaacatcgcccaagagagctggacaatttacagcaggcggggcagatgtccctcaattatacacctaccgacttatcggcacagcacaaggactaggcttttggtcatgctaaggaatggaaattttgcagagcctagcacctgaagcctttatgcgcttctgaggaaatcagctcacgttttctgacggggcatgggtaccacaagggttcttggctggttgtgcaagagaaacc

SEQ ID NO: 433844 - DNA, 324 bp, Oryza sativa
gggagaggtgtactttttagttgagcacccaaactattctctttatattttatgaacatatgcagcaacaagttcactctgcaaattatcactgtctgtgggataggaccgccaaacagcctaaatgtcgggaataaagagcattcttgcacagatgggccaacacaatggtgccactgtaacaaacacctatttgtttaatgactaattaacgaccagaatctaaattgctaaagttttaaggctaactggggccggcagaggctgacgaattggtgaggcggcccgtattgagagggacaccctcgtggttgacttgtagcc

SEQ ID NO: 433845 - DNA, 110 bp, Oryza sativa
aagagaaaataggacgataactctgtacattccaattatacattatcattatatatttatactagttcaatgtatctcactcttgttacaattattaattaaagtttact

SEQ ID NO: 433846 - DNA, 96 bp, Oryza sativa
atgggggcttttttaattcttatgggggtttacaccaattttttttatgacctgctttacctacgcctccttattgaggactcaggattttacttc

SEQ ID NO: 433847 - DNA, 298 bp, Oryza sativa
ttgtttcgttgagaggaagccatccagccagctagctataagatagatagaagaagatcaagacgaccaccaagttgaggattggcatttcttgtagcttagagacaaattatttactagagatcaagaagcctattcggcgtccatggggagcaccggcgactgcggcaatggaaaggcggccgtccgcggcggcgggttggtggtgccggagatcaaggttaccaagctttttattaacggcgagttcgtcgacgccgcctcgggcaagacatttaagacaagggacccacgaaca

SEQ ID NO: 433848 - DNA, 342 bp, Oryza sativa
gaaaaaaacaggggtttaagtaaaaaaaaaggtggtcatttccccgttcaaaaaatttaaccgtcaaaagaaatcccttacccaaatttaaagggaaatttaaccggtgtgtttggcaacattgtaaagggtttcccccaactaaaggtccaaaacaacagtggcaattacaattagaagccctaagatcaatacaccactgtgggcaacagggtacatccacgactccccgtccatgaaatatatacctcctactgctaagagagaacaacaggggttgtaaagctccacgatctgaatggagatgctttaaatggatgggagaagttacagtcatactcc

SEQ ID NO: 433849 - DNA, 123 bp, Oryza sativa
tgttctcgatttcgcttcgcttcgcctcgcgttcgccttctgcttcgatttcgacttcgattcggccggcggcggcggcggcggcgtcggtttggggggagttagggttagggttagggttag

SEQ ID NO: 433850 - DNA, 356 bp, Oryza sativa
ggggacactgaaagaatacatctttgcctcagaaaaacggcaagagttacaagttttcacttttcagtcgcattgtacatttctaacacctcccctcagcaacaatgctatggctttaacaactctttgaccagtactctgtatcaaaatagcttaactagcttactccatctaaatgaacaggaaagcgtcaacaaaatggaggcccgggcactatatcatctgtacactgtttgattacctcacaacattcgcctaccaatgtcagtggtacgaggaaagcttacagcaaccgggtagctttttgagttaaaaaagacaaagattaacaccacaatggcatccctatgaagaac

SEQ ID NO: 433851 - DNA, 218 bp, Oryza sativa
tcgctcgcctctccttcctcctctgctcccactccgcctcgccgccgcctccaccatgtacggcgtcggcggcggaggaagaagttttaacgcgccctacacggcattggccctttggtttatccacttggactattactactaggaggaggaggagttattgtaggtgctttttcattatggacttttagttcaattaatcattcaatttatcattt

SEQ ID NO: 433852 - DNA, 187 bp, Oryza sativa
tttttattggttttttttaattttttggggtttttttttttttttttaaacaccaggaacctggttttatttctggcaagcacctgcccaaaatatccaaaaagttcttaaaccctttaaaaaaatcaaacccctggtaaacattgatcccaaaacactccttcctaaatttattaaattcctaatt

SEQ ID NO: 433853 - DNA, 130 bp, Oryza sativa
acttaaaaagacaatttcctttatatttccggaggcaatttacccaatcatgcctattctacactttcatagctattggttcctgacaaataaacaaaaccaagctttttgacaacctctattccacctt

SEQ ID NO: 433854 - DNA, 110 bp, Oryza sativa
ggggcattaagacaaagcgggctttataaaacaccacttgctgacaggaatcacactgataataagcgctttcacctactcacacaaaaccttatttgagtaaacatata

SEQ ID NO: 433855 - DNA, 52 bp, Oryza sativa
tcggtcacgcggggaataattcgtccgggctgaataccacatggaagacggg

SEQ ID NO: 433856 - DNA, 219 bp, Oryza sativa
gttcttgctcgtgagcgggcgcactacttggttgatgcttgacaacacagactcagcggttatgaagcatgtgtccatgactgacgttacatttgctagaaacaacgcgcggaacagaaccagctgtaggaaaacagattgtggtgcaagtccgatgatctaattatgactgcaatatcttgaatctagcaaaacggcgctgaaacaaatggagtcagg

SEQ ID NO: 433857 - DNA, 377 bp, Oryza sativa
aatcaggtgtaccagattaagtagacgcattggaagcaaagctacattccacaagtagcttcaataaattaatatctacagaacaaaaagtataaaatgtatagtagcatcaaatacagagtacaggatggttaaagttctcttgttacgggcgctgcttcaacatgtactttgggcacatatatacagaattttgaagtgaaattcccatgacgacagtcttttaactcctgattagctcaagctgctttcttgcttttgaatttgtttgcgcagatgacatatatcacaaagttcagaaaactgagcccagcaagaagcccgaagaaataatctaggggaccttgatttaagttattaggaatccatccaggatt

SEQ ID NO: 433858 - DNA, 402 bp, Oryza sativa
cacacgaagaagctgagacatgtattacaacattacactatatactagtccaatcacatctccaaattcactcccccatcccatggttgctcattgcagaagaaattaattgatgtgtagcctcgccgatgcgcaagcaccgggaggcaatatgcatagatcctacgtcgagaaggtcaggaactacacactgatgtggtcagatcaatggagctgtacatatgcagcttcttcttcttcttctgatggttctcggtcatgtccatgaggagaggaggaggttgacggcagccgccggccggccggcataagagcggccttcggtgcgccgactacgccatgaggatgaccatggcgaccactaacatgaaccgcatgctccccaggagaggggaagtccgc

SEQ ID NO: 433859 - DNA, 378 bp, Oryza sativa
aggctgagaccaacatgattctctttgaatttttttttcctttttggagtagtgcctcacacagttaagaactgagatttgaatttaacataaacagaaaataacagttgattgtaggtgcctctccttctagcagtgcatttccattttcctccttgagaacacttttttctagtatttttgcaggttaggcggttaggccccttcgctgtacattgattctgaatggcctaaactttctgccattgcaccactgcaaaaaccagaagattgaccggtatcatttccattttcatttaagtttatgtgactaagtaaattttctaccttacatggcaacttatctaccccactttccaaaaaactgagcgccttttt

SEQ ID NO: 433860 - DNA, 414 bp, Oryza sativa
gtcggcgtcggcggagagagggagagggagagcgagtcttttgtgcgggtggttggggcgtgggcggtggcgtgttcaaggcggggagctacgtttcctgccggaggagatggggggttccaaggcggaggagaagcccgccggcggcggcggcggcggcgaggattggtggtgctaccagttcggcaacaaggacgcattgattgtgaagtcctctaagaaatcacccctcgcattgagaatggttgttttcgctatgactatgatctgcgggatatttatctgcacgatgtgtatgaagcaactaggaagtgatagcttgtctagaatagtgaagaacgaggttgcagaacagctatgcaataagtctgcaatcctgcattaaaagggtcactttgtgcattacccacaacc

SEQ ID NO: 433861 - DNA, 54 bp, Oryza sativa
aaaaaaagaatgattaattggactggaggatatttaaacaaaaagaattgacct

SEQ ID NO: 433862 - DNA, 343 bp, Oryza sativa
aatgagacagatcttcttaaaattaagtcatgcacgagtgatacattgatacatttggctgccaaaccagcattaggctgtgaagctgacaaattttcttccttgcaaattaccaagctacgggtaactaacaaaccttatgtgatcagtcagtcccccgattgcatgcaaactccggtcatcatccagaagaaaattcagctgcttcactgcctttagcttctcctcggcaacctagctccataatcttattgcattttgtgtgggtgtgtgtgtgtgtgtaaactaagggggaagtgtacatgcaattagctatagctaggttacgatcaagaacaattaa

SEQ ID NO: 433863 - DNA, 319 bp, Oryza sativa
ctctttcttccagaccgtggcatgcacggcttgacacagacgctctcgtacgtcgtcgtcgtcgccgtcgtcctcctcgtcggcataaagcagtctccactgcaaaccagctagctgtagctctcaattcgtaggtgagatcgacgcgcatcgcgccgcgtctacgtttgtatatagagggggagagaggatcggaggagccgatcgagctgaagtagggatggtgctgagggcgtgcacaatggtggaggggtcatctttcgtcgtcggcggcggcggcggtgtgccgcttttcgagtggcttaagccgaggacctcg

SEQ ID NO: 433864 - DNA, 319 bp, Oryza sativa
ggggaggagcaaactagcatggcagcaacttcattgccaaaactgcaaaaggcgcagattacaccatataggcaccagcgcgttcagcgagctcaatttcaagccggcactccaattcagaacttgcgaatatagctgcaaaaagcagacactagacaaccagtccgaccttggcaacggcatgccttttaagttcgataactccttgacacattactattatgatgatgtgactaagaaatccttgggcctgaatcccttccagcataggatgaggctggtccacgcccatcaattcctggatagctgctttcgaagt

SEQ ID NO: 433865 - DNA, 385 bp, Oryza sativa
gtggggttcttttttttttttttttttttttttagaatcaacctctagcacgtttctttataaattaaaggctgggctgcccccccaaaaaggggataactctggggccctccttttaaagaaaaacttcaactattgaaccatttcgggggcacaaactggccaaaccatctggattccccccaccctggcaaaaaacaaagggttccaaggggacctaccaatcacttttttcccgggctctggtccataattggggggggtctcaaccctatctccgggctagtataaggtaacccatgcttttaagcacccggcccccgggtatacgggcggacactttcaagctagaccaacctcaccccccccaaacaatttcctttta

SEQ ID NO: 433866 - DNA, 506 bp, Oryza sativa
tgttctagcgagctgtacgaatccatatgcatcccttcaactccctcccctctcttccctttctcgattagtgttagatctgagcttacagagctatagctcaaatctgcggcatttgggttttagatgcgatcctggctttcgtgtctcttcttcccagttcgttgtattcctgcttcttttagtcgatttcggaccaatttaggtgcgtgcaagaagcagaagttttacctgttggcgtgtgattgggcgaagttcttggaatagatttgggcgcagaggcatcgcgcagctattccctgccaaatctttacccgtttcgttttttttttactgtgatttggatttataaatgaggtaaatataccaaacagtaggattttttttttcaggaagtcaggatgagatcatgggagaggcgaaaataatcaataatgtgccaaagtgggtatgaaacccgactactagtagttgacaatcgtgattagtgattactatgaaacagc

SEQ ID NO: 433867 - DNA, 353 bp, Oryza sativa
atggggacttgaagaaaaagaattgcattaaaaaaagaggatgatttgggtagaagtttttattgagaaagaggcatacagaatgggacaaatacagaatgtagaaaaccaaaccaaaccaaacacgatagccttgcttacagactcggtttttacaggtagataatccaagccaagcattgagttaaagagcttcagggattgttgcttaaagacacttgaacaggatgaggatgaatagatgcccattccaggagggatcagcatcgcaggacgggggaaagaaggcctttggtttaaatccaaggcggaaaggaaggcacgagaagaagggtcacacatggttttttatt

SEQ ID NO: 433868 - DNA, 329 bp, Oryza sativa
gccgccgaggtggaggcgcggaaggaggagacgccggcggcgccggccgaggctgtggccgaggaggcggcgcccgccgaggccgaggtggcggagaccaaggaggcggagccagctgcggccgagccggcggcggaggaggtgaaggaggccgagcccgagccggccgagccggaggccgagcctgccaaggaggaggtggcgccagagcccgccgccgccgccgaggcggaggccaaggaggccgagccggcggcgcaggtggccgaggaggtgaaggaggaggaggtcgcgcctgtcccggccgccgaggaggtgaaggtggagga

SEQ ID NO: 433869 - DNA, 85 bp, Oryza sativa
tttttattgggtttttttatttttttggggttttatcttttttaaagcgcggaggggaaacaaagaatataagcttcatttttaa

SEQ ID NO: 433870 - DNA, 264 bp, Oryza sativa
tcggcgtctcctcctcctccgccgccgccgccgccgcctccttctccgacgatgccttccctccccgtcgccgccgccgagccgatggccgtcgacgagtcggcctccaagaagtcgaagcgcaagctgaaggcggcggaggtggaggtggaggcctcgtcgaggaagaaggagaagaaggcgaagaaggcgaagaaggagaagacgaaggagaaggtggtggtggagggaggaggaggtggtcctcctctctagagagcttac

SEQ ID NO: 433871 - DNA, 180 bp, Oryza sativa
  unsure (1)..(180): unsure at all n locations
attttattttttttttttgtatattctatttatttttttttttttttttattatttttttatttatttaanaaagaaaaanaaaaaaaaaaaataaaaaaaaaaaccaaaaattaaataaaaaaaaaacaaatgaagaaaaaaaacccaagcaggagacaaagaagacccgaccgccaca

SEQ ID NO: 433872 - DNA, 259 bp, Oryza sativa
aactggaaaaattattggtaaaccttagctcatatatagttaaatataaatcaaaacctcagcaccaattctgtcccataagaacaataacttgcagtaagcacaggcaaggcatatattgcaactgtcgagcaaacaaaaaaaatgcatatacctcactatttcctaggtgtgtggcactatagcactaaaagtgtacaagcacgattttgaagagaaaatggagcggttaaagagtacggcaatagcatttagacta

SEQ ID NO: 433873 - DNA, 412 bp, Oryza sativa
ataacttggccattcatttataaagatcccgaacttggtttttttttttttctggttccccctttggttttagactttaaaaaggccctagaagtttaccaaaattacaaacccccttattaccattttaccccccaaaaaaaccccaaaaaaattccgggggggggtttctaaaacaaaataaaaaaccccccccaatttggtcacccaacaaaaacgacagagaccagaaaacgacgaccactaacgctaggcttaggtgtacaaaggtggtcccgattcccaacgatcgaacgatttacccccgcctttgggggttcacccgagaagggctgaacgcgactccctgagcttttttgctgatgcttggggaaaaaaaacctcacctttttcttttttaaggtcacggggg

SEQ ID NO: 433874 - DNA, 358 bp, Oryza sativa
ggggttaatttttatttcgtggttattgtttagtgtaaacagttaattacactcatacattacattgattcttaagggggaaagcaagaataacggggttataaacttatatgaagcaaaattgctaacatggtattggtcagtatatgcataataacagtggtcagggagagactaccttactaagactaaacccagaaaacctttttgtgggactcttccaggaccccttgcgaccatatagatacttgccacacggatcagggagacagaggttaataagcctacataggttaactggcttttcgcggtttatgggatgtacagggtttttgacaatgactagctcggaagtatc

SEQ ID NO: 433875 - DNA, 525 bp, Oryza sativa
tcggttctctcctcttccccgtctccgcctctattccgaactagtcctgctcctgcggatttcccaaccaccaccaccgcctccgctctatcaaccctcgctccgatccgcgccctccctgtctcctgtggtggatccgcgatggagcagcagccgctgctcgaggtagagcaatgtgtaacatctataccggaagatcatgaggccacttgttggggatgtggactccgtctcatttttgcaagttatgcacctgtttttaagtgtggctggtgtggagcaatcacacaaagtaaccaaatttcaagaaaacctgacagtgtatgcttttctcattggaggaatttccgggacaggttctttgtgactgtgcttatcctcttcatgctcttcgtcatatgtggtggtgtctgggcgatatatccagttgttttctcgatcagcacattttgtggcatctttcattgcatataacaggtctactagctgtatttaccatcacaagttattgcttggcctctttta

SEQ ID NO: 433876 - DNA, 51 bp, Oryza sativa
tcgttgccgcagccgcagccgcgcgtcgtctcctccgcccgcgagctcctc

SEQ ID NO: 433877 - DNA, 53 bp, Oryza sativa
tcggtcctagatcgcgagcggccgtcctttgtttaggttttttaattacctct

SEQ ID NO: 433878 - DNA, 379 bp, Oryza sativa
agaagaggataaaaccatttgttgaccattttatttggatttacaagccatagggccgacaggcataaatccgggggcatggatccttacatataaaaacagcatgcatgaaaaaattttttaaataatcaaagaatttttaaacaaacagataagctgacagattaatttaaccaatcataggtggtacctagctactaaatcccccggaagaaaccaacaactggtgcaaaatagtaagaaatggggaaaaacgatcaataatacacgggtccacactttccacagacacgtggaaattaaatgggaaatcaatacagttctactaggaggaggaaataattttcccttggttgatccagctttttttagttttttt

SEQ ID NO: 433879 - DNA, 301 bp, Oryza sativa
accgggtaccccggccaaaacttttagggaaacaaaagattgatcccgggacacccaacgggcctgttgaagtttgacagcaaaacttggcctgggattaaagggatggttttttaaaagcggggacccattttttttggccattcatgaagggtcggggttatcccgccgcaatttaagaagccaatatggggcccccccccggtttggaaaaaccaaaggcttatttttacagggtttacaggggaaacttattcggtctttgtaggaaaggggggggctggtttctcagtttgacttt

SEQ ID NO: 433880 - DNA, 531 bp, Oryza sativa
tcgattctttgattcttccttcaatttccccttttcaactctgtcatcaacttaattgttagaagcgacctaaagattttgcggccgatcgagcatggcgtccccttcggctctgatcgcaatgctcctcgtcatggtcgtcggctgcgccgccgtggcctcggcgatggagctgagtttcattgtcggagatgcgcagggttggaacaccggcgtcgactacaccgcttgggcgaagggcaaaaccttcgaggctaacgacacgcttggtgagtctttctcgataatcaatcacttcattcgcacaatgctgctaaatgctaatgctatccagtttgccaattggcatttgaaatcgaacgctgattttatttggtgtaattaactgttttttgccttttttgtttcttcagtattcagatacgccaggatgcagcacacggtgacagaggtgaccaagagcgactacgacgcctgcaccgtcagcggcaaaccgatcagtgatttcgaaggagcgcgcttgtgacattc

SEQ ID NO: 433881 - DNA, 245 bp, Oryza sativa
ttctcttccttcctcctccgtgcttaatgctctccgcattataaccacccacctctcctcctccccccacctcctctctctctatctccatctccaccgctacgcttcccagccatgggcaactccctcgcctgcttctgctgcggcggcggcgccagaggacaccaagcgcaggcacgaggccgccgcggatcattcgacggaagccaatggctactgggacaccacctgcatctacaatgaca

SEQ ID NO: 433882 - DNA, 369 bp, Oryza sativa
actagttctagatcgcgagcgggggccctttatttttttttggttttttttttttttttttttttttacaaaaatacacaatagcatatcttctgttgcaatgaaatacatgtacataagacctcataagatcccagcaaaagaaagaaaagaaacaagttgggggaaaaatggtgctttcatgtccacctcaactcaagaaaaaagggaaaacacttggggcatcatatatatatttacaacaatgagaatggttgaacaatgggacaacatcaaaagaataatatactacctaccttttttctttccttcctttaaaaaaataagaacaatgccttattacttgcccctagaggtataacctggtga

SEQ ID NO: 433883 - DNA, 211 bp, Oryza sativa
gacaaaattcatccaaatcttggaattatattatagatttatatatagttggttatacatattggggatctgaacacttgcttcctttcgatgcctcaatggcttaaaaggagaagagtggaacaagaagaagaagaggaggaggattgggagttgatggaggagaaaatttgcaataaagaacctggcttcggatttgttgccggccgaa

SEQ ID NO: 433884 - DNA, 273 bp, Oryza sativa
tttgctcgtatataacaccccctctcctgtacacagcggctcgattccattccatttccactccccaattcacactcagatttcttcttgcggcggcggcggcggccaagaacgcgaggagaggggcggactcggtggcgacgagggatcgatggcggtgacggggacgtcggtggctgccgcggcgacgatgctggcggcggcggcggcgatcttcatcacgatcgccgtgtgcttttacctcttcctctgcgccaagaggtaccgcggcgc

SEQ ID NO: 433885 - DNA, 291 bp, Oryza sativa
gggatatatacaatggaacgggaaaataattgggtgcagatacggacacagacacacacgaattgacggtaccccacatacatacccacgttcatgcaagaagagaaaactgcaaagaaacaatggaggagacgatgccaacataaagaaagcggctatcgattagattacagaccgaacgatctcattgaaacgaccttaaagaattttacatggcacatataagtgtgtatatgtgtaccactagatagtcgagcttagcttgagtagacgaacctgccatttttatta

SEQ ID NO: 433886 - DNA, 373 bp, Oryza sativa
gtatcacgcaccgtataacgactatagatagaagacgacgatgaagtgcaggttgtggcttgtgatggtggtctgcagctgccccaaagccatagccataggaggaggagcaggaactatgtagctgaacttctacttgatgaactaaaggtgcgcaatggcggaggtagtggtcaggaaggaagtgacgaaggacattctgaaaccgatggactcctagatgtttgttattgcgagatgaggcggctacgcctcctgtatactgatgtatatactaaagtgtccgaagctcgtaagtgtaagaagacttagggccaactgctgtgagcttgatgttgtgacatacacaattgtggtagtaaatagtatacat

SEQ ID NO: 433887 - DNA, 477 bp, Oryza sativa
gatggacacacaagcaaagcaggcatgcagcttggcagcctggcaagaggattgaattgattatgtgctgttgtagacaaacagaatagagaggtacagtagagtagatgctaatgagcgaggagtatgaggtcgagcatgtaggcctccagctggagggcctccttggccatctctcccatgcagaacccaatggaagccaatgctaatgctactccttgatcttgctgctgctgctgctgtgacaggaacgaccgcaccagcatctctggtgcatcctcgtcgtcacagcaacaggtgtcactgccgctgctgacccggatgccggcctccaggtcctcctcgtctctgctgctgctgctgctgatacgactgagtcggaggaggaggtcggcgcttcgctccagggatgcggagaccaggcagtggaagcgctgcgttgcatcctcgtctgctgctggtattggagatgaatgt

SEQ ID NO: 433888 - DNA, 216 bp, Oryza sativa
tttttttggtggtttttaaattttttgtgttttttttttttatttttttttttattaaattgttcatactattatatattctgaatttaacaagtaatattaagttaatttttttatacctcaaagaaaaaaggcgccaaaaaaaaaatatcgggacgggcccataaaaggaaaaaagatccccccccggggggcttaaaccagcgagccaacact

SEQ ID NO: 433889 - DNA, 497 bp, Oryza sativa
ttttttttcagagaggttttttatttttttttttttttttttatttatatatttttttttttttttttttttttttttttttttttttaaacaacaaccagaagaaggccaaaaactgaaatttttcttataaaaaaaaagggggggcacaagggcaaatggtattttgggaaaatttattttggcaaaaatactgggggaaaagaaaaaaagtgggccccgggttttttaggggaaaaaaaagaaaaaaaagggggggccaagggaatgcttcgtcatttttgggggggggaaaaaaaaaaaaggttctaacctacaacagtaaaaatgtaaacagggggagaaaaaaaaaggggaaaataaaaaaaaggccccccttcgggggcaaatgattcaaaacccccttttttataagggaatttttttttgtaaaaaaaacccaccccccccaaaaaatgtgtttgaaaaaaaaaaaaattttttttttttgggggggg

SEQ ID NO: 433890 - DNA, 289 bp, Oryza sativa
ggggaaaaaaaatttgggaactaaacaagggcttcttttttacaaaccctggcccaaacacacaatgcctgggcccggaatttacagggctggccctacaaaagggggttagccccccattgggaaatttttttttccttccacacccgggaaggctggattatttgcactggaccaaagtttttaaaaaaaagggaacaccaagggccctacataaatggtgggggggtaccaaaatttggaacccaagcgttcaggatgttatgaaaagccaaagggccctttccct

SEQ ID NO: 433891 - DNA, 307 bp, Oryza sativa
gtggtgattcatttgccattcattgtaattaatttatgcagtaccaagcatttgtgattacagaagtgtgctctagccaacaaattcgtcagtcatttctcaaaaaaatattcagtgctaaatgaatttaaaagcacccatgcaaatacaactggcatatacaaattaccaagatgactgggttatgagtatggaaaatattcagaacaaaaaatttaatatatttggtggaactccacaatgtccaaaaatattacttgaagctaaaaccaaaaatatttgcatttcaccttccatcatatgggac

SEQ ID NO: 433892 - DNA, 95 bp, Oryza sativa
gggaaaaaaaatttgggttctaaacatttaaggggaaaaaaaaatttcggtttcaaaattgacacagaaaaaccttatcccccaaatttcttttt

SEQ ID NO: 433893 - DNA, 143 bp, Oryza sativa
tagttggccgccggcggactcgctgggcggggggcttcgatggcgcgcgggaccgcggccagctccgagggggagatcctgccgtccccggccgcgtcgaagcgggtgaagaccctctcgatctccgcgtccgccggcgccaa

SEQ ID NO: 433894 - DNA, 514 bp, Oryza sativa
tcggctgattcggccggccggtggcgacgaacgtcggtcgggggcgggcctcggagggcttgaagacacgactcatctactcctactcccggagaggtcctccctcgctcccaaccggccgcaaccacccgtcgaggtcctcccctcgcgaccggctggccaagaccacccggcgagctcctcccccgcgcccggcgggccgcgacctcccgacgagctcctcccacgcgctcggcccgccgcgaccacccggcgagctcctccccggcgctcagccggccatggcctcccggcgagctcctcccccactcccgaccagccgcggccacccggcgagctccttccccgcgtccggccgggcgcgaccacccggcgacctcctcccccgctcccggccggccgtggccactcggcgacctcgtcccgcactcccgaccagtcgcggtcacccgccgagctacttccccgcgtacggccggtcgcgaccacccggcgaccttctcccctgcttccg

SEQ ID NO: 433895 - DNA, 359 bp, Oryza sativa
ggggaaatcaatctctcttttcagattgccaacctttttatgattacaactatatcaaatcaatatcacactgagattataaagtcgttcgagaccacacacacaacacgcgtagctactagagctagctgatcatgagatatactacaattccaaattttccaacggcaaagaccactcactggttttaattagagacttttagtcgtttgtgtgttacacgctaattttaagctgtggcccttagaaattcagaatactagcaggagaggcgcggcaactgctactgcggaggagaggaggaagaggaggagccccaccgcgcgtgcgccgccgccaccaacttcgtccacttccaa

SEQ ID NO: 433896 - DNA, 59 bp, Oryza sativa
tcgcatcggaatgcggccgaggcggttatcagcttcacttcaaagggccggtaattacg

SEQ ID NO: 433897 - DNA, 105 bp, Oryza sativa
gccacttttagtttgggccggccttcctttttttttggggttggttttttaaaaatgtttttttgtttttttttttttttttttttttttttttttttttttttt

SEQ ID NO: 433898 - DNA, 522 bp, Oryza sativa
gattatttgaaggtaatgaatatttgactaaaattttttacatttgcgaaatctggaactatgtctgaaactgtatctgcgttgctttgtaatttgtgtcctctctttgtttgtgcatgtcaaaacctaaggcaatatacttccgacctcttaatcttgtgggcctactatttccttgtttaaccgttagaaatttagaatttgctagtccatgttgatttaacacctatgtaagtcgaattcccaatcctagcttaattttgaactacaagctattctgtgtgcaatcccactgttcatcagagttttaaattgatgtaatgtactgttctgtcaattgttgcaaagatgtcactagtttccaaaatgctaagaaatcgagttaattatgagtaaatttaaggaaaccccatgctttttacttgttggagttgcataaaacctgggttaatgccacaagtcataatacttggggttttatgcaacttcgaccataaaacatatgatttactaaaattcact

SEQ ID NO: 433899 - DNA, 355 bp, Oryza sativa
  unsure (1)..(355): unsure at all n locations
acgttacagtcaagggtatggcatctttnagtgggccggcccttcttttttttttttttttcgcgtaagaaagaattgcattacttttggggtatgcgatactataagcaacagagtatttgtaccagtctaaaagcagccttcttttactcttgccacataaacatattcagtttaactacacttttagcaccctgtgtggatgtcatgtgatgagaggcaggaccgactgacttgttcactcacgggattattaaagctgccaggctctttgaagctatctcgtacacattctctgatagcccattggctgacacgatcatctccagctgagccttagcaagagcttgtctgc

SEQ ID NO: 433900 - DNA, 520 bp, Oryza sativa
aatcgtttaggatttgggaatggctcgccgtttgattagcccctgccaaggctctggtttgcttaacgccggatttctcggcgtcttctcctcccaccattatcatcgcctgccattgtcatcatcgcataggagttcccaactgaagaattgctaccttcctaatttaaggaaggaggtctcgcattggacaagaccagccacgccttccttgtcgctatatagtgcaaggcttgccagcaagaggacaacttgttccgttgcaaccgagccgccgccttccacaaccgaagaaccagagatggatcttccaaaggagatattcctgaaagaatacaaaaagcctgattacttatttgactcggtcaatttggaatttcaacttggcgaagacaaaacaatagttacatctaaaatagctgtatctccaggaactgaaggtacctcctctccacttactcttcatgggcgtgatctgaagctgctatcaatcaaagtcaatggcaaggaccttaagagt

SEQ ID NO: 433901 - DNA, 155 bp, Oryza sativa
cggccggcctggtggagagggggagtattgtagtggaacagtgtacatagatgatgattgtagaagccatggtagtagggctcggcgaagttggggggtaagaacaccgaaccgaagaggaacaataaaaggggggcaagggcgaaggcaaaaag

SEQ ID NO: 433902 - DNA, 487 bp, Oryza sativa
ctttattttccggggttggagcaactgttgtgtgaggagatcaaatcttgatggtcattattagctgaaaaggattggatttttaccgcagagacagtatctgagctgtgtttctcagtgccttccatgttcttgcaccaaccaagctagaacttggaaaggaacaccaccatcaccaatttgcaagagaaggttctctcccttgtattataaccacaactatattgattcgagattaaagagaagggcacagtgaggatactggcatttggaggcttgttgaatccaggtgcgtgtgccacctctcccgaaaggccaaaaaaaaccactgctgcgagtgcgagtgtgcaacttttctgcaagaaacagtgagccgaacacaccggctttgttcttggctaaataaaccccaattgcggcgctgtttggattcagttcttcgcaattcttggattccccagcagcaactgttcttccccaccgagag

SEQ ID NO: 433903 - DNA, 309 bp, Oryza sativa
ttgttttgcccaacatatgtagtaactctatacatatataaatctgtacagcattataatacaagattatgatcactcacaactgcatgcagggggcaccacaaataagagaagacggagcagtgcctttcttcttcgaacatgtacaggaaattcactaggaacatcagtgatcacagttaaaacaccattcctctaataatcatcacatcagcattcgcagttagacgagctgctcccgaagcagctgttcttgggcgccatcttcctgacgctgacctgcaggaactggagcgtgctgggcgagat

SEQ ID NO: 433904 - DNA, 522 bp, Oryza sativa
tttctagctttctcgtagcttcccctcgaaccaaccgtccattcccgtgggtacagctcgtgggttcttcccgatttcttccagtaggagattccctgaatccgctcctttccctaatttaatttttatgaagagagggagtaacttgttcttgcctaatttgattcgagctcaggtccataatttgatttgaattttcctggattttcttctgctgggtacatttgtgagcgattttaaaggttctttttttggctggtactttggtagaagttcagctactatcgctttaatctgctcgaattcttggttgcgtcccgttcaaaattcgtccccatgtcgtgtatttgtgggtttcattcctgcgacttccgttatttcaggactgttcggttctctcaggactttatccaactggggcagtttgagattttgtgaaaaaatggttttttctttccttctctgcgataatcttgggcttttggcgacgggagagcaatgggagcagcaacatgttctacc

SEQ ID NO: 433905 - DNA, 311 bp, Oryza sativa
gggggtgattcttgtactttgagctgcacattaaaaggtcacggagaataagttacctcccaaataaacacgctacaaaaataaggcccagaaattgcttggagaaattctcggggactgacagacaaaagccggacccagagcgacaggactattttaagaggaaaagctgggattcaactgagccttttaactagtagggggaacacaccaacttaaaacaccctgataggtttcccaatggtgctcttgaagaaaagggacgtaacattcggccaggacttttaaaaaagggacacgaggaaggtgac

SEQ ID NO: 433906 - DNA, 413 bp, Oryza sativa
  unsure (1)..(413): unsure at all n locations
gcaggggaaataccataagtaatagacgattccccatttaaatatagaattgtccggaaaacttaaaactttaggtcagaataatttccgagaatncccttcccaattggngtcggttcacttaaatttaattgggtttaaccaaaattnacgattnttttttctttggtcaaataaatttgcngcaacacccaaaaagattgcacatccagaaagatagcacattggatacatcaaagtaaaaaaagccacagtacgccgtggtgtttcaattacacttcataacatgacaccaactaagcatagagagcctacagaggagggagaggaagagggcaaatacgagtagctagctaagctagtttgtgcgcttgctggggctggatggcatgtggcccttcccttctgggcct

SEQ ID NO: 433907 - DNA, 62 bp, Oryza sativa
ccgcaatcatgcgaattattcacagaatacaccaaagtatggtgtacactgcttgctccaaa

SEQ ID NO: 433908 - DNA, 171 bp, Oryza sativa
atgcacgcacacgtacgctagggatccactttttcgaccgcccttccttttttttttttttggacaaaaatgacagattaattccattatattattgggggagcattacagaaccaaacaattcataccaaattacataatttgcattatttgtatgtggagagattgatg

SEQ ID NO: 433909 - DNA, 249 bp, Oryza sativa
tgcagcgacggcgatgttattctcatggtactgatagtgcgggcgcgacggcggtggctgcgggtggtggcggtgcctgccgccgtcgctgacgcgataccggcggtggtaatttccactggcgctagcgtcgttaaccgacgccattcttctagaggtgccaccggcgccggcggtggcaccaggcggcgcggcggcgttggcggtagaggaggagaggtccttcacctgcgagagctccatgtgcgt

SEQ ID NO: 433910 - DNA, 298 bp, Oryza sativa
cctatttcgccgccgccgccgccgccgccgagatggacgacgacgacgccgccgcctccgcctcgccttccccctcgccgtcccccgtcgcctccgcgctccccgtcgccgaccccgtcaccgtcgccgcggggcctccctccggcctcctcgcgctggccctcccgatccagaagcagcagcacgcggcgtcgccgaatcctgggggtgggggtggcgggagggaggattcattaagcgtgggggcaaccggaggcgcagtacagacggaagaaagccgtgtccttcaagccttaat

SEQ ID NO: 433911 - DNA, 205 bp, Oryza sativa
catgccggcgccggagaccaccaccaccacctcacctcacccacctctgcttcttcttcttcttcttccccgtggtgtggtgtggtggtgaattgttgttctgttcccttcatttttcgttgattcgtgagcgcggcgacgtacgtacggtggtaagcatcgtcgtggattcgtctccggcgacgggggggagtgggtagggtag

SEQ ID NO: 433912 - DNA, 66 bp, Oryza sativa
tttgtttttgttttttttaaactttattttttgacaaaacagattcaacaaaatgcgcaaataaca

SEQ ID NO: 433913 - DNA, 128 bp, Oryza sativa
ggagaccaccaccaccacgcacctcacgccgccgccgcagacgttctggatcacgctcggccccggcgccgggatggtcaggttcaggttgtcgccgagcgtcctcggcgttacggctggctccgccg

SEQ ID NO: 433914 - DNA, 455 bp, Oryza sativa
accatgttcctccgcgtcccgccgccggaccgcgcgggccgcaagccgccgccggctccaccacacgtgctgtgccgccttcagcgcgttcctcctcctggtcctcctcgccgccggcccgtggcccgcgttccaccaggcgcccaggaacgtgatggtgttctcgacggcgttgaccggaggaggcgtgagcttcacggaggagtagaggaagcggctcgatcggcgcggtgcccctgaaaatctcactagcaagcacagatcaatctcatcacttctttcttctcttagatggcctggttgactgcgaaggtcctgctgcagatggcacctcttgagcagcctcaactgcttcagctttagagcttttcaaactcctccttgtcatccctcgctgatgggcctgctctttcattttttttaaccaggttagatttgactcctctgcgtctagt

SEQ ID NO: 433915 - DNA, 315 bp, Oryza sativa
ggttcattctttgatgggaaaaacaaagggaaccataaagatactaaaaattcaatccaggagttacataatgcataataaaataatacttgaagaagcaactagaaacttaaccctgggtcacaagccataacatagggagtcacaagtaacaaggttttatgacccattaatttcatcaaaactaataatgactaaatgatatcatcgagatctgaatcatccaaaactctatttggaaactcataatagactactaacagaaaaaggaatgtggatataccgagtacatatagggaaacatgacgtgcacct

SEQ ID NO: 433916 - DNA, 516 bp, Oryza sativa
ccatgttcaacgagccaaaccctaaaaaactaaaattccccaaactctgtcgccgtcgccatggaccgcgatgcgggcggcggcggcggcggcggcggcgaccctgctaccggcggaccagctgaattccctggcgaggccaagataaccctgcgacctgatttcctcctcttacaagcagctgccagaaaatctaaaagatatgctattcagcaaagtattctctacaaagagcacaaaaggcaatctagacatcaactaagaggagcacagccatcaacctcccaaaaacctaggcatgcagaagctggaagtaagactcatgttcgtcaaagtgttctctattcagagcgtaaaaggcaacctagacatgaacgaggaggaacacaaccaccaaccttactgactgcgagtgagcatgattctacaactgtggagccatcaagacttaaggaagcttcaccatcactgtcagatgaactacgtgaacttgaggaataccgcaagacgcatacc

SEQ ID NO: 433917 - DNA, 250 bp, Oryza sativa
tcgcggtgaaccataatagcataggggtaatccaccgggccgaggatggtgaactttgggttgccttctgtttctgtgaaagacaatggttgtgcaaaaggtgggaagtggagaaggtgaggccattccgattaggggacagagtacggatacgacctgcctgtaccccacgttggggagggggaggagacaagaagaaagtgggcgaggcaagtgcaaagggaaacgagaccagtcaaaggaggagggc

SEQ ID NO: 433918 - DNA, 263 bp, Oryza sativa
ggtacagccgatgatggggcagaagaaggatccgttcggttcaatagaccccttcgctgcgaagcccggatgtatgaatgctgcaaagaaggctaattcccgtcaagccggatcaaggttttggggcgttacaaggcgtgaattcaggaggcattgcaggattatcgggcttccagaccgctgacagtggatttggtagcttccagagttccggtgcctgggaaaccttccactttactaccactggcaccagattccagcgc

SEQ ID NO: 433919 - DNA, 106 bp, Oryza sativa
gggtaaaaagaacgtttactggaaaaaaaggaaaaaggatgggctgttaaaaaaagtccaaatccaaaaccaattttacttgttaaaaacactttggaatatccaa

SEQ ID NO: 433920 - DNA, 331 bp, Oryza sativa
  unsure (1)..(331): unsure at all n locations
tnttttttngagcaaaattcataggacaaaatgtgcttcagacttcatgatcaggtagaaaagacctgcagtaacaagtgaccgggactgcaaaagtcagaagaacggggaagaactttcactctggaaagacaacaccttccactacttactctgaaaactgtaaacttatgtaccgaaccaaagagtagacatatatgcagctcaatatatacaccaaatgaacatccccaaccttattcgtctagttacatatccgacgcacccagccccggactaacaggagtagtgcgttttgtgaattgtcctctttagcttgtcaaggatacca

SEQ ID NO: 433921 - DNA, 383 bp, Oryza sativa
tcttatgcaggcagcggagagccgagccagttcactctgtcacactccacactctgccactgccactctccagctgcagcgcagcagtgcgtgtctcctccccccgatggcctcgcggatcttgctccccatcctcctcttcctcctctgctcgcgtggcggcagcggggcgccggcggcgaggcggggaatgcgcgtgccgccgttgggtggggacccggtcaagttcgacttgtccccgttcttgatcgagtacaagagcggcagggtgaagcggctcatgggcaccgacgtggtggcggcgtcggcggacgtgctcaccggcgagtcctccagggacgtccccattgatccggacaacgatgtccgcgcgcggctctacc

SEQ ID NO: 433922 - DNA, 311 bp, Oryza sativa
tttttttttttttttttttttttttttttttttcatttttttttttttttttttttttttttttttttttttttttttttttttttggtttttttttttttttttttttaataaaggggttcccttaaaacaatcagacaaaaacccccattggaaaggggggcaacattcccaaagatgggacaaatccccaagggcccggcatttttggggggtttcccaaaagaccccaaaaccatttaacctaaggacaaaaaaaaaggggactgggcaaaagggtgaccaggctttttggcacaaatgcaatatgg

SEQ ID NO: 433923 - DNA, 302 bp, Oryza sativa
ccgccaaacgcaaattgtatattaaaatcatgggatatatcacaagatgattgctaaagaaaggggagacgaggaaaaatgaagttccattggcaccaaagccagtcaccacagcgacgacgaaccccggattatgtacattgtcaaagttgcaaaaccatgagctcctccgccggtcgccggagcagcagcaccgaccggtgaccggcgaccatcctgagtcgtcatcactcgtcgctgtgctgctgcgcgtgcgagctgctgccggaagtcaacgccggcgacggctggaagaggatgct

SEQ ID NO: 433924 - DNA, 332 bp, Oryza sativa
tttttgtacgagtaattaacctttattacaaagtacatactaattctatccgatatgcatgcatgcagcagatcgatcgatttctatacacaaaactcttatactatatagcagcacacagctccaatcatatacacacacagatgaggacacacaatataatcacacacaatataagcagctagggtaggtaacaacaaattaaagaacaagctggagagaagaagaaaacaaaaacggccgtacgagtggaagcaaaacctcgcgtcttctcaactcataagtcatcaccgacaccaacctttcttgatttcctccatcttggacagcga

SEQ ID NO: 433925 - DNA, 450 bp, Oryza sativa
tttcttccctcttgtgctcctccttatcttctatctcttcttcttcccctatcttttcttctaaagaacatctgcaatctccagcttcttctgttctgaagcagtggctttttgtggtttatgcacaccattggcagctgctactgtttgctgcttgtgttgtcagaagctaccttattgtttcggtcatcatcggcgccatgtcgacgccgacggtgcagatggtggcgccggcggcggcggtggtggaggacccgagcaagcactggacgcggcacgggccggtgctgacggcgtgcctcgtcgggatcaacctgctcatggtcctcctcgtgttcttctacttctggcggttcttctccgggaagcgtggcccgccgacgtcgtcaacgtcaacgatggccagcggcggcgacgacgacgaggaggggggggcttcttctttctcac

SEQ ID NO: 433926 - DNA, 125 bp, Oryza sativa
atttttgctttatgggtaatattattttttccgtggatggttgtaactttggttttgtctttttgttttttgtgaatatttatttgttttgtttcttaaggtggtttgttttttaatttgtggcc

SEQ ID NO: 433927 - DNA, 247 bp, Oryza sativa
gacgttcgaaccgccactttggattccccactatggacgccggcggcggaggccacggcggcgccatggcggtgtcggcggcggcggcggtgatggactaggcggacgccgtctttttcttccgccgcgggaaccggtgctgctgcttctgggggccgtgggcgttgtcgtcgtactcccgcgccggtggccttgttgtggcagtggaggaggagtggtggtacctcgtttggggagggggagggga

SEQ ID NO: 433928 - DNA, 119 bp, Oryza sativa
gaaagtaaacaaacttaaaatgcataatcatcactagaacagaatgcgtgggtgatactgacggtgacagggaaacagcagaagggaagggatgctgcggtgaccccatatcgttggaa

SEQ ID NO: 433929 - DNA, 252 bp, Oryza sativa
aaacgcacgatcgtacgattactaacactggatgaaaggtaacactttggcaacaatagtacattacaaaggtagctaaatgcgaagccacaaaaccgagagcccaagacgaccaaaaataaagtttacacaacatagcacaacatgcaaaccattcggactgaccctacatgagggcacttgaaacggccggggagggccttgcatcacaaatgccgaacaactagattgtgagcagcccacactgaaagg

SEQ ID NO: 433930 - DNA, 79 bp, Oryza sativa
ttttgggtttttttcaaaccagaggaggccaacaatggcttgggataaccgcatatgaaaatactcgactccatgcaga

SEQ ID NO: 433931 - DNA, 277 bp, Oryza sativa
tttccacccacccgcagccgccggcgagttcgagcggcggccaccgggcgggcggcggggcggcggctcggctcccctgatctccctcccctgcgccgctgcgcggtatggacctccaggatccagccgcggacgccgtcgcggccgagccactcaccgttgccgagaccgacgaccagccgccgccgccagcgccgcctctggaggcggagggtgttgtcgtcgcggaggaagacccgctgtcgcatccgccccttgaggaggtggaggaggatgt

SEQ ID NO: 433932 - DNA, 234 bp, Oryza sativa
gggaagccacttcagtaattaatcttgccaaaaagaactaaagaaggatatgaaagaagaaactcacttaagttttgaatattttttttacaaccatgatcgattaattttttagaagcaaaaatcactgcaaccgatcagaactttttgactttggggtaattttttttgaaacttgtcaagaccaggagcttgatgacttgaacggggagaccttccggggtttgctgccca

SEQ ID NO: 433933 - DNA, 424 bp, Oryza sativa
gtaacccccacctcctcgtcgcgggggggtcccgtctcggttgcggcggcggcggcggagtaggccacggtggtggtggtggtggtgagtattttctactatttttatttattatattttctattatatctttttttcttttatttattttacttttattatattttttttatttttttttatttttgtaatacttttttttttttattatctatctctaattatttatttatttttttatttaattatattattaattttactatttttatttaaatttttaatttatttttttttatattttatttttattttttattttctttttttattattatattttatatttttaatattcttatttatatatttttttttatttattttaattatttttttattttatttatacttatttattatt

SEQ ID NO: 433934 - DNA, 367 bp, Oryza sativa
cgtagctgacctttgcggcgccttttttttttttttttttcagaggaaaattatacaaatccatggagacgagaaaacaaatcacatgacagctcgtaattacagaactaagtacacgatggaacggaacaacaaccccctattcatcactcaccatcccattcattctaggctcagtcttagccaaaaacccaactccattcttctccttcaccaccacattgccatgccgcgccgtcagaccgaaatgtattcaagaaacaagcaatcatatgcactgcctctatcctggcaggcgggcccgatcagaagagggccagcttgacgaggacgcccgcggcgggaccaacgcgcgctggcctgcggc

SEQ ID NO: 433935 - DNA, 300 bp, Oryza sativa
gccgaccgaccgaactccacggcgaccgtccgcgcagtcgctcctctactggggcaacggcggcattggcgccgccgccgcggcatggccggacctcgccaactgcggatcctccatagcgacgctcttctagctagcccagcctgccgcgcgcgccgcctacacgccgccgactgtgctagctagctagctagctcgtcgccgttcgccgtcgtcgctaactctattttttttccaccttaattttccctgagttaatttcccgatccttgataaaaataacatgtattgggggaaaaa

SEQ ID NO: 433936 - DNA, 553 bp, Oryza sativa
tctagatcgcgagcggttgcccttttttttttttttttttccatcagaatgaacaaacagaagttttaatttctcatagctcacaaagtcatcaatgatacaagcaaagttttgaacaaaggaaacccccaagagaatgagaaaagaaagaagagaaaaaattcactctagaagaggaacaaggaattggacgacccttaacaagtccaatgcatgagaactcaaaaacagttctctaattatgctgcaaggtggtgatctaaagagtactattataacttatacatctagagtacttcccaaagccaaggtagggtaattaaccaattaaacacaccgattaaaatgccgagatgagagagagagaaaaggtcccccatatatgttcttgcaccaccacaccgccatggatatgccgcaagaacttcaagctcttctcatgtatctatccccccacaccgtatgccctatatacaaaataagctactacataccacccaaggaaggagatcaagaagccaagaagccaagtagagctagctagctagcaaat

SEQ ID NO: 433937 - DNA, 240 bp, Oryza sativa
  unsure (1)..(240): unsure at all n locations
acggcgacacggtaaggctaaggcattcctactagcagtcggaccgcacnnctttcccttttttttttttggaatgctaaataagcactggtcaatgactaactacattgtcagaaaattgaaacagaccttctaaatgactaacaaaccggaagactggatcacaatgggatggctatggtcctaacctcaaatcaaaaaccggggctggccggcacttgaacccaaaagcaccgggag

SEQ ID NO: 433938 - DNA, 100 bp, Oryza sativa
ctacttgtagtttggcggcctttcttttttttttttctgttctacaaagaagcaagagctcattaacacggagtcaccgatttacaacccaaaagtagaa

SEQ ID NO: 433939 - DNA, 280 bp, Oryza sativa
gagaaaaaagaagaggagagaggaggaagagggagggtttttttttgggttaagagaagtaaaaaaagggaaaagggaaaaaggaaaaaagataataaaaagaaaaatttaaaggaaggaaaggagaagcaaaaatcaaaaaagaaaaaaaaggtcaaagaaagaaagtaaaaaaggcgaaaggaaaggaggaaaggggaggaaaggaagaggagaggagggaaagaaagaaaaggagaaaaagaaaaaggaaaagggaaggaaagaagaaaacagggga

SEQ ID NO: 433940 - DNA, 189 bp, Oryza sativa
actttattggccggccttcctttttttttttttgaaagacgggtgtaaatgaattgtattatgctcagtatatgatgatgttacaggaaacgaacagtcgtatcgtaagatacaacatcaattcgactatggtaagtcattacattctgctataccataagcacccaacccttcggggagaaactagat

SEQ ID NO: 433941 - DNA, 296 bp, Oryza sativa
ggagcccatgcaatccctccattcttattagattccacatcctccaaactacattttgtagtactactcccaaaatactactacaagagagcagaaaaacagagaggagggaatgcgcctcctaactcggatttacagatcaatgagaaactccacccttgaaactcagacttgttacatccaaaggaagagaacctagcatcttcaaccactatttagtcgaccgatcacgcaaattaagtacatgatatggcgttcctggtaattacctgggctccatgatcaataagtatgtt

SEQ ID NO: 433942 - DNA, 322 bp, Oryza sativa
atggggggtttttaaatgtggtggttttttatttaagttgtttttttaaaagaaaaccgcccaaagggaaaaccaaaggaaaaaggcgggaggaaggaaggaacaccaaaaaaccaaataaggggcacaagaccaaaaaagggccaaccaaaaaaaacagaggcaaccaaaaaaaataaacaccacacagccgaccgggggaacgaacgaaggaaccccaacccttttgggaaaggggccaccacaaaaaaagcaaaattaaagagggaacaaaaacgtacggacaggtcgggaacgaacgaacaggaacagccgaagaggg

SEQ ID NO: 433943 - DNA, 81 bp, Oryza sativa
  unsure (1)..(81): unsure at all n locations
ccgcgagcggaccctaggcggccccttttttttttttggttttttttttttttggttttttttttcccccaaaggntattt

SEQ ID NO: 433944 - DNA, 149 bp, Oryza sativa
gatgcactgccacacttacgctagcttgcattctagttgggcggccttcctttttttttttctacgaaacggattaaaaggcttccaaaccatgtggaataacaaatagatgaacagagaacaaaaacctacccagtaccagaagacag

SEQ ID NO: 433945 - DNA, 374 bp, Oryza sativa
gtggcgctggcgatcgttattgtcttactcagatcgcctgccgtaatgcgtggtgggatcattcttaatagccacgaggctaaatgaggtgaacctatcgcggacagaaccactttgtcgccatcgcatttctgaggagctgacaaagtctgaatgcaggaattacacgaattcctgaacaaaatgcctctgaataggcggaccctagtttcaactgtgagtagaacaagttcggaactcagatcgtgagtgatgtttccgagctaaagggccgagtgaaagttgtaattgacttgaggtcctactagaaagtatattggccgtccggacagagagatggaccatccgtggatgcccacgcaactattgaagca

SEQ ID NO: 433946 - DNA, 346 bp, Oryza sativa
ggaataagcaccgaagaacgactatcgatagaagttgatgatgaggcgcagcttggtgattgtgatggtggcctgcagctgcgccacagccatagccagaggaggaggaggaggaggtttgtagcttatcttctatctcgattttgactgtttcaatttttctctctatttttggttatctttattactttattttcttttttcttttacttttttttacacttttatctactcttcttcttttttactttttttcttctatctttaatcgacaaatccttttttccttttttattaattatttactttttcttttttttttattttatgtttatttctacttttt

SEQ ID NO: 433947 - DNA, 387 bp, Oryza sativa
ttggggtttttttgggtctgggggattcatgaccaccaggtataggtgctgttattattgcacaaaattcacaaaaactcaatgaccaatgcaacgtgtatgtacgtatatctatgtgcatgcactccatcatgcatcatccctggttgaccgggcagaatgtatgtgcgtgtatcaatataatgcactcctctgcatcgagcgaccagccgctgacgtaggctagcctgtcgaggggcgaccggaatttcttggcgactgagccattctggcaccggagcgcgctttcaccggcttcccaccagcaccgggtgcagaccgagggtgtgcttcagcatgaaggcctgccttgccaggatcgcgagcatccggcacctgattgaggac

SEQ ID NO: 433948 - DNA, 443 bp, Oryza sativa
tttgggtgaatccaaagagggagcgcatttgtgtctaagtaacattcaaggagactcactgggtgccttgctctgtttggatcccattgcactgcagaaccagggttattctatggtaccctctccgttcgtagcagggctactactttacaacacccccagtacaccacacctgagcagcattactcatggaggccttgattccaagaaactaacacgggtcctctttctcaaggttgacaggaactatcaactgtgggggcagacactaataggtactggctagcctgacttgaatctgtgtacaaacttttgcaggtcctgtttgcagtactgcaccaccctcttcgacttatccccaatggttgaaccaaacacgtagacacttgcctgtgcttcggatgacaacttctttgccttcaaagcctgagcagcccctagat

SEQ ID NO: 433949 - DNA, 305 bp, Oryza sativa
tggttttttttttttttttttggggttttttttcgaaaccaaagtatggggaaaagtttttccaaaccacactttacctttagaaattaagacctttccccatatttgagtttagcttgatcaaactatttatttatttgtcggcaagccaacatttatcactttcacttattgagccggcatggggagaagttgagagcagttttaatgggggccaccatggtgaccgccggggggaccgccataaaagccgccgtgggggccctattgttcctgatgaccgccataaaagcccacatgggggt

SEQ ID NO: 433950 - DNA, 77 bp, Oryza sativa
ttgttcctttaaaagcggaggaaaacttcattagaagttggcaccggcacacaagctagcaccggcccttacaacaa

SEQ ID NO: 433951 - DNA, 67 bp, Oryza sativa
ctaaccctagccgcctccgtagccgcagccgcagccgcgcgtcgtctcctccgcccgcgagctcctc

SEQ ID NO: 433952 - DNA, 453 bp, Oryza sativa
  unsure (1)..(453): unsure at all n locations
aaaaatatacaaatccacaggctttccctgtaattttctcccatatcgcctttctcctcgcaagcatgtgtctcctccccactttgcacttggcatttgcaccccagctttgcctctacctcactagtagtagtaaaaaaacgttaattacattgtttactcgaaagcccacaggattaaccgcttaacccaatgcaaccgttgtcaaggctaaccctaaacactttaatttaaaactcctacttaaaaccccccttccagaagacatcccgctccagtttcccacgccaccgtcgaacaccttcacccatggcgtccatggccgccctcctcgtcgtcgtcttcctcgccggctgccacggtgagcgccgncgnccaccacctncgncttntngtgttcttacttgagatatggctaaatgttttttttaatttttttttggctgggagtgg

SEQ ID NO: 433953 - DNA, 483 bp, Oryza sativa
ctttccttcatctcttggttcaaaggccggtctttccctgcacgttcaggcagtgtgggatccatagtaacttgtacccatccatcccgtgaggccgtgatccagctcttgtttctcctttctttcagttgcatgtacacaaagttgcacaaatgtgttgctttctgctggtctctgtactgctagccaccactctcaccgacgtagccagtgcacagagatggaggcagacgagcggcggcggcaaggacaggtgggacggcctcctcgacccactcgacgccgacctccggcgcgacatcatccgctacggcgagctggctgcagcgacgtcggacgcgctcatcggcgacccggcgtcgccgttcgccggcgcgtgccgggtacgcgcccgacgcgttcctccgcaaggtgcgggcgtccgacctggacgcgtaccgtgtcacgaggttcgattacgctacttctagcgttcgtcttccc

SEQ ID NO: 433954 - DNA, 375 bp, Oryza sativa
gcacaggacaactacacctgtctggagttgcatgtattgtggattctcgattacagtcacagcaacaaggcttattatatggaaccttacgacctggggtcagtcgcaatacttagcaacaccaccagatcaccacacctgagcagcttcactgatggcggaagctattccaagaaactaatacggaacctattcgtcaaggtctacatgaactatcaactgttggtgtacacactaatagcctctgtgtagctttacttgaatctgagaacaaactgcttcaggcccttattgccggtgtccaccaccctctactacttatccccaatggctgaaccaaacacgtagtcaatagcccgtgctttggaggacaac

SEQ ID NO: 433955 - DNA, 483 bp, Oryza sativa
gcgctgcgctgcgtacgtgacagcagaagcgacgcgcgcgcgcgcgagcgacaccagatgttgccgtccaggccgagatccgggtcctggggaggcgggacgcggagttctccggtgtccacgccgaggtctcgccacgagcgcagcaaatccgtcgccaccatcttctcgccgtcgtctcccgagagttacggcggcgtcgtgatggagatggaggagaagaagacgtcgtgcacgctgcaagaagtcgatgggttgcggcagagcgacggtggcgtggacaaggaagtggtgggcggcggcgcggcgtgctccgacgaccgggtgcggctgctggagcgggaggtggcgacggcgaaggcgacggagatgaatatgctggagtcgctgatacagcagacgaaggagatggagcaggcgaagatcgctctcgaggaggctaagctcgaggtcgccacgctgcggcagcagcagggacgcgcc

SEQ ID NO: 433956 - DNA, 372 bp, Oryza sativa
tttggtttttttttttttttggttttttttttttttgtcctttttttttttttttaaggagaggcgggggatggattttccttcaaacctggggtcaaaacacgctcgtccaaatcaggacactgtccattttaccagaccatgatgatgattgggttaagactggattcctaaaaccctacctaggatgaagtttgggttttacattcaaacccaaggggtccatgcgggggggaaaatttttctttttttttacctaggcaggcctgggggaacaccggcactaaaaatttgtgggggggggggacctggccaggaagagacaaaaactccttgggggccctaccatcagtgggcggaatcccagggggg

SEQ ID NO: 433957 - DNA, 266 bp, Oryza sativa
aaaatatatttttttaaattaattttaagttaaaatttactacttaaaaaaatttttaggaaaaaaaattattccaaaaaatcaattttggaacaaaactatagtcccaaacaaacaaaaaagaagcactggagggggaaaaaaaaaatttttctttaaaaaggaaggcccggggaaaaaaccaaacaaaaaattttagtgtcgaacggacaagggccaaaaaaaaaaaaaatcgggagtagtctctaccaacactggaagaaaaa

SEQ ID NO: 433958 - DNA, 456 bp, Oryza sativa
ggcgtttttctgtgggccagtcgcggctcgccgccacgttcctgccgatgaggaggcgaaccgtctcggcggtccacgcggacgacccggcgaagagcaacgggcccgtgcaggccgtggctaaggcctcgtccccgtctacggtggcggcgccggtgaagaagcctgtggggttggggatgtggacggaggataggtggggggctacaaaggtgcttccgaatttagattccccacaggcaggatgtgctcgtctacttgctgaagacgatcgagacgtttcttgccggacagatcgacggtgaggctcgccaactccaggcgcgccttgactactttgccatggatggtgtttggtcccttcagggttgaaattgcaaccttagcttgaaggtgttgaatgacaacaacatccgtgaggcctcccgtattgttttataaatgggagttgtcatg

SEQ ID NO: 433959 - DNA, 500 bp, Oryza sativa
ttttggtgtgttctttctctgggtgttctttcttcaaccttacccttaaatgctcagcaatgaccttctcatgaacattacacattattgtgtccttatcactctcacggatgtagacaagcatgtaggcatttgaatactttgtgaatttaaatggagcgttgttgaaaccaggatttatttgaggcaactgttcagcccaaaagagattaaaattacggaaacaggaaaacaaacatatgtagatcaatatctcatatcattcaatatcaattatcaggtagaacacacctcttcctcacccccgtattgctcttcaagggccttcttagtatcttctttagttacacgctcatcatcaaatttatacctggtagacaggataacattttcaaaaatctataatgaattgggaactgtttgctaggatgtaaaattcaacaagatagttcgccacaaggcataatcatcgtagaattaattataatgcgaggatattg

SEQ ID NO: 433960 - DNA, 468 bp, Oryza sativa
ttttgttttttttaggccttgggagagcatgcttgatgcattgcatcagagcttccaactatacagttccagatccttttggctgagtgtaggaaacatctgctgagaacacacagattattattagggtatgggtgaaaattattatctattattgagcagggggccaaacaaataaggacgccaaggagaatggagtaaccagcataagtggatctactacttgagactggggtcatcttgtgttaaccgaacacaaactaccattccaaggagaataactaagtttgcttgaacatctcaatcgagtgtctgctgtggcttcaacggggaaaatgtgcaggcttcggacaaactaaaacaatggctcgtctctgtgtacatcatcacttcaatgaagctggaagcctgctgaggactagacttccatggtgagactaatgagcttaccagagaaagctcatgcag

SEQ ID NO: 433961 - DNA, 523 bp, Oryza sativa
atatatgactgagtcaattcctgagaattccacatcacttgccattctcttagcagtcattgtattccatattggttttagagttatggaataacagggttttatgtatcttagaaaattcagttttggtgagacctgggatcaagcaaataccatttgttatttttgtgtaatggtttcttaggtaccattttcagtgtaacagtggtgctccaataggtgccttttttcctcctttccacatctttttctcactatgtttcactgctgcttttattcagtgttcttgttcatagtggaggagtacatggcggtcactactatgccttcattcgaccaacgctatcagatcaatggttggtttttctttgactttttttttgtctctagtactacaacaatacaaaattattcaactatttgccatttaccagataatattattaccctgttcctatgcatggccacttgatgacagctgaatagatgtgttctccgagacaactccctggcactctattcg

SEQ ID NO: 433962 - DNA, 346 bp, Oryza sativa
gggtatttgcgctggcgatcgagggggtgctgggtgcgtgcgggctggcggcgtcggacgcgctgcaccacggattttcccatgatctacgaaagccgcggcttggaggactctatcgatggccgtgccgaggaggtgcttggggggaacatgaaaggttcgtaatgtgtaggacgattggataagaagagacatccggttgctgatactatatcagaggcggtgctgggcaggatgggagcgcaaggcactagggaccagcgcgagatggtgcactatgagctagaggaggccgaatgcatgctgtacgtgttcccgacaaggatcggtatgatggacgaaccaa

SEQ ID NO: 433963 - DNA, 229 bp, Oryza sativa
tttttgtttaactgataggaggaaaacatatttataaccgcatctatctaaggacatggaactattagcaatgcttataccccgaaatacagttttactacaatatcttaaaaaagacgttagttttacctcacaggatggccagttgagcaaagctgttgacacaaaaaacactggatccctttgaaccaaaccgcatccatcgatgaagacacagggtactctactg

SEQ ID NO: 433964 - DNA, 169 bp, Oryza sativa
tggataagatcgcgagcggccgaccataatttttggttttttgaccatcaaaaggccatcgaattcgtagtctacggcgtgctaaggatggaaaagtggttatactgctgctagagtgctatcccgaatgctaccggaatccggtgtttaatctgaatgtagggtgatg

SEQ ID NO: 433965 - DNA, 356 bp, Oryza sativa
ggaagaaaaaggacagataacgaagaaaagctgtggaatactttacagagcggggagttttgcgtggaaaacttacagggttgtaatccagtattgtaggcaagaaacttgcccacctttatctgtacatgattatcagatccttcttcattgaagtcagatgataaatttgaaggaccgtattagtgaagtcctcctagttagtactcaatccaattagcatccagatccttcagcttcaggagccatttctgtttgtccggagaaacgcttggtttgtttggcttgcttgcgtgtttatttgttatggcatatgaggatccagccttactttcattatcagagttggctcgcct

SEQ ID NO: 433966 - DNA, 494 bp, Oryza sativa
ggtggatccgtgcttgccgacggcgacggtctcggagtgcgcgtggtcgtggcacttgcgcttgtggcctgcgccggctgacatggcggcggaagcagaggacaggggtggatagaccaatatggtcgccggcggagggggaagcatcaagtaggacgacccggagcccaaagccaagtacaggctggcagcagcacataccaaagagaggaaggacaagctcaatgcagatatgacagacaccatgcacccggggaacaagacgcacccggacgccatgaacgtgaaccatagcatcataaagagagacatggaaccaagcgactacctaacggggaacgggtagtaacccttggacttgctcacaaactctactaacgggcctggccttgaacgaaactgataatctagtgacacgctgaagaagaccttctctagcatgcctacgaagagaccgaagcagtagaacgtactcagctgttgcatgtgacagt

SEQ ID NO: 433967 - DNA, 303 bp, Oryza sativa
cttgctccatccatctatccatccaaggagtgtggaacgccacacgtattttttttttatctatgctaatctgatcattagcagaggagagttttagcagtaggattggattaaattggagtagtttcatagtttgtgtgtagtgatcttaattagctttgattagacagacagtacagtagagtagaggatgttggctgtgttcagcggcgcggtggtggaggtgccggtggaactaataggcagcctgcgcccgccgcggagataccaccacgtgtgcgctcacaactgggaggacgaatt

SEQ ID NO: 433968 - DNA, 131 bp, Oryza sativa
tttgtgtttaggttatagggaggactaaaagccacaaatcacacatgacgtatgttaatacaggtagcacaggaactcgctatatgtagagacaccaggacctaaggtagctcagacatagctggactctg

SEQ ID NO: 433969 - DNA, 422 bp, Oryza sativa
agaactgcgggggcatgcgcgcgcgcgcgtgcgcggggcctctttagagcgcgcgctcttttttttttgttttttggaaaatgccggggtggatgaaaaggagtttgaaaggcatatttgacaataattacaacattagctggctgacagtgcgacagatttttttagctaaagagaaactaaccgatgtgcctatgatccaaccacatctttatgaaagtgagaggatgaacttccaaagaaaaggtaggtatacatacacaacactacatggaagggcgagcctgccctatggggctttgctacaactgcaaggcttgtaacctcggcaccagaatggatggagctgcttgctgaacccgcttgactgggcggagaaggaagttgctggtgcccgattctcggaaccaggttatcaccac

SEQ ID NO: 433970 - DNA, 380 bp, Oryza sativa
gtcaagtcttatctgccttcctccctcctctcgccttccgcctcgcgtgcgctccaccaccgaaaaaaaggacaggtattcccctttcctctcttcctaatcaggtgcatgcatgtctcagatttggggatctctgggtgttcggtcgcatctggtcatgaattttcgatcggttcgataggtcgttggtcccggtgaagaaacggatctcgtagcttcggagttgttgcgtgggtgtggaggttttgggcggaacggatttggtgcgattttgctttgattcaggggtgtttggggcgtcggaggaggcgtagatgggttggatgtgttcgtttgggggtgatgggtggtttgatttggggggatttggtgtgtttcat

SEQ ID NO: 433971 - DNA, 442 bp, Oryza sativa
ttttgtttttttttttttttgggttttttttttttttttttttttttttttttttttttacaacaagggcttttcaattcatcgggttaaggaagaaggggccctaccgagataccagggggcatttactaaaacaatttggttgggaacaagcattaacaattggaggatttcatgacccaaccattaccaagttaccaagatgggatttattgttcggaaagggttagtttttgtttgcaaaaactttttcttttccaactggggggttctttacacttttacaggacatgggggccaaaaaaacggaagcaaaaaattggaaaccagctgcaaagaaggggaacccccaaaccaagtggccggtgacacccaaaaaataagaggggggagaagccctcctttacaaaaagggcgaagaggaggaccaccaaaccggggg

SEQ ID NO: 433972 - DNA, 442 bp, Oryza sativa
tttggttctttataaaaggggggaaaacattcacaaactacccaatattgagagcatacagttttttggtgatatctgattagcggaggcaaatatacatacgggcacatacaaaagctgaatggcaggactacttggaagaaacatggggcaagcgggcacgcaggaaaggttaggaatttcagaagctgaagatgatcaaggatctagctgactcaaaaagctagaaaccgagggtaaactagatgtggcaagcaaacgaacagatagctgatcattaacagcgagctgaccggaggcactttttgatatccaaacatttacacttcaatgcctccggtcatgcatccagcggcggcgttgtttagcccttaaagggggacgaagagtcgagcttggcggacctggccctcatgccaactggtggaaggcggcggccatg

SEQ ID NO: 433973 - DNA, 295 bp, Oryza sativa
  unsure (1)..(295): unsure at all n locations
aagttattcacacacagcgcgctcacagtgatcggagatggcgaaggacattgaggcggcggtggctgttgttggcccggagtacatttctaacgacttctntgaccagctttcggacgccgctgatcgacatttactgagatcatccacaacgtccctgtcacctaacggtaaccatcagtttttgtgcgtacctctgctttttctatacataacgaaatccacatggaaatcgtacaatttctaatcatacccgctggaggacgcagaagacgaagaagaagaagcttctatt

SEQ ID NO: 433974 - DNA, 347 bp, Oryza sativa
ggaagcccaagcaaaggacaagccccttttttattaaaccccggccgatttggccaaaagcttaatccttccggggggggataaaccaccgggcttattatcttaccaaaaaaaacaaagggaaaattaggggcctttgatctttttggggaccgggcaaccctggaacccggaaaaaaaaaaaaagcctagaatgactggccgggcttttttttaaaaaaaaacttggattattctttttaccggagaactggaaacccgggaccccccccaggggatcccctggaggggcccctctttccccggtgggggtatatcccaaccccctaagaccccggggggaaaaa

SEQ ID NO: 433975 - DNA, 477 bp, Oryza sativa
gttgtcttttgagctttaatccccgcccccagcctctggcccgtggactcgcagcagcacacggcatccgaagccgagggcggagcagggatcgactagcggtgaggaggcgggcgagcggctggccgccatggaccgtggtctgagcacgttactgggagcttgcgtagctcgagcccaagctgttgcaggcttgccagcatgcgcatagtttggcgtatttaagggtatactccgtcggtcgaggacgacttcgtgtacgcacatggtttatggacactttgctttcggctcccgaacctgtttgactggaatccgctctacgtcgtgagcgcgcttcgttctggagccccgtcgtcggacgtcgtcgttgcgcagcatcgtggaggcgctcgcgcactgacaccgtcgcggggttgtccaccgcgacgtcaagcccgacaacattcttcttgacgttgtcgacgacgggatcga

SEQ ID NO: 433976 - DNA, 260 bp, Oryza sativa
ctctttggcttctagcagcaaagggggcacgagttggggttctcctccatgctcatgttgcggacgtagtagcactgcggcggcggcacgtacgggtaggccggcagtggcggctgcggccggtgatactggttcctggactccctgtggaagccctgccccgggaggtggattatccatgaaaacctgggcacctgctgccagacccgagactacatccttgccttcggcagctccagcttatcgattgttccaaggtg

SEQ ID NO: 433977 - DNA, 323 bp, Oryza sativa
tttgtttttttattttttgggttttttttttgcgcaattgattttattttcaccatgcattcgtcaaataaaaacagccttcatcacaaaggggcatactcctcgtattaaagatccaacaggttaagggaacacccgagcttcaaactccacatgaccaaaagtggaggctgacaagggggtacctaggccactcatacggcggaggacatcttcatggaatttacgagctccctaactcgggatgacccgggaagggactttctgttagaaaagagaattctgttttcacaaaacccatgcccacaaaaaagggtatgaac

SEQ ID NO: 433978 - DNA, 359 bp, Oryza sativa
tttttgtttttttttgtctggtgtgttatatgtatttagcaataaactcatgcgtctcagcttcgagcatgtgcggactgtttaattttgcatgccatcgttaacaactctctggctccaaactacatggggctacgaacattagaagttcatgcaacctaattggatccaagttatatggaccctatagatttattggaagctaatagaaatggccgggatggggaacacgagagcgtcgcaagagcttgtgctcgattggggttaagcgtaccaagccgccttcacagacaccgtctttagtgcctgggctgttaagcgcttgaagttcacctgcatgttactttgggcccccctgc

SEQ ID NO: 433979 - DNA, 356 bp, Oryza sativa
taaaaatctaattaaaatcccctcccccaaaaacccctctcacccgaatttcctcatggactcggtgccggccgccggagtcggcgtcggcggcggcggcgcgggcgcgggctacccggagtccacggagtcatccccacgcagccggggcggcgactcgtgggacgagcccttcccttcctccgccgcggcggcggccgcggctgccgggggagggaggctccgcctcatgtgcagcttcggcggccggatcgtgccgcgccccacggacaagtaggtgtgctacctcggcggtgagaccctggtcgtggccgtcgagcggaacgccttcgctggccgacacacacacgcggtta

SEQ ID NO: 433980 - DNA, 499 bp, Oryza sativa
  unsure (1)..(499): unsure at all n locations
tgggttttaaagtcacggggcatgatgccccaagcaatcaataatcaacatcttacaaaagtgggcaaaggtctttaatccgcaaaaaagactaataaatcattcccccttctccatggccaaaaacaggatccaatctcgcaaaagtggagaaaacaaaaacaaaaaaagaaagaaagcaaatctcatctcagttatttaggactattgtcttcttcctcctccatagaaatactcatgtggaacgaccatttcgttcaacagcctagngcaaactgtccaccggcttgtcgaaaaggatcttctgggaccggcacctacttgtggagaaaggtttattaccttgggaggagaaggaggtaatggccatgcccaagctgcttgttgcatgcgtagcaagagttcaggaacccattggttcgcaccgcgtcgccgtcgccgttgacgccgccgncggccaccttcttcacgagcacatcgccgcagctctcgacgatgc

SEQ ID NO: 433981 - DNA, 461 bp, Oryza sativa
ctcaaaaaccttttttacccgaattttctcaaggactaacattttgccgcctttgtttttttcagacaccaacgggcaccagattactttccccacttgattgattcttccccatactaaccaagagtaaacttaagaaacaagacctggtattgtgcacggttccagcacacgccattacctaattatagtgggtgtttcggtatcatgagatcaatgttttgccgtttactggcagtttgcgaatcgcaatcgttgaccaaggatgccagccatttggcacgttgcttttaacaacttgcctgcggttttttaaaatgaacaaagcataagattattattatcaatgtgtgattaacacataacgacactggtgttatactgaagggaaaaaaagcttgaagaatatgaggctggggagtcagaccattaatgttagattatgtttcattagataccct

SEQ ID NO: 433982 - DNA, 329 bp, Oryza sativa
ttgttctttgagggagtggggtgcacattcacaaacaggccaacgaaaaggctcgacgccagttacgggttaaacttttcgactaataccgaccagcttatgcagggtaaggcacgaggggcacctctcgggtatctgaccagggaggaccatgcacgaggcacagcttgttatcgaatacccaactaatgactgcaacgtgcacgcctgtatgcgaatagtaccgatacatcggggcaggctggactacagtacactaaggccaggggatggcacgccgcgcctacaacagactggatacacgctctcatttcagattgtacaccagc

SEQ ID NO: 433983 - DNA, 360 bp, Oryza sativa
cgcgccctttttttttttttgttttttactttagggggggttatgcaaacccaggacaggggttatacgccataaggcgatcccacgttatttttctacaacgccaagtcgaagagctacctctgacacattccacaggctaaaggctatgaggggctacaactacgggacacctttatctaaatgctgacaactcctaacaagctaatacactgtcttattcctgataaatggggtggccatgtgcccaggctatggaggacccacccttgaacgggatatcccgtctcatagccacgggctgctgatcatcaaccctaaaagtccaactagttacctgggactgatgggccaccaaac

SEQ ID NO: 433984 - DNA, 281 bp, Oryza sativa
cgcgtatttttttgaggcgggcgccagcgtttaggtaatgagcgctttggttggagatagactcacctaactgagcctgacggggagactgcacaagtactactgggacgctcgcacaagttatgtttcgctatctcggagtgtgatcaccttgtcaagtataaggaaccggagtaagctctctttattcgtggcaagggtgagagcttgccggtgactatcgctgagacgatggcccacgtgatcacagtcagcagactggaggctcccggtgcagcaga

SEQ ID NO: 433985 - DNA, 320 bp, Oryza sativa
gcgtattatttaaaggcgagagtgagagagatggtggagagcccggcgatcgactctgcggctggccggaggacgctgacgcacagaggagactgataggctgcgcgactcgtgcgcgcgggtgtgctgcatttcagtgtatgatgcacggcgtgccgttcgagctacaggccgagatgaaggccatggtgcgcgcgctcttagacctgcccgacgacaccaagagcacgaacgccgacatcatcacgggcagcgactacaggctcgccgggacaggcaaccacggttacgagggctttggcctatgacgacgaccgcgc

SEQ ID NO: 433986 - DNA, 354 bp, Oryza sativa
gcggtttatgttcacgagagcacgacgaggacccgatctcgtgtttctttcttttggtttcaagtatcatcgccacattgcgcgctcgattttccttattttttttgctcgtttcgattcgagtctaccctttattcatccctcttctcgcgttggacgctcctccacccgatctctgctctcgaagcttctggaagcttcggggggaggaatcccgggccgggctcgcccgccatggcgctgcggtggtgtagctccttgtggctctcgtcggtgtcgcgctcgtcggggggagtccgcggtggctaatcgaatgtgtcgtcggagatcgctcctgtgagcggcggggagggg

SEQ ID NO: 433987 - DNA, 322 bp, Oryza sativa
ttgttcttttgatttttggggtttttacatgcacatcaaattatcggggattaatcaacaacacgacaagacaaaacacgacgcacattacgaggacatgttgacattaatgcatgcatgcatgcgatgacccgacactgtcacacactgacacactcactcgctaaagctagcagtcgctacatattgttagtaaacggactggccccccatccaaatgattaacttaaaactaatagacggcctaatcacccactaattcaaacgaaatttaaccaaaccaaaaccaaaatcacgggctgaagcagataatcttgagctt

SEQ ID NO: 433988 - DNA, 364 bp, Oryza sativa
  unsure (1)..(364): unsure at all n locations
ggggaccgggaagcaattgaccccacaaaaaaacgggcccagaaacccaggtgaaccccgggaacaaaatccccccccatttgacttggccaaaggggggaaatgggctaacccccatttacaaaatgagggggggaaccgggcccaaaattgggaaaagggccaggaaccagggttttctttcccggggccaaaaaaaaccccccccaaagcccccacaaaagggcagggcacccaaaatttttcccggggggccacccgggggggggcttcgggggcgggggccccgggaaccaaaacccaaaccggtaaaaggcccccagggggggccccccgggggggggggaancccctaaaccaaaac

SEQ ID NO: 433989 - DNA, 437 bp, Oryza sativa
  unsure (1)..(437): unsure at all n locations
gaaatgaatgtgcattacagcatacaattttttgttcaatacaacaattctgaaacaggattacaaagacttcacgggggtacatttgattcacaaggcaataaaatccccaacattagagtctagttcatcgaccaattactaaagaactaattcaattattcccaaagaaccagatgataggctggtgcattggggaaccattttattcaagcttcggccaaaaataaatagcaaacttcaacagaacgcgctggtaaagcactgaggggcaagcatttaacagcagnctgaagcactgaggaatcgaaaccccaaagggaacaaatcctggctgcccaggtagtaattaccaacaacagatccaggaaacttcaagcttcataccaaaggcttttaagcaaactttaaccccccgggatgaaccgatgcctttt

SEQ ID NO: 433990 - DNA, 414 bp, Oryza sativa
tttttgttttttttttttttttttgtttttttttttttttttttttttttttttttttttttttttttttcggggccccccccaatttattttaaaaaaaccgcaggggatatttccacaatggcgggcaccacttcccaaaaaaaaatcgacccctggggcgggcaaaaggcatcaccgtggggaggcagagcccactgttatgcgaaacaggggcccaagaaccccaaggccaagaccctgaacactgtttataaccggaatgaatttaacaggtttggccagcccaaacatgattgtttttgaagtccggagaaggggggccccccatgggaaacatcaccgaagatgaacaaatccattttggggtagggcctccacaaattcatgctttggggggggccaagccccttt

SEQ ID NO: 433991 - DNA, 403 bp, Oryza sativa
ttttgtttttttttttttttttttttttttttttttttttttttttttttttttaaagggcaagggttgttccactcatttttgggggacattggcattacctaggggggatgagaattggtttcattcattttacattaatggtggctcataattacaattccgttaaggggaaaatcgttttgggggatttttcctcagcttacaattaacacatacatccattaacaagcatttgatatggaatgatgcaagatgttcataaggttcattcattcaggtattacggccttgtgttgggtccacggggacccatctatctttgggctccccattttcttttgaaaattgcccttaaaataggttgaatccctcaaaggaaggctcctggaactgtgactgg

SEQ ID NO: 433992 - DNA, 347 bp, Oryza sativa
aaaagggcaaggattgttccactcatttttgggggacattgtcattacatagaggggatgagaattgctctcattcattttacattaataggagctcataattccaattccgttaagaggaaaatcgctttcggagatttctcctcagcttacaattaacacatacatccattaacaagcatttgatatggaatgatgcaagatgttcatcagcttcattcattcaggtatcacggccttgtgttgcgtccacggggacctatctattttttgcctccccatttccttttgaagttgcgctcatcatcggttgaatcctcgaaaggaaggctcctggaactgggact

SEQ ID NO: 433993 - DNA, 389 bp, Oryza sativa
aaatccctcaactcaaaagctatctaatgggattagccatgtaaacccaaacatactcactgcaactggtcactacacactcaatcttcactctaatgtactacaaatgcataacgctcatggtaaaaagatatgcaggccaaaaaactcacaagaccgaaaatctatgatatgctacagtacacaccacaatgaacactgtcacagcacaaacaaaagccccaaaaaagaacttcaaaaaaaatcacacatggcgaggcaggtggccattggaggcgctgttgaaggtcttgctctcggcattgcgcctcttcaccaccatgccccatgtgacgacctcaaggatgatggcggcgacgccgaggaggcagaggacggcgacgtaggcc

SEQ ID NO: 433994 - DNA, 320 bp, Oryza sativa
accgtgttatctcttggacgccgcgagccgagctgagctacgccatggcagaggcggtggcgctggcgctgattctgctgctagcggcaaagccgatccgatcgaagacgcaaaacgtgggaagaggaagccaggacaaggcgcagaacctcacgaacataactggtaccagcgagaaaggcgtccttcaggccactgcaagctagcgactagcacttggaaggaggttgagatatccgctacagccaagcacaaaatcatctgacaaactttcggtattttgaagatctgtccaacagaaacaaagaacctgacgatga

SEQ ID NO: 433995 - DNA, 165 bp, Oryza sativa
ctcgaccttacatccatacgagcccggcgcggagtagcgagaagagaagggggggagggcgcagcaatagccccaaagaagctgtacaggacgacgctcgcgtggcacgtgacgaggagccacccggagctggaggaggcacgaccccagtacgagaccgagccg

SEQ ID NO: 433996 - DNA, 276 bp, Oryza sativa
tcgacggccacgcacgggctcgtgtctcgctgtcccgtccgccgcctcttctccactcccccacgcttccgctccagatctgcctctccgcccgcccggatctagccaccggttcgccggcgcccgccgctcgggagctgaaccgcgtggccgagtggcgaccctctcctaccgcggtagccatgaatcaattttcgtgcctcctgaatcagcccgcccagggccaagggcgaggccttaccaaggcggtcacctccgccttaacacccccagaag

SEQ ID NO: 433997 - DNA, 117 bp, Oryza sativa
ctgggccccccccaattttttttaaaaaacccctaagggattattccccaatgggtgtcaccatttcccaaataaaattcgcccccttgggcgggcaaatgtcatcacgtaggggtc

SEQ ID NO: 433998 - DNA, 541 bp, Oryza sativa
gggtgcaggtccgcagcaaactgaacgagtcgctcaatcagcaaatcgtccgacacaacgcacagactgacgcgatcgtgcgcctgagatcgaaccgccgcttcaaatgcatcgtctgtatcgtattcgctgtggtcgtcgcgcacactcaacacaccggatttgggcggctcccgctctgttggcaaagactccgcatcctccgcacccgacatcagcgacaggatcagcgccagttttgtctttttgaaagcggttggtggcacgatatgtgaagcgaaagactcgacaatgagtgtagtgattgcccagtcgctgacccaacagccacgataatagttggacgcgtcgatgtccgccgctcgtgccgcactgagaccggcagctccgagccaattgtgatgcgccggtagacttgtcgatcccgtctcattgacgatacgccccgccatctcaatgatgcccctttcgcgctgttgcacaccgatttggtagtagtagcgctctggcgacgttttccaacaattggtcacgtggtaaa

SEQ ID NO: 433999 - DNA, 295 bp, Oryza sativa
tttttgtatagctcaaaatccaattttcatagcctcttgcacctgattattttggttggctggaagccacggttgacaggtgacacatcaccaaggcgccatgagttattcacaccaaattgcacgaacaaataaacctgattctaacaacgtggatgcttgcgagtgccttttttcacaaatttgaatttaccacgaggaaaataaagataaagttacattttttaagccaacaaacccttttgttaggggcattcaaaccaacttgcctgttcgagttgggccaattgcccgg

SEQ ID NO: 434000 - DNA, 113 bp, Oryza sativa
ttttttttttttttttttttttttttttttttttttttttttttttttttttttttttttttttttttttttttttttttttttattttttttttttttttttttttttgggg

SEQ ID NO: 434001 - DNA, 260 bp, Oryza sativa
acatcaaagaacaaccacttttataactaggtcatataaccaaaacaaatgtgacctactgaaaatgttatgaaacttgagatggaaagaagtcgaataagatgccctaaggcaaaacatccgaagatcatattggacatgggtccacagggcgaaccaatgcttcaaaatggggggcttgaccctacgctgacgtgccctcttgtgagcgatgtactatactgacccagcacgtaaacgatggaccagcttggggaggc

SEQ ID NO: 434002 - DNA, 71 bp, Oryza sativa
cttcttaaccctgttttttttattcattgtttggttttctacacttgccactttagctggcttttttttcc

SEQ ID NO: 434003 - DNA, 390 bp, Oryza sativa
ggcgctggaggcggagtccggcatgccgctgtacccggcggagcacgaccgcctcctgttcgacgtaatgtctggccggtgggacgcgtgcgtggcggcgatccgcgccgtggcgggcctcggggaccgggagcgcgcggcggcggagttcttggtgtggagggggcacttcctggagcttctggggatcggcgacgctgggctgccgcgcgccagggaggtgctctggcgccggattgcgcccctcggcgttgacagggagtgtgtgcactggctggcacgcgcaatggtctcgtgcgagggggcggtcgcgccggatgccggggtcgggtggaggaattgggcttttcttggatctggttgatgctttcccgccatggttccatgtgc

SEQ ID NO: 434004 - DNA, 465 bp, Oryza sativa
ttggttttatacaaggttctgaattctgatgcatctttgattctttacagagtagacgagcaaaactttaatccgagacaggcatatatatgaagtatactgctacttctgggcctctgcctgttcaaagtttacctctgaagtagctaaaagctctacggggaaaaaaaatctcaactgctctgtgcacactacactactacagtcaagatgtacaactatatatttacaaggaaaacatacaaaactttccacatcaagccgtcaaccgtgtgcgatgtgagcctttgtgtgctagccaaatccgaactgtgcggtcatcacttgccgaagccagcatatgtggcttagcaggattccagctcacacaatttacagtaagtgaatgaccgtataagacctttattggcgtctccaggtgccttttccaaatgtagacctgggaatcctcactgccactagcta

SEQ ID NO: 434005 - DNA, 208 bp, Oryza sativa
ggggggccaaaatgccaaagcaaaccgggaatgccctattttattcaccccggaaatttaaaagggaagtttgaacccaacttgaaaaaatttaccaaaccgaaaaaaatagggggaaaaaaaatggaaaaactgaacacaaaatacattcattcccgggtgggaaaggaccaaggcatgggtaaaaaaatggtgcacttttaacaag

SEQ ID NO: 434006 - DNA, 863 bp, Oryza sativa
aaaaaaaaaaaacccctgcgccaaaaaaaaaaaaaagagggggggaaaaaaccccaacacaaaaaaaaaaaaaaacagaaaaaaaaaacaaaaaaacacaaaaaaaaaaaaaacaaaaaaaacaaaaacaaaaaaaaacaaaaaaagaaaaaaaaaccaaaaaaaaaaaaaaaaaaaaaaaaaaaaaacaaaaaaaaaaacccaaaaaaaacaaaaaaacaaacaacaaaacccaaaaggaaaaaaacaaaaaaaacaaaaaaaacaaaacagaaaacaaaacaaacaaaaaaaaaaaaaacacaaaaaaaaaaaaaaaaaaaaacaaaaaaaagaaaacgggaaaaacaaaacaaaacaaaaaaaaaaaacaacaccacacaaaaaaaaacaacaacaaacaaaaaacaaaccaaaaacaaaaaaaaaaatacaaacaaacaacaaaaaaaaaaaaaaaaaaaaaaaaaaacccacacaaaccaacaacaaaaaaaacaaaaaaagaaaaaaaaacaaaaaaaaaacaaaaacaacacccacaaacaaaaaaaaaaaacaacaacacaacccaaaaaacaaaaaaaacaaacaacaaaaaaaaaaaagacaacaacaaaccaaaacaacaaaaaaaacaacaaaaaaaaaccacaacaaaaaacaaccaaaaaaacaaaacaaaaaaaaaaaaaaaccacaaacaaaaaaaacacaaaacaaccaacacaacaaacaaaacaaaaaacaaaaaacccaaaaaaaaaaaaaagaacaaaaaaacacaacaaacaaaaaaaaaccacaaacaaccaaaaaaaaaacaacacccaaacaaacaacaaaaaacaaaaagccaacat

SEQ ID NO: 434007 - DNA, 54 bp, Oryza sativa
atgaaaaaaaaaaacccttaataaaacaaaaaaggcagggttaacccaaaaccc

SEQ ID NO: 434008 - DNA, 368 bp, Oryza sativa
gggtaaacgaagaactttattgctctcaacagagaaatttgttgctaaaaaggtgtacaattgagctatgggcctgatttagtgtgtacaaatacatgactgaagtggaaacatcagtgtccttttgtgaggcagtatagacaggtggaacatccttaaatacattcctgagactctgagagtgaaagctgtaaaaagctacccaaaaaattctctgtaactgttaactgagcagtgaatactcctacagcaatggtacagtgaaccgaaaaaaagagggtgccgccttgtcaaaaactgtagtcgatatcagagatattctgcagtgcctgattgtttaaccagcttaagccgctcgttgtacagat

SEQ ID NO: 434009 - DNA, 417 bp, Oryza sativa
acgatttctcttttgagcgcgcgtctccctgctccatgggccgcggggcccagacgaccagccggtgcgcgccgtagatcccgcgcgccagatccgatgggggagaccggggtggccgtcgcctcctccccgcgcgccgcggtctcctccccgcgcgccgacgcctcctcggcgtcggtcgcgtcgtcgccgcgggcgggcggggtgggcgggcggcaccaccacaggcggtggggtggcgcggcggcgatctcgccgtcgtacagggcggtgctgctcgcgctgtggctggtcgggttcgcgctcgtgttcctgtggcagagcacctcggtgggccgcgcgcggctctacacccgtccgtcgctgctgtcgaagcgcgcgccgtccgcccaggggatggggcagtgggtggccgtg

SEQ ID NO: 434010 - DNA, 323 bp, Oryza sativa
ccccaaaaggggggtttttttggacctaaaaccgtttgggttaaaaaactaaattttttttttttgttaaaaaccaccatttgttttttttgggccacccggggttttggttttttaaagggggcttttagctggttttttgtttttttggaaaaaatttgggggttgccttgggtttgggggaaggaaccagcccaaatggtttaatggcttttggaatacaagttttccatttaatgagttttaaactcttttggggttttttttcggaaaagggttttggaaccctttaaggaccacccttttgaaatcccccctttttt

SEQ ID NO: 434011 - DNA, 404 bp, Oryza sativa
ggaacaaatatgtgagaaatttttataccaccacaaagcccccgctctttctttttttctctggactttgggcagaaaattccgcaataaaaccacaaaaaattttctgtacaaacaccaagatcatcatcatcatcttcttcttcttcttctccaccgccatcgtcttcgccggagtaatcaaatgattgatatgaacgagccaaacgaagattggcaatggatgcagcgatcagatcttcatgttggcgtacatgatgaactggagctccttgacgcagtcggccatggaggggcggccggcgctctcgaagcagacgcagcgggcggcgaggccggcgaacatggacaccgactccggcgtgtaggacgacctcgccatgtccctgtccaccaccttgggc

SEQ ID NO: 434012 - DNA, 482 bp, Oryza sativa
ttctaactccatcttcttctccccaaagatcaattgcgcagccgacgatcgtcgatcgatcgaatgcgcaattgcgggatcatcagtttttgtggcgggtttcttgatccataagtagctaagctgctgcccattcctttacttctttgccaaacgcctcctctaggtgtaggtggcgcgtctcccttgtacttggatccaaagagaccgtgtcgtctcgtctagagtaggtctctatctaggctctgatcttgagcctcattcggagaccatgtactaggctccattgccgatcttgtcctctcactctcacctgtccttgttgctcatgctcactcacagctcttcttgatcagttcatcagctcatcagggtcaaccttcggcagccattgttgtagcaggacattttgcctttttcatgtaaagttgcagtgtgaccttgggctggagcaaggaatatatctccccagttcttgatcg

SEQ ID NO: 434013 - DNA, 102 bp, Oryza sativa
ttttttttttttttttttttttttttttttttttttttttttttttttttttttttttttttttttttttttatactattattaaaattacatttttatctt

SEQ ID NO: 434014 - DNA, 262 bp, Oryza sativa
tcggctggatagcatgtgtagaagatgttatacagctgtgatttctatacaacaggcgcggtgcttgtccgacaattgcgacgcaccaaattcaatagaggagacctgtctggacccaagatggtcccggagagccacggtcgtttttgggcgcgctagtacactctttgatatatgacgtgatgcccgctcatcctggtggggatgggcgggcatgcaccaccacatgtggcaggggtggcagcggtggtagattttaccg

SEQ ID NO: 434015 - DNA, 208 bp, Oryza sativa
tttttggggtagattaggtaaatcatgtatatcttttcaacaacatgtacaagatcccttgttaatgggccactacatgcctacaataaccggatccatgcatgacatcacaaaatttttctacttgatcccaaagtttcaactaaaccactgatgatgatgagataaggtaaaaaaaatgaaactttaggagcctccctaacatgct

SEQ ID NO: 434016 - DNA, 141 bp, Oryza sativa
ttggggttttcaggacaaggggcctatcatcaaaaggccaatacttccaatatacggtcaaacagtaagaccaggtcaatttaatgacagactaccctccttgctcgtacaaacatggcgctaatttgatcctgctttgtc

SEQ ID NO: 434017 - DNA, 306 bp, Oryza sativa
tcggcttgacaccgatagctagctaactaaggttcccgttggtgtccggcattattccacttggacgaacactagctcaccgggcggccatggcgtctatttccagttctgatcaagctggtcgacgtcggcggctgcgccgccgaggactacgaggagacgctcaccgtgggcgggcgcgtccgggtggacgctgggccagagctactatactacgggcaagtggccgaaccttggcggtgggagacaagctagcgcacaggctagccgaggcgcacgcggtgacggtggagatcaagaacgatt

SEQ ID NO: 434018 - DNA, 133 bp, Oryza sativa
tttgggtttttttagcttttgggggttttcccccttactgttgtagtttttttttttttttttttattttttttatttataagtttgcccccaaagaaaactaatatgctttgcaaagaataaagaccccccc

SEQ ID NO: 434019 - DNA, 362 bp, Oryza sativa
gaccggaccggaaggccggggcagacccacgcgttcgccctcatagacgaggagaggcgacaatggaggggcaggaggaggacgggcggaacgagacgaccaggtaccaggggaggcagccgaaagggacagagccgcaggccgccgcagacgacaaggacaaaagggagccaccagcagggccgctggccgagccaggggagcgtacaagaaccctcaccggaccggaccgcgatcaggccagtcgagagcgcaggaatacccttcctaaacatgaccaagacgaccggcatgggggtcagcaagagctcacccaagggcgccacgggcggaacccaggggatagcctgaagcttcggcag

SEQ ID NO: 434020 - DNA, 388 bp, Oryza sativa
  unsure (1)..(388): unsure at all n locations
aaaacgcactaataagaaaaacacaaaaaaaacaaacaaacaaaaactagaaaccttataaaacncaccttttttttttttttttttttttaaaatttttttttttttaaaaaaaaaacaattccaatcaaccaaaagtaaaccaaaccaaccaagaaccaatcgtccaccaaacaataagcaaattaacccaaaaccaaaaacacctccaaatccaaaaaaaaactaaaattgttcgcaaatcctacgtaaaaaaaaacactaggttgaaaacaacatgaaaaaaaaccaacctacttgggggaattaaacaaatgttgtttattggaaacgcgactcaagaaaaaagcaaaaacaatttaaaaaataatgaaaaaaacgtatatta

SEQ ID NO: 434021 - DNA, 189 bp, Oryza sativa
ctcgtcgtcccctcgcgccgccgccgccgccgccgccgcggggaagagctagccctagaggagaagcgggggtgagttgccagagaggacaggcgcccccctccgccgaggcggggggggcggcggcggccatgctggcccctgccgccgcgcaagaggccgctcccctcgactagctggcccgccagg

SEQ ID NO: 434022 - DNA, 122 bp, Oryza sativa
agagagaagcaattccattcatccaaagggaaaccaagccatccatgatccatccgtccaccatacattaagcccaattaacccaaatccaaaatcaccctccatatccatatagaatctaa

SEQ ID NO: 434023 - DNA, 220 bp, Oryza sativa
ccctccgctccctcgcgccgccgccgccgccgccgccgcgtggaagagctagccctagaggagaagcgggggtgagccgggagagaggacaggcccctccctatcccgacccaagacaggccggtcaccccccccacaacaaccacaacccccaactactccccgaccccccggggtcccccaaaccgccccccccctcgacctccccaaggcctacccc

SEQ ID NO: 434024 - DNA, 310 bp, Oryza sativa
ttctttttttttatttattgttttttttttttttatccttttcactctttcattttattgttttttttttttcatgttttctctattcatattactctcctacaccaaaagacccaggacgcacgagcgctgcgggaaacgacaagccgacgaagaaggcggaggacccggaccactgggagggagacgtgcaagtggggacgaccatggagaaagctgtctaaaccggcgagaaggggcaaaactcacaggagaagattgccaataggccctggcgcagacaagataaatagcacagaaaacagacccg

SEQ ID NO: 434025 - DNA, 407 bp, Oryza sativa
aatatccgtgctgtttatttgattgtgtgtgcatttacaccatttacaaataaaaattctgtggaaaaaaatgaatcaattcattacaatcagggcaaaataagactcatctgttctctttatctcacagaaaggtacaacaaaccgacaaatttatgtgcaggctatttacactgatgcacaaatatggaaacgtttatagcagaccatggaaaacaagaacactctctcaacttcctatggattgtaacttacacagataacctaactatgaagatacttgggattcggaagaccattggaattcaaatttccaggttcctatcaggaccggttttactctcctgggagcaaggtgcattcgccagcaacgggaggccaacatgacaaccccatcgatctggatt

SEQ ID NO: 434026 - DNA, 385 bp, Oryza sativa
aaggggaaaaaaaaattttaattttaaaaaccttggggaaaaaaaataaaaaaaaaacaaaaaaaaaaaccccaaaaaaaaaaagccccccggggaaaaaaaaacagaaaaaaaggggttcataaaaaaaagggggcctcccttctaaaaaagcaaaaagtctggtctaaaaaaaataaaaaaatttaaaaccccttttttttggggaaaaccacaaagggggaaaaaaaaggaaaaaaaaatttgcctataaaaaacctttaaaaaaaactttgttttaaaaaaaaaaaagggggagcccaaaaaaaatgcccccccccaaaaaaacccgaaaaaaaaaaaagcttttttggggggaaaaaaaacaaaattttatttccccctg

SEQ ID NO: 434027 - DNA, 440 bp, Oryza sativa
gaaaagcctaatattgcggtctctgcaatgatattatctccagactgagtcttagtaagcaaaactcatagtgttcagcatatgctgaaggattgctaatctgaagaaaaattcattcggctgcctgtttcaaatgaccaagattccaaaaacaggcaggaccaacgagtaaaaactctttactattatctatgcatatgcggatctcctatatactgaaaaaggaaaatagctatatatgtatctcaacatatacatcaaatgagcatcctcatgcattgttcatcgttcctccagcttcatcttcgttgctggagctaacatgaacaatgcctattgtgcatcgtcctcttcatcttctcaaggatcccagaagctttcctccttgccctttgagtgccagtttgtgcgagaaaagtgagggagccgtttatgctctc

SEQ ID NO: 434028 - DNA, 371 bp, Oryza sativa
aggccatagtgtttgcatgttatactttgtagattaaacattcacaaaagattgtcccttttatcagttcttttagagagataaaagggggagaaaatcgtccctatcagagctgacaaaggcattacattatcctgtcgcatgcatcctaatttggctcatcttttctgcaaggggatgatgcttagctgggaatagcagtatgagtcactagcagaaacctgctggtgaaaggaatggaggcaaagataccatgtcttaggatatgctcaggtgtccatcactccatcttcttcttgctctagattaattcccccagggtggcaggtactgtggtcgccgtcacagctagcaagataaggctggctggc

SEQ ID NO: 434029 - DNA, 345 bp, Oryza sativa
ttgacttgttctagatcgcgagcggccgccctgctgttttattttattaggtgtaccttcccaccttgtccacatcctcgtcgggcgccggctcaccacctccaaggggaggtccacgacgccgcgcacaggaccgctacttctgatacaacaccatccgacgacgtttaaccgaataatacccaccacgtgctgtcacttcctgaggcggagctcatgggcgtgctcgactccggagttcagaccacccgcggcgtcgtggaccactgtcagcgagatcgctctgacctccagaccaaacggtgctcgagctcctcgaggccttcagggcaagaggagatgggc

SEQ ID NO: 434030 - DNA, 480 bp, Oryza sativa
tcgctttcctcgatcgagggcacgcgacgcgccatggcgtcggcggcggaggcggcggaggagctcacgaggatgcaccgggagctcccgccgagcaccgccaacgaggaggcggaggcggtggatgcaaaactggtctcggtggacgaacaccgaggcggcgcgcctaaccgaagtgtaccgagaagaggccgccgcctccggaggctgagctcatgggcgtcctggacggcgggatggacagctcccgggccggctgcggccaggcaagcgagatcgcctgcccttcgtaccaaacggagcttgcgctgctggaggcctccaaggcaagaggagaagggcggtctaggcaccacgctgcgtggattggaagaggcattgcatggaggaatccccgcatggacgctcactgaagtcgatgggccctcgccgattggcaagacccaagtttgtctgaagcttgctttgctagcaacaata

SEQ ID NO: 434031 - DNA, 123 bp, Oryza sativa
ataagtaaagctgaagctcctgcacgctagccggtcccgaatcgcagtttcgacccacgcttccgcgctcgagttttactgctatccctctagttgctcgtccgggtcactctgaatctaacc

SEQ ID NO: 434032 - DNA, 104 bp, Oryza sativa
aaaaaaaaaggggggtttttaaaaaaagtgggggtaaaagacgcccaaagatatataaggaaaataaaacgaggaaaaaaaaaaattttgaaggaaaaaaaaga

SEQ ID NO: 434033 - DNA, 434 bp, Oryza sativa
atccatccatggatcgagatttcctcttgtccctgttcttgttgttgttgttctctgtgaatttaacaggaaatcaagaactaggtgctggttttgactaacaagaactcggtcgaacacttggtgcgtgttgttggtggtatggcttggccggcggccggcacacggccgtgcaaaaactaagaggctacactgttggggccttcttgcttattgagctggcggaagcggacgacgtggctgccgcgaggagggtcgtggaggaggagaaggtgtctcttggcgtggctgggttgtggtatgggccttcggcgagcggcgtggcgaggctcgtgatggagcggaggacggcggcgatggtggcggcgctgtacgggagcacggtggtgcttgggtatgtcgtggcggcagcaccggcggagggcgctcgcgcg

SEQ ID NO: 434034 - DNA, 607 bp, Oryza sativa
  unsure (1)..(607): unsure at all n locations
acgacaaaagaggtgtagagatacaaaaggaacgcgggaagcaacgaaacaaagaaaacaaaaaaaatctaaaaaaaaaaaaaaaagaaaaacaaaaaaaactcaaaaaaaaaaagaaaaaaaacccaaaaaaaaaaaacaaaaacaaaaaacaatggacaaaacaaatacaaaaaaaaaacccacacaaaaaacacaaaacataaaaagacacaactaaaaaaaacaaaacgaaaacaaaatacaaaaaaaaaaaaacaaaaaccaacaaaccgcaacccaaaaaaaaaaaaaaaccaccaccaatggaaaaccaacaaaaacaaggccacccctaacccagtaaaaactcaaatacgaaatacagtcaaaacaaagaaaaaaaaaaatcccagtccaaaaaaaacgaacaaactaaaaatacaaccaaagaaaaaagagaaccccggaataaaaaaaggccaaaaaggaagtaaggaggccccccaaaaaaaacataaaagaccccgttgaaaaaacaaaccagaaatgaccctacacaaaaaccaatggaaaaaaaaacagagcccctttngaccaaaccctcctcccccccaacccccctccc

SEQ ID NO: 434035 - DNA, 178 bp, Oryza sativa
gaggggaaattaaactactgcatttacaacaaaaactttaggggcaagaacaagatcgaggatatacaaccaaaacatcaaaattgattcaatccaacaacagaaatggcactcaaagtgtacaaaaatctacaaaacaggggtaaagaaattacaacccagaataaaaacaaagaaa

SEQ ID NO: 434036 - DNA, 390 bp, Oryza sativa
ggacgagaatgggacacacataacaatttctgcatttgaatgtaatatggacagggtaatggagtatgcataatttttacaacagatgggggggcacacaaaaaagccccagtcagggtcatgataacatggagaatagctacctgagcctgatcattgtttcaacgaattggaacacaatgggggactaatattttaaccccaactaatgaagatttcctttttggagtttcgacaacagtgcagctgcataaagttccactggtgggagattcaagaaaatcatttagggttttcatcagcattttcattgggcaaactcccgttagaggcctcttctggatcttctttgacaaaactcccgggagcacttttgtacccatttttttt

SEQ ID NO: 434037 - DNA, 111 bp, Oryza sativa
  unsure (1)..(111): unsure at all n locations
ccgtttattccggacggggatctgtaggtttgcggggatcaaaacacctgagacggagtaaaagtggaagaaagaaggatcaaggccaatgccaaccgnaaaatgaaaacc

SEQ ID NO: 434038 - DNA, 168 bp, Oryza sativa
attaagaggggttttttaaaaattttggactaaaaaagaacaaaaacaaaataaaaatccaggaccaaaacaaaaaactcaaaaaacacagacaaaaattacaaaccaacaagaacaagaataatgggaaaagaaaagaactagacaaaaaatcaaataaattaaaaa

SEQ ID NO: 434039 - DNA, 175 bp, Oryza sativa
gggggaaatgaagataccgcatgtacaacaaaaactttaggggcaattacaagagctaggatatacaaccgaaacttcaaaatggatgcaattcatctattgtattggctgtgaaagtgtacaaatatctataaatgggggtaagagttttaacctgcaattaaacatagataag

SEQ ID NO: 434040 - DNA, 178 bp, Oryza sativa
tttatctccctcggggggccccatgtcctgcgcccgaggaggccctttaagaacctgagtaacacacaagttttggcagcgggtgacgatcggcattactgtgtactcgaaagcggggaatgcgatacccccagggattcacagagagagagagagctagagagcctcgaaccccctg

SEQ ID NO: 434041 - DNA, 82 bp, Oryza sativa
  unsure (1)..(82): unsure at all n locations
agctatgcacgcctcgcatgcaccgcnngtactgtaagctttggatnncctctattattttgtcncnngccctttnnttttt

SEQ ID NO: 434042 - DNA, 390 bp, Oryza sativa
gaggcgcagattcagggttggattttagtgaactctacaaaattcatacaacaaagtttgaacgaacggaaaagggagtgtccaattctttcaaagtgaatttacagaaggattttgatggccgccatgggtgctcgatccatcggtgcttcgccagctgtgcgaggaagaagacgacgacgaagactagtaggacatggatgcatcggctacgtgtcgagctcgaggggatcaggggacgatgaggcagaggccgtcttcttggtcgccgtcgtcttcctccggaacggccggcacgccttgacgctgaggtcgacggcggcggcgagcgccacgaacatggcggcgtcctccatgcacgtgacgtggcgcatggcgagctgcacgagc

SEQ ID NO: 434043 - DNA, 141 bp, Oryza sativa
cccaaccaagggctacatatagattgagccaggggtgaagcacaacatgaatggatggaggaagtaaagtcaagatgagcaggacgaagaaaagaccatgacaactgccacagtggctgggctactccacgggaaggcaca

SEQ ID NO: 434044 - DNA, 280 bp, Oryza sativa
tttgataaagtaagccgactgttgatttgaagattgtattccttcctcttctggcctttgaagtgattattcttgctgacaatttcagaatgtgtagagctttaatgccaggagatgaagaaagtatgagcgatgaagctatttgggagacacttcctcacttttgggttgcaatttctatggtgtttcttatagctgctacaaccttcacacttttgaagctgtttggtgatgttggtgctttgggatggtgggtatttgtctgtattttgccgattta

SEQ ID NO: 434045 - DNA, 385 bp, Oryza sativa
gggggggaaacaaaccttttccgggggaaataacccaaaaaccgggaaaaacaaatattccctccaaaaaaaaccaaaaacccccctgaccttgacccaaaaaaaatggggctaaattccccccacaaatttttttttttaaaccaaaaaggtgggccccaaaaaaccgggacgcccctttttaaaacccccaataggttggccggtttcatttcatttgaaataacccacttaaaccccccccatttttttaaacttaaaagccgggggaccaattttaaattggggggggggttggccttcgggcggaaatgccaaacccttttaatgtggaaccccttcctcgatgacttgcaagaaaattcccccccccccggttttgggg

SEQ ID NO: 434046 - DNA, 319 bp, Oryza sativa
ttctataaagggcaacataaagatcctaagaggcctatacaataacatgttagagtgcagctgggatagggataaaagttactaccaagagatttgggatgtacatctggacaagagcatttaggtggatgtttactgcagccacctccctgctgctggtcaatgggtgcctagaatgtacggattggagaaggatgctctcctgggctccatgcttatactaaccagttacttggttgtcgggaggtttattgctgcttggattggagcctttgtatccaaagactaggagagcaaaagtggtgcgaaggggacaata

SEQ ID NO: 434047 - DNA, 516 bp, Oryza sativa
  unsure (1)..(516): unsure at all n locations
gaattgaaacatagatatcgaagcaatcgaatgaactactacataagtcagcaggtccatcgtcagaatatacaacaaacaaattaagatggtcgaatctggaactggaaggacgtcggagcgcagggcaggggaaactgactgtttcctgcgctgtattgttctctgacgaagctatttgttttgtatgcatagaaaggcaacaacatggcagctgtacaacatgtacgaatctcttcaaaataacaagatccatattcacgacaccatgagggagcgagccgcacagcctaaatgacgaagctggataggtgagtggtttggataaaacaatcgttgtcatttcggtgttctagtctgtagagaatgctccttcacagtacctgttgctaaacttctcgatggcagtagatgcataaagaagtgtttcaccagccttctcttacgccatataaagttctcttnctcgggtaactttagcaatgacccatgcattattttttgctctgatgcata

SEQ ID NO: 434048 - DNA, 179 bp, Oryza sativa
gtcgccggccgcattcactaccaccactcgccgtcgcctccgccggccgcacgcgctcctcccctcccctcccctcccctcccctctccccggccgcgccgctcgccggatctctcccctcctcccttccaggaaccccagccaagcaggtagcgtgtgacgggggaagggggggatgg

SEQ ID NO: 434049 - DNA, 423 bp, Oryza sativa
atagtgcattcgttacacgttcttgggcatgcgtcccacacaaaaaggcacactggatcacaggtcacgaagggaggggacagtacccccccccctacccccaacatgcaagatacatgtttgttacagcggcacggtgctgtgtcgctcgactcactctggtgctgctgacatgactgcaagcagcaagatggcgtcacttagcggcacaaacagacaagcatccacagctgctgctgccgttgctgcaccaagagcgtctttgttggcaggtgaccgcgtcgcgtgcacaacattgataacgacggaatgcgtaccatttgagtgttggataatactggcagggtaccctggccagtcacattacatgccacttaactactgccgctatgtaagttgagcccctgtgcagaaagacaacag

SEQ ID NO: 434050 - DNA, 417 bp, Oryza sativa
tcggtatcgtataagactaaagccatagtggtgtctgaatcctttgtgatcaacctgacagcaggttctctgggcaacacgtgcttgggaaacatcatgaagactgaggttgtgctgctgttgatgggcgtggtcgccgcacaggtccaggagcatgccatcaacactgtgaaagacgcaaaggcagaactcttcggcaagatcattgctgctgcgggtgctgacgatgagctggcaaacgccaaggctcgtgtcacagtgttgggccctacagatgaggctgtcaaggccttcctgaaggacatgggtctgactgctgacgacgtgcttaagaaccccaaccttgcccgtgacctggtgggctaccacacaaatctgggtgtggctgcgggacctaaggagctttttgccagggaa

SEQ ID NO: 434051 - DNA, 150 bp, Oryza sativa
gttaataaattatagagcttttagctctaaattttcaattaaaaaaaaggaagactttttcacagataaacaaaacacaagtgacacttgcaaggcaaagcgaagagctcatatatgagaaaaaccaccctaacacaaaacaaaaaatac

SEQ ID NO: 434052 - DNA, 87 bp, Oryza sativa
aattattaaggaccttttggcacacagggcaaggtacaacttacacgtcttttaaaagacacactacacggccctaaaaggcaatgc

SEQ ID NO: 434053 - DNA, 305 bp, Oryza sativa
ggggaaagggtcatcatcaatcaccaaaagggaaacaaattattcccaaaagaagaagggttttcacgttttgatcaacgcgacccccatttcaaaaagatccctgtcatggaccatgctatcatttggaaagctccttccacaacaaacctgggaagaatcaccccgtattaacaaaatgcaaaagaacttggtttcaccaaaaaaccccattgaagggcggctctgtcataaaacctaaaggcaatagccccgggggttttttcttatgtgcaaagcgggaaaagaagcttttaagacccctt

SEQ ID NO: 434054 - DNA, 111 bp, Oryza sativa
ggggaagggaaaaaacaatccccttccaagcacccgggggaacaagcccacaccaacacacaggaaaaacgacgaggacacaaacaagcaaaataaagcaagcaaagggca

SEQ ID NO: 434055 - DNA, 316 bp, Oryza sativa
gccttagctgatcaaaccgaggaaggcttgagcgtaatgacagccggcgaggggaaggcacggaggtgcaggaacagctacagcggcagctacagcagcaacatgagcaatgatgaagagctgacctgctggacaagagtgagctggacacagagccacctgccagctgagcgcggagggcatgcaacaaggtgcacctaatcaggggcaggcaccaagggcggttagacgcaatcatgggtggatgaggcgcaactgctggggatgctgctgaagaagggcgaagagagacaggacagaataagcggtgtgtgtg

SEQ ID NO: 434056 - DNA, 54 bp, Oryza sativa
gtggtgtaccggagggacggaggaggagggggaggggggaccattaaaaacacc

SEQ ID NO: 434057 - DNA, 187 bp, Oryza sativa
ttttgttacgtcctccaggcgagcgatccccaggtggccgtaattcgccgactggtggcctacacgacgcgctaccccgaggtacactcctctcctgccggagaagcgggcctaggcgaagagcagcgccacggcgaccgtttcggtgtcggattaagtctagagaggatcaaggaaagcaattaga

SEQ ID NO: 434058 - DNA, 240 bp, Oryza sativa
aacagagagtaaaactcgcaaaatgcaccaatgctgtacgcgttcatatggatatgagaattgtaaacacggtgaagagaaacctaaacattccagagcacataaattaaggttcgctaattcaaaaattggattttttaagacataagttgaggttgagggataagacagccagttcttgcctgccataatgccaaaatttcctttctcagattcttttgcttgcaaaattttctaagc

SEQ ID NO: 434059 - DNA, 424 bp, Oryza sativa
ctaaggaaagctgaagataagtctttatacttgcagagactttagggtacaacagatgaaacgaaataaagatgccacagatcataaaaaaaaagtacaataatttgtaaatagatcagaaagtcataaaagaaaaaggcacaactgatggagtaggtacaacatatcgataatacaatggcacattgcaattgcggattatgtctagatcatccattattcttttgctagttcgttgtactcatctatcaccacactggggttaggggaattcttagccttttgaatcatgcttgccagttgtttgatatgagatgtctttgccctagtatcttcaggtgcctggctgctgactgttaaaaatacctgttgcagctttgagaggttttccagaccgtacatatagtccaccattctgaacctc

SEQ ID NO: 434060 - DNA, 143 bp, Oryza sativa
gggagggaaaacataggttattctgataaatggggaattacatagagaggggccatttatttagtttaagtgacagcacaaatttgaaaattcataattatgaaaatggggaaattaaagttacacaaattgaaaaatttatt

SEQ ID NO: 434061 - DNA, 345 bp, Oryza sativa
gtgagtgttgttgagaagaaataccatataggggcgggagattttagctatgaattcgcgaattaaaacatgcctatgatgattgggtggccacggacatgaatgggaagagctgagctcaccatgctagctccgaggaaataaaatgttgccataatggagctgaccaccctagtggtgactgccatcatagacgagacttggagcccggactcccgaggatgaggctgcaggagccagaatgggactaaccagttgccggtggcggactttatgaacagcatatagcggtgctaggcagcagccagagacaatcacgtgcatgtactgtggatatctggcagc

SEQ ID NO: 434062 - DNA, 476 bp, Oryza sativa
actagagaaacctcccaacatgagaagtgataaaccatccatattttgtcaaactgtttacatgctcaatttgctcatgtacgtctgacatgctcgtatttacacgctctaatcctattctgctattcaagcctaagacaaataataacatgcttcaaatccacaatcattttttacccacgagccaactcactgatccggattaatttaccggcatcgcttgatcagcacgtagctcgacgagtacagacaaacgcaagcaaaaccgagtcattcccgctgcacaccatcggccgccgccgccgccgcggcgccgtcagacctcctccggccggctcgcctcttgctgctgccgtcgccgttggcggcgacgtcgtcgggcggcgcgacgtaaacgaaggtgccgacgaggcagtcgtcgtcgagggcgaggagcggctcgagcgccttcacgaccgcggacatgtgggggcggg

SEQ ID NO: 434063 - DNA, 87 bp, Oryza sativa
tggtagttctagatcgcgagcggccgcccggcgtcatttatatacaccttggttttattacacccccaccaaccgagggagagggaa

SEQ ID NO: 434064 - DNA, 267 bp, Oryza sativa
ctggggggagagggaatctgcttgcgtgtgtgtatatatatacccgaattgctttatgaagaacgaacctgaatacagatacataatccattttacataatacattttgcgcattttcaggcgtatacgagtccaaacgaatataaccaatctccaaaaggcctagctaatccacaggacgtgacgtaaccaacgccattcggaacgtgaaaccgaaaaagccacttctccaaaaaattagctatcgaacaccttgagaccgaaccc

SEQ ID NO: 434065 - DNA, 199 bp, Oryza sativa
atctaatactactatcgggtttatgtatatgtatgtatgtactcaatacaccaaccaactcgagcatacaaatggaattgcaggctggcaattatacatgtcatttcttgaatctttttggacaagggtgggaggatggttgggtgtctttttggaacaaccgaggggaaaaaaatccttgcgggaaaaaaaaaggagg

SEQ ID NO: 434066 - DNA, 287 bp, Oryza sativa
aaaaaaccagccaaccacaaccatgattctataccagcagagcgatgcgattcattttctttaatgatttacaacacacgaacagtttcactaattatagcaaaacctgctaagctctatgcttacacaaagcgcgttatgccccttggccccttagcatacaagcccaaacagaattgcaatggaacaaggcaaggaaaaagtgaacacaaatatacaaccaacgagccagtcaatagaaatgagagacctataaccatccctagcaatgtactcctcaatggcct

SEQ ID NO: 434067 - DNA, 279 bp, Oryza sativa
acgcgttcgcaaagtcgaaaccctcccaaaaccctaaaccccccatggggccttccgtccccactgcctccgattgcctagcactccgccggctactctccacggcggacgacgaggcggaggcaccggacggggatcccgccgcctaaaaggcctagcataagggccccaagacggcggtgttagcgggggatgagaaggacgcgcggtgcgctgtaccgacgtttctcggcgctaggaggtgcgaaggtaagggagcgttaaccaccagatgaacaa

SEQ ID NO: 434068 - DNA, 279 bp, Oryza sativa
atgcgtgttcatttgactctaccggttaaatccatgttacaggagcccatgcatagtctctaacccattaaaacgcaaagaaaccatagggcaactgacaaacagagcctcctacaatgtctcgccagggttgccgagggcaaagtctccgattcattcagggccgactcgatcggtgatcccacgaacctacagcaagggagggagacggactcggactcggagcacggaaccggtatattaaggagggtgaaaagggagcttgagagggggtctagc

SEQ ID NO: 434069 - DNA, 322 bp, Oryza sativa
ctttatttcgagcggccgccctgttgttttctccatgggtggtttgacccgtgtgcacagcggcatcggctctgactgggggagcgagcctaagcactggactgcttggagaagacatttggtgcgctatcgcaagcactacaaaggcgttgatgaagagcctgctcaggcaggattacgctccgtgctggaggaaagatcccttcaccctaagatgcctttggttcttagcaataaattggaggaaaaggacaggacagtttggtagccctgcggtatttgattctatccccggaccttgattgagactgtagaccagttc

SEQ ID NO: 434070 - DNA, 459 bp, Oryza sativa
gggttctcattatcatatcggtccaaatctctgaacctggcatttacaaattttaaagaactccattggaagtgctgggggctaccaagcatgcagggcctgttaattggatttacaccggggaaaaccagatgggttaaaattacaaaaaagggaatagttaattttttgggggaaaaattattgggtattatttaccaaaaattagaacctaattggccgaccggtggagaagaattacgacgacgaccacaagggctggcaccaggatgatcgggtccactctgactcgatccgatgagttgcgtgctagggcttgacgacgtcgacgtgttcgctgttgtcggttcgacgtgtggccatcttcccgatcgacgacgcaatgctgcccatgatgctgctggtgctgcccccgacgccgttggggtggctcaccgcccggcgagacctcctgtgcag

SEQ ID NO: 434071 - DNA, 333 bp, Oryza sativa
tttgattccacccacacatcccccccccccgggggccttgtcgtcgagctcgccgggcggccggcgagagggcgtgcgcggcgatggggcagggcgccagctgcgggcggcccagcgaggaggtggacttcttcggcgcggcgcagtcggacgacctcgcccgactcgccgccgacgttcgctcacgcccttctctccttggccgcaccacgctcttcgaccgtctatccgtactgcacatcgacgccggccacgggcaccttcagggggggataatggcggtggacctttgaaggcacccggacgttgttaaccagcccaagcagacttagc

SEQ ID NO: 434072 - DNA, 213 bp, Oryza sativa
agcacaaattctcactgtttgataccacacgctcacacatgaaatttttgtagcttttttttttttttttgcacaaccttctcctcgtttgacgaggaggaaacaaccaagcaaggtaggggataaaagtgaagtgcaaaaaaaaaaacaagtggtgggtgaagaatgaaattacaagaggactttttcttcgcttccaccattcgccccttc

SEQ ID NO: 434073 - DNA, 505 bp, Oryza sativa
  unsure (1)..(505): unsure at all n locations
tgccttgctcggttccaaacgcaaagcaaccaattccatttccgttcccctctcggcgaacagcctcgcctcctcctcctcctcgccgccgacgccgacgccgacgcctccccggcatttggttcgcgcgggtggtgccgtgagatacgtggtggacggggtagggatggagtcggacgcctccacctcgccgcgccggcggagcaccagctgctacagcgacagcggcgattcgtcatgctccgagccgttcagcgagtgcggcagcgacgacctctcgttcacgccggctgccgccgcgggaatccaccggctgctgctgtcgtgcgcggcggaggcgtcggacgggacgatctcgtcgctcgtcgcggagctggagtcgccgtcgtcgtcgctggactcgctacggcgcgccgcgatggagctccggctgctggcgaagcacaacccggacaaccggattcgcatcgcggtggccggngcggtgcgttcgctcgtcgcgctg

SEQ ID NO: 434074 - DNA, 286 bp, Oryza sativa
  unsure (1)..(286): unsure at all n locations
nctccatctcacctcacctcagctcgcgagctccgctcttaccaaccgcagcgcgcgacgaaggggattggattgggttgggttggattgatctgagaatatatatttgctttagttaattttgattcataaccgaatagatgggactttaaggaccttctagatgtaccgattacgttactggatttaataagttccatggagtaattgagattcccaacgagaagattgagcgcattctatattcactttattgaaaaaagagggttgcctaaaggattaacac

SEQ ID NO: 434075 - DNA, 318 bp, Oryza sativa
gagttcaaaatttgtgttgtaagttgtaacacaaatgatacatttacaaggttacatactaaaatactacacacctgaaatagtactacctccatactatcatgcttatttatgttcattgctacatagcgatcatgaaaaatcaaaagcaccatgaagacaccagtcatgcatgatcactttgatcaaggtctggttggtcaagaaatggagtgcctccgatccttgggcggcttcgtccgcaccctgccgccgccgagcacgtccgatcgcaagaacgggttgagccttccgagctttttggacatgctgttcatg

SEQ ID NO: 434076 - DNA, 131 bp, Oryza sativa
  unsure (1)..(131): unsure at all n locations
gnataagctgtggttggttcttgggatcaggttctctgattcttgctgcgcggcctctttcgccatggggaagagtaagaagagcaaggtccgtggcgttggcggcggcgaccacctgatcgacagaagcg

SEQ ID NO: 434077 - DNA, 54 bp, Oryza sativa
tacctcatcgccaccatggtggtgggcagctacctgcggaattccgggatgttc

SEQ ID NO: 434078 - DNA, 87 bp, Oryza sativa
gtagctcacagttcagttctaccacgtacaacagcattatttgagagaggtatattattacaacggatgaggatgtgcttatctagc

SEQ ID NO: 434079 - DNA, 82 bp, Oryza sativa
tcaagagcgcgagcagctcgacatcaggcaggagggattttaaagagagatttcctttaagccacggggaagaagaaataag

SEQ ID NO: 434080 - DNA, 102 bp, Oryza sativa
tacaatccaaaaggcttacaagagaagcaaccatccgtatgaagatggccatggctaccccccccgcatccaccgtttccttctccgcccgcccgcccgcct

SEQ ID NO: 434081 - DNA, 355 bp, Oryza sativa
tacaatccaaaaggcttacaagagaagcaacgcgatcctttagaagatggccatggcgacgtcctccgcatccaccgtcttcttctccgcccgcccgttcttcttgtgcgcttttcttcttttctgtttttcttttccgttctttcccttttttcttcttctctttcttttcttttttttttttcttcttcctttttctccttttttcttttctctctctttttttcttttctcttctcttttctctcttttctttctttcttttctttttttttctctctttctcttcttttcctttcctcctcttttttcttttttctctttttcttcccttcttcatcctctttcttttttc

SEQ ID NO: 434082 - DNA, 125 bp, Oryza sativa
  unsure (1)..(125): unsure at all n locations
ccatanctttcttcttcctcctcgtcttcaggactcaattcgtcttctgatagcttagcttgaccggggtgggagacaatgggaggcccctcttcctcctcatcctccccctgaatcccccttct

SEQ ID NO: 434083 - DNA, 154 bp, Oryza sativa
gaaatgtaaaagaaaatatcagaaaagaatagtaggaaagaaagaatgaacacatgtgtacgctccggtgatcggcgaggcgagccaatgcatttcggagctccggggcgaaggatcagttcgcctttctcggcctctttgctctcttactctt

SEQ ID NO: 434084 - DNA, 381 bp, Oryza sativa
  unsure (1)..(381): unsure at all n locations
cgagatccttctcctccctatctccccaaactctccaaacccgcctcctacccatttcgctcgccgcctccgacgccgcggccgccgccaccgacacccatggagcccgcgccgctcgcctcgctgcaggaggagggtgaggatgtttncctatcatatcccttaaaagaagctgcattaagttgatgattcaagtgctgccacaatactggagcatggagtaacacattggaactttcttttgcaacaagctttaaactatggcgtggcctgttggttatttggccgtcaagctattcctggctttccatttttaaacatatggggcaagcattaaaatttccattccctgtagcattgacagcttttacagttcttcac

SEQ ID NO: 434085 - DNA, 548 bp, Oryza sativa
ctcgttggctagagcgcgagagccagtagccgcagctgcagcaagcagcagcagcagcgaagagcctgagccccagaggaggcgtgcaccgcctccgattggccggcctctcggagagagagagagagagagatcgatcgagtcctattggccgccgcctccgcgccctggctgctcactggtgagcgagcatggagtcgaggccggggggaaccaacctcgtggagccgagggggcagggcgcgctgccgtccggcataccgatccagcagccgtggtggacgacctccgccggggtcggggcggtgtcgcccgccgtcgtggcgccggggagcggtgcggggatcagcctgtcgggcagggatggcggcggcgacgacgcggcagaggagagcagcgatgactcacgaagatcaggggagaccaaaggtattgttccttttcctttttggagtggttgtaggtgctcggcccggttttatctctgcaattcgtgcttggtttgggaacaaattgtgcttgagttgaaaaaggagactaattcagat

SEQ ID NO: 434086 - DNA, 292 bp, Oryza sativa
ggaagctaaaattgcttaaattctgaaaatcatatcgacccgctcacggcattttacaagccagctcggtaaaattaaaatttttgccaaccagtactgcagtactcataaggttctacagtattcataaaagggtcaactaaatgaaaatattgttctccacaagctgcctactgtagaggagcatcaggatccaatcttttctggattgcagctgcagccctaaaattgcccaatctgtactggtacatcatttcctccccgagccgggcctgcttttttattgcttgag

SEQ ID NO: 434087 - DNA, 554 bp, Oryza sativa
  unsure (1)..(554): unsure at all n locations
ttttgttcgcgcccacttgcagccaggccaccgccgccgccgccgaccgaagcagccgacggcgaccaccgccgcggcgagggatcggtgcgtaagcttggcggcgggccgatccgcacgcgggagggagcgccgtagccgcccttccccccaccctctacaccccctcgccggcggcgaacacggcgcgcgatgggaggcgcgcgcgcgcaggtgaacaagccgcacaagacacgctttgccttcaaggcgttgcgccacgcgcacaagatcgataaggtcaggaccgggaagccggagggcagccaccgtgccgncgtcaagggggcccgcgccgcgcgcgttcagcggagcaaggcgatccgtgatcagaaacgtgctgctttgctgaaggagaagcgctcttccgttggatcttcgagtgcgccccgtgtcgtgttctttttggcctttcctcgtcggcagatgtcagatcacttgccaaagaccttttaaccattgcttctggtgatgaagagacaccaacttcttccagctgtgctttgctacatata

SEQ ID NO: 434088 - DNA, 529 bp, Oryza sativa
ttttcgtcacgcactcacgcttcctccggcggcggcaaggcgacggcatcggcggccaaggcgcgggcggcggcggcggcggcgagcaaggtgcaggcgacgtcatcggcaaccaaggcgcgggcggcggcggcggcggaagcgggaggcggaggagtgggagaggcggaagagggggagcaggaggaggaggctgcagatacgagaggaccccgtggatgtgctcggggaggaggtgatggggcggtttgatgtgatttttttcttccttttctttcactttattcttatatcttcttttatattctcttttcctgtactccattttttattttttctatttttttttttttcttctttccttatcaataattacttttctcttattatctcttagtattttctctttttatcttttctctttctatttatcttcctcttatttttatttttcttacctttttttttcaattttgtcttttctttaccttttttttttatttttttatcttatattttttttcttttc

SEQ ID NO: 434089 - DNA, 179 bp, Oryza sativa
accgataaagaacaacatataacttgtgaaccatttatagcacaaaaggttgttgtttaggctgtgaacagacagagcatacggcactattcaaaaggaaacttaccccctcttctcaatagttacaaccattcctcactttattttggaaatactaggaatgagtaacacaataatcc

SEQ ID NO: 434090 - DNA, 282 bp, Oryza sativa
gagggagtttagtaatcaccaccgcaccgacccaaaaaccggggggcattttaaaacacattcaccctaactccccctcacatacactcccaaacaatcctactcttcatacaaaatcacaacactctaacaccattaatacaaagaatgagagagaggaagcagattgcagtgagtgagcgagtgagtgaagcagcttatttcagccttataacaggacaaccaacccggcccggcactagcgctgctgctcgcggtggtgggcgtcggcgcgcaagacta

SEQ ID NO: 434091 - DNA, 338 bp, Oryza sativa
  unsure (1)..(338): unsure at all n locations
tcncctcctcctccgccatggtggagactcggcggagtttaaacgccactaccccttaaaacacccacataacaaaaaataaataataaaactaacataaacataaacaatataaacaataaaaaaaattacaacacaactccaccaaaaataataaaaacaacaaaacataaataacacaaaacaatcaaacaatcaaacaaaaacataaataaaaaaaacactaaaaaaaataaaaaaaaaaaaacaaaaaaatcacaacatacaaaaacaaataaaaaataactaaaaaaaaatatacacaataaacacaaataaaaataacaaaaaaaaaaaca

SEQ ID NO: 434092 - DNA, 490 bp, Oryza sativa
ggcgccggccgctccgctgaccatcttctacggtgggaggatggtcgtcttcgaggacttccccgcggacaaggcggcggaggtgatgcgcatggcctcctccgggatggcggcggcgccggctcagctggagggcgccgcgctcgcggacatgcccatcatgaggaaggcgtcgctgcagcggttcttcgccaagcgcaaggaccgcctcgcggcgaccaccccctacgcccgcccgtcgccggcggagaccaaggcctccgagccggaggagaagaagacgcccacctcatggctggacctcgccgtctccgtctccgacgacgcgcgccgtgacagactcaccatcgcgctgtgatctgcgcggctttgaccaaaaacgacttaagacgcgcgcgcgctctcagcgcgcaagaggatcgatttagtttgctcatacggatggcgacgtaaagttcttaccgctcttgctatacttctttgtaaaatt

SEQ ID NO: 434093 - DNA, 206 bp, Oryza sativa
tacttttttttttcttcggtggtgttgggagtggacaaggtagagtgagtcactattaacccccatgaacagcccagagcacacttctagtaaacatcacaaccctagtcgattcttgcgctgaccccacaattggatataacacaattgagcgtacaaccctcttatacaataacacttgttcatatatacaaccattcaaaaac

SEQ ID NO: 434094 - DNA, 370 bp, Oryza sativa
ctctcttcttcttcctctagtcctctcctgcctgcttcgtctactcctctcccaactccgatcccctcctctgcgagctcccggtggccggacccgtccggcgacgacgatgagccgctcgccggcacggcgccctgctcagatctgaagagctgcgagaatccgaggctgctcttgctggtttagctccggcggcggcggcggcggcggcgatggaggaggaggtggaggcggcaaacaggccgaccgaggagagttgccacagggtgctggccttgctgtggcagcagcaggaccctgcgtggctcaggagcatagcttcagagacaggagaggcctgtgccaagctcaggaagctgcgaattaagag

SEQ ID NO: 434095 - DNA, 112 bp, Oryza sativa
ctcctccgctccttgttccttcgccaagacacaggggaggggcggcgatctccatttggcgaggagagcacagcatgggaggtgaggggaggggatcttggtcatattttac

SEQ ID NO: 434096 - DNA, 460 bp, Oryza sativa
gttggttcgagtttgtttgcaaggcaaaccaacattacctacatagatggcaccgtgataatcatggaattgtttcttctcctttttacatgatcctgtaaatgaaaggaaggtactactgatttattggatgatctttcgtgacttgcggctaaaatgatggtgtagttttaatctctgtattcccgtttcatatcatagaaaaaaagaactaatgtggttaaaaggtgagatattgtatttttgttgaatgtttataatctctaataggtttatttttctggttttgaggcttgtgggcctaatataccttgagacagtggcccatggctgataaccggaaatgagtcctgacttactgctgggacttatcgaagatcctgttttgagctaaatatgatttcatttcaggtgcaagttctgtgattctaaaggaatcagcatctgccttctagaggtg

SEQ ID NO: 434097 - DNA, 482 bp, Oryza sativa
gttatagaattgtggcgtggtcgaagtgctagagatcaaaatctgaaggacactggccgtaaaatgtggagatctgtcaatgaattaatgcttgctcggtgggataaatcaaagcctgctggcgtgtcaaacttaatacttctcaagttcaatgaggcagatgcacatgaatccaccactcttgaccaaataaaggaagaagaacctgaattttacaacatggtttcacgtgttctgaaacaagctgaagcagaatttgctttatgaatgagccattaatcactagatgctccagcttacggtgataccaacgatatcatggacgaagcagttagacttggttttttgaaggacccaattttttatattgctgatcaggaagccagtggaagcttgtgcaagttcatttttcagctgccaaatcattaccatatgctgccatagattgaacttggtaatatttgtggattctgaaaagaata

SEQ ID NO: 434098 - DNA, 123 bp, Oryza sativa
gctgatcgtctgatcggacgggcgcgacagcgtgatggtgaaggtgacggtgccggcgccctcgttgaccgtctggtcgggcaggggctggatgaccggcagcccgatcgcgatgtcgccgat

SEQ ID NO: 434099 - DNA, 268 bp, Oryza sativa
ccctggcctcgtcgctgcccgccctcgacgacgttttcttggagaggagaaatccgtaggctccagaggatttttggtcggctaggttcgcgatcttctggaacagggggggagctactgcgtggattcctaggatcagaatggcaacactgcggggctcgctagctatctgagcttgcaaacacaggttgtgagtggaatctaagctgactgtcctaatggagacacgggttggcaacactaacagtagcaacctctggtcgttgat

SEQ ID NO: 434100 - DNA, 470 bp, Oryza sativa
cgcagctgagctgagctagcaagcgagcgagccgagctcgagctccatttgcttcttctcgtggcggcagcgcctcctccccgtcgccgtcgtctccacgtcgtccgctccgatccgcctcgatcggcgttcgatcgcgtccaccacctcgatctccagaaacctttatataagcagccgcgtccgcattcttgttcgatctatctctccacaccatgccttcgttgctcgactcgccgacgcagatcacgccggcggctgctgccggcgactggagctcgctgtacgcggcggcgcaggcggagactgccgtgaaggcgccgcggcatggggcggtggcggtgaagaaggccgcggcgtatggcggcggcggcgggaggaggatcaagaacctggagatgtgcaccgaggcgctcgggtgcgagaccggcggcgtcgacggcgcggcggacaccgccgccgatgccgtc

SEQ ID NO: 434101 - DNA, 252 bp, Oryza sativa
ggttgttggtttttttttttgtgtgagagggtttttgctcgcttgaatggtaggctcgatttaatgaggagggggccaaaaaaaaggaacccaagggagtcgagggggcaaaagagaaagaagcccgtgggcgaaaggaaggaattgggggaaagggaaccgacgattggcacacacttggggcggaaagagcaaacaaaggtaattgatccgccgggagtgaggagaacaaatccagccaagtacccgggg

SEQ ID NO: 434102 - DNA, 494 bp, Oryza sativa
cagtatcatctgaaagtcctgagtcatcagaggaagataaaaggccttaccaaaggggagatagggtcacgtatgttggatcctcagaagcctttgaagcagatcacaggatcattttagggaaagtacctactaaagatggctcaagaaatgcctatacctttattagtggcaggactttatcaaagggacaacggggagaggtatatgagatcaatggggatcaaagcgcagtcatattggaccctcttgcagagaagctgcatgatggtgatcatgatgcaactagcaaggaggaaaatactgaggcatccatttactgcgttgattctcaggacattgttcatgaccatgatactgagtcagaagattggcatatcgcaattgcagcactttgcgaggctctgccatctctacagccagcaattgtctactctccagacagatgccagtggctatctagagcagttccaaaatcaaatcgcagagagttt

SEQ ID NO: 434103 - DNA, 487 bp, Oryza sativa
attagaggctggcaggccgatgcgatcgaagggcttgcgagatcacggtgcaattagcaaaagcaagcaaaaggcggagtccgaacttcctttttgagtcttgctgtaaacgtctgtcatgcagtaggtccgaacggccacattccctttgtgctcacaacagcaacgtcctaaccacctgctcccagccttcatggctgagtcgacatgcgagtggctgatatgaaggagctgtagcttgtttgtcaccaggttcaagccgaagcagtgcctctaagagcgtgacgccatggctacaaagaagtccagcagcagtgatgcggagtatgactttgccacagtaactggttcgtcagctgatatagaagatgactttgattgggcagacgacgaactaccagccggcgccacacctgcagcagcagctactgcaagtcaggcagccccatcacagccagcatcagtagctttgaaagcagggcccatt

SEQ ID NO: 434104 - DNA, 262 bp, Oryza sativa
catcgccattgattcttcactcgaagcttagctacacagagagaagcatctagtagtagtcgcatgggcaacagcttgcagctgccatgtccgtgccaggaggccacggcggtggccacctcgggagtcaagaagaggaggaagaagtcgccggccaccgccgctgtcaggagcagcaaggcggcggcggcggcgtcgtcgaggcacgtggttccggtgatagacacgccgggggaggaggaggagatgaggatggtgcgct

SEQ ID NO: 434105 - DNA, 463 bp, Oryza sativa
ctcctatctatcccgcacctcgaggccggtgaattcttagcctacgccgcgaccgagcccctgtcgctctatggggctccggtggctgatccagcgcattcttctcgccgctcgcccgccggcgggaggacacggggcactgtcgcggaggggggatgcacatacgaggcgcaacgcgttggactagtggggcataccagaacccttgctccactggacgaggttgcggagcacgcaaggaaccgggccgcatatgcaagtgtgggtgaagtcatatgtgccaacccatcgaggattcttagaggtgacaccatagcaggtggaacacttagaaacttacatgagaggtatcagtcaagctatgtgtgcagctttgcacgcaagatgcgacagatggactcacccagtgaagcctttctgctgcaagaagtatataggagtgatccagagcgagttatacaga

SEQ ID NO: 434106 - DNA, 293 bp, Oryza sativa
aaggtctatcaaccatatagtcttgtttctgaccaccagatcaatgcccaaacatggctgagaaggtatgagcatgactgtgttgggagttttgctttctgagtatttgtcgtactgcactaggcctcttcagcgaagtctgctgaaggctactcagtttgttctagtatgttatgatgggtgtctttttagccctcatgctcttctcctttgtagaatatggctagattgctttttctagaatttgtactgtgttgaattaaccagaaataaattgtctgaattactattcc

SEQ ID NO: 434107 - DNA, 339 bp, Oryza sativa
gtgatctgatcgattcaacgaggtcgacgccttaacgagagagagagagagagagagagagagagagagagagagagagagagagagaggagaagaaaaagaagcttagctcgatcgatcgctccatgctctgtgttgttgcgagatttggagagaagtattgatggttgtgcagaagatgtggatgcccgtggatctccggctgccgtcggggccacaggcggcgcttgggatcctcgcgttcgaggccgcggcggcgatgtcgaagctgctgtcgctgcaccggtcgctgtcggagcaggaggtgtccaggctccggtccgacacgatgcggtcgcc

SEQ ID NO: 434108 - DNA, 370 bp, Oryza sativa
gtgaaaggggacaaacatcatacatgtggacgggccaaatgtttcaataccactatagactggcgtgcataaatacaatcgatcacaacgctgcaggtgaactgctgaataagaggagtgcagaggctatatatggcaggctgacacatgacttcttgagcatgtccagagagggggacttttccaagctggatagtgcgatcctgaggccaataaacagacagtttgagggaggaatctaccatggaaggatccagatgtcattgtactatgccgttaagacaccataacttatgctgctcactccaggtgtaagatgtgagattcaaaagaagatctgattgagcatatacaattaccacgctgagca

SEQ ID NO: 434109 - DNA, 306 bp, Oryza sativa
tttttattttttttttttgtttaattattattataaaaaatataattttttttttttattttattaataatattttttaaaaaaaaaaatattaaaaaaaaagaaaaaaacaagaaacaaataaaaaaaaaaaaaaaaaaaaaaaaaaaagaaaaaaaaagaagaataagaaaaaaaaaggaaaaaaaatgaaacaaaaaaacaaaaacattgacaccagggctctgagcacaaaacgaaaaaaattaaaaacgatcccgatactggacgctgcaccagaaaaaaaaaacgacgaaaggtcggcaa

SEQ ID NO: 434110 - DNA, 453 bp, Oryza sativa
ctctcctctcgctgttcccgacggaggaagggtggcagtggcacgcacgcacgccggcctcgcctcagcctcgcctcctcgcgcgcgcgcggccggacgggaggcacacggtgcgcggccggccggcctcattcgctcacctcgtcattgaactatataaaaaggttgtttgtcatgggtatttcatcgaagtggtttaaatcactggttggtataagaaagcaagaaaaggcccggaatgcagaaaaacaagaaaaggcacaaaatgcagagagctgcgaaacaagcacccctgctgctcagttgcttcacaaacggaaacattctttggatactgaacgtgcaatcttagtagaagaacttgcagtgcacagtgaaccattgactgatgacaccaacacgcagacagtttcagattccatttcttcagacagtacattgcttggagtacat

SEQ ID NO: 434111 - DNA, 492 bp, Oryza sativa
cgcgaagtgccgtcacagcggctgcttccccctctctcttccgcctcggcgagcagcgacaccaccggagcagggcggccggcggcgacgggcggggcccgacggggaggaggtaggcgggcttggatctgcagggctcacgcggcgtaagagcaggggaagccgtatctccggcggcgttcatcgcagcaggaagtcgtcatggcgacggcggagccggtggagccgcagtcgctgaagaagctgagcctcaagtcgctcaagcgctcgcacgacctcttcgcgcccacccactccctcctcttcactcccgatccggagagtaagcaggttcgtgtcggctgcaaggtgaatgcagagtacagcgcggtgaagaacctaccaacagatcagggccgaggacaggtcaagagtgctgcggcaccttcaactgcattggcgcttccaggaacacaagatgtcaaagatgctgataacaaaggcagcagtact

SEQ ID NO: 434112 - DNA, 370 bp, Oryza sativa
ctgttacctctccaattcattctctgctactgtctccaacatatccatgtttccactccacacccatctagggatcttactcctgctcctcttctctcttgcgcaatccatcatgctccgccgcagtgaatgatactctcgcggaggtgcaggtgctcaccgtcggggagacgctcatctcgaggcacgggaagatcgggctcggcttctacaagccggcacatcctgcaggcaatgcgagtgagtctggcaacatcacctctcctggaaggtaccttgctatatggaccaacaagagcccggctagcaccaccgggtgggttgctcatagggagaggccaatcactgatctagagatcaggttaacaca

SEQ ID NO: 434113 - DNA, 484 bp, Oryza sativa
gcgtagtgcttagtctagatgaacagaacaatatgctggacacatggaggcaagtaactaagaatacaatgtttgatgaatggttaaatgaatgggggaagagatcacctacttcttctggcccttcaagcgatgcctcccatccagatgaagatcatttccaggaaaagttcgatcagagtgaacagatgtttaagcctggctggaaggacatctttcgaatgaaccagagtgagcttgaggctgacatacgaaaggtttctcgtgattctactgttgacccaaggaggaaggtttatctaattcaaaatctcatgaccagccgctggatagctgctcagcatagaatcgcccaacctcagtcagaagagcgtaatggatgtacagtattacctggatgatggccttcataccgagatccagagactcagatttttggctgtgagcattacaagaggaaatgcaaacttgctgctgcatgctg

SEQ ID NO: 434114 - DNA, 69 bp, Oryza sativa
atcatgctcttgaggtgggccataggcggaccaccggcttcatgaggaggcactccgtcgaccgccagg

SEQ ID NO: 434115 - DNA, 374 bp, Oryza sativa
ttgtggtattaaaactgatggaggacattacttcagagctgtggctgaatgagtacatcgagattattgtaatcaaggtaaaaataaaaggacgggtccaccagtcatacaatacagacaaccatgaaaccagtgtcccagcccagatcctggagcatcaaggaagagtttttctgcgatctaaagctgttcttaaactctaaaagatgcatcggtcagcaagcctggagttggagcaatgacaaaggcaaacatgccattgttctttgcatatacaattgaaagtgtagagcatttcattgcagtctggtacaaggatcacttgctcagaacataactgtttcgatgcctcatgtttgcaaatgttggatttt

SEQ ID NO: 434116 - DNA, 579 bp, Oryza sativa
  unsure (1)..(579): unsure at all n locations
tggtaccccgctcgcggatatctcgcgggcggcagacccacggcgcgcgctcacgctgccgatgcatagataatgattgccggtaacacactaggcaaggggagtatgttacgtggagagtgggatgtttcaagatgtgatcatgtaacctgccagggattagcttcactcatagatggccacaatgttctccagaagctaaaggctgttgataggatggctgagaggagaccttccctgctgcccacctattccattatgcagtgctacttagaccgagcgtatacttgatggtcgacgaagactcatcctatgttcttctggccattggtggtatgtaataacttggtcgagattggccttagcaaatgcaatggcgttacagatgaaggaatctcttcacttgtaactcagtgcagccacttaagggttattgatctcacatgctgtaacctncttaccaacaatgcccttgattcaatagctgagaactgtagatggttgaacatctccgtttggatcctgttctccataagcgaaaagggactggagcagattgcaacctcctgccccaatcta

SEQ ID NO: 434117 - DNA, 161 bp, Oryza sativa
tttgtgtttggaagtatcaggggaccacagcttttgtttagggaaccaaagcaaaaaagctgagcgacctgcgacccacggaatcacaaggaactctgaatcaatgacgatcaagagatcaacgcaacgtgggattaaaatagactcaagactgctaccat

SEQ ID NO: 434118 - DNA, 408 bp, Oryza sativa
agcgggcgcgcccttttttttttgttatgccataaacagggaaaagcgccctgctttcataacctacagtgactgtcagccgtctaccgcaaatgcaatggcctgcgtgcaaacagggaacacgtcttggggactggagcttgcggggacagactgatgcgcagcaacatcagcgcgggaaaaacatcatttcgcttggttttattggcttatcatgcacacccacacgctctacctttatacctgatcttgcttgatctctgcctgttgaagtccaggtggacgaaggcaggcccacgatgatccacgcagggacagcctcagaacctggagcaggaaaaaaaggggaagccctttatatatagggagcacaaaaatgtggcatggtttcatccagggttcattatc

SEQ ID NO: 434119 - DNA, 223 bp, Oryza sativa
cttcgttgttccagaagcttctggaaagtcggggaaacctacatggcgtacggcgatccggtggacgcgcacggcggaggcgaggcaacaattgaaggtagaggcggaccagtgcctctacctgacgagctgccagctgcacgatctgagcgaggtggagatcccgcccaccctggaggagctcgaactcacggcgaaccgtctcgtcgtcgacgacccccgc

SEQ ID NO: 434120 - DNA, 136 bp, Oryza sativa
tgggtttttgtcattttcggggatatgtttgctgcttttataaacgtgaatggaattctcccacagtatacgaggaaactgcaataccgacacactgggagacatgagcacgaggtaactatggaaatggcacaca

SEQ ID NO: 434121 - DNA, 519 bp, Oryza sativa
ttcaactccggcgagaggaggaggcggcggtggggcgttcgtctgggagagagaccagggccggggggctagggttcggccgttcagagaggcggcggctgaggaggaggaggaggaggaggaggcgatctgccatctctacgatctgagcgaggtggagatcccgcccaccctggaggagcttgaactcacggcgaaccgcctggacgacgttgacccccgcatcggccgccttccgggcctccgcaagctctccttccgccagaacctacttgacgacgccgtcgtcgagcccctttccacctggtccgacatcgatgggctgcaggagttggtctttagagataacaaacttacaacgattcctgatgccaccatctttaaaggccttctggtctttgatgcatctttcaatgagatatattattttaaggggttgtccaaggttttcaagccactgaaggaactctatgtttctaagaatgaagttgaaaagaggaggaacttgaacacttttat

SEQ ID NO: 434122 - DNA, 515 bp, Oryza sativa
gtaggtcgtgctggagaagatgagccgggtgctggcccagggtgtccctgcattcacccctgccaccactgttgatgctgacctaaaggacctcagcctggtgatggaccacaacatgtcggtggccagctttaacgctgcccccgcttacctgcccaagccggcgcctgcaaggtggtgcgtgctacccccgcacccaagaaggagtgaggttgcccccccggcaaagaccgtcgaggaggcccctaaggctgcccctgtgcagcagtacttcccggcacccccccccaacgtggcgggcgcagctgccatctcgattgccatgcagtcggctgcctcgaagctggccggccccctaagggctgctgcaaccacccagatcaaccggctgcgcggaagcgccgggcgcgctggcatgccgatgattgctcccaggtcacccctcgaaaggtcgaacgtcaccgtgaacaggactctggtgcctctatggaggccaagagcacgacgacgatgct

SEQ ID NO: 434123 - DNA, 328 bp, Oryza sativa
tcgtccagcaccgccggttcgtcttcgtcggccaagggggaggggaaggtgagcacgggggatgatctcctggacgccctcctcgaggtgttcccgcagttgaatttcttaacactggtagaagtttgcatggaatataagaatgatatagatggtgctgcggattatattatccataatgtccttccaagtatcccggacaacaatgatgcacatgcaaacgaagggcctgcttcggtggataatgatgcagattcagtgcagtcttacttagcgaacaaatacacagctgagcaggaggaggaggacgaggaagaggcagaggaag

SEQ ID NO: 434124 - DNA, 221 bp, Oryza sativa
acttcagcttaagcaaatctgttttgcgaagcacaccgcctctcgtcaataattaaggcacagtggatgctctgttcagaaatgcgcaacaaccgagctcgaagcccatgtattccttctacgggaccctatagatctgctggggctcttcgtcgccttcgcagtatcctatgctgaatggttgcaatatgacatcacagcctattttcgccatggcacgc

SEQ ID NO: 434125 - DNA, 283 bp, Oryza sativa
ttgttttggcggcaacagggaactacagcttttctcgagggaaccaaaacaaaattgctgtgcgtcctgtgttccacagcaatcacaagcaactctgaatctctgacgatcatgagatcatttgaacgtggcattaaaatagacctaaaaactacataagaaaaagaaatggaaacaaaacgcatgacacctcaaggatggggggctgccaaacggagggtctgctttttacagtgatggatgtatacacaagccttgctggggtaacgcacaaagacccagc

SEQ ID NO: 434126 - DNA, 148 bp, Oryza sativa
aaacgacacaggggaaacttatggaaacatccgccgaactctccggagggttccgcagcggcggcggaattcaaggacacgtgaggcggaccagtgcctcgacctgccacacgggacgaagcacgatctgagcgaggaggagatccca

SEQ ID NO: 434127 - DNA, 132 bp, Oryza sativa
tttgtttttttttttttttttgttttttttttttttttttttttttttttttttttttttttgggggggggcaaaccaaagttttattagaagtgggtaccggcacaaaaggtagcacgcggcccttaaaaa

SEQ ID NO: 434128 - DNA, 394 bp, Oryza sativa
tttggtttttttttttttttggtttttttttttttttttttttttttttttttcaacagcaaacgggggaccagaattaggcaaacaaaaatgttaaagaatgcacaagtggggtagcccgcttaaccgaggggcttcacaaaacaatgttagcatgggcccgcttttgagatgcacaatcaaaaacctccgttttggcgaccaccttcctaagagtcaaacattaagattctggatataaagaaagaccctggaaagccttgtgacaaggggggattcccacagggcaaccctgggaaattttaacgagccccgggccatttttattaaaggaccttaattcccctgggttaacgggggaaaacttaggggggcggttgccccttttggggcc

SEQ ID NO: 434129 - DNA, 513 bp, Oryza sativa
  unsure (1)..(513): unsure at all n locations
gtggaggagggggtgtagatccggcgggcggcagcgatgatgaagtcgctgctgccgcagagccagctgcggcggtcggcggcggcggcttcggcggcgcggtcttcgggaggaggcgcggggtcgggcggcgccgatggggccggctccgacggcggcgcgggcgggcgtgcccccgccacgtccacgttctggttcctcctccacgcgctctgctgcctcgtctcgctcttcctcgggttccgcttctccaggctcctcttcttcctgctcttctccaccaccgcgctctactcctccacctcgtcgtccttctcctccgccgtgctccgcgccacgacgacgacgacgaccaccaccacaaccaccacgaccaccaccaacaccttcaccctctccttccaagccaacccaaacccttccccatctaacctctccaaccacactgccctggacgcggcggnggcggccgggcacacgcagagccacgtggtggtggggcggcatgggata

SEQ ID NO: 434130 - DNA, 214 bp, Oryza sativa
tgggtttttgtacacctttttgggggtttattttttttttatagcatctaaacaaatacgtgcgacgcggggcttgatctcagaggaacccgggacaaaggacactttagctattaccaggccgcgtcacgtattgaagacgtctgcaaaggactgagtgcacaaacctttgggaagggcgcacagggggggctcctacacaccctttagtggg

SEQ ID NO: 434131 - DNA, 176 bp, Oryza sativa
ggaccacgacgtgggcggaggagggaggggcgcggacgcggtcgaggcggagccacgcgcgcgccgacggttcgaaccactctgggtcgagctaaaaccgtccctgccttgctgagctggactccagacacggggacacacccggaacagacctggagcagattagaaaaatgttt

SEQ ID NO: 434132 - DNA, 310 bp, Oryza sativa
  unsure (1)..(310): unsure at all n locations
acattgggggacaaaaaagggccttggaaaggtgcccctcaaacggggggcaaaaatatggccaagggatgggattttgggtactaaaaaccaaaaccagggttgaaccatggggggggggggnggggacccaaaaccaccccctggatccccccagggttttttgggccaaaaacccccccctcgtcataatgatgatccgcacaacaccaacaaatgggggagagataaagaggagggaaggaccttaacaaactccccactggcttcctttccttcttttctcctggggaatcttttttggggccca

SEQ ID NO: 434133 - DNA, 381 bp, Oryza sativa
  unsure (1)..(381): unsure at all n locations
tgggtttttttttttttttggccttcaaatcatttcatttataggggatgcaagataaccgctcaactaggagcaaacatacaccttcagaggaacattaacacaaacttaaaatctttcggacaaacacacttccaaactgaatcctaatacaaagagcctcttggggcanaacacacttccaaacttcacagccgaaactttctttcacccgagctatttaaaagaggattgccaaagaaagcaatcctccacctcttgcatgccatgctctctatttatagggctaagactccctaagacattgtctcaaatacccctagggcgaaaccctaactcagaagggatctggtccacccattcttccttagaaccgaagga

SEQ ID NO: 434134 - DNA, 512 bp, Oryza sativa
gtacaccgtgtgaggaggtcttcgcaacggacttcgcaaggtcaagtgcaagtgccgggttcgcgaacagaatggagaatggaagaggagcttgtatacatgcactggcatgtgcatatgcaagcatggacagtggtgcttcggttgtgcatgcgtgcacatggccgaatgccatgcacgggcgcaagacatgcatgtgtgcatgaggagcttgctagcccattggtgcatgtgagctgtgattggttggcagggaggccaagccaatccagcccttcctcgtggctcaagatgatggatggatcagcaggcagggaggccaggccgagcaggcccaagacaagacgacggcccacggcattggcaccatgcgcgggcaagcgcgggagattgcgcgaggcacgcgcgcgcagtggacacgcggcggcaaggaattcggcgcgtgcgggcgtgggggtccacgctgtttcaagtggctcggaggcggaggttgtactgggacccacgcgcga

SEQ ID NO: 434135 - DNA, 370 bp, Oryza sativa
tgggtttttttttttcacaggagaagttacgacactttattcacaaatgatcagggtatatctgcatacatgcatgcatgcatacatccatattatgctttgcaaatgttctgtaacatactcaactcatagctattatatacaaatcaatagaggaattgtgaaaatgaaaataaaactagagcaattaccaatcagccctcgagctctagtaaaatcttaaatattatgaaaccttaaggactagaatgtaagaattccataggtatacgtataaaaccaatttcctgcagtaattataatttactgactttagtttccatgtaatcaccaaaatgacatcaaagaggaaattaccttttttcacccc

SEQ ID NO: 434136 - DNA, 487 bp, Oryza sativa
cccacgcgtccggatcgatcctgtagccctagccgccaggctcctgcgccctgccgctcctgccgcgtttctaccaccaccggcgccgtctctacgccgccgccgttggtgcagtgtcgccggtcgccaccaccaccgtcgccgctgtgctgctgctccgttttctgctgctgttcggtggattgatttgcagagcagcaggtttggttctgcttcttgatttgtgtttgtctccagcgtggtgaagtcccaatttctcctactgctgtgtgtcctgaccagctacttcgtgagttgctgcagtagccaacaactagggggcagggcaggaagagcagagaagtcaaggaattgggaggaagagaggcaaggtgggggattttattttccaagatttcacaaattgatctcaaagttgatttttctcacagtagggctgaagggtagctccttttagtcctagaaattcaattgcacgtgggatcga

SEQ ID NO: 434137 - DNA, 157 bp, Oryza sativa
cttctccattttttttctctcctctgcttttgaaggaactcgagaagcatcagccgcatctctactactactactactacccttgctctgtctgatccaagtccaggcagcagctagctagcgtggtggtggtggagtcgacggggatggggtggtg

SEQ ID NO: 434138 - DNA, 181 bp, Oryza sativa
  unsure (1)..(181): unsure at all n locations
gattcatatcaccattttatacacaaaagaagaaatggcacatgactaactatacaacttgcaatctatctcctttaaacactatatagatccacgaactaacaaaaagtgaccagaccaacacacagatgntgctggntccaccgatgcaccacatcaccctnctttgctcnntgctaga

SEQ ID NO: 434139 - DNA, 512 bp, Oryza sativa
  unsure (1)..(512): unsure at all n locations
gtcaagggaagctattgcattgctattggatttgtcagacatcccgcaagttcggcagaggattggcaggattaaaggcagtatagtaatgctagtcacattaagaaatgcacatgaaccaggtacccatgatgatgcagagaaattgctgcacatgttgtcatccaatccgcaaaatgtgctcctgatggccgaggctggttattttcgaccattgatacattacctgaaagaaggttctgatatgaacaaggatcctaatggcaactgctatttctaaaatgttcctctctgagccgatgaaatcttcccttggagaagatggtngcagttgagcctctagtggaaatgtttaaatccggaaatcttgaagccaagcactcggccctaggtgccttacttaatctctctagctctctacaaaatgcagaaaatttgataaattctggcataacaggaccactgcttcaacttctattctctgtcacgtcagtgttaatgacccttagaga

SEQ ID NO: 434140 - DNA, 321 bp, Oryza sativa
ggggggcacgagaacacatacaggaaggctcaactgggaactttcaatacataggtttagaacatgtaagacggggaatcaacatagtcccaggggaaaatataagtaaatgctgtatactagggaaataagatggtctatggcatccaggcaggtcccttttaggcaaagcttccaggttggggccatacttttggtcatctggtttgggaaggggctccaataagcaggctccatacttcattggtcttggcattcttttgtcttggctgttgcatttgtcaatttaaggcctaataaccatgtcgctttccataggaa

SEQ ID NO: 434141 - DNA, 339 bp, Oryza sativa
atatacatcgaaacattacatgttactttattaggctcaagacttactattcagcttgctagcgcaaatcgtataacacatatgagacttgcagagctaacgaaggtgaccaaccaacacacgatttgttgtacacgatgcacaatcacccattgatcgaatccatggatatgtggacagcctcacaagcaattatgccaccaaagaccatggcttgaaccttaggttctttcttggaagcgagacatgctaaaggtaggcccacagttacatttgttgagtacttgaagtgagggagcaaccgggcacagacgtcattcaggtggttcatcaactggc

SEQ ID NO: 434142 - DNA, 88 bp, Oryza sativa
tggttttttttttttattggggttagttatttcttctgttttaggtttacttttttttggtgtaaggaggcccgggaaataaaaccta

SEQ ID NO: 434143 - DNA, 512 bp, Oryza sativa
  unsure (1)..(512): unsure at all n locations
ctggggtttgatgggttgtttcaaagaagcaaaagttgcttgagcacctctgatgatgaggataactgcaataagaaactttatggttgccttggtgcattccgtcggctacttcagaggtctcagtatcaagttcaatatggacgtcctattcagctacttatcctagcaattgttgttttactagtcttaatttatgccatgaaggcaattttgtgactgttttttgatcaactagtgtctcacgattgacttgcacttcttcatcagcagtctgtaaggtgtatgacaattcatagctgatgaaactaaaaggaagggggnattttgtttctctagctagttgaatgccagtgacagtgaacactgttttgtatgtttcgaagggattctatcataactcgcaagattgtcttggctatgaagaaacaacctgacatgggaagcacaacatttaccaacccaatatagcaaaatcagtgaaggattgattgtttggaccggcagatcat

SEQ ID NO: 434144 - DNA, 302 bp, Oryza sativa
cattattgtttgtttttttgggaaggggaaaaccccaagagcacaacaggggggggggaaaaggtaggcccaagacaaggtaaaccccaaaggaaaaaaggggggtttaaaccaaaaggggcccccaggggggatatggaaaaaacggcgaaagcaaacggggccaagggggggcccaaaacttgacgaatttgaaaagggtggaaattctaaagggggaccccggaaccaccatttggagggggtgtttttcttttggggggaggcccgggccacactgggacccgggggggccctattct

SEQ ID NO: 434145 - DNA, 263 bp, Oryza sativa
cgggcgccctcttttttttgggttttttaaacaaatgggtttaccactcatattttggccggagggggggaaactaataccttacaaaaaggcgatctgttttcaaagccacatacagagcgagctggcggataccagggtcacaaatagaaatgaatgaccacgaatttggccattacagggcatctaagagactcccccacatgacgtctggtacgcggaccgccaactcacgagataacagtgatttttattgaacgaag

SEQ ID NO: 434146 - DNA, 352 bp, Oryza sativa
agaaatggggaaacacctttagattgattagtttttataggaaaacagaaagacagttttttttacactagcagggttttgggagtacaacagacaaaacaatcaaacaaagatgccacagctcaagaaaagaacagtacaagaatttgtaaatagatcagaaaatcataaaataaaaagaccaccaatggagtaggtacaacacatcggcaacacactgcctcactgcaattttgcagattattactaggtagtctattgttcttttgataattcattgtactcgtctatcaccacaataatgtcgggggcattatcctttcgaatattgcttgcttgtcctttgatctga

SEQ ID NO: 434147 - DNA, 420 bp, Oryza sativa
tgctagacagcaaatcttggactaggcttgcagtgtggcaccttagggtttttctatttagaaaaggcttagccggccatttccagaccactcaacatgtaatgagtgtacgcgtgttagagtttaaataatcacttacaaaaacaaataattttaaaaataataactgcttttgcagcggacacgtggtgctcgacacgcgtcttgtatttgtgagctacgaattcgagttggatgactcagaatttacacagcaatctggacatagtagtgacgttaatgttattaaagtcattaataatactgcttcgcagaatgttgaatttttggatcatgctggattttataagtagatccttcaggtgaattagatgacacatttaaacttcagatagggatgatttaccactgatgagtttt

SEQ ID NO: 434148 - DNA, 314 bp, Oryza sativa
tgggttttttattttttttggtttttccctttttttttatatatggttctatgactatacttttcaatttggattctatcttctttaaacactttttaatccacgaaccaacaaaagggacaaaccaccccaaaatgggggacaagggggacaaccaccccaagaaaaggaaaaaagcgaggtgaacagccacaacaaaaaaagtggagccggacaaaaccaccccatccaaacgcacacggccgcccggggggcaccccccaaatggggccacacccacctttgggggcccccagcgcgggccgccacagggg

SEQ ID NO: 434149 - DNA, 369 bp, Oryza sativa
gacagaattgggactgccattacatttgaacaagagatagacacagtgttttctttgacagaacacccgtattatggcggctacggatttaacacgtgcacacgggagcgggcgttttccgaaccccaaacggtataccggggggaacgagctagaagtgtgtctctctgttagggggcatgcacagtggtacaggggtctgctcttagcatacccacaccgggtaggctaatgccttgatgggggcggattcgcttctgtggaggcacataccgcctggacctcctggtgctcttgcacggccgcggtgacgctaacgacaaggttgtagtgagcccccctgggcatgctggaggcgacgtccttggg

SEQ ID NO: 434150 - DNA, 408 bp, Oryza sativa
gtgggcgatgcgggcggcgaaacaagccgcgtcgcccccgtccctctcctcccctcccacgcctcgccgccgccggcaaagctgggcggctgcaaggacggcggcggcagggctctctctctccaccgctcgcagtggagttggacggggcgccggcaaggcgccgacgacgaggaagaaccgacgacggcgaccagatccggcgccgggatgcacggatccggtacccccatggccggatctgctgctccgggcggcggcgagccgggtcggcaagtcgcagcatcgcggcgtggagggtggtgccttccgcggccggagggccgcgtcgacggccggagggcggcctcggtggcgttggaattggcagcggggcggaggacgcggcggcatgaccgtggctgcggc

SEQ ID NO: 434151 - DNA, 368 bp, Oryza sativa
tttggttttcaatggaaggatagtaattcattcatatcagataattaagaatacaaattttacatataactaccaacaaaagtacataatccaccacacacttaaatgacaagcaacttcagcatgagacacacaatggccaaacaccttttcaccatgcaaagccatccatccacccatatgaatgcacctgcatgcaactagcttaattagctagctaattaagcacactgatcaatgagagcgatcattcatgatcatggtgatctcgccgagccgacgcctcggtgaccttcacgacgtgctcctccacctggatctcgtcgtagacgaccaccgccccggccgccaccgtctccgacacgacc

SEQ ID NO: 434152 - DNA, 66 bp, Oryza sativa
acagcgtgaactccgacacggtgagctcatacggcactatggccttgtgtccaaccgggaaggaca

SEQ ID NO: 434153 - DNA, 181 bp, Oryza sativa
ctcttttcgcttcgccttctactctccttgtccttgacctcccctgctccgccgcgccgcagagcgagcggccatgaccaaggtgcaccccaacgtcgcggtggtggcgccggcggtggtggaggaggagaagggggaggttgtgcttctatctgttacacgaaagaagatagtgtttaag

SEQ ID NO: 434154 - DNA, 365 bp, Oryza sativa
ttgtttttttttttttttttttttttttttttttttttttttttttttttttttttttttaaaacaaagttcccacgccataaatggggggcaaagggcccccaacgcagtttttgaattcaaaaagactggccaaacagcccaagggtttcatcatagcaggaaaggtttttaacccgccacagaaaagggaccctcaggcaaaaagaaaactggagggggggaccactagcaaaatccgggcttaggaaacccccctgattttggggccagcacccgttccccctgccggggggggatcgcccttgaccatgccgccggccatgtgcgggccagggccctggtacattttggggaagaagggg

SEQ ID NO: 434155 - DNA, 386 bp, Oryza sativa
gaggggccgcctttttttttttgttttgtaaaaaactcaatgaaacaacttgttaatctgagtaccatgaattccaggatacacaatgtgctttaagatgtacaattatggtgatacaaatgtgctttcaagctgtacaattacgatgtgctagtattcacatgctatacacaacttgggtatgcgcttcctcaatttatctcttctggaagttgaatatcttgattgagagcccgaaaaggaaggcgaagaggacggcaaatgagaccaccatcacggtaaccacccacaagaagtcacgatggtaaccaaagtagctctcgacaaagttagatattcggacaccattatcaaacgtgttagttacatccccgaactgggaagtt

SEQ ID NO: 434156 - DNA, 362 bp, Oryza sativa
  unsure (1)..(362): unsure at all n locations
cagtaataaagatataacaagctttcacttgcataatgtttttccttttttttgcaagtataatagtttttatgtactgtacatacatacgtcaaatgacaagggaaaatctttttctcccgctgacaccccctgactaaccgaagagaattgttggtcctgctttctacaanaaatttacataatttaagggcttctttggaagaagaacgtcatatctgcgtcgtctcacgagggaggggctcgcgacgngcgcagttcccgtacgccatgctccggccgacgtccaccggcgccgaggggtcgacgccgagctcccgggcgcggttcacgtactccttcttcacgttccccctctgcaa

SEQ ID NO: 434157 - DNA, 464 bp, Oryza sativa
  unsure (1)..(464): unsure at all n locations
ctccctcgtttccatcctcccgaatcttcttcttctcttcttgcggtgactgagaagaaaaaaaaaagaaagagaagaaaaattgctacgagattccttcttcgtcgccgccgctgctgctgcgttatccccaaggtgagagctttttgtgctttgagcctttggatggtgtggtttggtgggggcgctgatggttggggacctggngtggtggtgtttgcccgtgcacaattcgttcccttcttcttttttttttttttgttgttggatgctcgtgtaggctgtggtttctttgcttgctgacttacagtggatttttggtggggttggnggggtgcgattctgagggtgatcggcctcaaaggtggacgctttggctggattggttcttgggttgagtgaatttcctctttgattttgctgcagttggtgtgtggtcatgccttgcctggtggttgattgga

SEQ ID NO: 434158 - DNA, 175 bp, Oryza sativa
  unsure (1)..(175): unsure at all n locations
cttttctccctttcggtgaaggcnngtggcgccttttcttcattagccttcacgcctgccaaggtatcctcagccttcggttgttaagttcgtttcgcctccaagcttgggccctgtgtgccacgaaaccccccccgtttcaggccccgacccgctgcggccttatgccggtaaa

SEQ ID NO: 434159 - DNA, 341 bp, Oryza sativa
cgtttcgcgtccgttgttgtcgtcccggtgaggtaagttcaagaggcagccctgtgaagctgcaatggctactacagctcatcctgccaagatgggagatacgaaggcccaagccttgacaggaggcaagtgctgctaagtctgggacagtctgaaacacgaccctgaagatccgcccatgcgaatcatcatatggccccacgacctgcaatgattttaaaggcgcatggtgccctcaagagatttatccaggttggtacactctgagcctgggcctgttcttcttgtataaccgctaccactcaatgctgctggggaggaaatcgaagacgacagcactt

SEQ ID NO: 434160 - DNA, 62 bp, Oryza sativa
tttggggtttttttatattttgggtttatataattctttagggagcaaaatcaatacatcaa

SEQ ID NO: 434161 - DNA, 385 bp, Oryza sativa
  unsure (1)..(385): unsure at all n locations
ttgtttttttttttttttttttttttttttttttttttttttttttttttttttttttttttttttttttttttccaaacagggggggccctggaaaaaaataagcaagatttagctggcggggggacctgatccggacccccaggcactccaggcaagcaggggccaattaaattagaaagcatggggnggccatccctacacacaactaaatatgcggggggggtgaaaaccaaaaacaacagaggggaaagcaccacacaacactggagttacattcatgccaccctttaaataaaacggcttgggggaggggacaatataaatacgggggggggctgcatgcaaaaataggggccggggggcgacgaccacgccgaggggg

SEQ ID NO: 434162 - DNA, 243 bp, Oryza sativa
tggtttttttaccaaaccgggctatttacattggtcaaaccagcaggactacgcgctggagaatattggttgcatgggatacatacaaacccatgtgaggctcagaggcatacactatggatatcccaaagcgaccgaacacctaagacacaccagaatctggtccaatagatcacgatcaacaatgcctatagggccagaggaaaatcaacgaagacgcttcatgcccgtttatgtgcgctg

SEQ ID NO: 434163 - DNA, 398 bp, Oryza sativa
  unsure (1)..(398): unsure at all n locations
ttttgttaacatccaagaacagaagaacttgttcgttctattgttattatgtgtacgataatagccagtgactctcagcacacacacatcatcatctggcaatctaaaactgtgttatttgttgcagtcttgcagtcgcatgcactcgatcactttggcgatgcanggcactgccactcccagctgtttcactctcagttttaagttctccagcacattcactttggcaagctgacagagctgacacaccctgagctcctgagagactgtatcacgagctgtcagtccgttgtcggggtggaggtcgcggtgtaagaagcattggtgacagattcagacgactgcccttcctcgtacacgatttctgaatcaggcccaggctgcatctcctccattct

SEQ ID NO: 434164 - DNA, 410 bp, Oryza sativa
gtttttggctggtgcggttagcggctagggttttggttgtttcgtctgatcgatcctacccgattttgcggcggcggcggagaattggtgtgaagatctgatatggctggcggccgctgcggcggaggaaggggggagggctcggcggcatcatcctggacccggcgatgatgtccgtcccgctcgacgaccacatggtccaccgcggccacggtgtgttcgacaccgccatgatcctcgacggccacctctacgagctcgacccgcacctcgaccgcttcctccgctccgccgccaagggccggatcggcaccccgttcccgcgcgacacgctttcgagaattctcgtccagatgacggcggcgtccaactgccggagggggtccatccgctactggctcagcgccggc

SEQ ID NO: 434165 - DNA, 360 bp, Oryza sativa
gaacagggtgcttgtttatgaaagttggaagtgccaaattgatcaattgcccaaaccaaaaacgatcagagcttatgttcaatcaatttcctaacaacacacaacttaggatgggattctgaaattttgtatgaactcatcaccattatttgatgtgctgaatactagagattacgaccattctacccatctatacacctgacattctttataacgctcttaatgagcatgctaaaatacatgatcgccacgacatgggtacatcagcagaagccttatttcttcgttttacaaggccgtcaggttgtgcttggagacccctcggtctttacttggggctcagtggttactctgactgat

SEQ ID NO: 434166 - DNA, 322 bp, Oryza sativa
cgcgcgcgcgagcgtggggactctttagcgggcgcgctctttttttttggtttttgcgaggatccggtgcatagttgacgtgattaccggaggagacctatatagtatagtacagacgtacagagagataacacctaacataacttaattgctgataataggaactatatgctgtcttgcctttgacgctgggcataagaggctaaacaccgaaagagagctgcatactattggttcaccttggattgaagtcacggtcactaaattacagattacaatcattaccgacgaagtagtaatagaaccaaagctgtagtattat

SEQ ID NO: 434167 - DNA, 184 bp, Oryza sativa
tttggtttttgaacaaccagggcgggaaagtgactatgggagaactatcaacatttaactcgcattctttttacagaggcgaaggattacaagatcacaccttatatgttgagtgattggaagcaaacactctgcatgcctatgtgggacgatcatggctaagaagcgcatctgctccaaaaga

SEQ ID NO: 434168 - DNA, 316 bp, Oryza sativa
ttgtttttttacacaaagaggtaaataggtgtgtattaacatacacaaaaatatcagggtacaagccagtgcagtacatagcaaaccttcatctcaaacaaaaaaaaaagataacataggatacctatcaacatggcaatgggaatatacatgctaatctaaaatatggtaaactcagcactgctataattacaacaaataagcactctgcttactattcaaaacatattaaaagagatagggttaaacaatggctatgaagattgttgtattacaccgttatggatataaagttctggcttcaccaatacaatcc

SEQ ID NO: 434169 - DNA, 258 bp, Oryza sativa
tttggttttttttttttttgggtttttttttctttgtgttttttaaacacagccttgggcagaaggaaattaagtaacaagaacagtaattcatgtcagtaaacgggccagagggacaaaagcatgacacattaacaaacctcatgttgtgaccaggcttccactacaattcaaaaggttggaagtttaagaaccacatgcattattgatacacagtctgagagggtggaaggtaaattcatgagccagcccccatag

SEQ ID NO: 434170 - DNA, 275 bp, Oryza sativa
cggcatgcgcacgcgcgcgtgcgcgggtcctctttagcgggcgcgccctttttttttgttttttttttttttttttttttttttttttgaaaaagaaaatgatgtccacagcgtcaaataccacacatttcactggggggaagcactcagtttaaacccattctttgaaggcctcggcagaactttattgggtttggaacaaccaggcaatttttgctggcaaagcccccaggaaactgaactatagtttactccactcacccaaggggcgcaca

SEQ ID NO: 434171 - DNA, 280 bp, Oryza sativa
agagagagacggggccggtggcggtggcatgttcctgcggaccctcctgatcggtgaaagaaggatggcgttctccggaggaaactgccgctggaaacacctgtgcccgtgcggcagccggtactgaggacgcaagatgttccctgtgatggatgaggaggggttcactacccacactgtcatcatggctgagataccttccaagggtcatgcccacggagcttgaggcccggaccccccccttaccgggatcagacaacgggtgcaagcaggacttcaa

SEQ ID NO: 434172 - DNA, 406 bp, Oryza sativa
accaatatatatgtatttacgtatgtatgtatgtgtttcttatgtttagttacagagatggaaagaacattaataagtatacaccaagaccaaaaactgacaaaaacaaaagatgtagagggggcaagcatcagagagaacaacaaaatgtgtgactaaacaatgtataacatacacttgctcctatctttctttcctgtatacaaattatccttaaccccccaacaataatgcctaaactaaaggaattaatctagctaaattaagaatcatcttggaaaaaaggagagttctctcatattaatatttctccccatcccatgcatgcatatgcatccatcaccttcaaggctagggaccattttgcaaataaatctctctctctagagatctctgatgcttgatc

SEQ ID NO: 434173 - DNA, 83 bp, Oryza sativa
gggtcttacgcgcccgttttaatctcaagtgaacttggggggatctagtagagacactagccgtggtcaacaaaaatatcggg

SEQ ID NO: 434174 - DNA, 486 bp, Oryza sativa
tttttgggtttttatcacttgaatcctgatgatgccactgctccattgccctttgcttatacagtgctttggcacacaggagccttttcttccatgtgcctctgtaattaaacccccccaaacaaatgaaattaaccattacacataattcagagtatcgtttcagtctctgcctaatacttcaaaacaggtcttgcgttacttttgatgaagcccaacatcgtcttcgtacaagagcttttctacgccaagagtacctgcctgatgctttcgcatgagcaggatgcagtttagtctcggcctgtcgtttaatgcccttgacctgctttctgaagatccctttgatgtagctcaacagccaagatccaacatgtcagcaggggttggtttgcttgtccatgtttggcacgatgttttgcaactggatgtggagcacgctgatccttgtcctcctcacccgctgggagatgctgagggggtgcctgg

SEQ ID NO: 434175 - DNA, 459 bp, Oryza sativa
tttttgtttttttcttgttttgataagaagtccatttaagttagaaagcatcaagtttaatttgttcaagcacaaggagtaaacctgcatcgcatcacatatgcagatatgctgattaggggttacataccacgcataaaggacacagacacaggccctctagtaggctagttcacgatcattgatcatactgcagctgtaattcagtaactacatggggtcaaacatttaggccaaggaagtgaagaaaccgccggcgacggagagaacgaaccggttgccggacacgcgatgcccagatccgtacgcgtccccggcggcgccgctgctgaatccaccgcccccgttcccccagaagcgcgcgtagcacttgccgaggtacacctcgccggccgtggcgtagccgcagccggccttgagctggccggcggcggccgagacgcattcggagcaggcctt

SEQ ID NO: 434176 - DNA, 515 bp, Oryza sativa
ttttgtttaaacaggaagcccacctaggtaactcaaatgaagtcaatcattctccaactagttacagcatatacataccacactgtgaacgcactcctcccctcccctcccctctctcaaaacagcatatacttataatggaaacatggcccttcgccacagttagacaatcacattcactacctctagtggaagacacacagaattaccattcatgggttatacattcaactattcaagggtgactgcccacagcatacccctccttcagccacattgccactcagcaagaaatcatcagattgatcctcagaaaacaaccccacaagtaatacttgaactatatcaatggagaatacatgcaattacaagctatccctgccaggagttaattttttatttttggaagatccaacatcgctactgggggttattagaagatggtctaaattatccgcatcacttccggcaacaatggatgcattagactccatatcatcatcaggaaactcggg

SEQ ID NO: 434177 - DNA, 454 bp, Oryza sativa
gacattatcagccaagggtttatttgatgctgggacatcatcaacaggaggccacatgcattcatggtagataggtaaacactaatcctatatgacacatacttttggccggtggccacttgatcaactcaactggtcacaggtgcaacactacgtaccaatcctaattaattcactcggcacctgcaaattctgcatgcaaattactacaggctacggcagtaatctgatgctgaattaattccttatcccctttctggcgaaacatggggaccactgcatcttgcatgctctagctacaacctcatttttggcactacagctagcttgcacattgcatgcccagttcatcatcatcaatcacactttgcgtctttggtttgcaattcgatccccttctgcatgaactactactgtcgatcgatcgtcgatcgatagttaatttgattggatg

SEQ ID NO: 434178 - DNA, 452 bp, Oryza sativa
ttttgggttttttttttttttttttttttttttttttttttttaaaaagaaaacacccaatcacagaagctacagagtccagacattatggggacctcgccacagggactacatcacaaattcacaatgggaacaaaacaaatcctccatataaaggaccggagctaacaaaatctctacgaagctcaaaatcgaaaagagggcatggatgacagggcccacaaaatgagacgcggggccatagagagggctacactttgaactccagaagcagcccttccttttggagggccttgaccttggccaccgggggctgagctatggcgaacttgggaatgaccgggatgttgttccgcgaggcgtccttgaggaaaagcccggcgaccttgccggcctctgtccagcgcaagcccaacttgggcttggcccccgggggggcgttggcaccaaac

SEQ ID NO: 434179 - DNA, 457 bp, Oryza sativa
ggcgagtagtcggccccggtacaagtgctacagccaccctccctcgccgtcgcgcggggacgcgacggccgccgccgccgccaccgatgacgacgagctcttccctggcaccgatacggacacggacaccaacaccgatgacgactcgctcttcagctcggcggcggggtccgagcagcagaacgtcgccgccaccccgaggaggctgaccaggctgaaccatttcactgccgccgccgacgccgccgccgccatggacgactccggcgacgagcatcagcagcggacgcttctcaagacactgagcaggtcggacagggtcggcctggcatggccggagcagccgctggacctgctcgccaaggacgccacggggaccgggagcaccaccatgccattggcaagatcctttcgaacctacaacttatttaaggcgtgttggggcggcggccgccgc

SEQ ID NO: 434180 - DNA, 454 bp, Oryza sativa
ggaccaaactcacaagtttatttcaacatacttccatttatgatcctttccaatagaacactggcgccagccattatttcatcacaattccttaccactttttggttaccatacacttggggggatagccagtaagggggggttaaaagggcttccataaaatggaatttttcccttaaggtacctaccttttgggggggaaaaaaaaaggggaaaagaatacccaaccctaaaattgaactttaccgggggggcttttttgggcttcctgggggctatttactaaaaactgggggcttggtttggctaaacttggacctcccaaattcccttggaggcaccacccaagaaaggccccggggtcccaaaggctactttttttttggcattttttaggggataacaatcttttaggtggcccgggttcaaaatttaagggaaaaaaaattttcct

SEQ ID NO: 434181 - DNA, 442 bp, Oryza sativa
atgggtctgtgcgtgtatcagttgatcaattagataacaccaacattgcaactttacatgatctgcagccggtaaggtgatcaaatcgtctgaaacttttttttttttggctacctatggatgtatctttctctgaacccacacagttcaagcaaagcacatatcacccaaacctcaaatgaacaatcatatacacaatttcacaaacccaatctctgacacgccaagaaaaacggaggccactgcagcaaactcactcactctatacagggaacaaactgtgaagattctactggatcagctgccattgccggcggtgattgagcgaatgctaggagatgctgagcacggtggtggctctagctcttgacgggtccaagctgacgcacttgaccaatccacagatcatgttcacctcctgatctttcaccatgctcttgct

SEQ ID NO: 434182 - DNA, 500 bp, Oryza sativa
ctgcaaaatgagtcatcgattcacattggcctttgcttaagcagcgccctaaatcagaacatgctcgaggagttgcaagagggttgctttggatggcacggcagtacggaactgctactgcctactgggcggcatgacgcaccttttttttttttacctatgtacacgacctatgtacacgaaagttaggagtacaacttggatctcctggaaggtgcagatcatctggtgtgcgccgctctcagaagagaagcaggcagagcaccgcgaacacgacaaggaagaaccatatctggtgcagggacctctccacctccatgtgctgccgtctcagcctggggctcatgtggtaagggctcgtgtagtacgcgctcgccgccgccgtcgccggcgactgcccgcgcgacacccacgggagcaccgccagggccatccctccgagcatccctccggtcgttgtcgtcgtcgagtggaacatgcccacgccgcccacggcagca

SEQ ID NO: 434183 - DNA, 496 bp, Oryza sativa
ggaatgttaataatcatttctagatgattagagttccttcaagtatgttagagggcaaatacagccaccgttatcattgaaggaaaggcgccctgcgccttgtgacctgaacttttcgcagcctaagaagaggcccttctcagggacatgttcagtacatccatttttggcatgccaatgccccatcgatgatttcttttgaccggtgatctacacaggcgctttcacaaacacaatcctcaaaatccaacactttgccagttgttactaacaagcaacgccgttcctgcccatgtgatcaccagcagaaaccatttgggccccgacggccatatcttcactttcactatctgatgcatcgtcaagtctggctatagcatcgagtaatgactgctcctggtcttgcaaaagtttcttggccttttcgatctcacccatatttggattggacaaaaccctctccacctctatgacaacacttcgagtgtaggtacat

SEQ ID NO: 434184 - DNA, 225 bp, Oryza sativa
attgagacgttagaaaaaaaacaagtaggactaagaaaggaaaaaaaacaaaacactgaaaaaacgaaatccgggcggagcaacacaaaaaaaaccggcgggcggagagagcagaacagccggggagacaaataagaccgccggtttacggcaacggaggcgacaccacggggcgcactgcagtcgtgcagcctacggcgccgccggccccggggcggccgccaa

SEQ ID NO: 434185 - DNA, 413 bp, Oryza sativa
tcttcccccctcgaatcccgataagcagaggcggaattctccaccgcggcagcaacctgcaacccccagttcgattcggctgcgaggtgaggtcgtccgattcccaattcggtcggaatcacgccgaattttttgtctctactagggtttggtttcggtctgaggatttctagtttggtggagaatcgaggtccgatcccccaatcgggtcggaatcacgcccaatttttgtctctatagggtttggtttcggtccgaggatttctagtttggtggagaattacctctgggattttgcggattcgacgtcggttgctagggtttgtgaggggagcgattcatggctcttgagagccacggagcgccctgttcactacgaaggccataggaagctggcccacaaggttggagcg

SEQ ID NO: 434186 - DNA, 497 bp, Oryza sativa
gaacaggaaacatcacgtaaaagttctttgctagccggtttgcaaggaagggaaacgacattggaggggacaatatatggatatttacacatgaaaagatccaacaaagaagtcataatcgcactagactattattattacacactaagggattattattattacagcataaaaacactctcactaaacttgagcagattgttgctctgcttctactagagccactcacctgttaacgcaggagagaattcagcttctgggttatactatgcgaacttctccctttaagcgtttgatccgcttcaattggatctccagatctgtctccctgtgcccacgtgaatgccgcatctcatggactttaaatgtgctgtccacatcatctttgagggctgattcaaggtcttctgttagaagcgccggtaaatttgaccacaatcggcctgaggagaacgcaattgaacttatgctctgtggcgacaagaaaatgctctttg

SEQ ID NO: 434187 - DNA, 474 bp, Oryza sativa
gtcattcacaaaaattgttaaacttttggataggattttttaaattcttgaaaagatcctttttcaatttttcctcctttaacaacgttttcatctgaccctttgccaactaggatcgcagggatattctcaatagctatatgatttgtcaatccatctaaccactttgcttgatcgtttccgccgaaaatgaagattttctttctggtttgtgatggaaccattggctgaaccatcatccatatcgttgaaaatagtccgggagcgccaacgagaagaagaacacgaactctttccacgtacacctcatccatgatttttgcgagaggtcgaaaaattgagatcgcattatatgctcttgaataccaacctggaacaccaccatctctcaaatcagtcaattctacgattccaagatctaaaacgtttttttctatagcaatcttgaaaacccgttctagtaaatctaaaacc

SEQ ID NO: 434188 - DNA, 492 bp, Oryza sativa
ttttggtttttttttttttttttttttttttttttttttttttttttgtttttttttttttttttttttttttttttaaggggccctttggaaagcaaaaaaaaggcccaaattcaaactaattcggccctccggaccccaaaaatggggggggatttcgaaaaagaaacaaaccgtctaagttaacccaagtccgggggaggacccggacccctaccaggggggggcccccccggagcgcttttccccctcggcggggacccgggcccccccgccaaggccccctggcccgggggggggccccgggggggccccccaaccaaggggaacggggggctcggggggcccctctccatgttggggcgggaaaaagcccccccggggcacattcttgggccgggccggaagggcaagaaccacaggagccccccccgggacatccccgggcccccgggaaacctctccggccaggacccccgggggggggggccc

SEQ ID NO: 434189 - DNA, 341 bp, Oryza sativa
aagggagggaaatttttttggggggcaggggggaaaataaaaaaaaagaaaccctaaggggggtaggtaggtagtttgaaaaaaaaaaagggcttggatgcaaagtggggggttaaaaaaagggaaaaggagggggaccgggagctctgtgaaaaggggaaaaaatgggggggaaaaaattttttttaattgaaagtggaaaaagaaaaaccccaattggggccaaaatttaagggggggaaacccaaaatggggttttccgccccaaattttaaaccttgggaaagaaaaacaaaacccgggggggtggaaacgcaaagaaagggggaacggggccgggg

SEQ ID NO: 434190 - DNA, 355 bp, Oryza sativa
tttttgggttttttttttttttacataaggagcagcagcttaccagcgaccggctgtggacgacgacggctgtggcgacgaccggcgacgatcggcgacagcggcgacgtccggtgatggcggtgcccaaaacagataaagacggctagggctgggatcgatccctttttttgcccccttttttttttactggtggttatatagagtctagaaaggagaacaacgggccaaatcgattcaatccccgagacttcgtttggactccgattactataaacttatagtctattttgcattagtcggcaagccctaaataaaaaaaaaaaaaaaacaaaaaacggggtggccgctcccg

SEQ ID NO: 434191 - DNA, 451 bp, Oryza sativa
ttttgtttttttttttttttttttttttaaattgctgttgggcactattacttttttttcgccgggaaggccgaaggaggccatccaaatatattaagaaggagtaaaagttacaagaaaaaaaaaacatcacaatgcaccaaggggcatgaccttacagcacgcactaccacccaagcacaaaccgttgagggtgaagcctagcaccaaatgacccccgctaagaatggccgaacgccgttaggcctacggcaaccccacagagacaagactccgaaaacgaagccaccacgggggtcacgacatccaggatgccgccatcgcccatttaaaaaagatggggttttcacccagagaagcttatcgagaaaggaagagggtaacccttgacaacgccccaaggaggttacgacgcccgaagacatagccgttgccggccccatgaattacc

SEQ ID NO: 434192 - DNA, 409 bp, Oryza sativa
aatgaaaaccacacctttgtatgatatatattatttatcaattgaccctacatgctacaaagtcagtgacaagcaaatgagctttctaaattaacatatgatagccaaaactgccaattttgactaattctgttagctatatcaggggtaaaaaaacaagtgtcaaaagaatgaatactcgctgcatcattatttacaccacacatgagcaagctagttcagtcaccttcagccattcaggaaactctcgtactgtgttcccatcaaagtactattaacttcagcccagttatctatatgatcacgcaaaagtttggtatggatttttacatgcctactggacagctttctcttaaggaatcttaaaaaatccaggacattcatgagcttagtatcattgctgacaaca

SEQ ID NO: 434193 - DNA, 495 bp, Oryza sativa
gtaatcaacagcatgaacaagagcataagtttttgagtacaagatcgatacagattttcttacctccataataagagccaaaattttacctggtactgtcctaggaccagtactaataattaagcaagagaacagatagtcacatgagctttttaaggtttagtaggatatctgtaaaacattcctgccactgccaatatttaacatgccgaggattcgctgatcatatgcttccgagttgtgcgacggtgccagagtcatcattcatcaccctcttgtgacggcgttcccctccgacgcagttccttcatcttgcggaattcatcatagtgagccttccgttgctcttcgaaatctatatgaaagcatgtaaaagcagtcattcttactttgaaaaaaaaaacacaaaacaagatggtgaaatttgaggttactcttgcaaaacacatagatagtaaaaattgaagcgtatccaccagtgccttgaggacttcc

SEQ ID NO: 434194 - DNA, 507 bp, Oryza sativa
tttttgtagctttaaacacctacttaagtttcgctactgcatttttagataacacttcctcagttctctctacaaacttgcaaccatgcagaaattcagtgctcattgttctacgtgattgaacatttgaacccccatcgttctcgttctaagttaaagttgcctagtggctgaaaatcgctgcaagcctgcaactatctctcgcaaaaacgtgcagtcagcgtggagatcggatcccaatatacgccgtatcactgaaactaatgtttctagtgctagtgctaagttcaatctgatcagagtcagcagccatgctcggtgatccaccgagcaatgccgctagctcgccggagttgggctgcccccatgggtgcagcgacagcttccccagcctgtcgagctcctccgcgacctcccgcatcgacggactcttctcgccggagatctccaggcactgcttcgccagctcggcgacctgctcgagcacctccatgctctgctcgccct

SEQ ID NO: 434195 - DNA, 436 bp, Oryza sativa
ttttgttttttttttttttttttttttttttttgacacaaaaatgcttgatgcttttatagttttatatgcagtttctgcacaactgagttgcaagtaacaaccaacttttccccacgaaaactaattgacaatcccaacctcgcgtgtaacgtaacgacagagattatttagctacctgctctttatcgccactcgctatttactactagtacaagttctaccactaacaaacacgggcactggggatgattggcccgcgacaccttaccgggctgggatcccgccgttgctggcgacggacaccctttcgcccgagtagtcgccgaagcttttgtctgccttcgacagcgtgtacgccacgtccaccatgctggggcgctttgccgcccacgcgttcgcggacccgtgggcggacccgtgggcggacccctggg

SEQ ID NO: 434196 - DNA, 318 bp, Oryza sativa
gagcgaaattaactaacttgggagatttacattgcacataggttttgcttgagtttataatagtctaatagctcacaaaataattccatatcgaccgagataacttattcacaagagcccacagattgcggagcaatggagacaggcataatttggcctgaccttgaactgcatcattatataaatggaggggaagatcaattggtcccctcatcagctgccttcatctgcggcagcagctttgcaaactgggcaggtgttcttcacctgcagccacttcttgatgcaattgcagtgaaacccgtggccgcatttcag

SEQ ID NO: 434197 - DNA, 438 bp, Oryza sativa
aaagcagagatgtacaattttactcatttgggtgcaaacctggagtaaaaaatttcatcaggattcaggaaagggatcctaatgctatgttgcaagtctgcaacaatgtttcctccccctatggggtcatctcgcccaacaattggtgccagattctgctacatagcaaccatgacgcatttagtaaaccgccagaaacaaaaggggtttttacaaagggggccggtccaaccccctgaaagaatgaaagaatcggagcaacggccaggattattggtgaagcaatacgaaggccgaagcagcccggaccaaaaccaggggggggccactgctgggatggggcctgaatccactatggctcattggaatcctctgaggcattgcacactcgttgccgttgaaaaagacctttgaagggaaaccattttcagcaacaac

SEQ ID NO: 434198 - DNA, 246 bp, Oryza sativa
ttttggtttttttttttttttttttttttttttttttttattttttttttttggttatattttttttttttatttttgttagtttttacaaactaaaataatctcataacttattaactttattagcaagggtaaaacattatttacaacatacagaaccgaccttggccttaaaaagaagaagacaaagagcaagcgaatgacactaaagagaaaactgtcaaacagggaaaaccaaaaaaagga

SEQ ID NO: 434199 - DNA, 452 bp, Oryza sativa
ttttgggggaaatacaattatacaaacgattcaggaagcactacatatgaaataaaagagcattcagatctgtaggattttgcgtaccaaataagagagtattttcttttaaaagccctctatcctaacctagatgatgataataaaaataatgtccgaggaagaagggccacagacatctgcacgtgtgaaccatagcacatccgttaacaaaattatccatgcagtcataccaacaatgatatgtttgcagttcagcctaagaaatacaaccctgctggcattatttgatgaccatgcagagagacccgtgggcggctattttcaggcttgctctgccgctgcactagatttggaggcaattttcaggctggcttgctctgccactgcaatacaccttgttggcctaatgaccagcaaaggcttgccgacagggccgagcacctcacaat

SEQ ID NO: 434200 - DNA, 391 bp, Oryza sativa
aaaggcagaaggtattattgaaagcaatcttcttgtctgggaaaactggcagaccgtgcttatcagtatacacaattcaaacaactcacacatcaatcacctatttgctttatgtatgcctacatgcagtctgtagtatctacaacttattcaacctcattctgcggttgtccaacgctccaaaagcaattgaatcagtgatttgagtcaggcaaaatccagcgtgcgtagactttccacttgtccaattacctaacctggtgtcacacaaaaagatttctagtcaaggccgaacctcttgaagaggtgctcaaagattccttgtccggagacaagctcctgtgcaacgaatccagcaatggcaatcatggccagacgtccgttggtcagc

SEQ ID NO: 434201 - DNA, 338 bp, Oryza sativa
tttttgggtttttttttttttttttgttttttttttttttttttttttttttttttggttgttttgtttttttttttgctgttctttaaaaaaatgggggggtttttaaactctctggaagacaaaagggggaaaccattttggcggttttgggggggaaaattaatgggggcgcccccccaaattgggggggcccccccgggggggggggggatttttttagaaattgggggggggcccataaccaagggcccggccctcccttgggggaggcccccggggggaacgcggggaaatatactaagaggggggcccaaaccccgttgcttaagggggga

SEQ ID NO: 434202 - DNA, 491 bp, Oryza sativa
cgcacacatagtaataaaaaatggtgggacccacatgtcattctccgttccctcgccacaatgtgaaggcccacctacactcctgcgtctgcacaccagacgacgtcaccacccacacctgccgccgactagcacaaccgcacaccagacgacgtcacccccgcacgcgcagatcccagagcaagcgtgtggtgggaatggcagggaggctgaccgcggtgttctcggcaagctagtccctggcgaggccgtggaggaggccggcgagcgggttggcgtcgggctcgcgatcgagctcgcggagcttccggtcggcgcgcttcttctccagctggatggagccatggcggcctcgatggacgggttccccatgaacctcttgaactcctcttccgacctccagtcaacctcctactgctccaccgcgccggcatgggccttcccgccggcagccattcctccaggggactggatttcccatgtcttggcag

SEQ ID NO: 434203 - DNA, 430 bp, Oryza sativa
tttttgttttttttttttttcaggggaaatgtatattgtgtgatttgtttagaaagccttttacacatgtacttacaaatacaaacatgtacattgaagtgatctagccctttttgttgacaagcgtatcggggtaaggttcacaaacatgcacacaatggacaagagaaaaattcggactgctgtatgcctgggtgcctagaggcatggctgttacagactggccaatttcatccaaacaaactgaacaagtcagatattcacagcattgtaacttcagctgtcattcacaagaaactgtccactccagtcagacatttggaccagtaaatgtctccccaatcacatgatactttccttgggccgccagaacatagtgcccttgttattcttccgcataaaatgggttattgtcagcatcaaaatcaaa

SEQ ID NO: 434204 - DNA, 75 bp, Oryza sativa
  unsure (1)..(75): unsure at all n locations
atatcttatctattctctatattctatctattatctatctgtatatgtatctntgtatatgtatgtatatgtgtg

SEQ ID NO: 434205 - DNA, 420 bp, Oryza sativa
cccacctgttgttgtgctcacgaacaaacgcatgtttagatgcacaactgtacgagtctcacggcgcaagcatagccatatgaccacaaaaaatctggagccgctgaccacggagcacggtacgtagtcgcattcacaacatacctagtttctttttaggaggtaaaactctaccagtctcacagcatactaaaacgtataccagctattgctagacacaatgagcattttttaagtcgtaaacaaaagggatacagtaccggcttaaggggcgtaaaatccggtacactatctatatgtgtcgccgaaacgggaaacagagcacaatgatctctgggtgcaaagatttaccgggaacctttgccacgactgtcatttgagaaccaatgacgagattgctagatgacatactctgattac

SEQ ID NO: 434206 - DNA, 198 bp, Oryza sativa
gccgccctttttttttttttcgggtgacaaaacacctgcggtgatacttcactgtcatctgaactcctaagcgtgtggtgcgatactgggactgatgaccccttccccatctggggtaatctatgcccttcatgggtttagcctggccacaggattatacttctaccataactgccctagtttgggcaaccacatccc

SEQ ID NO: 434207 - DNA, 464 bp, Oryza sativa
ctgtagaggatcgcgtttgcgcaatctgtcttgaaaaaaatgggtttacatattgagtttctttgccggtttggggaacggggcattactaagcgacattatggccccgccaatattgaccccgatgggcgatcggctattttttcccggtggtttgagcgggattctatattgtatcactctgataccgcatccactgaatccttattaattaatcatgcctatgaactggataccaaaaacagggagttatgatgggaatataatcccgttaacaggctaaacccatgcagggcatagataaacctaaagggggaaggggacatcatgccccgtatctcaccactcacctaagagtccctataccagttaaggatgaagtgcagggcattattgaccgctacagggaagacttactggcaagaagacaggttcaagatgttcctagcttctacgaggtcaaa

SEQ ID NO: 434208 - DNA, 85 bp, Oryza sativa
attgttctccagaagagcagccaacaaacgcacgggggaagcaaaacgaggaaaaaaaggggagctcgcggcgaggggaggagaa

SEQ ID NO: 434209 - DNA, 529 bp, Oryza sativa
tatataggaacgcgcaccatccgagccgatatcagccactggaggcttccatcgcaatgcttcctttggcggggcagcgtagggaattcctaaaaaggagccatgttcctcagaaactgagccaatcaagcgtcctccggatacctgaacttcaaaggagtttctctcagtgacaaagcttgctttcattttgagaagtaccctacatggatttttgacatgctagctttaatataccgactatcctgattggaagaaaaaagggatttgaatatctagcgtaacgtcttgatcccaccatacaagtcggtctgagcgagaggggttacaacggaagaactcggaatccaggtcgccgtcatagccgctggtgcccagcccaagcgggatgtattgaaccagtaaaacaactacaaaaatcctgggactggatgcctaattaggttgtgacaaagtaagccaaaaggacagattagagatagcttttaaggcgtggggagcattggccggcataacaataaacacccct

SEQ ID NO: 434210 - DNA, 410 bp, Oryza sativa
tcgatctttactaatttttagtcaatttctgcctcgatacttctaacctttttttagtcaaatgtattggtatagcctcactccccttgatattctcctactccgggatgccaaacccttcacccctggcgatcgggcctgggctggcagtatttttacccccaatggtcataccttagcgggagcagtccggagtttgttgccccaaaatcaaaccatcagcctaatagggccattgtcatatcacaaggaaaccctttattttcctcggccgatgggctttgtcggtaaaacccccctgatacctttgcctcggcacgatgccaccagtcccttacgaagttcaaatgtcgtgggataaaacccaacctgactccttagcacccctggaaactttttcccaaacggat

SEQ ID NO: 434211 - DNA, 51 bp, Oryza sativa
cgcctgatgcggcattttcttcttaacgatatgtgcggtatttaacaccga

SEQ ID NO: 434212 - DNA, 538 bp, Oryza sativa
ttatgttcagtagagcagtccggcagctgttcgggggtcagctttgggatttgcctgatcgacccctaccagtgtattaatctacaaaaattaagattgacattcgtatgtacaatttaccggatctatcctcttgtactaactttacaaaatggaagggaaaatgtgttgaccaaagatgtcaactactaagcatagtcaattgcaaatcggccgggtggtttgcttctctccaagtatgggagattctccaatcttcgaaagacgctcgtactttcttgatcttatgaagaaggggcttacttccattccgtaaggatcaattaataagggtattattcctacgaaacaactaccctttatcggtaatctattattagagaataaatgaattggctctttctgctttcatgtataagctacgtcatatggagtgtgatagaggatatctagggctggtagagttgattgaaataataatccgtagggatagctgagaattgctcaagaacaagagattacttttgatgagagttat

SEQ ID NO: 434213 - DNA, 95 bp, Oryza sativa
gaataaggaaggccgcaaccgagggagggaccggaccgggatacccgggaagccacacgcgatttttacgccggccggggccacaggcacgagcg

SEQ ID NO: 434214 - DNA, 377 bp, Oryza sativa
aatacaaaagacacatctttattctataaaggtcgggaattggtagtggaggtgggggtggcagaaccaacaccaccactactctcttttataaggagtgtagatgagtcggggtaatttgttcctaaatcacatcttggaatatgaccttgtcgatgtggctatcaattgcctcaggtgagcagtacgcgacataccacaagctcttcaccacatggagaaacccctccccggttagtctgttaatagcgctgcagccctgtagaacgcgccgagtcaattcctgcatctccaaatccacttgctggtctatctcctcaactttttccgtactttccccattctcctgggcaagaaccctcctggaaagtttgcag

SEQ ID NO: 434215 - DNA, 428 bp, Oryza sativa
ctattgcatctgcaagagcgatcgagagagaaaaacaagatctatctatagcagctagctagctagcacaagaacgatatgccggtcttcactgcatcattccagtgtgtcaccttgtttgggcagccagcatcggcggccgacgcccagccattgctgcaagggcaacggccgttcctacaccttcacgctcgccgccgtcgaccatgcgggcccatgctaataagcaaatcaccgccgtacccggcctcggaagaaacacgcgaatgggaagcagatggacaacatgaacacacggatgaactaagagagacgacgacaaccatgatcgatggcatcaggacagcactgagatcaatcggagagggagagattagcatctcagcctatgacacttcgttggttgcccttctgaagaggctagatgg

SEQ ID NO: 434216 - DNA, 241 bp, Oryza sativa
aacgaacatggaggattttatgaacacggagagccaccagggaggcgaggcggcaaagcaggaggaggggaaggacaggggccaaatcgacaaccataatggcaggaagaaggacgaacagccagaggagaagaagcacgaggaggagcttgccaccggcaagaaaaaggactacgcggaaagagccaaagacagaagaacaccacgccgagggcaagaagaaggaaagcccacaccacaa

SEQ ID NO: 434217 - DNA, 296 bp, Oryza sativa
aagggggacgcccaaggcagggagaaaaaaaaaccccccggaaaaattaaaaacgcccgggggggggccaagggccaaaaaatttttttaccggggggcaccaaaggggggggggggggggaaaaaagggcccctggcccaaaggaaaaaaaggggcccccgggcaaaggaccggccatgggaaaaaaaaaaccctttaaagaaaaagcaacccccaactaaaaaaattggggggggcccccctgggggttaaaaaaaaaggcctttaatgtgggagaaaattccccccaaggggg

SEQ ID NO: 434218 - DNA, 557 bp, Oryza sativa
gaagagaaagttagcatcctgaaagctgctttggtacatgtggcgcggaagatgcctaaaaatgcccatgcacattttatgttgggtttgatgtaccaaaggcttggtcagccacagaaggcaatagcggcatatgagaagtcatctgagatattgttacaagatgaagaagaagttcgaaggcctgatttgctctcatcagtgaggatacaccatgctcagtgcattttgcaaacaagtatgggtgacacttttgatgaagagcttgaatctggtgaactagatgaaatccttgttaaaatgaagagttcagttgaatctgaccccagacaggcagctgtttggaatatccttggtttggttcttcttcgtagtggtcagcttcagagtgctatctcagttttatcttctctgacggttgttgctccagattactaggactctcttgcgaatcttggtgttgcctacattcaaagtgggaatctagaactggccacaaaatgctgtcaagacttgctataaaagatcttaccgcccagctgctctggtgactatgc

SEQ ID NO: 434219 - DNA, 387 bp, Oryza sativa
ttggttttttttcattttttttgtgactcaatcaattctattcattccattattgttggaacacaatgtgaatacagatacacattattagctgaatccaagaaattacccttatcaatcacacaatgaaaatggtagcttattacaaccccggcgggcatgaaattaatcttcgatcgaccgacatatacgaggatgcataatatcgatcgataggcattagcacgacgattattaatcatagtatatgggcatatataaaccggtcggcgcagtaattaatgaatttacaggcccatggcgtgcaagtctccccagagggtttcggcagaaaaactaatccttctcttctccatgggggtgagcaccagctcgggggtgacccca

SEQ ID NO: 434220 - DNA, 525 bp, Oryza sativa
atcctgaggttactctgaggatcgcctgggaggtgagcaagttggtggaggtggccatcattgatttccatttcgaccaggagctaccgggggaaaaggtttaccacatcaatatgaccagcaactctggcattaatcccctagtaattaacctcgaccaggaagggggcggccccaatctgcgggccattgagctggccatgctattcgccaaaaccctacggttgggcagtaatcaacagggcaaactactagatgcgttcaaacattgctatttccgtcggggcatctcccaggaatccccccagagttggttgaaagtaccccctaacttttctgacttggaagctttgctggaggaaatggccgaggaagacaaggaagcggaaaagctgagactaaagctattcaccatgtttgagtacggcattttcaacaaaacccagcccccctatgaaaggttaacccgttggaatcttgccaaactttcccccaattgcaggcgatccccgggtaccgagctcg

SEQ ID NO: 434221 - DNA, 510 bp, Oryza sativa
acccggtgatcgattagcatcgtgcctatccaccaagtcgcagcttccggataattttgcacggcaatgatcgtaccgatgagtcctttctggggatggtggagcccaaaaacgtggagatcctcaggagttttacctgctggaacatcaacaaattcggcttcagcagcggtggatgcaggcggttgccctgtggttaagttgaaaaaatcggtgcagcgttcaaacaaggcttgcaggcaattactgtcctgctttgtcagttgaacaacagtgtaatcaagatgttgccaagggaatggcgcaaagttagaggtcaataggtgcatgacagggacgggtagataaacatcctcaatcgcagcgataaaccatcgaaacacgcaaatcagtccgcagccccagccgttgctcggctttttctagctccccatgctgcggtgacaactgggctgagtccacaatgcgaaagccgcaacgctgatagaaaggcgcgttccagggcacttc

SEQ ID NO: 434222 - DNA, 134 bp, Oryza sativa
actctagaagaccaacccacctgcctctaccgctccgaaaaggcaaagccagccacgcaatatttttttccctaaggactccataggggacagcgcccccatgaaaagccaatcggagcgacacaggcatcgcc

SEQ ID NO: 434223 - DNA, 159 bp, Oryza sativa
attcttttggatctaattaaatgacctcctccacatgcccttcttcccacggatcgaacgggccgggttctcacaaactggggcgccgcaacggcgacgctaaaaaggtaaaaaaggcccacttgaaagcttgctctatacctctgagactgtgaaaac

SEQ ID NO: 434224 - DNA, 182 bp, Oryza sativa
ttcgtatagggcatctccagcctcgagtgctgcgggggcgctttggtgaccaagatcaggtctgagggttcgaacatgactgatgcttggttcgccttgatcgtgtgcaacggcacgtggtgtaccgttctcaccctcttctctattaccaatggggggcgtgaaatgcagcgggttacccg

SEQ ID NO: 434225 - DNA, 249 bp, Oryza sativa
tgcggtcgactctagaggatcgcataaagccctgggctttggcctgggtcgcttctgccagagaccccatttgtttccagaccttgacaccagcattctggagctgggtcacccagtccagtggcggaaatgaccagaagaagataaccaccggcacccgttcggtcatgcagatggcgatgtggtcgtcgttggcggctgcggtaatgaagtcgatgccaaaggggcgatccccgggtaccgagctcg

SEQ ID NO: 434226 - DNA, 298 bp, Oryza sativa
tgtatgcgcccgccctacattttatgggcgtttgaagaacctgaattgggtgttactggctgactgatttttctgttataaatacggaatccacccaagggggagggccaaccctaaggttcgcaagcaacacatgagattaccattacatgcattgcttaaactaaccctgactgatggttctcatgcagagtcagtttagacacctactttgtactaaacccttccctcactatctagcattttttttcatctttaacgaccttcacgataatattgcccttcttgttgctaatgc

SEQ ID NO: 434227 - DNA, 337 bp, Oryza sativa
gtttttaaccatagctggagcgctaacattgtcccgccacctctgctgtactggcggactttgacatgtgcaagtggctgcagtcaaaacgctataagccgctgggcacgctgcggccgaagatcgtgcaccaccttctactacaagaacgaggcattcaaacatcgcgaccaagccgcactatctcgaggtgcccgctctgtcggtccgcgcagcaatccaccaggcgttcaacgattccggtgactccctgaaccgctgcatttcggggataatcattgacgtttagatggcagatctaggtactgaccagcactagttcttctttgaggcaata

SEQ ID NO: 434228 - DNA, 308 bp, Oryza sativa
aaacccctgcccgtaccgggcccgaattccgagggctcctgctccatcacacattcttgtttgggcatcccgcctccgcatcacccgccgccgccgccgcctgctgctcgaggtcgcggctgcgtagccggtgctgcaggaggtgcttcggaggggagatctcggtggggactgctgcttgctgcttgaggtggcggcagctgaggaggaggaggaggtcgctgtggatggcgaggtgggatggggcttggagtaagcagcgggagaggggaggccgcgtactgaacacgccacggctaggggcacca

SEQ ID NO: 434229 - DNA, 298 bp, Oryza sativa
gggccccggtccggggtcttctggtcgaccgatatgtgcgactacgcacatcgcgagggcgacctccgcgacgtggtggaggaagagcaggcacttgtgggggcggaagctgtcggaggcggttgatcgcaggacgtatctcggcgctcgcgacaagaggccgttgctcgtgcgcgccgtggcaacctcgcgcggcgaggccacctgcaacctcgcggagctcataacaacctcaccaagaagcgcatcttccgggccgcgatcggtacgcgcgacggctaggggcacgacgagttca

SEQ ID NO: 434230 - DNA, 298 bp, Oryza sativa
tcactccctcgagggacgcgaccctcgattgataggtttaaaaaaggggagagagagtgaggagacccctaccgtggacactgggtggaggcgccattgctggtcgcgttgatccacgtgccggctggcgccgcggaggaggccaaccaggtgaccaccagccacctgtggacggccggctacaagaacgccgaccgcagcaagagcaagagcccgaggcaggagaggagctttgccgacccggacaactacaaggccgtcttcgagcacatcgacgatgactcccacttcgacgacg

SEQ ID NO: 434231 - DNA, 338 bp, Oryza sativa
tttttgggggtttttatttttttgtgtgtttttttttttttttttattttttttttgtgtttttttataatcgtggctggccaggtaaaccacgcaaaacattaaatgaaaagggaaaccggggtgggggcaaaaaaatcttaggaaactggggggggatttaccaaagtttaacggccctggatcccgggcaaaagggtttttcaaggaccggaacccaaggggctaatggcttcaccacccaaaaggttaaggggcggttccaacaaagggcgcacttaaagacccctaacgccacggccagggggggggggccccacaaaaaaagggcccggccc

SEQ ID NO: 434232 - DNA, 243 bp, Oryza sativa
cttaagcttggttcctctttttttccgcccttttttttttttttggggtttttaaggagaaatcatgattcctcgccgcttccactctcgcaagtcacaggaccataaaaagaggcaacaaaagggccttaggtaaagaaaaattataccgaaccattactgccactcctccataattttaaacatactggtttcatatttaccatgcctgaattgacttttctgttcgggacgctatcctgc

SEQ ID NO: 434233 - DNA, 323 bp, Oryza sativa
tttgggtttttttttttttttttttgtaaacactattttttttttttaaggacaatccaacatggggattctggccccttatatatcctaaaatatgagccgtaataaaaaagggtatgtttactttacaacaaatgcaaatttttaaaaaacacctcatattaaattggattttggaattttaaaagttgtatgccctaagtttcactttccccctccaatggggtttgggaaaagattttttgggggcttctccaaaggggttgtttttaaaagggaaagcctgggaacccccttttgtaaggggcccccccattttcgtc

SEQ ID NO: 434234 - DNA, 216 bp, Oryza sativa
ggccggaattcggaattccaggacgcgtccgttctcctgttacagtcgacatcccctttctcgacccctattgctgctgaaggccggaaggatgagcgccactgacgggagggagatgaactccggacgcgtcgctatttatactatagggttgcgctaggctgaggagttctggccgtagcggtgggacctttctatggcgatggaagttgaaca

SEQ ID NO: 434235 - DNA, 373 bp, Oryza sativa
gtacaaggagctgcagcctttgattaattattataatgagcagatagtatatacaactcctctcaagactagctctatctctctctaaaccctcctaaccaaaagctcaaaagacaaaaatttgagatcaccatctcaagcacctatatgttagccacattgctctagatcttgcgatcttcctttttttttcccttcttccgtatgaaacaacaaaaaaatttctgactcctgtggttgccaacaaaatctgccaacctgttcatcacacgccccaattcgctttacactgtacaggaccggtgatcgtgtgttcagccgttgagcttcgccaagaactggttgagatcgtactcgtctgcatactgagact

SEQ ID NO: 434236 - DNA, 345 bp, Oryza sativa
ttttggtgttttttttttttttttttttttttttttttttttttttttttttttggaaaattcaacattagggtgctggttatggcccatcatcagaacattaacaggggggcaccctactacattctttttccacttttttttttgggaattttcctagacaaactcttgaggaacattaaacttacaaggcaaccctgaaaaaagggggcatttgggtcaaactttttttagggccatttggggttatactatccaaaagggccccactaaattcccagaaaaacctttgggacaaacccaaactttgggtgaaccaccccacctaaaacaaccgggaggaag

SEQ ID NO: 434237 - DNA, 259 bp, Oryza sativa
cgaacccaaatactcatttaagagagggcattggtagctccagagcggtctgcttgcgaagttgcgacgggtgccatggccaagcccgcctcccgcgctgccaagcccggatgggcgccgaagaagcagaaggtaaagcccttctacgacggcggcggatcctcccacccgccttataccaccaaggtggacgacggcggcacggagcaaaacgagaggacccagtagggggagaagcagcacaagcacaagcagcacc

SEQ ID NO: 434238 - DNA, 181 bp, Oryza sativa
tttttggggtttttttttttttttgtttttttttttttttgggcaaaacataggatgacttaacagaatgatctaacaaaagacagtccctgtcacaccgtttctgacagtaatcatttgagcacaagaaagacaaggctatgatctgtttccagtccttttatgagatggttaggcacat

SEQ ID NO: 434239 - DNA, 434 bp, Oryza sativa
tttttgggtttttttttttttttttttttttttttttttttttttttttcaaaaactaggcctcggttttgctaatattcaaaactcacaaccgggggaagaaaccaaactcaagggtaggggaaaaccaggaccacaacggggatagaccactagttccggggggaagaattccaaagaaacccaaagggaaaaggcccaacccaaagggaacagaggatctacatatcctaagctccaaaatccagtctacgacgggattcagcctcaggaggtccagccaaatcatttttttaggctcactgcatttggatcttttccaagattttttaacaaagcatccatcacaggtttaacccgcagggggattgggaagcaacaaaattcccaccagcaatcggatggaccacttgacccgggcaactaggcctcct

SEQ ID NO: 434240 - DNA, 386 bp, Oryza sativa
ggaagaaaaagaattgcattagaaaaagaggatgatttgggtagtagtatttcttgagtaagagtcgagcagcatggtccagttccagaacgtcgaaaaccaaaccaaaccaaacacgacaaccttgcttacagactcgatttatccagatggataatccaagccacgcattgggttaaagaccttctgttatttttgcttaaagaccctagaacaggatgggcatcaatagatgcccattccaggatggaccaccccccgaggacgggaggaagaaagcactgggtatatatcctaaggggaaaagcagcccaggagaagagagtccccacatggttcttcattcatgagagggatccaatagatgcagatgcagcgtcagaaat

SEQ ID NO: 434241 - DNA, 239 bp, Oryza sativa
ttttggggtttttaatttttttttttttttaaaaaaaaaacttcgtggaatatatatcctgtttttattccggttttcatattttccatgtgaggtagaccctggcaatgtacactgatttgaacatatattttgaggcggaagaaaaaccctacacccttgttgatttgcttggcaactgtctaatcctacagggaaacacacaccacatattgcaaaatcatctaaggcaagagatt

SEQ ID NO: 434242 - DNA, 294 bp, Oryza sativa
ttttccgttacggagcactccgcccttgggcacggagccggccattgaagccatggggcagggtcaggctccaccgcctgatccaagacatcggccaccgagactccggcgactacctcaccagggcgcacgggagacacaagaatcccaaccacgaccggaccttcaacgacaacaacgcgacggtacttgacctaaaggacagctaacccgccggggacaaggtgattgctattgagcataagcacgagggttaagcagggaccatgccaagcattggcctggggacagaat

SEQ ID NO: 434243 - DNA, 362 bp, Oryza sativa
  unsure (1)..(362): unsure at all n locations
gaacgtgtataaacttgataaacacaggctgagagcctcggtttgaggagcctgaaaagagcctaaattggtaagatctgaccttagtatgtgcgctgctttaccaatggtcgtgacttgctcatggtgctatgagcgacagataagtgcttttatagaagaagtccggttgttgcagccaacttgttgaaatcctacgactgggngaaactctgcgtggctcagtatgaagtgtattcaacatcaatccaaaaggcctcacgagcaagtgatgcttcttcctgagactctgaaccccccgaagacgacggtttggggagagcctcacctttcggacgccgacaaaggcataccggacctgg

SEQ ID NO: 434244 - DNA, 545 bp, Oryza sativa
ttgccagttagcaggaactttctcatgaggttcttgaccacagggcgaagcatggcctggaaagcacatgttctggtggctgttctactggcagtggttgctgtgaccgccgtcaatgcgcaatccgggtcgccccaaagtaaccagactgctgcggtagcaaatgcgaccctctcccaaaaccagaccgccttctccgctctagtgtcaagcctcgaaacagccctccaagctcggctcaacctcttcgctcttaacaccacccaaaccctccaatccctaaacctgtctcagcccatcaccggtgtcgcatctgtaaacctcacggggctagctccaaactcgagcaccatcaatgacgcttctctcatttcaaatccaggtctgaggtccgacctcacagttcctgcttgctcctcctatctgttcaatgtcacctacccgggtaacaggaccctctgcctgggtctatctttcaccccctctcagaacgccaccgctctgtccagcaattctagctccgaccaaacgctccctctgaatgg

SEQ ID NO: 434245 - DNA, 429 bp, Oryza sativa
ggcaaaagcccataggcccaaacattataccacaccattttcagcccaatcatattatattcatttacattagtatcaaataacaagacagctaagcccatataggcccaacaatcaaacacagtaacaaccgatacagcacacaggttacaaccctattagcatccatcggaacccgacaaacattcaatacaacacaaaatttacaacccagaatctacaacccaattaaatgtaaccatacagaatttcacccgatgccgcgtgaccaagatcttccaggtgagcttagcagcacttaagttttgtatcaggcagcaatcttgttttgatttgcaaatcgaaacatcacccccaaaaaagtaaccgtcggtaggcgtcccaaggtatactggtgctgctgatggcggaagatagaggaagagagcc

SEQ ID NO: 434246 - DNA, 434 bp, Oryza sativa
ttttggtttttttttttttttttttttttttttttggacaagggcaatattccagtattactaacagcgccaaagtttggacaaacttaacgagtagcaatccagggggcaatggagtaactgcaacaacgaaataacatttgacataacttaggaaaggggctattgccctgaagcaggtcctaactccaaaattttacgagcatttgatgcgcaaacagtcaaacattcaaccatgtttcacaggcttatttcagcaagggccctggacagcaaaaaatctcaccctagcagcccacatttgaaagcagacggcttcagttgcgcctgctgctccaggttggggaagatgatgaacttgagtatcttgaaggtcgccatgtgcctggaggaccattttggcgggctgggggagcaccatctcgagcaggggg

SEQ ID NO: 434247 - DNA, 425 bp, Oryza sativa
  unsure (1)..(425): unsure at all n locations
ggcaaaaaaatgattttctttttcaggtttgattaattgataatctgggggatacaagattatgcaggcaattaattacaaccccatgaaaaacaatctctcaagatctaaaagaaccaaatcaatcgaaaatccaaccaagaaactaatgttgctttgagactactaggacctctgaactttcctgtccctcctgacgataaagcgaaaaactgttcactgctccatttccgacaaaaaatggagaagctcctcctatacacctaaaaactgaatcttggttttcttttttatttttgntggtttgtttggtatcgctgttgatcggaccaagaacggcgatgatgcttgatcagaagaaggatgcgccgccgccgttgtggaagaagttgtgggcgatggcgtcgcgggcctgcgcggtggcg

SEQ ID NO: 434248 - DNA, 403 bp, Oryza sativa
ggaccacaaggtgcctatttcctggattatggtggaaatatattatgttatgatatccgtaacatcgttgcatgaatgggacatttcaacagacatcacacaaatggagggaagcatgaaaataaggattcatgcattattcagtacaatatagaacagatcaaagaaatctggaggagaacgggttgtacatacgcgaatggaatagtcaggcagtagaacaaggttttttatgtttcctaacagtagcacaatcagttagctcctcttcagcataaatgtcagtgtgatgttcagtgttgttttgctctgcattccaaattatacaggtttttatgcgaaccctgcatttttttgcagaaccctgtcccggaggaatggcttatgcagttctggagttgga

SEQ ID NO: 434249 - DNA, 509 bp, Oryza sativa
tttgcccatactccagagtccagccgacccgacccaaacctcaccgccgccgacgccgttgccgccgccgccgctgcgtgcgcccctgcggaaatctagggtcctcggcggcgtccccctcgctccgaccccagttctctgcggcggcctgcgcgacgcgccgaccggccgaaggctgcgcgttgagctggccatgcaggtggtggggacggccgccgccttctgagcgggggggacgccgtctacagcgaggaggcggtcctgggattcagggaggaggttttctcgaagcatgaccgacgggagaggttcagtctcagcagctgggtactcccaattggaggtcagaagagttagctatcgacctgcaggaaccgaacaaaacttgttgaatgacattagcctcaatcgtaaggagacaagtttttgattactttctggacgaagcgggagctgacaaactactcttttgcagcttttggcaggtctatcggtacctacccatggga

SEQ ID NO: 434250 - DNA, 317 bp, Oryza sativa
gggttagcggagcacattttcatcttttcatctgatattccgtcaactgggtatgctaacttcatatactcccaaatacagcccaacaacaacttcctgatatctggtgaaatacgaatgccccttgagtagtggtattcgtattccatccactcttcctccgatgcaagctttttcactagcgagctgatcaacatccagctgctcctgtcacgagggcactcctgaaacaagttgtactgccctatggggacctgaccacatcctatagctgcaggttggcccctttccaaaaagctggcatggatccagagaaa

SEQ ID NO: 434251 - DNA, 339 bp, Oryza sativa
tttcagctgaagggaaccatattgcgatgggctgatggctgcatgctgggtgaaccagacgtccatgctcgccaatgaatgggggatgctgatcgtggtgctgtgcagatacgccgcccacctcgacctcgcgctcctcgacgggggtcgtcggcccaaggtcagcggcttgccggtgctcctactatgggcggcgtaccagctgggcggatgggccgggacgcacactgtccggagggtgtcacctcagggagacgaggaccaagtagcccgacctcttgatggtgtacatgcccatggtgtttatgaggaacagatgcccggtttctttcagcaatt

SEQ ID NO: 434252 - DNA, 394 bp, Oryza sativa
ggacagattattgtgctcctatatttgaccttgcaatgcatcaatggacagaacaaagtcaacaacagcaacaacaacgataacaaccggtatatcatgtatacattgcatttgacatacaacaaaagtgctggctgtcacaggaaaccgaaccatcatgaaacaaattacagaaagtagctgacaactttgaaaattaaagtacaccgccgcggcggcgtggggcggcgcctcccttggatcggtcctcgccgccgtcgtccaaaaaccaaaccgggccggccgtgatccggcagcagggagcacacctgaattaaagagagaggatattttcgtttttgaggcctgtacagtacacacaccaatttggctcatcgaacactgatcctactac

SEQ ID NO: 434253 - DNA, 347 bp, Oryza sativa
ttttgggtttttttttatgtccaaagaataaaattatccagcaaccaacaatccatgcaaaaaaaaaaagaattagaaaagtttcttagcatcaacacaggagcagcaatccagctgaggcagatgcagcaagagccaagaagtagccggcaatgctcggcgccgcggcgcgacgacggcgtgcgacgacgaggctcttcttctcgtccgccttcgccttggcgctcgacgacttcccgggggagcgggctggcggcgtcggaggccggcttggcgtccggcgccggcgccggcgacggcgccatgggcgggtcggtcctgaagatctgcatcgggaggagcaccct

SEQ ID NO: 434254 - DNA, 347 bp, Oryza sativa
tttttgggctttttattgtgttcctatttttttttttgtattgcattaatttttttgttatttttaacattgtttgttctgggaaaaacaacatgttgtccgcgagtaaattggacccccaaaaccccagggggttggaaaccgggcccgaccctaacagcccccaccccgtttggggaagagttccggggttaaaaaccccagggcccgggcccaaaggggggggggcacccaacccccaaattttttcacaaacttttggaagggaaaaattttggggggttttcgaaaacccctgggggaaaggggattggggggggccaaaccccaggaacaacccccttggg

SEQ ID NO: 434255 - DNA, 490 bp, Oryza sativa
  unsure (1)..(490): unsure at all n locations
tccacgcgtccggtattctgccgtgattaccatggtacgtagtcaaattgccctcgtcccgttccatgtgatggaggcgtggtgtgatgcatttttgcacgatgaggatgcttatcttgagtgtcgtcaaaccgtgcaaaccaaccccgtcaacggagagaccaagacccccgggcagaatatctatctcaagaacatctgcaatgttgaggttgaccctgacggtgtgcgtgctgccatcatcatgcataagcgtgttggaggcgaggatgaggacgctgttctcgtttacttgccatccatgcgccgcgggacggacattattcaccatttccttcctcgtgggtatcaaatccccgtcggcacccattcgtactttgcgggtatcaatccgtacacctatggtaccgacaccaagactggcatgtgccaatacgctgcanatacgaagtatgaggactggccagcagcacatgctatcgtgtccagc

SEQ ID NO: 434256 - DNA, 200 bp, Oryza sativa
agcgacgcgtccctctgtaccttataggcgaaagattgtcacggagggctaaggcactctctgagaccggggtccttacctctgcgaccagttcactggggaagtctacaggagcaatgcctactgcgaaagcaacaacaaatcctgttctatcttcgaatgcctgaataccgatggttaggcgtcgttatattagtgga

SEQ ID NO: 434257 - DNA, 475 bp, Oryza sativa
ttaatcctattagttgaaatagcttataaatgtctgccctgttaacctattcaatgatttatgattctatgttccatggaaaaagatccgtatcaggatttgctgattaggtgttgatatgtgacttggatatcaatgtttatttgtggaactgactgtgttctattcaagtagagcactggcatattatcaagctgacatgcaaattgcgttggcgtattaccaggccgacatgcaaagtgcatagacgagccatcgtagagttcacatgtagtttgcatgtagtactgtaacggctaacagagtcatcataaagttcatagacgattttggtcggaaagacaagaaaatgttaacggctacataaatgaaatggtcaaactagaatgctagatggtccaaaatttgcctaggatgcatgcttgcttatcaatacacgaaagattgcttgccgtatttatgaaattccatattt

SEQ ID NO: 434258 - DNA, 403 bp, Oryza sativa
accaaacccaactatttacattgatcaaaccagcaggactacgcactgcagaatatttgttacatttgatacatacaaacccatataggctcaaatccatacactataatccccaaacgccgaacactaagcacccaaattggtcataatcacatacaatccataggccaagaaatcaagaagggttcatcccttcttgcctctatctactactattacctataagctataatccttatattaacatggaagatttattggtgcacaaagctaagcgatcaagagcagcaattggggcagcgtaccaatccgttctcgttgcagtcgccgcagcggcgggcgcatccttcctcctggacgaacaccttgcgggatccgtcgcaggcggggcatggcacgaacc

SEQ ID NO: 434259 - DNA, 379 bp, Oryza sativa
ttttgtgtttttttagactaatatcctagcaactttgtgaattaaaaactgaaaagtggaagggcaataacagccgaacggtccgaaaagcaagaaaaatgttcatttcagcatatcaggcgatggaacagaactaattcccagtccttatctacaaacacctacaggtcaagcagaaccggattcctgcacgaattagagccaacaaaccgaccaatgaacggtcccgatgcaatgcaacgaaatgggcacgcgcttgcgtacgtgttcgtacggattttgattattccttgcgccggcgccggcggcggcggcggcggcggcgaggctccaccgatcattgatggcggatggctcacatgatcgcgcaggcgttggg

SEQ ID NO: 434260 - DNA, 386 bp, Oryza sativa
tagcacacgcgcaccaacgcatcatacatcgctacatcccagcgagatagctagggagaaagataagaggaaaactaaggccgagccaggcatgggttgctatcatctgggcaagttcgtgtcgaaagctctcggaaaatgcaacgtgcgcgagagggggtggcgggaggagaggctggactacaccatggactacccgcccggcccacccacggagacgtactacatgcggccggtggcgcgcacggacaccttcagcgccgccaacttcgtctacgtgatcccgactgcagagccggcgcaccagcaatcccccgagccccattcacagacaccgccggcgacggcacagcaacagcaacacgggcccgagcacgagcaccacc

SEQ ID NO: 434261 - DNA, 330 bp, Oryza sativa
gcagctgaaaattcatgagctaatacatatagaattgagttcttgttccagcatagaaacagcaggtgaactgaacatccatccaccaagagaggagaagggaggaggtattacatgattttacagaaggcttctcacagaacaaaaactttcttatacacaaaaaaacaagtaaagaagcccaagcatgaaacacctcctgacaagagaacaaaaggaagaacagatcgatctggagtgtacagggtatgaaacaatctgggtgaagaaacctaaaaatcggctctaataaaatcccaaggaccgaagagatttgcacactcctggctg

SEQ ID NO: 434262 - DNA, 354 bp, Oryza sativa
ttccgccgtgttgccgccgccgccatgggctcctgcctctcctccgacctgcctccccgcgccggcgccggcgcgggagcgtcacccgggtggccgcagcggtggcggaggaggaggcagcggggggtggagcggggcggggctgtttccggcggcggcggcggcgtcttctccatcggcgtcggcggcaagaagctgcaccacggcggcggaggaggaggggagatgacggaagaggagctcgcgaaggtcgaggggagggtgtgcgtcaacggcgcgagcgcggcggcgtgcctgcacacgcagcaggggcggaagggcaccaaccaggacgccatgggcgtgtgggagaac

SEQ ID NO: 434263 - DNA, 411 bp, Oryza sativa
ccagaaaggggcaaaatatcattggcgcaaacagatgatcagtcgaagataacttggttagttaaagggacaccatgttccaacaaatagtgcaaaagttagggtaaaatacgatgtttctaggcgagaccactactgcacatttactaatagcttccaaaacatctttccaacaaatagctttccctggtggccagcctccaactatcactcgtcacatgaaatcagtgtgacggtctggcaaaagaagaatctatatgaatgatttaatggcaaaaaagggcccccatataccattcaagatgggattaagcctgaactgtgcttcgctccgacactggctcaagcatagaaaggaggttggaaaccacattgcaaggaggaacatgcacaaggcggtcactgaaacta

SEQ ID NO: 434264 - DNA, 414 bp, Oryza sativa
tttgggttagtctaagagttgtcatattttaaagattaattttttgagcaagggtgcatattcccatacaagctagtataagcatacttaggtagattgctggcatttgggacagggaggagcagagccagagtacaatacttaagtacttcttcatccagctgttatacatgatgagtataatgccatcactcatccatgatgtgtctttactttgaggatagtacattgagtcaccaccggagaaatatggtatcctcgtgccaaagtagttcctcggcaactcgatggttttttgggtacgaagtttgaacattctcatacgtcttgaggggttcctgactcttcccccatcctctgcgctgagcctctccaagtttatgtcgtacgaagcattcctatgaagaaggcgaa

SEQ ID NO: 434265 - DNA, 156 bp, Oryza sativa
tctacgttttaagccaagccaaccgaactcacagcccgatctatttcaaacaccactcgggttagcttccctatctgttgccatggcggctgctggtcagcagattctgctgctgaggaagagggcgccacgggttggggctgcaagcttgtgcca

SEQ ID NO: 434266 - DNA, 217 bp, Oryza sativa
tatccgatactagaacgcgagcgggcggcacggaccgggtttcttttaaagcggattcggcttgacgacccagccaacgtacccccatggacgccttcgccggatccggcaatgcctccagaggcgccggcgccggcgcgtacgagggcagctactactccctgctcggcattcggaagaacgcgatcaacaccgacgtgcgcgccgactacaagag

SEQ ID NO: 434267 - DNA, 426 bp, Oryza sativa
gtattcaatccacattgtattaattattaaaatacaagtgcgtttaaggatacaataatacacagctccaccattgtacatggtataaaataaatgaaaaaaaaaaaaacctcaaaggtgaaagagcagaaaatggacacaaaagtcacttctgatcatctaatgctactggccatacaaaatttatgcttaaaatttgtcatttaaattaacctaattattactctgagaatgataatacgcatgtcacaatctgattcaagtgcctgtaaagaaagatctcagcaaatttggtagcagaattcagtaagttgataatggtcacctaattatgtttgggcttgaactgtccaagtggaaataagacagagaaattaacttactaatttgtcaaaatggccaactgaaaacgatacacttgaattg

SEQ ID NO: 434268 - DNA, 557 bp, Oryza sativa
tcccctctccctctctttctctctctctctctctcccacgccaaacgcagtgccgccgacgccgccgccatcgagccgccatcggttcccgccttcagatcgatggcgtcggcacccctagggccggcccggccttcgcgccgccgtcgattcccgtctctccaccgcgaccctcacgccgaccgtcaacgaatcctgactcaagatcgacgccgccgacaccccacccagcgcgtcgattcccgcctccagatgatgccgccggcgctccgccggtgctccgccgagtgcaccgccgccccaaactccgccccacctcgatctgattcgccgagagaatcattcctgttgagccagcgaccccgacaactcttcttgccaccaacaccaccgtcttctccctttgtccagccaatcgccgggaaggcatcgctgcccttttcccctgatcgagtgctcgacctgcctggacacggtggtctacggcaagtctgcctggactcgggattctcacactgtcagctctggatctgcctttatcatagacattctcccac

SEQ ID NO: 434269 - DNA, 394 bp, Oryza sativa
acatcatggggccctcctaaggggtttttaaaaaatcgcagattctagttggccaaagaatatgtccaggaaaaggggcaggggggtttccattttggcagccccaacaaatttaacattgcccaaccaaccccatacaacaaaggtgcggccctacttttttttccccggggaactattcctaatatatctaaggaacccctgcgtttcccatgaaacatatttaatttgaaaacagtcttacccaaggcagctggtaaaattaatggcatctcccttagcaggggaagcatttgtttaatttggcatagccctggctggggggtcttaagttgtcttggatgaagcccccccaagggcaaggttccccaagttcacagccattgcatttttt

SEQ ID NO: 434270 - DNA, 234 bp, Oryza sativa
gttgttgtactttttgatcagggagtcctatgttgaggagcaccggtccttggtggagactcaaggagcagataagtcagcagatgtaaaagctggctcgcgcagtatccgaaaaggcggtaagcacactggtagctgatatgccgtttataaaaacaaaaaagagaaacgaccgcgtacaaaaagctactacgaacatggaggaaacaggtaaaaggctaagcaacacaaaag

SEQ ID NO: 434271 - DNA, 123 bp, Oryza sativa
tttttgtgtttttaaatttttttggttttaaatttattttttttttttttttattttttttttttttattttttttttttttttttttttttaaaaaaaaacaaaggctttttaaaattcaag

SEQ ID NO: 434272 - DNA, 426 bp, Oryza sativa
ttttgggtgacaacaaaaaacgcgaactttccctcgtgcaatcaggggttacaacccaagcctgaacaaatacctgaggaaaaaggggaaattaagaacctcacaccctaataagggattcggatttaccaaaaccaaactgcccttaaaatggtcatatgatgccggggatattatccgagaatttacaaggtacaaccttcattctttcttccaaaaaatttacttccttctaaaatgaatcaaatggttaataagccttgaacttcattggcatggtcttggagctccaaagtccacccatgttgacgggcttgtcggcgaagagcgcgtcgatgttctcgtaccagttgccctgatcgagctggtaacccaactgcatgtagctcggatcgtggtacaacgcgaattcatcagcgacagccg

SEQ ID NO: 434273 - DNA, 94 bp, Oryza sativa
gaaaaaaaaatccccgggccccaaagggtctaattggtgggaagggaaataatagaggcagggccccggaattaagattttaaaccccaccccc

SEQ ID NO: 434274 - DNA, 340 bp, Oryza sativa
cttcttaaaaggggagccaaggaaaagcaaggggggccccggtccccaaaggaacccccctcttagggggtaaaacccccccaccgggaaaaaacctttttaaccaggcccccccctggaaacaaagcccgaaggggcccaaccacgggaaaaaagggaccaagggggggaaaaggggtttttacgatttaaggggttaaaaaaagaacctcccttctgggggggcccaaaagaggccttcccccctggcctttgagaacccaagggccctcccccaaaaaatgggggggaaccccccccagggggtggccccgggcccgaaaaacaccctggggggggg

SEQ ID NO: 434275 - DNA, 191 bp, Oryza sativa
ttttcggtttaagccaagccaacccaaccacacgccgagacacatacaaatggactagggtactactctatgcctgttgagaaggccactgtagctgagcggattctgctacgagagaagaagcaggctgtgtctcaaagggtgaagctggtgcgaatagggtaccatgctgtgcggatatggcggagcga

SEQ ID NO: 434276 - DNA, 300 bp, Oryza sativa
atctatgaagggggggacaaattaaccaataaaaaaataaaaaaaacaccaaaattttggggaatagggggggaaaggaaaaaaaaaaaactaaatgcggggggactaaaaaaaaactgttatgccaaaaaaacccctaaaattttcaaaacaaaaaacacggttattggaccaaaacaacactttttggcattaaacaaaggggattggggggccacccctttgggggcctaaaaggacaggaggaggacaaaaaaatggcgggcgccccaaaaaaaatcaagaaagaaacaaaaaggg

SEQ ID NO: 434277 - DNA, 310 bp, Oryza sativa
aaattaaaatatttttgtttttatttttttttttttatatatttttttttttttccttttttttcactttctttagttaaaccaaaaacggataacaaatcccccaaaaaaaaccaaaaagggtgggggcccaatgaaaaaaaaaagttctcccccagaaaaaaaggaacaaagggccgtcttttttaaacgaaaaaaaataaggggaggggggtaaaaaaaaacggccaaaaaaaaaaccccaattttttttaaaaaaaaaaaaaaccgacattttttttggaaagtccggacaaaaacccaaaagccc

SEQ ID NO: 434278 - DNA, 355 bp, Oryza sativa
aacacaaagggggggcccaagggacattgggtttttggaaaaattattttggtagcaaaactgggggacaaaaaaaaatggggggccggggcttattaggggtcaagaaggaaaaaaaagggggggccaggggaaggcttgctcactttgggcggggggaacaggacacagggactagaccccaacaaggaaaaagggaaaccggggaaaaaaaaaaaaaggaaaaactaaaaaccgggcccagttcgggggcccctggtctccaccacctttttttacagggccctgcgggtgggtcaaaaaacaagggacccaaaaaaaatggtccccccccaaaccaaaatttttttttttt

SEQ ID NO: 434279 - DNA, 425 bp, Oryza sativa
ataataaccgggggggttttaaaacgtggggcttttttcctctccgactttttttttgttctgcgcatgggccttcaaaaaaaggccccggaggaaaggggtgggctgcccggggccccgaggtaacaaccgctttaggggcaaaactttttaaaagggaaagaaccgatgggcccgtgcccccccttgaaaaaaaagaccggggggccccacccgggataacggggcccaggggggggaagggggcccccacgggtaagggggtaaaaagggggcccccccccccggggggccccaaggcgggggccccggggcctttggggaaccaaagggcccaggggggaaagggggggggcccccccctggggggggggcccccgggcgggaaacccccccggggggggggagcaaaaaggggttccccc

SEQ ID NO: 434280 - DNA, 230 bp, Oryza sativa
gcttggaccctttttggggccccccttttttttttttgggggattgagaagtccgggtgtttacagactgtgggggttttccaagtccagcacactcacctggaaaaatatattctgaagaaaaggcacagcttttctctattcatgaagctgcagactgaaccatcatcagctatctgaaaccaacccagcatttccttgtggtcacccccagagggagggatgttttg

SEQ ID NO: 434281 - DNA, 465 bp, Oryza sativa
gtcgacgttggcgcagtgcgagcttatgtggtgttcgcgaatcagacagatgtatcggcgtactactgtatgcttggtgagaaggccatggtagtggagggtttctgggacgagaagaggagcaggctgtgtctgaaagggtgtcacgttgcgaattcgggaccattccgtgcggatttggcggtgggtgagtgtgggattggcatgagcttctggttccccgctgtgtggtcactacaggaacggagcttggctgcaggtttggtctggaacacgagcctgaagagcggtgagggcatagctgcaagctccaacacaatagctccatactttaggggaagtctttcgggtctgaagtataactacaccaaggttgatgaggcaaacaagtattatgagaagtatggcttgaacaagaagagaaagggaaagctccctgatagcaattcatatcgggacttaaca

SEQ ID NO: 434282 - DNA, 96 bp, Oryza sativa
ttttgggttttttttttttttttgggttttaaccaggacataagaggttgcatttgtgggtatcaaaagttacaaggagtttttcacatttcacaa

SEQ ID NO: 434283 - DNA, 379 bp, Oryza sativa
cgcgaccgtgtggtgcttgggcgacgccgacggcgagggggacggcgccggcgcggccgagccgggaaagacggggccgccgctgccgcccgggtggaagggcggctcggggtccggccaggggtccagccccgacggagcttggaggtatggctggggctgggccgctagccctggcggcaagggctccgggttcgggtttgggtacggcggcagcagacgcgaatgaggcggcggccgtggcggcggcggcggaggaagcggtcgagcatatggttacggtggaggatactgtggccaccctcgaggctttggaagtggcagaggcggtggcggcggcggcggcggccgcaactatggtggccgcagcagggggatt

SEQ ID NO: 434284 - DNA, 181 bp, Oryza sativa
gtgggtacaagcacttgatctttaaagttcaaagaccaccattgatcaggtttctaaaaggagtttcacaaagtttgcccttcgtcaacacatgagttcacgataggcgataggccaccaaggaccaagggcaggactcagttggggtgggtatacttactaatattttatatatctgcgc

SEQ ID NO: 434285 - DNA, 316 bp, Oryza sativa
aaagctcggcccgcactggaccggacccggaacttgctgggtcggacccacgcatgcgtctttttcctacacacgccttggcccctctcctgtcgccggcctgccgacgcggcgtctccggagccatggccgccagcggaggcgtcccagcctcggccacgcttcttctacttgcaatacacgccgcggccggaagtcccctcgccttcgccgtgcgcccggtttggagcccggagacacccggtggacaccagccattgatgtgtgccaccgactgatccttgagcaagctgaagacaacatatgcggcggacag

SEQ ID NO: 434286 - DNA, 381 bp, Oryza sativa
gcttcatacattaccttgcatgtttgcaaaaggacatttcaaaattttatcttccaaaatgccatcgtcttgcccgaggggtagatttagcattataagagctatgcaacgggcacattgcacattgccaccaattcttgtcatgatttacaagagaataagcgaacgctaccctattgttggtattatagccccccgtttaaacttgccatgtcgacactctcacgcaacaaaaaagagcatagttttactttctgtcgactcaagaagcccggatcaactgtacactagcaactgaatgtgctgataggaatagaagattcatatcttgactgacacttcagctggcacattgaggccaaaaagggcagacccaccatg

SEQ ID NO: 434287 - DNA, 283 bp, Oryza sativa
cgtgcgcttgtcctctatattggccgccctctttttttttttttgttttgttttttttttttttttttttttttttttttaacacggttttttttattgaaccaaacaaaaaaaaatcggattatgggcaaattctctcttggttataatgaattggcagaatggaccctagaaactaaaaatggccccattaatttgagccgcccgttttttatatatgggcacggttgatagattgacccttacaaaagccgggcgggcacccccccatgctctcgaaccc

SEQ ID NO: 434288 - DNA, 322 bp, Oryza sativa
gaaagcttgcaaaagtagaggagagacaagaaaattgcatgaagataacatttttgaagaggagtttggcagcttgaagaactctggtcaaggagcatggagtgaactgagtaaagtagtagcgtcaaacttatctgaaagtgttgtctcgctggcttcattcgatggggatattatgcattctgcatgcacaggcgtagttatcaaaactgatttatttggcacaagttacctgacttcagctagcctgattagatcttttgatgatgaaagcaagatcatgccatttgtgtctattgaagtacaccttccaaaaaacaag

SEQ ID NO: 434289 - DNA, 475 bp, Oryza sativa
tttttgtaaggtgtaagagctttgaagcaatcatcattaataacacttggtatgaattaacacaggtgagcatgagctcaagggtaaatctcttttccatctttttctctacctgtgaatcagtgaccaacatgctatacatatgccattgatttaggcctgaagaacaatgactgggaaacaaaaaatgaaaaaaagaaagggggagaagaatgaacaaaatttgaacaatgaagtaccaaaattatcttctcaaatccgttcgaccatgaatcgtgtgatcaactggcgttcaccagttcatcttcatcatatgagtagtccaaagttcttgtaactgagcctccaaactgttttttttcgccttgtaccatggaaggaacttctcagaaggaaaggtctctcatgtcgccttcgcgttcaggggctctgtatgaatatcccaattcttctcagattgtcgcctactatgctg

SEQ ID NO: 434290 - DNA, 360 bp, Oryza sativa
tttttgttttgtttttttttttttttttttttttttttttttttttttttttttttttcagtccaaacatacccctttttaattgactttaaaacccgggcagtttataggagggcggaagcatttcccccatttacaaataaaaaccccggggaaaaaaaggaatcaattcattacaatcgggccaaaatatgactcatctgttcttttttatcccacagaagggtccaacaaaacgacaaatttttttgcaggctatttacactgatgcacaaatatggtaacgtttatggcagagtttggaaaacaagaaccctttttcaactttttagggattttaacttacacagataacctaac

SEQ ID NO: 434291 - DNA, 438 bp, Oryza sativa
ggtcagctataacagccggtcagtattcttcagaaaggtttaaatcgaaacaaatgagacaattagcaggtcagcatataaggaggcaacaattggctcctatcaacaatttagaacacatgaaacaagggaaatattttaacctcgcaccaaaacataaatttctgcgtatgccgatctctttcaccaaaatctgtgcttaacagccgccttctcttcaataatgggcaaatggcaatgcaaccatgatcaccaaccattacacccaagctatgtcgaagatagtctcagccagcattacaagctcagtggagatatgctggtttttaagcttttgcttagtgaggcagcaactggtgcatgagtcgattaatcatctcataactggtgaacgtaatgacagcattcgggttgtccttagcaaattcgtagcacaac

SEQ ID NO: 434292 - DNA, 500 bp, Oryza sativa
  unsure (1)..(500): unsure at all n locations
tgttcctctcccacaccgccggccgcgtcgcccctcccctccgcctccgccgctgccgccgccgcctccctgcggccccagtttccgtttcccaagcgagtgtcccaagccgcgttgagggagcgggcggcgctccccccgtcgcccggcgcgtggcatcccgcccggccgcccgcccggatccggccggggcctcccaccgcgggggacggagcgcgtcctccgccgccgtcgccgccgccgccatttccggtggtcgacttcgccctgaccgagggagacggtctcgtccctctcttgtctgctgcagcttcctagctcctgggctgcctccccccgcggcttctcgggcgccgcgatgtcggagggcaggngaggtaacggcgcgcgagtgatggtccgggaggcggcctgcaacgccatcgcgggcggttcggctggtgtgatctccgcacggtgctgtgcccgtggacgtgatcaagacgcggctgcaggtgtac

SEQ ID NO: 434293 - DNA, 328 bp, Oryza sativa
aaaagggccccgacggccccccaaaaagtaaaatcataacgccatttaaaggggggaaaaaggccccacggccgggttttaattggaaaaggcggcccaaacagaccagggggatgaccatagggccaaagttgtaccacccgcaacatgcaagggacacctgggcaataagataccggggggggcggaacactctggggtggcccgcttagaggaccatcttgatctgggggccagaaccgaggacgcccggcggggggggagtctcctggaccatgcccgcggggcgggacccccccaccccctgggtcaataagggcaggaaggg

SEQ ID NO: 434294 - DNA, 323 bp, Oryza sativa
tttgggggggttttacacagatcgcgtctcccccgacggacagcatccacatttatttttcaagcctcaactcggaagacaacgagactaacgtgcctttcaccctaacagctacacggctcatcccaagaagcaccctacatttagggagacagagggagtcccagagggagaccttaaaacactagcgtgagaccgtttgttgatccgaggctttggccaggggggaaaaagaccatttgcctcaaccccaaaccgcctggagaaccctggcccagagaaggggatgggcctttttaaacattttcccacccccaaaggga

SEQ ID NO: 434295 - DNA, 375 bp, Oryza sativa
aacaaaaaacttttaacatagggaaagcctcacaaaaaaaagccagctccatttgtgggacccatggtaacaaaatacagtgtgcggcccctggtttacaattttgtactagaatggcgcatgaaaacctgtttacatttaaaggttgtttaagcggcataatagccgttaaatataacttatgatactacttagcatgacacgtaatatcagggtgcccaattttgatcaagcccccgggcccccaggtacctttaaacttatgcaatttttagccccttcacgagcattttcaacgcaggtgccctactgtacctttttgaccggcttttactttggatttggggaattttgtccattaaccaaatcttacca

SEQ ID NO: 434296 - DNA, 470 bp, Oryza sativa
  unsure (1)..(470): unsure at all n locations
ttttccgagttccgacgccgcagacccccttccacccctctcagctccagtttcatccagatctttctctattgtttcgtgaaaaaaaaacttcgccctttcatatttagaagattcatgtcggaacatgacggagacaaacaaactacgggaagtcttcagaccagttcttctcaaatggagaaacacgaggtggtgtgcggagataatgctagacttaaagaagaaggagcaactgtggataatatggatccttcccgtccttttctataccttgagaaattcgatcagaaaaagatggatgagcgggtaaaaattaaatctgcttgggccgccaagaacgtaaagaacgatatcatgacagatcctactcctcaggttgtgtttctatttcacttacagaattcagttgacagatcattctgttatattagntattttcttcctacctgcagcatnttggtgtatct

SEQ ID NO: 434297 - DNA, 446 bp, Oryza sativa
acttaacattgtatttaacatctcagcatcaccatagctgaatgttcttcaactcccagtgcgatacacaccaaaacaaaacacggcaagggacatgtagtaacattacagggctactagagagagagagagagagagagagagagaggagtagaacgaacatattctaccggtagcaccatctttcaccatttctgtatgtgcactggtattcacagccctctgggggttcttgctcttccacatcgtcatgaggacgccaatatggcaagggcacaggccacctgtttagcttgacactgccatctccagggattttccagccaggcgcatcagatggatcactaccattgccaacttcagcagcactactttcattctcaaaacatgccagaattttaagaattacatcccatggcatgtagggggtcctattttttatcata

SEQ ID NO: 434298 - DNA, 497 bp, Oryza sativa
cgaaaagaaagattagttcaaagtccacagcgagagatgctcagtttcagagcataaatacactctagaatgctgaattgaccattatcggatcaggaggaccttatgatgcagagaacaatgcagctcgttctcagggtgaagagatcgtcgggtttactacaccaattctccactgcggcgaactcgcagaggttaatttctttcatgattttctgatcattctgtgttcatgtgtgtagatcatggtgatcgattcgatgcaggttggccgggaaggtggccgtcatcaccggcgccgccagcggcatcggcaagggcgtccgcgaagagagttcatcggcaatggcgccaaaggttatactcgcccgacgtccaggacgacctcggctgcgccgtcgccgccgagctcggtcctgggcgacgtacacacagtgcgacgtcacggacgagcgcatgtcgcccggcggtggacctcccgtggcgcgcacgggcgc

SEQ ID NO: 434299 - DNA, 319 bp, Oryza sativa
aacttaaacccttgttcgattctttgccagcactatctagcactaccacaggccaagcaccaacaccaccagcaccagtatcatatactatactatactccgtagatcatgacatgatacccgatgaatgaccatgacctatccaaagagaaatgaaagaaaagagaaaaagaaatacaaaccaaacaccagacccgattgtattacgggtttgcttttagctaccagagctagtacgttgccccagtccagtttccttcttaaatacaaggttttagatcagtaagtacaatatctaaggacaagatggggtgcgaga

SEQ ID NO: 434300 - DNA, 504 bp, Oryza sativa
ctcagtcctgcaccgcgcatcttcactctgcgcgcgtgtttgctaaaattagaggcgctcgccaaggttggatcctcgagcttttatgatcacgactaaaactcttcgtcttgagccaccgacggggtatatgaagatggctacattcaccgccttaaatgggggttcacccaaagcaacagagggtgtcaacggcacagcaccggaattggacagaagagaaaatggacagcagcagaccaacagcgcagaggccagatcagctaccgaccggagagaaagagagacctggccggcgacaacagcaacagcaacaccagcaacaacaacaaccgcgatgtcgtgacaggctcccatttcctgggtgatggctatcaggattccgactcaactcacaagcggaagcgcgccctatcagactcaccaaggagagagcaccaaccttcaccgtccgagaggtacgagccatatggaccacaccggcctcattctgagtcacgtgat

SEQ ID NO: 434301 - DNA, 281 bp, Oryza sativa
tttggggtattttaagcagatggtatgtccccaacaccatgtcggattggtcttgcaacagccagtgcggtgccccccttgacatttacatggaaggggccatgtagtaacattccacgactcctaaatagagtgagagagtcacagacagaggggagcggaccaaacatattttaccggtagcaccatctttcaccatttgtggatgagcactggaattcacaggcctgtgggggttcttgctctaccacatcctgatgaggacaccaatgtggcaaggg

SEQ ID NO: 434302 - DNA, 241 bp, Oryza sativa
atgagcatgaggccctttctttgcggatgggggatcttggctccactggacgccacttggcaggcactcctcgtcttgcttggtcgatgaaaatcagcggccgaggccgcagcggcagaagctgccgtcttccttcaccccaaggcccaacagatcggggacgctgacactctgttgctgctacctttatcccccaaagagatggtggtggtcaccaggcaattcagccatggggcacgtg

SEQ ID NO: 434303 - DNA, 387 bp, Oryza sativa
ttctcttccaaccaaaagccaagccatatacagagagagaagaggcacaggccaaatcttgatcttcttcttgttcctcctccttcatctcctcttctcctttgcttcacctcatcggcctaaatttatcacccacaggcgacttggccagaggaggccgcggcggatacactgattgataggtacacagatatagacagcgatcgatactagcttcaaaacgagggatattctgatgctcttgcatctttagagagagagagagagagagccagacagagaggagatcccgtccggcgcgatgaaaaggctgcccgctgagtcatggccgtccgacgaagagcttacactccgcaggcaggcagaggctctgtgcgctcctcggcc

SEQ ID NO: 434304 - DNA, 487 bp, Oryza sativa
tcgatccagcatatcgatttgtatggatactggaacatattcttgaaccatgcatatcacttctgacacttcacacaatgggtcaaacatcaaaaggttgttcgagatataatccagggctccaggcttgctgttgcagatacattcaatttagtccccattgaaattaatcttgtaagttagggtgtgggtggtttgaaaatcctccacttagccttcacagagaatgatcttgagaatgaaataccaaatacagtatacacggtttgaggtttccggatggtttctgctgccactggacctcacaaccctacaaaggtttataatcaccaagagtccaggacacaactggatagtcacattgccgtatgttacaactagcattcagctggtaatggtatggtactaatgaaaaactgacatcaggataggagcatgctatttttcctttagggagacaatcatatttttcatatctacggagcga

SEQ ID NO: 434305 - DNA, 148 bp, Oryza sativa
tacaattaacaaaaaaaaaaaaaaaaaaaaaaaagcaaagctaaataggatgattgcataatatactctatctattactgaagcaccaatggcgccgggggcgttctccacggtcaacccaagggtgttccttgacatccccatcggc

SEQ ID NO: 434306 - DNA, 265 bp, Oryza sativa
tttgtttgagagagagagaggggagggggggggggggaatcgtgcgagggaggggtgggtttttcggtctatatctgagttatgaatcgctcccgcgcgccatgtcatgcgaccaggaaatcggcagcttgacatagtccttcctccgctgttggttgggcgcctgctgatagacctggttcgccaccaggctgccgacaccggagacaactttcggcggctgcctaccacacaaggcgaccttcattcccgaccaaacagacct

SEQ ID NO: 434307 - DNA, 378 bp, Oryza sativa
gcaaaggcaaatacgggggggatgcaccttcctgaattggttggtgccactggaaacatataaagtccaaaatggcccaaatgatacttcaggaataaagtaattttcagaactagaaggaatcgactgcacactgtatatggactttgggatgcaggggaatgacttgcctgaattccaagtaccctactgacaccatacatgtcatataagccacatacaaagacatggggcgtcatgttttctaaatgattcatcgacccaaaagtgtgacgcggtccttttgaatgacctgagccaggttgagatcaaaaagctcacaacgaattggcatctccatctcgtagaatggatttttcagaacaaaatcccggtaga

SEQ ID NO: 434308 - DNA, 482 bp, Oryza sativa
ctccgttgccgtcccctcccctccgcccccgatctacgcctgggcgcccgcctccgcgcccctagatcaccgtcggcctgagtcgccgggctcgtcgtcgccaagccgatcccctccgcagggagctaatacaggaaaattactttagtttctactcagcattcttgtgtgataatggcgttagcagcaatctacagccttttcatcattaacaaatctggcggccttatatactacaaggactatggctcagcagggaggacggacaccaatgacagtctacgcttggcaagtctttggcattccatgcatgctatctcccagcagctgtcccctacacctgggctgtgaaggcattgaccttctacaagcccacaactttgatctccattgcttccagtccctcacgggacaaagttttttgctgtatgcgatactggtgctcaaaatatcgagactctactgaagtcatatacgagctc

SEQ ID NO: 434309 - DNA, 441 bp, Oryza sativa
gttccaaaggcaatctgattaattatcaatcttctcacatgagataaataggtaaaggccatttagaattcatgaatttaatgaaaaaaatatcaagcctctgaaattcctgcaaaattcatacatttcgaacaggcttaagataccagcctatatgttggcaggggatttattttttctctttgaataagttgacatacgccagacagacaagtgtcttccatgcatggaacagtgcctctgatgttaaactccctttcctgctcctatcaaagcggcattgcctcgatgagattattgtggaatctttattgtttcacaataatttgcaacccatgcatgagcactttccaaaactcggagctcgccgacaagtagatctttggccatttcttttctgaatggatgcatgctcctagaggcagggccatcaacaatttc

SEQ ID NO: 434310 - DNA, 488 bp, Oryza sativa
attcaaaggggggcggttgcggcggcgactgcgactgctctgtattcctgcgttggctgcgcagcaagtctggaacccacatttcttctgtattatctctcggaacctcctctgcctttggaaggtcattatttgcatcggagcccattcaagagggggactgtataatgcaagttccttaccatgttcttacccttgataaacttcctcaaaagtttaacaccttacttgaccatgctgttggagatacatctaagcttgctgcgctcctcatcatggagcaacacttgggaaatgaatcaggatgggcgccgtatattaaatctcttcccacaagggatcagatgcatatcatggtgcttggggatctaaatgagctcatgcggtccaaaacagctcaatttatgatgaagccattgaacacaaggtacaagctaaaaggaatttttggcactgaagccagctcttgattcatttccaatttggtt

SEQ ID NO: 434311 - DNA, 323 bp, Oryza sativa
cgcgggcggacgcgaggggtccaagtggcaagttccaacaacaaccttcagtcggatcgccattgaacgaactccttgccgccgggcacagctctgacagcgatggtggttcattgcacggcggcctggggcagtgcctcaacgaccacagccggctgcgccatgcgcaagctgctggcgcgggtggtggtctcaccgccgaccggggacagctacctatgaagggttaacactaaccccggtccaagccgcggccccagccactgggcagcggcgcgcagatgatccccatgaagatcgtacggcggatttaattagcgacc

SEQ ID NO: 434312 - DNA, 455 bp, Oryza sativa
ttttggttttttttttttttttttttttttttttttttttttttttttttttttttttttttttttttttttttttttttttttttttttttttttgggggggagaaaacggcgcccctgggggggaccccccaggggggaccccaaaaaaaagccaaaaggtaaccctttaaacccccaaaaaaaaagggggtggggggaacccaattttaagggttcccgaacccgacaaaaaacggcccgaccccgggccccggccgaaaacgggaaacccggggaaaaaacccgaggaaaatggatttcaagggccccccccaaggggggaaaacaacgggtttaacccgggtggccccccagggtccccccctgaaaatgggggggacgggccccaacccgggaaaaacccgggccaacccgagggggggggcggacaaccacggggccttggggacggg

SEQ ID NO: 434313 - DNA, 468 bp, Oryza sativa
agaacaaccagattctccatacagctgcaaaaagctactttcgcccaaaacatacgccatcggtctgaaactctgaatcctgtcggcactcactcagctcaagttacatctctgttaaaaccatgcatcctacaacaagcaacactcaaggatctgaatctagagaaacaacactataaccctggaaaaagggggttgacattcagaggattccaagaaagctagtagctgaaatcacccgtcgctggttaatgtcaaggcaaggacaacacaggtcagggtgaaaatgatcgtagccgcggcgaaggccaggatggccctctgagagacgccctgcttttcttggccggccagctcaacctctttcagcaggcctctgatctcatcgacgtccgagtccttcgccgcatggattagcctgttatgaacctcatcgagtttggcgagccttctagctcggctggcgtc

SEQ ID NO: 434314 - DNA, 451 bp, Oryza sativa
actaggaaacaatggtatgtaggattctttatacttttgccaataactaaactgcccagttggtggcttcagaaaaaaagaaggggcaaatttactttgcaggagggttgctcaatgaaaagcaactcctgtttacatgaattacaacaaattgagctatagacttgcttgtcagaaaacaagcaaaaataaattacagaaaaaaatggtaagagaacaagcggctgtgatgtgagtgagggggagaccatgttacatgttgaatgaagttggtcaaattaattacaagctaacaaatcttgacatcatatatgcatcttcaagttcacccgccaaaccctcgttagcttccatggaattcttcatgttagtgtttgttatgtactgctccaatgcaccgtcaccccgaagaattttggctccacatcctggcctatcaattgaacctatt

SEQ ID NO: 434315 - DNA, 398 bp, Oryza sativa
tttgccgcggggtcagccgcgctgcatcagggggagggtaagctacctgttgcgcgctacaaagatgctgaggcacaaggcacatctctcacatagaaccctttagctactgcacataacatacagggtgcaacagagctgccaagatgctgttgcccacgggatgtggaccatatctgagtatctgtgccgaagaccatctctgatgaaggtcaacctcctggcatctggatgctcagaacgggcatgattgcgcttacaggaaatgtggatgtatcccgccatgtcgatcattgcctatgaatagctgatcccaacgtgagtggcatgagtgttgaatgggcattcaatttgactggacatacaaggctttctgtgacttgcctaatgggtgagca

SEQ ID NO: 434316 - DNA, 419 bp, Oryza sativa
ctcttctcttctctctctttttgttgcttccatttctcgttcttgcacggggaagaggagagaaagatgtgtgtcgctgtggttcgaaaaaggttgggcgtgagaggagagagaaagtggagtggaggggagagagagagagagagagagagctgatagagagatctgttcttgcgctctacctcacaaggacctcgggttccccaagacgctgtttcttgcgtcaccgcctaccaatgatcaccaggcctcacaccgtatgggtggcggtggcggtgcgtctgttgatctcaaacgatttgtgcaacctctcgctccggctgcaggtcttggcgtcaggatccccacttcctatagcagggatgaaatgttctctgtctccctggcatggccagactctgattgctaggacaacttct

SEQ ID NO: 434317 - DNA, 510 bp, Oryza sativa
  unsure (1)..(510): unsure at all n locations
caccaaaccagcacatgtcgttgtctctctccgaaatatcatttcgttttttaatcatcttttcctcctcttcgctaatcaccatgatttgcctccgagccgccttccccttgacctcctccttctcctcctcccctctccgccgcctcgccctcaagccctcctcctcccgcgccgccgccgacgccgacatgtcgtccgcccccgccaccgccatcgccgcgccggtcgagcacatcgtgctcatcaaggtccgccccgaggcggccggcgtcgggcgccgccgcggcgatggtgtcctcgctgcaggcgctgtccagcgtggtgcccgggctgtcgtacatccacgtcggccccgtgctccgcctccggtcgccggcggcggaggcgctggggccgacccacgttcttcactcccgctacgccaccaagcccgacctggcggcgtacgcggcgcacccggcgcacgtcgtcgccgtgcatgggcacgtncttcccacgcgctcgaca

SEQ ID NO: 434318 - DNA, 407 bp, Oryza sativa
  unsure (1)..(407): unsure at all n locations
aatagncactagaagtattttctgcttcattgctcattgacggaaacaggatgcacacacatgcatatggcccatacttattttcagttaggacttaggacatccacaacctagctaacaagtaacaacgaagaagacaagtataaattacaagctaccgatatcctgtaaaccaggccatgtgaatcctcttattcagctgctttgatataagtactcaaggaatcaactgatgtcacaaaatacagagcgattttgagatgacccagacatcggagctccatgagactcagttgcatgataaactcttcgttaagccttgctgatcatccatgtgggcatgcagagtgcattatttccttcgccagtaaactncttcaattaatttgcagctgataaatactaca

SEQ ID NO: 434319 - DNA, 390 bp, Oryza sativa
ggccccccaaaatatgccattttttatgtctcatgaaagggatcccggggtttaagtttcggggcaaagagggctcccaaaacgacattttatttttgaaccccacataacaggggttttttgacaataatacccaaaatcttaattccagaacttaagggaatctactaaaacttcatcaatcataaattcactggggcacaccaagccccttggagaaattctcaaactttgggtggccactggcaaaaatcatggttttgtaccatgcctttccaggagccttggttttagaagacccccccgggctgagcttggtcctttgggaggcgagcttttaaggcctgggcttgacacccgcagcctaagtgagaggtgccattttgggcc

SEQ ID NO: 434320 - DNA, 66 bp, Oryza sativa
ggtcggtgcggccaccggcggtacggccggtggcgccggcacgcccccgcccggcagccccagatc

SEQ ID NO: 434321 - DNA, 66 bp, Oryza sativa
gatctgtttctgccgggcgggggcgtgccggcgccgccggccgtgccgccggtggccgcaccggcc

SEQ ID NO: 434322 - DNA, 479 bp, Oryza sativa
gccgccgccgagggcgccgttgctgctgctgtccaccttgctctgcttctcggggacgcggcgcacgctgcccttgtcctcctccacgggggtggccggggtcggggtggcggcgctgccgcacccgtggtggcagggcggcgcgcgcggcgcggtgaagaggatctcgcagatgcggtcgcggcggcgcaggagctcctgcggcgcgtcggcggcggcgacgaggatggcgttctcgatcacgtcgcagattccggcggagccggccgccccgcggaggagctcgcgccaccgatccagccggtgggacatcgccgccgcgggcacccgaggtcgggctgcccccacctccacctgcacccccacgactccggtggctcccctggcaccaccaagaatagatgccctctctggtcacctgctgctgctgctacaatcttgaatttctttctccccttatcagattacgttgcaccaaa

SEQ ID NO: 434323 - DNA, 314 bp, Oryza sativa
tctttaagctgcgacctccgttgcgcgagagagagaacgagtcgaacggaaggagttgggaaagggagacgcgagatttgctgttaccactaggaggccatggtggtggtggtggtgtgcgtgcgggggaattaggaggaggagcagttgatggtgattggcataccatggctttacccttgatagagttccttaaaagtttaacagcgtactcgtccatactcgtggagatactattaaacttgcttcgctgcatattatgtagcaacagttgggaaaggaatctagctgctgcggcggatactaaacatatt

SEQ ID NO: 434324 - DNA, 317 bp, Oryza sativa
ggactgaacccaggcgggaaatccccacaggattaatttcgcggcacaagaggttgttggagcattacatatttagatgagcggcacacccaaagaacccggagcaggtggccaaagtttagacccatacatagggcacccagtgtttgcatacaagaggatactaggggattatggcggctttttttttttttttcggattgagcaaagagatgccccccccatttttttttgggggggggggaaccccgcggggaggaagtttttcggatgcttcccctcagaatgctttttgcacttggtctaaaagggggggc

SEQ ID NO: 434325 - DNA, 408 bp, Oryza sativa
gcttgcaatatttgcatggcatatattcaatctatattcaaatacctccaaaatatttgactcccctgacccaaccataccaaatgcattcacataaaatctgtttgttcagataccattttagttaatagacccatctattagaagaagatgaaagaaaaaaggtaagtctgaccgcattgattcaagcagcaggtccaatacatctgcaaggagacggttcgaaaggtaagtcgccacattgactacaaagagcagagccaacagatcctttgcatctctgtctcatggatttcccaaattcatgagatacatcaaatgtaccgagcagaaagttttcttcaacatgttaatcacattatcccttgtcctggtcctatgactccaattaaagaaggcctggtgaca

SEQ ID NO: 434326 - DNA, 262 bp, Oryza sativa
  unsure (1)..(262): unsure at all n locations
actgcttgaattcgaaacatggattcgaaacggaggggttttgagttcaaattgtcttgcctggcgcaaatcttgcaaaacaagaagagggggaaaaagagagagtaacagacatgaggggtgaagggggaaaacgtgcgggctccggctggccctaccgcccccttcccgtacgacgtgctccttgcggcgagcggcgacggcgacccctcgtcgccgcggccaccgtctccatcgccgncgacgtcttcttcgtcgccgc

SEQ ID NO: 434327 - DNA, 388 bp, Oryza sativa
atatggatattaatgaatctagacagagatcataccttaattgtacaactctacatgacaactaggccattcaaagcacgcaagacaggatgcagctgcttgaacggaaaacattcacgggggtctgtcttattaagccacctgtaccgggaaaccgtgcccgggccgcattgaccgtaactgtaacaacagcatggcttcctcgagccctaccaagagcggtacgaccttgagcacctgcctcacgtactatgacattaccttgtagacactggcgccaacgttgctatccaacatcgggacagacaggtagacaaccagggacagtgcgtggtgacaaaagtggatccaccttgagctgtagagactgatcacatccggcctatgc

SEQ ID NO: 434328 - DNA, 307 bp, Oryza sativa
atgagagcaatgctttgacttggcatcggacatgccaattgctgtcgggtcccaaaagccggcaacttgatgtgcagatgacagcgctgcatcggcagcagatggcaccgagccgtcagctaatagctcggctgtacccggttgacacggcataaccaaccgtcacaacctgcagacagagactagagcctctggtgctgctgacagtcggggacagcgatagcagctctgacgaccagacaacgcggatggtgcggaccatgacacgggcgatccggagcacggaagagctcgtcaagcacctgac

SEQ ID NO: 434329 - DNA, 445 bp, Oryza sativa
aacgacacggagcgcgacacgtggcagtacgtcggctacatgttctccaaaacggcgcgccaactcatgctcgcacgactcggcttggacccggaacgcgtcaacgccgacgtcgaacaattcaaaacggcgcatccggcaagcgatttggacgcgaagaagaccgacacagttgccggtggcgataaggcgacgccggccgtcggcgccgacggcgccgttgcatcgaccgccgcctcgtcgacgtcgaccacgtcggcgccggaggactttttcgaccgcgtcgccaacggtggcttgcccgacgcggacggtgccaagacgcccgacgccgctgcgaagccgtcggcggccgacgcgtttgcgttcttcttgccggcgacggcaccggacgccaacatcgagaatttggtcgcacgcacgctgttggtgggcaattttgcgg

SEQ ID NO: 434330 - DNA, 386 bp, Oryza sativa
aggatgaagccggtctattaaaacacgcttagggcatcagccccctgaccatttatcaggcagggtgccttgggtggaaacgagagcatatgcccgaaactagtaagatgtagctatgaacaagacattgcacaagaaacaatggataataaattaacaactcaaatatgcaacagataatagatcaacacagggccaacatatttttacatcttgaacaaaacaatggcgacaatctcacggacagcagggcacttcatccaccacaacgttgcaccgttcaaatggaagttggttgtcctcaccaccgtctccattcagctctgatcgctctgttgtttgtagaagaaggtagagactggccgcgtgtgaagccattcatgtct

SEQ ID NO: 434331 - DNA, 502 bp, Oryza sativa
  unsure (1)..(502): unsure at all n locations
tcgttatgctgaggatgaccacataaaagattatgctgcatgggctatttcatttcttagaagcaggtggctatcaaagaatcagattatttttgatgatgattgttctcaaagaaattctagtgattccaatcaatcgacaagtttttctgatgaaagcttagtgtggaacttaagtcagtggttgagggatcttaacttcgaaaagcctgatagtatggtgtcaacaagtacagtcgcaactgttttgagatgcctttccaaagctcctagattgccatctatagactggggggttattgtgcggcggtgcatgaatgttgaggtacacattcctgatatgttgacgaatcatcatgatcctaaattattgagggaagaatgcctatatatttctctagctcatgcaagtcatatcagtcctcttctgcactttattgatgatctgacagacttatncagattcaggagattagaaataaatntgcagtccattttgctc

SEQ ID NO: 434332 - DNA, 248 bp, Oryza sativa
tttgtcttggcgtgggtgagagagatcggaggagatcccgtggcctcctggatgaggccgccgacacctgccatgctggccctggcccttgtggctcgcgctcgccgcggcggcactgctaggtgccgcggaggaagacgcggccactgaggatgcctacctgacgctgctagaccgagaccaacacgtcctccgtgtacgcgtgctggccaagtccatccagaacacgggtacgcaccgggacctgg

SEQ ID NO: 434333 - DNA, 422 bp, Oryza sativa
gttcttcttctctctctcttgtcactcatcatcatcactcttcagcttgcttggttggttggtggagcttgggagttgaggtcaaatagccatcgatacacactcctctttcttttctctcttcatttctttctttacatcgtctctttcttgatttcccaatctactaagctcctactagctctgtgctctgctgcttcctcccatccatggcggcggttgccagcgacccacctacctacaagtagcttaagctcaagctcagctcagatcggagaggggtggtagaggtagtagcagcagttgagagagagagtgaggatggagagcagatggaggaaggccaagatgtcgctggggctcaacctctgcgtctacgtgcccaagacgcttgacgatcgcgactcggcgtccccgggtcg

SEQ ID NO: 434334 - DNA, 383 bp, Oryza sativa
cccccaaacactaattcagggggcaaaggggaaaaaattccggggggagaaaaacaaaataaaagttggggttgccccccactaaaaaggaaaaggggggagcgcatgcatgcccatgcccagaggcgaaaaacacgatttgggggaacaaccccaaggggcacacttgcacccccccccgcaggggaacccggtcccttccccaagggaaaggaaggaaggccgggagccggggaaaacattccataatcgttttgggggccaaaaagggggcgggcaaaaagggcggaaattttgcaacggggtttcgctgggctaagccccccacaaacagagcgcccaaaatcgggactcaaaacaaaaagaattggggagggggggca

SEQ ID NO: 434335 - DNA, 444 bp, Oryza sativa
tccacgcgtccgcaaaacgatatctctgctacacgtgcaagcatgttgtgcaagattgtgttcctcggccttctgtgtgggctcgcttcggctcagtcaaactatgacttgctcaaggatgcttactggagcacagtaaccgagcagtcggactcacactgcagaattgacgttcagttctactaccgcaactacttggctatgaacaccggcattacatgcgccactcctggcctgtttgctggtaccttcgccttgagtgcaactgacatgtacatccagtacgccagcactcccgaaggcgtttctggcctggctttaatgaagttcgcctatgctttcaccaacaatggcaacactctcactctgacagctgcgggcctcgtgcctgtcgttctgcagaagcagcctgctgaccctttccggatggtgtttgggatggca

SEQ ID NO: 434336 - DNA, 299 bp, Oryza sativa
ctagcctcttatttatttggaattaatctggatatttggtcacattcctgggttttctgcctgcttgccatctgtgattgcaaagctccacagtgcgaatgataagtatttatcaacaccaacatcggccacatcatcctcaaaaatggaggatacacagtggaatttctcttttacattggtctggaaccactgcgccgtggcttgtgcttgggaacttcttcattaagatcgccacatcaacagctcaagaatatctcaaataacagcaggatatagagatggagcttattactgat

SEQ ID NO: 434337 - DNA, 408 bp, Oryza sativa
gtcatctgaaatttctttacaatggtgtattcacagtcactgcagcctcattgatgtcacacatacacagtcagagagatgattaattaggccaagaatgatattgcaaactcaattagagaaaattaagctcctaattaagattacacgtcgaattctttaaccactcctactatcttttttactccactaaccacgcacgacgaacttttttttactgcgtgtaccaaattaatgcgctactacactttctccacctcccggcggtggcctcctcctcgccgccgtctcctcccgccggcggcgccggcgacggacacgggcacgggcacggacacgccgcacaccgtgacggcgtgcctacccagcatccgcaccccggcgcctcctgatggcgccttcttggcc

SEQ ID NO: 434338 - DNA, 340 bp, Oryza sativa
ctaggccgggcgttcatttctctgacctagcatctctctcaatccgggcgccgtcatgtaggagccgatcaagaagcagcagcaactgctgcccgccgctgcggcttgacatccgcctccgacgccggggtagaccaccctggatacactgctggacgcgtccgccgacacatatgaggaagaggacgagaagaaacagcgactgcccacctgctcggtgacggaaccgcggacagggcctccgtgagtggcatcataggtgcggagggccaagataccgaatacgctggtcgacacctacgacgaggactggatacgacgggagctcaagggcctgatc

SEQ ID NO: 434339 - DNA, 73 bp, Oryza sativa
atctgaagttgcaaaccaaagctttattagaagttggtaccggcacacaagctagcaccggcccttacaacaa

SEQ ID NO: 434340 - DNA, 259 bp, Oryza sativa
cccacgcgtccggcggcggctgcctcccctcgcggagacttgtcggtggtcaccgccgccgccgccttgccttcgcctccaagcaatcttgacctagccaacctcacctgctccccctcgcgcgcgcaaaaaaaaaaaaaaaaaacagagagagaaagagagagagagagagagagaggaaaacctagctcgcctcgatggcggagatcgaggtggtcggcgacggcggcggcggcggcggaggtggaggggcgaagca

SEQ ID NO: 434341 - DNA, 437 bp, Oryza sativa
acatgaaagtttattgtattaaaacacacggcttagcaaaattaggaagcgtgctcataaaaaatactgtaaggaaaaaaaaaagaagtgaagaaccagctatcgactcaaaattgaatgagaacgtgatcaatcgaaaaacttcacccctctatcaaagtcctcgcagaccttgacgtgcctggccacgccctacttgtcgacgacggcggccatttcccggaactccggctggcccacccgcggcggcgtgaggttgcacggctccatggacacggttcgactgcacggaagagcggggaccctgtggccgtgcgcgggcatcaggatcgtagggcgacgcccgcgaggctgctgtccaatacccgaacgtgacatccggacgtgacagctcagggaagccctgcaggggatctcgcagctctttgtccagacag

SEQ ID NO: 434342 - DNA, 261 bp, Oryza sativa
ctacgtctctgcggctgaggcggcggagcgggagccgtgcggcggcggcgcgcctaggagggaggagaaggagcggtggcgccaggtgctggtcgtcggctgcctggtggcgctgctcctcttcgcgttcttggtgctcgggcgggagagcgcgtcggaggttctgcagatagcgaactccaagctgtccgccatgaacggagggtttacgacgaaaaacccttctcatggcggtggcgccgccaagcatgccgacgagct

SEQ ID NO: 434343 - DNA, 87 bp, Oryza sativa
acgcgtccgttgtaacgttacactgagccttttctattaataaggaatcgtctgttgtgctcgtgcccaccaccaacaccgtagcaa

SEQ ID NO: 434344 - DNA, 385 bp, Oryza sativa
ccccactcccatccccgccgccgccgtgccactcccatggccactcaacggcctgtcggcgtcctcctcctcctcctgctcgccggctgcgcgctgccgatcgctcgatcccgcgcggggccaagaacggacgagggtggcggaggtggcgcggtggcactcgacacgagacacgagctcctgcggacgcacgggctgtcgggtgggctgccgcctcgcggggtggagtcgtacagtgtcggctaggccaccgggctgctggaggcgcgactggtggagccgtgctaccccaagtacgacgaccgtgacctgcccttcttgcacaccgtggtgctatgctacctgcatcttcgcgcgcacccacgctttgagggcctgtcccagg

SEQ ID NO: 434345 - DNA, 457 bp, Oryza sativa
aaactagataaattgcaggcatattcattcaagcatcacaaactggatagagctattaaaagcagtactaatacaaacaaatatcttgagccagatacaacaccacgaccgttttctccattagccaagctcaaataaccgaaaacttaccattaagggagtaaaagtgtaaaactacaatacttacaactgaagtaatgcaatatgtcattacatacaataggtcaacagccacagtttaaagctcctcaaagattatcatctcatgatgttcaatagtctgccttagcggacacaagttgatatgctctagccagcttcccgtcaccagaatcatttggctgccaagaccaaggtgtaccattattcctcagctcaggcctcaacctcaccacaagcattaacaaaaccaacaacaatcccgcaaaaatgaaaccacacagcagtgagcgagtaa

SEQ ID NO: 434346 - DNA, 373 bp, Oryza sativa
agggaagaagccgagaaatccagttttgtttttggacttttgataatgcaaaagtgacttcacacgacagtcgacagtagtacaactgaagatggataatgtccacataatcacaatcagctttatcaagcaacggaacaaaaacgtaccctgtacccagaatcattattcatttattcccttttcatgcataaaaaacctattcccaacaagggtcgtactagcccacacaatcaggctcgtgccgttattatcaaccgatcaaattcaccacagattttattctaattaaaagtgcagctcatcgatcatcatctgtcgccctcaactcagacgtcgcaagtgagccagagcggctcatgaaactcgccca

SEQ ID NO: 434347 - DNA, 355 bp, Oryza sativa
ttttggtgatttaaatttattggggatgacagttgtaagacactggacacctcgatccatcattggctcaggagaaaaacagaagctcgacagacaactaaattaagacggagaggacgagaagaatgaaaaagccctgggcgatccccatgacaacaactacagcattgctagaccgagcccttcaactaatccccgggcagcggttcacgctagctcgcccgatgggcggagctgcatctccgaatacactgggaccggattaattcatagggcgcagcgcctaatgacaacggacacggaacgaaccagggtgttcgaccacgggctgacccggcagcgcgccaggtaggcg

SEQ ID NO: 434348 - DNA, 206 bp, Oryza sativa
agcaaccactgacttagcctgttggggtcgaccttccccttgagagcaactgacatatacatccagtacgccagcactcggtgtgcgtacctgacctgtctttcatgaacaatccctatgcccttaccaacaatggcaacactcttactttgacagctgctggcctgatgcctgtggctctgcagatggagcctagctgaccctct

SEQ ID NO: 434349 - DNA, 228 bp, Oryza sativa
ttggggtttttttttaatattgtttgtattttttattttttttttttaaatactacgaatctacacaactttccagatcgtagttcattaaatcattaggagtggagggagtacaatctttaatatttgaaaatacttttcgcatattcaattatcctctgaaaggaacactctccgatccttgcttcgattcagctccagatccagctttgccgtcttcggctggct

SEQ ID NO: 434350 - DNA, 65 bp, Oryza sativa
tttggggtgtttcaaatatggattgcaatttgaaaatctcaacaagaatcatcatcgctccgact

SEQ ID NO: 434351 - DNA, 584 bp, Oryza sativa
  unsure (1)..(584): unsure at all n locations
cgcggcgaccacgtcggcgaggagcgcgagagtgggggccctcctcctgtccgccgtccgcattctcgtcgtgtctggtttgagctgctgctgctgctgctgccggtgggagttgggctgcttgcttgcttggtttgattggtggaggtgggaggagtactggagtaggcgagtagctgtgggttggggtcggcgagggatccgggcggcggggtatggggaacgcgagcggcaaggaaggggaggagaacggcacgtngcngccgggggccgccgccggagtggctggctcggcgggggcagcggcccgggctccgccgccgcttatgccgccggacgccgtgatgcgggagctgcctcccccggtgccctacgtcttcacgccgcaggttccagtagccccactgcatatacctactgaattttctcctgttttcaacaattcatggataaatgaatcggatgaatccaccaataaccatccccaggagaagggaattccaactttgatctcatggagtcaaggaggaaatgaggtgtttgtggaggatcatgggatacctgacatcangggggtgttagag

SEQ ID NO: 434352 - DNA, 133 bp, Oryza sativa
tgtttttttatttaattatatatgtataccccgttttcgtttaatacctgtcttgacccattaccccacaaaggacaaccttctaaaagaccatgctacaaaatcaagctgactaaagaaacaaagagagatt

SEQ ID NO: 434353 - DNA, 160 bp, Oryza sativa
attcgtcaccctcttgtaactcattgaccgtctcactgtgacatatggacccttacacccctcttcctcctgacctccggcgagctcttcttcgagggctgcagggagaggcgtcgtgggtggagactcaaccggagcatgcacgcggccgagaggcacg

SEQ ID NO: 434354 - DNA, 63 bp, Oryza sativa
tgggtttttaatattttcccctcttaccctttacctcttcctgctaagaatggacacacacac

SEQ ID NO: 434355 - DNA, 453 bp, Oryza sativa
caatcggagcttaggattgttcaatagatatggcattttgatgatatccaatgacatgagccagtgcactgctgctattcctgaaaatttagcatgtgcacaagaggacatatattcgaaatgtataagattctaagtaagaagctttggtgtcacaggatcacagttagctaaccatcgtgtacaatcggcagtaccagatatcaagacaaaattattgccactatatatgtggaattagtagtatgcagtattcactaggatgatccaggtgaatacctgagggatcagctggctaactctttgggctatgtaggtagctactagctgcatgattatcatcaggggtatatttctttggtgattgatttgagcatttgtatgcccatcttctaatcgagatcaaaagcagtttgctgttggagaaactgcatgctggagatgtccttcccg

SEQ ID NO: 434356 - DNA, 284 bp, Oryza sativa
ttctgcccaagagcgagcctagaaccaccacgggctccgtcgccgatgacagcgcttctcctcggatcagcccggagagccctctcgggagctcactgcaccagccgcaagcgaggcaacgaaagcgcttggtccacgcccaggatgtccatcaactactacctacacagctgcccacaccttgagcgcatgcccgcggacgagccacccagcagagcatgcgccaacccgaccacggcggcggacacgcatcaggataactagcgccactgctactgccaagg

SEQ ID NO: 434357 - DNA, 152 bp, Oryza sativa
  unsure (1)..(152): unsure at all n locations
aagaggnnnnggccgacaaggaaagataaaaagtactggaccattacagaagatcataaaaaagcggacacttcaagaagaaggaaagacctgaagtggctccctcaacagaggaagaacaggggtagacagggtacacaaagggaggcaag

SEQ ID NO: 434358 - DNA, 224 bp, Oryza sativa
agccgaaacattagaacaggtccatttcaccaactaaagctactactgctactccactcacactactgtcaccaaccttatctacaaattaaaacgctgaaagcatcatattcctctaatcactaggtatatatatatagtttgtcccctaagaaagaacttttgattattctttgacatttgtgaattttttggtcagacaatggctcaggcgttgggattct

SEQ ID NO: 434359 - DNA, 387 bp, Oryza sativa
actacccttctattgcatcgctttcgtcacgaccgaagaggcggaggagtgtataagggcacgcccctagactatcgccatggtacagtgcgctgccaccggatcaaccacggggatcgggacgagctaccaggggaggtaaatagccggcgagcgattaacaggtgtgcctcgccgcgcggcgcagtcgtggaagtggtcgtcccaggtgcccctcgacgagccgcctacgccggcgctgacgaccgagcaggtcgatctatgcaggcaggcgctcgagtagcttcgaggcgatgtgtggccggccggaagccatgtccgacgagttcaggagactccaagtatgcatgtactgtgttcgaccaatgtcctcggcggcacgatgtg

SEQ ID NO: 434360 - DNA, 437 bp, Oryza sativa
agcacaacaaagcagggttctcaccggagaggcattttgttttcaatttatactgcttgtatgcccaaatcgatatatcggatgtcactttaagttagtactttcacacattagtaaattactaaactaaaagagagaatcagtgtatatgagtctattggggcatcaactaattacactcactagactcggttgatgtacatcaccagctacatttgccatgggtatgtacatctgggcaatactgcatatatttgctcagagtcgccgtgccttgtatgtgctgccacaaacttaaaaccttcgacccctcctacatctacaaaactgcaccccggtttctttttcaagccaactctcttcatttcagtgctaatgtttgcagagtccttccatcttccaacaacggtatatacatttgacaaggagactcttca

SEQ ID NO: 434361 - DNA, 411 bp, Oryza sativa
actatgggggcagctgcgcctgcctgcagcgcgcccgcgcctgaccctggccgggtctgcgccagccgtgcattccggccaccaccagcagccgccgcggccaccggggcgccctcctcctcctgccccccggcaccggcgaccgaccatccccttgccccctttccccgtcgggttgtgaggcgagatgagggagctgcgcgtcgccgtcctcatcatcgcggtctcgctgccgtccttctccgcgtccgaccgacatggagatgccctgttcgaatgaacccaaaaccgcgatgtgctggcaatcagctttcggattggaaccaaaatcaagtcaaccctagtacatggaattctgtaatttgtgacaatccctactaatgggctcaagctacatttgctgctcgtgga

SEQ ID NO: 434362 - DNA, 474 bp, Oryza sativa
  unsure (1)..(474): unsure at all n locations
gtccgccctttttttttttttttgataacacgcatatatatatatgcactcgttccaaatatacacaattttggggccgcgcacgcaatgcatactctgcactgcgcacattaagggcatgttcactttgatgtcaaaaaaaaaaccttatcaaattttggcaacttgttaaaattttagcaggatttcttatatatagttactaaaatttgacaccaactaaatgtagccactttttttttggtagctttaccaaaatttagtaaggttcaaagtggcatcaaagtgaacggccctaatccattatcagaggctaatactctgcatctgattctctgtacataatggagtagcaaattaagttgctctgaaaaagttattcagaacatgtagtggtgcttgtggtcgatctttgtgctgcttctccgcngtggtgggaagagctagaggaagaagagcagcagcagtagggtc

SEQ ID NO: 434363 - DNA, 393 bp, Oryza sativa
aagagtacataaacttaatatatagttttgatcataagatcggcagtagtacagattcagaatctaattgacaaacacaaacaccgcaatataattcggtaatcaagcaagccatgatatcagctgcaccccatcatcctccggttaaacattcatcaacgacgacgtgattaacctgaaccaagaaatggcatggtatctgatcaagatatataatcctgatgaacagatggattttaagtttttaactgaatccattaaaatggaagtgaattcagatgcttacaattgagtgcacaaactgcatcaatggaggagtacatcagaaaagggcgccgtcgattgggaagtcgtcgaagctccacaggttgacgccggcgttcatgtcggtgt

SEQ ID NO: 434364 - DNA, 450 bp, Oryza sativa
ttttgtccgaggcccacactggaccctctaggaggccaatcacggcgcctgctcgtcctcgaagccgcccgacgagtgccatgtaccgaagtaggcggcatcgaccgcgctgcacgctggcgctcctacgtgcagcgtgcggtgccgaggccaggcggacaccgttggacccattcgagcgcgtgcgccaggccgtccacctgttctgcggcggcaccctatcccgatggcgccaccaccacccgcctccgccttcgacgaccacacccatggaactccgcccggaggaggtagaacttacgaaagttgaggaacacactgtgaagttagagatggagctttttgtcacggaaaaagaaacggttaaggttttgaaagaaccacaggcagcaaatgaggtagctgccaccttgagatacagctagagaacgcggcatctgagagcgcagc

SEQ ID NO: 434365 - DNA, 248 bp, Oryza sativa
tttggtttacttacaccctggagtagctgctgaatttcaactttgtgcatagaactaactaattacacatgctgattattcataagtctgtactattacactgcatagctactacttattgatccagaagaaaaagaagatgttgctaattaatacacagtcttggtgctgaagctgccatgggtgcaagaggaggagtcggcgacggcggtggtggcggtctggctttttcttcctgtgcctgtgct

SEQ ID NO: 434366 - DNA, 527 bp, Oryza sativa
cttcttttgtaaaagaactgtttgctaagatgagaccttctaatctttctgctgaatcaaaacgcgaactggtcctgtttttgcttgagttttgtactctcactaaaagcatgcaggctgaccagcaattacgtctatgtagggatcttgctagtgaaggtgcgtctgacatcatgtctgatgtgatgcagagtcaggataaagtgctcgtctcagctgggacagacatccttgtatattttcttaatcaagatcctaacttactgagatcatatattgctcgtcaagaaaattctcatgaaggaaattcacttcttggtcttctggttcaaggcatggtaactgactttggtgagggactgcactgacaatttctggaaattttgaagattctgatggatggatttgctacaaatatgcctacaaactatcattggctttctcccctatggacattacccaatcaacatctagtccagttggtgtgggtacaagagtttgaaaccattctgtgaagactgaaatac

SEQ ID NO: 434367 - DNA, 308 bp, Oryza sativa
ctgggtttatatataacaacacgatttattacattattatatattcctactgacaaaccgtgacacactaaaataccaaactatatactgtaacataacaatagtcgtattctcatgacaatacataactcacttaaattttgtaaggtcacctattttttatcttgaatagcaaaagcggttatgtatagtttatgcaactaatcacttaattaattcataaataaaagtctatttttaactttaagcagattttggcgccttgacggtcttgaagcggggtttctttgcatcgaacttctgcttgg

SEQ ID NO: 434368 - DNA, 341 bp, Oryza sativa
gggaagggagggaatgtccacctggagcctccaccgccagtagtgcccgtccccagcgcatccgcagacgatcctcccttccaggctcaaaaccacaccacccccaccctagagagagaaacaaacagaccaacaatcaaacatactagtacaagtcgaggtagagagagaaagctcgagacaagctaaactagctagagagagatcatgtcggtggcggcggaggggaaggagaagggggttggtggttgggggtggttgtgcggttgcgggggcgtgcgcgctgtgcggtgcggcggcgcgggtgttccgcggggccgtcgcgggcgcgctgtgctggg

SEQ ID NO: 434369 - DNA, 493 bp, Oryza sativa
gctctccactcatcgtcacacgttttcgtacgttacaccactgatcgatcaataatcgctcatcacccgatcgatcgatcgatatattctggcaaatctgtatatagatcgagcctcttattctgcttcttcaggtaagtcggcgtcgagctgatttgttaacgggtaggacgacgtcaagagcggtagctcgagctccgttcgcagccatggcggatgagcatgattggtggaatagcccttgctctgcgcgcaccggcgacgacgaagccgcgtgctcgacggcggacgccgatgagtcagcggttgggagtactccgatgagcttcggccatggcggccagcctgctagtttatctgacgccgccgcctcctcgtcgtcgtcatcgttccttcttgccggacaacacatggattattggacgcaggacttcatgggaggtagagcagcggcagcggccaccgcgagcttcgacacgctgctccagcttca

SEQ ID NO: 434370 - DNA, 225 bp, Oryza sativa
ttttggttttttattttttttttttttttttctttttattaattatatcaacccatcccaaacataccccacaacacccacttaagcccacaaaaaccacacgcagttaacaccggcaaggaaacccgctttttaagaagacgcacacgcgcacttaacacattttctcctgccccaaacataccagctcgcaccatctcccacaccacaagttcataagacaag

SEQ ID NO: 434371 - DNA, 452 bp, Oryza sativa
gcctgcggtagcagcgctgatcgacctcatggcgcggcggaggggccagtcagcagccaacgggcccaagcccaccaccctggagctggtggaccagcatgatgaggcaccacaggaggacagcgaggatgatggatacggggccggagacgacctagacttagatgacagtgactacggcctgccaggtgccatgtcagcactggctctggccaagaaggccacaggcaggccagggacagcaggcagcggcagccccattgcagcagtgcagcccgccaaggccaagcccgtgcagggccctgttcgtgtgcggtcctggcctgctggtcccctgccctccgagcacagtgatgacaagagtgagaagggtgtggccaagcctaaggacaagatcaacaggcagattggcctggggcccctactggctgagctcaagatcaagggacaga

SEQ ID NO: 434372 - DNA, 397 bp, Oryza sativa
acattctcgctgagctagcaacggaagcgcggggagtatacaagagggggctctagagccatatctggcgcctatgcgcccccgatccctgatcggcctcacagtgcagtccgagctagtacgcatcgaccacgtacacgacctctctagcctacccgagcactctactaaaagagctattgcggagaactgtagctgtgcgctggctgacacaaaaagtacagacgttgcgtctggcaccggcttgccaggaaatatactcgctggtgcagtcgctcatcattacgctggcgattgtaccggtccatcccacgaggcgctctgagacgctctagatgggacactgatgacgacagacgcgggtacctgagaagcgcagtctcaggaacatcaggac

SEQ ID NO: 434373 - DNA, 423 bp, Oryza sativa
ttgacgcgtgggaaaacctcgtggaatgggggagccgccggggaagaccgggcgacgtgacgcgggcgggacggcgccggcggtggaagaccggtggacgcagctcccgccggagctcctcccgctcatctgcaagaagctgccggactcggccgacttcgtgcgcttccggacggtatgcagcgcgtggcgcgacgccgccccgttgtccgacgtcccgccgcagctgccgtgggtcgtcgagcgccgcgggtccgcgttccaggcgagggcccatttccgcttctactcgcctagctccgggaggacgtacggcgtccgtggctacggcggccgctcctggctcgtcatgggcggcgcgtgccaggagcacctcgtcaccaccgtggacctctccacgacggcgctgtacaacccgctcac

SEQ ID NO: 434374 - DNA, 64 bp, Oryza sativa
  unsure (1)..(64): unsure at all n locations
catagcacagcagtacagtaaagcttaggaatcctcttagagcaggccagcanccttttttttt

SEQ ID NO: 434375 - DNA, 270 bp, Oryza sativa
gggaattaaaactccatcatggtcttccgggaacaggaaaacaatcctgaagacaacatcacggagaatcagcccaccgggccgcctgactgaggttcaagacaccaaaccaaatgaaacacgggatcagcgccaaaacaagggagccactggatcagtgggcaaccacagggtggcccctcgtccagggccttcgaccgggggttacagcacgccccccggagggctggatcaggagcccacccccggcggagaaggacccgttgggaa

SEQ ID NO: 434376 - DNA, 338 bp, Oryza sativa
gctgcgcctgctgcggcgccccgccataactcccgggacctacgcatgctaccatcagccactccaagacgctagctgcattgtggggagatagagaggcagccatggctctttcaccactaacaaaggcggtgacgggggcgcctgcttgcaatgcaccctggatgctggcggcgttaccgtcagcagccgttcctgacgatctggctgacagaagagaaactgctgaacgcactgctgaagatcgtgttccacgagatcagcgccgacgacgcctacgcctccatcgacctgcacatcctggagcagcctttcgacaacatgtgcgacgtcagcta

SEQ ID NO: 434377 - DNA, 170 bp, Oryza sativa
tttggttttttagaactattttttttttattcacataaatcacagctagagttcaaacttcttagaagcactttctggggacaacagaaggcccagattcatcatatccttccttggagatccacattcgtgggaatgccgacaaccgaagccacgatagactcctccaa

SEQ ID NO: 434378 - DNA, 263 bp, Oryza sativa
ccccctccgcctcttcttcctcgcctccgcgggctccttctccttctggaagctgctgctgctgctctcgctagggttagggtttcggcgatggaggcggcggtggcggtggaggtggagaggtgaggagaggaggtcgcgggcgcacgagtgcggtttggttgattggaaggggaggagaggggggatggacccggacttctcgcgggcgatcctgggcccgagcttcgctaacgtatacaacttctgtaacttcttcgacc

SEQ ID NO: 434379 - DNA, 75 bp, Oryza sativa
tgttttttttttttttttttttttttattaccacaaccgctgaaggaaggaaacgcagagcacaacactcacccc

SEQ ID NO: 434380 - DNA, 205 bp, Oryza sativa
ttatcgccatggccgcgtcgccgtcgccgccgccgctgcaggaagatactaagatcaggatcaccagacaagatgtcaccgaacaaactacgaggacaaccggcttcgatggattttccaaagctaagatgagtaatgatcagatctacttgtacatcgaagcaaacttgcagtattattatgggaccctgactttggagtacag

SEQ ID NO: 434381 - DNA, 358 bp, Oryza sativa
tttatcattgaggagcttggcatagcaagcagaagggatcaataaatagcatgcatggactcgaccgactactacgtccacgtccgggaaggcgatctcctcgcggacgtgctccccggctaggcactttctgtaactatatataccgaagaacaaacagtataatcgctgcatgactaaaaaatgatttgcgtactgcagctctctctcatcacagtttcgcaatggccaaaaaaacactactgcaggaggtttgcgcggtggcgctggtggcgctgtgcgcgtgcggcgtcgcggcgtcaccgtcgtcgccggcgggagcggtgtgcctgaagcacgtcgcgaggatcacggagta

SEQ ID NO: 434382 - DNA, 351 bp, Oryza sativa
acggcgggagcaggagctggctgcggcagggggagggggggcggcagcgggaacggccgagggcatggggggcgacatggcgggccccgtggacggcgttccgggggcgctgtacagcggcagggagctgccgggcgagcccccgtagtacgcctgctccgagcctcgtgaaccgcagtccgaagatcgaccgcacctttcgctcgttccgcgcagggcgtggccagtagcatagctggaactactgcgaattcacaacgaacaccgtgaagcacggcaggactatgattctatagttgccagatttgtttcgcgtagaggcagatgcaccccgtgatgaacaggcttcac

SEQ ID NO: 434383 - DNA, 292 bp, Oryza sativa
ttttcgccgctgctgtcttctctttctgtcttccgaggaagaccttaaccaccaacctcagccgttagaaatgggccgcaggcacaccgggacggcgggccccctggggctgatcgcgtttgggttcacggcgtgcctgatgatgctgagcttcctgtacccgggggcggcctcggggtacatgatcccgctggcgttcatcttcggcggcattgtgctgatcatctgtgggatcattgagctctaccgcgaggacgtcttccacggcacggtgttcgggtgctacgggtgc

SEQ ID NO: 434384 - DNA, 237 bp, Oryza sativa
tttgtgttttttttaaatagaaaaaaaaaaaataaataaataaacaaattttttttttttttttttttaaattaatttattatcgaggccttagaaaatctctcagatggaaagaaattgttattgttttaataaaacaaaatgaaaattgcatttttttataaattttataattttgaaaaatgaaattatagttttaaataaacataaaaaaataaaagtaaaaaaaattttttt

SEQ ID NO: 434385 - DNA, 420 bp, Oryza sativa
gtctcggcaagtttggcatagcaggcagaaagcaatcaataaatagcacgcatttactggggggttaatataggcagggattgatacaggacacacccgtaatatcctccaccggtctaggcactttctgtatctatatatacgtaagcacgtcctgattcttgttgcatttctcgtcctgatttgcgtcctgcagctctctctcatcacagtttcgcaatggccaaaaaaacaatactgcaggtggtttgcgcggtggcgctggtggcgctgtgcgcgtgcggcgtcgcggcgtcaccgtcgtcgccggcgggagcggggtgccggaagcacgtcgcgaggatcacggagtacggcggcgtcggggacgggaggaggtccaacacggcggcgttcgccaggcggtggcggacctgtcgc

SEQ ID NO: 434386 - DNA, 279 bp, Oryza sativa
gtgggaagggagggggaggccgaaggggaggtgctcgacatggaggccggcacggtgcggtgcgcggcgaactacgcgccgctgacgccgctcagcttcatccagcgcgccgcggcggtctacggcgaccgcgccgcggtggtgtgcggggagaggcggcacacgtggagggaggcgcggcggcggtgcgtccgcgtggccgccgcgctcgccgcccgcttcggcgtcgcccgcggcgatgtggttgctgtcctgagcccaaacgtgccggctatgtac

SEQ ID NO: 434387 - DNA, 487 bp, Oryza sativa
gaaactgaactgtaaataaaatttgctctgcaactttcatcggctatacaaattacaaaaccggatgataaagcctgcacgttagcaacaggaagccgcacgcgtgcacaaccgcaaactaaagcagcaaaagtacatacaagtcctaacgctctacatatatcgctcatttactaaggtggtgttagcgcgaacgaagcaatggactcaaaatctgtacaccgctaacaccagtttttatacaaacatcaatacatacgtacgtatacacatacatgcgtatacacatacatgcgcacgctactatcgtgagcacccaaaaatgactccaatcacgaggatccaactgcacagccacgcatccgcaaaattgcaacccaccaaccaaccaaacatacatgtgttccagaccaacctgaacttggtggatgcaggaaaacttttttttttaccctcgtttaacgagaaaccgatcgtcttgccccag

SEQ ID NO: 434388 - DNA, 89 bp, Oryza sativa
ttggttttaggaactgagaataacttgcaaaacgcaatgtctacgtagtacaatacaatcgaatcgcgtacgttgagatggaaggcctt

SEQ ID NO: 434389 - DNA, 165 bp, Oryza sativa
ctgtgccagccgtccgtatggttatcagaaaccctacagagcgagatcgacacctattactgtagaaggatgagattgtgtcaatcactggagctgcgatcatgttggatcatgcagtaatggaacaccttcctctgagtatgccatatttcggatttctgatgt

SEQ ID NO: 434390 - DNA, 224 bp, Oryza sativa
aattatgaaacagcgaaccataaaccatccgatattatatgaggcgggggtgaacaaaaaaatcactgattatgaccctgggcagaaaacgtatgcaggtctgggccgcagaacactacacgatggaaactaaaaactgcacatcccccaatcaacctgagaggccgccgatccacttataaaatgctgtagagacaggtcgaagtgaagacagagttgggggc

SEQ ID NO: 434391 - DNA, 472 bp, Oryza sativa
aatcatgaaacagtgtaacatattttatcctatattttattagtcgtgtgtgtgcaaatgaattcctgatcatgaccctagacagagaacatatgtgtatatgtgccacaaaaatttacacgatggaaactaagtactccacatccccaaatcagcttgagagatggccgtacgtatcatatcatgctgaagagattggccgtggagatgagagagttggtggcgagtccgatgaacgcgatgaaggaaaaccacaccgcgctgttgatcttcttgttgaacggatccttgccgaagctcgacatccacagatcgttgcgggacgctgccgccgacgaggccgacatgaggagatacgccaacacctgatccaggaagaggctgaagtagtagctcgaggtgctccggaaaagaaacctcggcgaaaccaggcggcgaatctcgccgaacgcttgcgcgatcgagtagatgc

SEQ ID NO: 434392 - DNA, 366 bp, Oryza sativa
tatcgatcactcctccgcctccctcctggcggcctacctccgcgacccagcaaggaagacgaccaacaggaggagagagaagaggaggaggaggaggaaaagctctatgtctatctctctctctctctagatgagagtcctttcggccggcgcggtcaacccggacggctgcggccgccgcaatacaatcgatatcgacgctgcgctgcgctgcgctgtcccacccgtcgaagccgaatacgacggatcctacacccgttgaccgtctacgccatcggaggccgcgccgagccctggaaccccgcgccgactgctgctgcctccgccgactacgcctcctatagataccgccccggctcaccgcgg

SEQ ID NO: 434393 - DNA, 357 bp, Oryza sativa
ccacctgtcttctagacagcaacactctgcgggggggaggaagggggaggagatcgcgactctcggcgtgagcgcggtgggcgcggtggcgcggagggcatcaggatggcggatgagctcgctcctggaggtgtcccggaagctgaagaatgagctggagacgctgacggacaacccggaactgatagcctcgatgggcgcgctctacaccttctacgtgcagaacaccccgcaggcgcgccgtaacctcaagtcctacgtcgagcagcgcggactgaccatcaaccgccattttctcgacgccttcctgcctgaccacaaggcgttggatcgcgtcagggggaggtgcacgcgctc

SEQ ID NO: 434394 - DNA, 301 bp, Oryza sativa
aaagctggaacgcctgcaggtgccggtaccggaccgcagggcccggccagacccacgttatcgtttgacaaagaccacagagagagaacgacacattgaagcgaaaaaggaagagctagagacagtggctgaagcagcgatcgcgttgcaacatgaagtaatggaacaacttctccggaggaatccatattaagggatgaagattgctgacgggcactcccaagcgcgaacgaaggcaaggattggcgcaagacaatgggagagggcgaggacgatagaaagaagccaacacagaacaaag

SEQ ID NO: 434395 - DNA, 401 bp, Oryza sativa
gtccgttgcgagcgccaccggtttgcgagctctccggccaccgccgcgtcgcgtgtccatgtcggcgtcgtcgcgcgcgctctcccgggcggggttcctggcgcggcgcggcgggatcgggatcctcgccgccgcccggtgcggctaccacacccggcgccggctgccgctcacggcggcggaggtggtcgagggcggcggcgccgcctccgcggcggggggcgcgtctacgtctgaggaagccgggacggcgtcgagcgcgatggcgcggcggatggaggaggccatcgacagcgccatggcgcggatgtcggagcccgagtggtctccgttgcggaccgggacgtctgactacgcgccgtcgtgggccgacggcgccgcccgtgggttgctggcgctcg

SEQ ID NO: 434396 - DNA, 437 bp, Oryza sativa
  unsure (1)..(437): unsure at all n locations
acgttaanattatgccagaatggttggggcagcacgtttcccttgaatacattaccatcattaattgtcccaagctaacatctctgcctaaaagcttactgaaccttaccgctttaagagaactgcggttgaagggatgcgaagggctggagacgctaccagaatggctgaggcttctcagaactgccaaggtgacttttacacttgatcgcttgaagaatattatcgctctcagaactgctgttggagggatgtgaagggctggagatatcaccagaattgtttggacaccttgcttcgctaaaatgcattgaaatccaaggttgtcccgatttgacagatttacctgaaagcatgaagaatcttattgctcttgatgagctatggttgggaggattcagtagcctaaccggatggatgggaagttcatttgtctg

SEQ ID NO: 434397 - DNA, 473 bp, Oryza sativa
gaagtatactgaacaaacccatctgtttgaatcgattgatcatctgaccaagaaagcatctatttaaaatttgaggatccgatcaagaaagcatctactactacttgaccatctgatcatcaagatcgaacaaacaaccaatacaataaaaatactaataataataatgacagcattaagactcagatttaatttaattgtcctcacaccaaactttacctaagcatcattaatcaagctaccatctatcactgcatcacaagctcaagaagcctctcgcttcacgcgccggcgccggcaaattgatcggccgcggcgagctctcgccggcgagcgctacggcggtggtggcgccgccgccgccctccacgacgcggtcgccgtagatgtgcaccgtcctcgggttcggcccgcgggagatgacgcaggtgtagtcctccgatgacggctccatctgcatctccgccggtgac

SEQ ID NO: 434398 - DNA, 216 bp, Oryza sativa
acgtttacttgaacgagaaggaacagggcgggcactgggggttgaatgcatagcccaccaccagcggggagagagtatatgacagtctgaacggacactgacacgacggtaccaagctgaactggggacgatctgagaaagaacacttgtgaagcaaagagacagaccgtcgcagagtgaaccagacgctgaaaatgtataacttgatccatagga

SEQ ID NO: 434399 - DNA, 241 bp, Oryza sativa
gaacacaagcataaagaatccttactgtattaaaagaactagggcttaccataccatcaaaaggatgcttttacacgacaatctaaagtttcacgatgctagatttgatccatatgagcactagaataacacctcctaagatataaaccctattaccttcatgggcgaggtcttctacgataaacgtatttaatatctactcccatagtacatcagttgagctccatcaaaatatgatggt

SEQ ID NO: 434400 - DNA, 462 bp, Oryza sativa
  unsure (1)..(462): unsure at all n locations
ttttcgtccacgcgtccgcggacgcgtgggtgaactccgcgctgtgatggaaattttagacttcatgtgttctggtgtcaaccaagccacagatggatcagaagacatatttgattcagtaataccggacgatggttgcaggctggtatcagctgtatcgtgtgtatatattgacccatatggttctcatttactgagtaacatagatacatccaggataagatttgctcacccagatcttccccagaatatttgcaacacgttgggcataaagaagctttctgatgtcattgtagaggaactggatggaaaagaagaactaaagatggtgaatagcatttgctctgttactctggacaaaataaaagagaagctgcttagtaaatcgttgcacgatgcgttaaggattgttatgatnggtgtattcactcattttcctttcatttgagcactcaatctggc

SEQ ID NO: 434401 - DNA, 264 bp, Oryza sativa
agacagttaaatgttccgagaacggatggggcagcacgtcgctctggaattcgcgccaagacgagtcggggctaagctaacacatctgcgcgagcacagcagagcacagcagggtatcctggacctgggcccactggttgagataaaggtacagacccatagagctaggtgcacacagtgatggagccacgcatcagacacaagctccgtgttggccgaaagctatgaagcggctcatacggggagagctaccttggtaccaat

SEQ ID NO: 434402 - DNA, 353 bp, Oryza sativa
cggaattcccggttccggctcgacccacgtttacttatacccgtggtcccatccagttcagtggccctggaagcaacgatgcgaaccacaccttgatgttggaactcggcgccgaggcatagagagacacgacgataccgacgtgtaccttttaaattttttgttcttacagttttgaaaagttgagatggaacctcgcagagtgacctgcaggctccatatttgtggagtgctcaataagaggttccattgggagtttctgtggagtagagatatgtgtaccaataataactgatgttagctatgcatgatccattgctccatttttacacagaagttaacttggttttatt

SEQ ID NO: 434403 - DNA, 501 bp, Oryza sativa
  unsure (1)..(501): unsure at all n locations
ctcttcttccttccacttctcattccacagccatggcggagtcgtgctacgtgcgcgtcctcttcctcctcctcctcgtcgtcacgccccttccgatctccattgcttcacctctcaagcttcggctatctgcctccgaggtcgccgcgcttgaggcgcacgcgccgacgccgccgtcgccgtccccgcccgacacgccgacgacctacttcgaggtggaccggccgcaccgaccgccgccgggcagcttcggcccgtgctccacgctgctcctctcccactccttcggtttcacctacacgctcccccccgtcacggcaccgtactccccgacgtcctgcctcgccgacgacgggggccgtgcgtcggcgatctccctcgcacgtctcgagtggcgcgccacctgccgcggcgtccagttcgaccgcatcttcngcgtctggctcggcggcgtcgagctcctccgcagctgcacggcggagccgaggccccagggcgtcg

SEQ ID NO: 434404 - DNA, 373 bp, Oryza sativa
cgctgcatccccacatttgtcgttttacagccttgggagctaggtgctaggcgcgccgcctccgcctccgccgcccggctgctacgatgttttccgtacccaaagttgcacctatgacgagatggttatctgtctccgatgtcagccggcttgaggtgtaggctcctaggccgacggacgccgcgaaccccgacaagacggccacactattgcgacggggacctgctcggagttccgcttacctgggcattataagcggcgcgcttacccgatggcggaagaagtcaatgccggtcacatgaactctactcatcgagaccaatctgcagaattgcacgcactgcctgaatagcacgagctgtccaacatacct

SEQ ID NO: 434405 - DNA, 148 bp, Oryza sativa
aaccaaatcataggaggtttcatttttttttcgcaaagaagagcagcatgctccattgttcaaccaaaacgtcaggacaagggataacagaccacaaaccctgcttcaacttgcggtaaaaaaaacagagcggacccccctaacaggg

SEQ ID NO: 434406 - DNA, 303 bp, Oryza sativa
ctcgttctagttcgcgtgcggacgccctggttgatttgtgtttttggcgccgtctatgcctcctcctcctggttgttacgaccctacccatctccatagattgaccgctgacgatctggttatctgcctccgatgccagcgcgctagaggcgcacgcgccatcgaggacgtcgtcggacaacgtccgacacgctcgcgacactattgggaggaggaccggccggatcgaccgtcgccgggcagataagggccgtgctgcaccctaggtctgtcgcactccttgcggttcacctgcactctact

SEQ ID NO: 434407 - DNA, 408 bp, Oryza sativa
tttccgtgtaacttggtccactgcaatggaggggccagttctggaccagattcaccctcctcgtgctctggaagttgagtggggcctctctgcgctctatgtcctgatggttaccatagtcccaggacaactggcccttgtactgcttgtccaagccgagcaacatccgaggcagcgtcagtattgatcacaattctgattgtgctgattgtggtcttgttgtactgggccgtattgcgggcagatcgtgagctgatcgaagagcacaagcagcggttgaattggaagatggaggattggttcgaggaggattaccaagagcagcgcatgacatctgtgtatcgacgcgacgactcgaccatttacagtttaccgaaagccaagccgaatgtgacctacaagatgaaa

SEQ ID NO: 434408 - DNA, 390 bp, Oryza sativa
aaaaagagctaaggaaaatatcatcacccacaaaaagggcgccacatgcatacatttaaaacaccatttttttggtgccgccaaaagccccccacttttacttattcagttaaagacttcaggcgaaggctacctttcaccttagggggcggggaccccacctacggggtcttggccgactcgtttttaaacgggggggcccccggggatgactcgccgaaaaccttggcgatcccctcgggggggatggcggggaggtcctgggctccggggaaacccttgtcggccgggggggagaacacctggggggacttttcggcccaaaaggggggggggggcacggggatctgggccccctggggaaacaacggaaggttgttgagccagccc

SEQ ID NO: 434409 - DNA, 344 bp, Oryza sativa
ggagaaacattttttttccatgtatttgggggaacatgcccatttcaacatccatgtaatccgatgttgaattaagcaagcaaatttaagcatgcagagggcactgtttagcacacactggatgggttgctagctagctagctccatttaggtcccttttttttcatcatgattgacacttggtaaaattaaccaggatttagcttgctagctgagctggtctgaccaccatgcatgcatgcaagcaaggccaattaaatttaaaggtggccggccataccccacacagcacatattcggggggtaaaacaaaaaccaaagggaaatcctccccaactttgatt

SEQ ID NO: 434410 - DNA, 348 bp, Oryza sativa
aaataaaataataattgactaaaaaaaaaaaaaaaaaaaaaaagaggggaaaaaaaaaaaaaaaaaaaaaaagaaaaaaaaaaaggcccaatggccacaaccccaaataaacataaaagaacaaaaaaacccgtgaaacaagaactaaaaacaactataacgctgttaacacactaggaaaaaaaaacactaaaaaaactaatcaaaggaccaaagccaagggaaaccaggaccaaaacaaaataagagtacagggttaattactggtaaaccagatcaaaaaggaaaaggacctcggggaacacaaagacttggtggaatcttcaccagcaattaaaaaaaaaccga

SEQ ID NO: 434411 - DNA, 457 bp, Oryza sativa
gttggagcgaaatgtactgtttttaagcatgtaaaaaagattgaaagggtggactgagatgaacagttgagatggaaccttgtacaactccatgataacatagggccagcggaccagcattgaatattgtgagtacagagccaacatggattgagttaggcggttcatacatacaaactttgggctgtaaattaccgtaaaggctgttggccgaaatggctcatccttttctttttctcagcagaaggcctaacgctctttgttgccaactgagaggcaccaatataagctgctgagtccatacctaggattgagttcatttgatcaaatgcgggtaccgtcttgatcctagccttgatagacatagaacctacctattaatcaggctcagtagcagcagtttgttccacccaaacatttagtaactgggatgaattcgtgtacgttgcagaattgt

SEQ ID NO: 434412 - DNA, 334 bp, Oryza sativa
tttatttatcgaccgcgaacccactcagagctagagctatgtgcgggggcgcgatcctcgccgacctcataccgccgtcgtgctccgggggacacaccagaaagaacaagcggcggaggatcagcgactactaggacttccaggtcgacttggaggagttagacgacagagacgacgactccgacttcgacttcgaggccgaggcggtagacgagtacgacaaaggcgctgtcgacgaccacagcggggacggcgcggtggatcttgcgacgactgcgacgatcgcgtcggagattccacatgagcgtcatggcgcgaggcggttccgttgagt

SEQ ID NO: 434413 - DNA, 360 bp, Oryza sativa
gaacaggctgaatacaatacctttgtaggccaagtccgttaatccgcggaacacgatgatgacagcgaccatccgagatcagaggcaaaagatgagttcacatgctgctattattgacggggccgagatgcttggccttggatctaacttagtgcttctagatggtccacgacggcgacatgggcatgaggcccgaacaccactcgacttggtgacagcaccaccttggtatggttgtacctgcagaaccgcatgatgtccccggacaccgacgcctcgtgggaagtaggctcgccttcctgggaaggaaagaacccgcacggggactggaatcactgctcggacgccctcgtgaccagc

SEQ ID NO: 434414 - DNA, 500 bp, Oryza sativa
  unsure (1)..(500): unsure at all n locations
ttagggttcacttgtttatggaaggcacggccaagagatttacagagcaaacttaggtttggatatctgcaaggaggcatttttgtactccttgaagtatagtatacctcttgttgcataccatgaggaacaatgtttgaccctctttgaacatcctttggttgatttgttgcacacaatccactatgagaccaaggtaaaagtggtgccttcagttgaggacctcttggggtattcatcttttcagaagttgcttttccttgacaaagtggatggggattcatctgtactgagacagcattggtcagaactaacacaaggaagagcacgtgttatcaaagcgcattcaagtatgattgagattgttccacttaatgcttcaagggtggtggtataaggattttacttgatcatcttggaataactgaagattctgatcttgatgctgtgggagactacacangatggctaagcaacatatttacttaaccattcttaag

SEQ ID NO: 434415 - DNA, 545 bp, Oryza sativa
gacgaccttttcctttaacctgccaatttcttccttccttccatccgtcctgcaacctcctcctctgcttctcgatttctcctcctccactccatcgtctctctctctctctctctctctgcagctaactcctccgaattaggaggttcatcttgatgtaattgactggattcaataaaatttttcattatcttgaaaaagaaagtagcggaggtgcaacgttggcatatggagaagcggaggcggccggcggcggcggcgatgcttctggtgctcatccctgctgcatcgcgcccaccccatgggatcgtagcagcaacagaatccagtgtccagaatagtgagcagagctttggtttcaaccttacacttgccaagactattgtggagtatgcctcagctgtctatatgacagatctaacagagctctatacatggacatgctcaaaatgcaatgacttaatccaagggttcgagatgagacgtctaatcgttgatgtccagaacctgcttgcaggcatttgtggtgtcgatcacaatctcaa

SEQ ID NO: 434416 - DNA, 466 bp, Oryza sativa
acagccaaaactatatatatagagataccatcagggagttgggttcacaaaacgcactttcaagttgcacaagtacatacgggacgggtacctagccgcaactggtatttccgaaccaacaacctgcacaccgggatctttgacgacgacattgacgccgccgtttttgtcgtcgccgccggcgagttgccgtgcgtgctgcagcaggagcgtttcgggggggctcctgcccaggacgatcctggaggggctccagtcgtcggcctccatgtccactccaaggtatgtcaggggggctgacgcgcttcaaaacaggaccaggacgcttctggagcagtctggatctttgccgctgccgtcgcaaacttgggagactgggctgccattgacttcatgttcccagacctttgttgggaagtgatgggatgtttggtctggaaaaatgaaaaaaaatgggggcaaatgc

SEQ ID NO: 434417 - DNA, 424 bp, Oryza sativa
gctgctgacaagacaagcatcgtataactaatggtaatggatttaagaatttcacgtggttaacctttgacgtgagaatcactctcatgagatgtgtgcaaatgtaacccgttcatttttgcgatcatacggcacatcatgagaaggtaaagcacgcaacacaactgttcttaccgtgagctaaccaaattagaatcttattctggtaattttcttcgtggatctcaatacaaatcgtagtggaacctttgccttccaaaatctggagtccaaaaatacacaggagataagcagccatttgctcctggaagaatgagagaagcttgcgcgccggtgcctcctggggctcatgaggaggccgtcctggtgattatcttgagccgtcatcgtcggcgtcattagcatcttcgagcacattgcaact

SEQ ID NO: 434418 - DNA, 235 bp, Oryza sativa
cactttcacacatccacactgagggtacactctactcgcgcgagaggagggaggataggcgacggcctactactatcaggctcccgcctccgtcggcctaccatggacaacccgctctgcaccgacatcgacgactagtacttctccgacagcttctcggatgcgtatagcgtgcacgacctcatcggacgtgagctcgacgagaccagggccgacgagcacgacgacgtcacca

SEQ ID NO: 434419 - DNA, 84 bp, Oryza sativa
gttaaatcccgagaagacgtaaaaaccaaccagatgcctgtcacttaatcgaccatttacactctggaaaaagagggcccaaca

SEQ ID NO: 434420 - DNA, 183 bp, Oryza sativa
gttccagctgggccggggcagcagaagctgtcgtcccatcctgctccatgcccggcccctcgccgccggcatcgcctcctcttcgcgagggcccgccgccgtggcggcgcggacgctagggcggctgctgctgctgccgccgccgccgccgatctcgccggaccgaacggggagggggagggc

SEQ ID NO: 434421 - DNA, 98 bp, Oryza sativa
atccggcaaaactatatataaacagaaaatgacaatgatcttggaaaaaaaaacccgctctcaagtagggcatgttcatacgggacggggtacctaac

SEQ ID NO: 434422 - DNA, 491 bp, Oryza sativa
tttttgttgtgaagaagctcctgagttgtactacaaatgaaggcaaacagatagaaagatagaatgactatttgcggcgactgatcgctgcgggtttaaagtgttggagctcaaaatcttgcttggattcgtcactggccagaggtcgggctcgatgctcgtcctcttcttcatccatggcgttcatgggctggatgacatgttttggtggctcttcgtgaagaaggtcctgtcgcgaggtggatccttcttgctgagttgcagtcgtagcacgcgagaggttgcccatgctcacttctgacgcacttggacctcgcaaacgctcctccttgacttcatcgtcttctgccccatcaatagaggtccggtagtagattggattacgcgacatgtgtagcttgcgattggataattgaaacgtgctcggatccacctttcgcaatgcgttctcgtcgacttgctccttttgaaagagactttgcgtaccacat

SEQ ID NO: 434423 - DNA, 83 bp, Oryza sativa
attattggttttttaatttttggtcgctgtatctctgttggttgtctatttttttttatagtgatgtttttttatatgttgtt

SEQ ID NO: 434424 - DNA, 373 bp, Oryza sativa
  unsure (1)..(373): unsure at all n locations
ctgaagtcaagttacataggatatgccgcatgctgatcaagatccatagcgtggttgaggaggccaaagggaggcagatcaccaaccatggcaccctcgggtggctctcggagctcatcgatggcgcataccaaggccgttacttgctcgacacgatcggatgcggggagcctgatcttgatgacaagaatcgcgatgaggtagatcccaagcctttctccttgtccaagttcaatcctgcaaagcgtgtgcgcgtcgcggctatcaccgtgaggaacatactgtctcgccacgacatcngtgttgatgagattgatagggtggatgagagcttgcaaagcatgtgtgggtgatctcaaggagttcatgatgc

SEQ ID NO: 434425 - DNA, 372 bp, Oryza sativa
  unsure (1)..(372): unsure at all n locations
tcgtttattttttctgcctttgggtcatacgacgaccgggcgcactctggcgccgccgattcattcttgattgccctgtgaggatgtataaaggctccatcatactcgatgaacttgttggaggctcctaaagagtaaccaaggggcacttgctcaggtggttagatcatccgttagggctggcttgaaaagagcaactacgggtgcaaagaaaggatcccgtgttgcactaaaacggggaacacactgagaccatcgttgtcctaagtgtgatcttgagtaccgttatttccaccgtggacgacgatggcctcccatatgtaggggggcatccttctgatttgacctaccttgccngtcgaggtgctgcac

SEQ ID NO: 434426 - DNA, 182 bp, Oryza sativa
gttcatggtaaaagttgtatacccacacattatagaaacggacaatacgaaagattttttttacagctcacacttgccgggcaaatagacaatgtggaccgcataaacgcttcctacacaggatgagcagcttatatagattatagcaactcaattagaaagggctcaacattagataacca

SEQ ID NO: 434427 - DNA, 468 bp, Oryza sativa
  unsure (1)..(468): unsure at all n locations
tttttgtttttttaattaaagctgttcgcatgtctcttattgcaacagataaaacgataaattttcaccaaagtgtacacttgacgggcacatctctatgtgtagtgtataaagtaatcatacaaatgaaaggagcttaattagatcgcgcaaacactcaaaagtgcagccatttctcacgagctcagccgtgccactcccgcagccgccgcggcgtcgccgcctaactccgtcgcggcgccgccggcaatggcacggccggcggcaggcgatcccttcgcgcagacctcgtcggcgtggtcggagacgacgccgtagccctggctggccacgtcccggtagtagcacccgtccgtcgcctcgtacctgtacgtttgcgccgcgcgccacgacgtcccgacggcgtccccttcctgcacgcggacgtccacggnggagtcctgcgcgttgctcagcgaccgggaccag

SEQ ID NO: 434428 - DNA, 506 bp, Oryza sativa
ttttctttgcagcgaagtcccagctacctggcgcgtgcattcattcatgtgtggatagacacctactgaactccaccgggagagagaccggatcgacctcgcgctttctccgtccaatcgaccatgccgacggcgtcgccagcccacgcggtgttcttcccgtacccggtgcagggccacgtcgcgtcggcgctgcacctggccaagctcctacacgccaggggcggagtccgcgtcaccttcgtccactccgagcgcaaccgccgtcgagtgatccgatcccacggtgagggcgcgctcgccgtcggcgccccggggttctgcttcgccgccgtccccgacggactgccgtcggatgacgacgacgactgcccgttcgaccgctgcgatctgctcttgtccatcgaggcctgcgtgccgcactcgaagaagatcctcgacgaggccgtcgcctgggggcactcgacacctgcgtcgtcttcgacgtcgaccacgttctgctcgct

SEQ ID NO: 434429 - DNA, 343 bp, Oryza sativa
aaaaaaaaaaccaagttaacttttgggaaaaaagggggaaagggatcatgcaaaggtaaaaaaagtttttatggggacaaaaatttttaccccaaaaaaacccccaagggaaccttttatggggccccccaaaaaaatgggccctggagggaactttgggggggcccatttaaacttttaaaaacgggaaaaaaaaaaaatttaaagggcccccgcgggtatgggggggtttttttatgcctgggggccgggttcaaaaaaaaaggggggggtggaattgttgttttcagggccactgaacggggggggaccagggttgttgcggacccgggggttcccccgg

SEQ ID NO: 434430 - DNA, 236 bp, Oryza sativa
cggtccggaattgcagggctggacatcgccagcggtcgttttatgccgctttaccccttgtcgacgcggcgcaggatttctacaagacacttctgccgccgagcgatggattccaatacaagctcctagaccgttctaccatgtgaggaacacaactgctgtcgcacaaagaagaagttcatggccctcggacccgttgtggcgcccgcgcctcacaagctgctgattgtggaggt

SEQ ID NO: 434431 - DNA, 481 bp, Oryza sativa
tttttggtttttttttttttttttttttttttgggacaaacagcatacataacccttcttttcatagcagttttccttggccataagttacaagaggctggacacctttccctaatattcaaactttaaaaaagcatcccccaacttcccccaccggtcatccaattccagtttccaaagaagcacatggcatgagagccctgcatgcagaaatctctccaaatacaacaagattcaaggggcacatgtccgcgcaatgaaaacaaatgggaacctgtacaaacagcctaagcattgccatgagtccaccaaacagttgctaagggccaaagccccttagaaccaaccaaaccttttattttccgggctttagtactccacttcagcaggcgtgacccatggaggaggggctctgatgatatgcacaccgccaagattgagacatactagaactgaatcctatcatcgccatcgaaattta

SEQ ID NO: 434432 - DNA, 515 bp, Oryza sativa
tttttggttcgcctaaaactggaaccgaatacttcgattttccaaagaatcggcacagtaaaatgcaccgtagctgtacatggactataatgtatatttacaccctcgatttacagccctatagttttacagctaaaaaactaacgtgtctaatattatacatactaatagaaagcgaaagttgtagaaagagaaattaaggcctgaatattttcatcatcctagatacttgcgtccgacaaaatgggcatcgtgaaaccgaacttgagcatcgattacaaagaacatgaccgcatggtattatagtcatgttgacctccgcattcaggcagacacgacatgaccatgctgacttggcaacatcagcttctctaactgctgcctccgctttctcctgctccacgagtagagccacttgagattctttaagctggtcttgcaaggaaagagtagtctgagaagcgtttcctttgagcatccatccttacccctgaactgaaagcatatcgtggact

SEQ ID NO: 434433 - DNA, 145 bp, Oryza sativa
ttggcgtgtggttgaatttggatttgtgctatatgtcctctggacggtccgacctagatcgacattggatggtgcctgtcgctacggcaggtttgcttgagctagactagctcgaggagtctttggctggagtactgatcaggta

SEQ ID NO: 434434 - DNA, 483 bp, Oryza sativa
atgagtgctaagtgtaaatcaatgacacgaacggtggctaccaggagagaaccaagaagaagaggggaaggccaaaaacggtgaagataaactaattctatcagacaaccatccgataaaagggattagaaacgaggaggctgctgcacatcagctgtgtttatgaacaggatacacctgaaaaattactaggctaacagccgggctgacatgctaaacctgggcaccaagacagaagctcacagggcaaacacactaacacacacatgcacaaccacagtcagccaccaaccaagccgagttgtctggaccaaacacacccatggtgtagcacaacaccaccaatgtcaaggggagagacacaacctgtgccattggacgcagcgccacacccaagctggtgatcccgaccgcgcatttaaagaatttggagcccaaccggaccaaactctgtaagacgcaccagccacgaaaaaccttgac

SEQ ID NO: 434435 - DNA, 529 bp, Oryza sativa
tttttggggaagtaacttatactattatggatttatcaatgcaatcaatgagatacaagctgaatatccaacacacgcaattcgtcaatacttcatgaaatggagcagatctaaactaatcgcctgtgcaccatgtagttggcacagaagatataggtgagagcttaattactcaggcaccaagctaatcccaattcccaacaaaagtttttttttggaagaacttctgcatgcaactccagtacagttatatcctaacaaaccaatacacgaaattgatctgacgggtgaagttaaatcaaagaccaacccaacccgtttcagaaaaggattaatttttttttgaccaacccaatctagcacgtttaaatccctacgttgaagcaatgctaaaatccctaagcatgaagtcatatacaacccccgtggcctcagcatagcgtcatagcataaattgagggataccacgcagagaaatgacaacggcaatgacagacgggttgctaactggtatgtattacgactgaca

SEQ ID NO: 434436 - DNA, 250 bp, Oryza sativa
tttttggttttttttattttttttttttttttttttttttttttttaccaagaaaaggggggaaattataaatctttttatgggttgtttggagaggtttacatattataaccagatgagctacatggattcctgggtttttattccctcacaggagactaaagaatttctggattctacatttgcccaacagaagaaaacaaatactttcacatgaaacaggcaaagcttgaattccgttttgggtgaa

SEQ ID NO: 434437 - DNA, 369 bp, Oryza sativa
gaatgcaatgatgagattgttgtaaccagtgattttatgaacagtaatctgttttttgtctagtttcgatgctaatcctcttcctttctggaaaccagaaggactcgcagtaaattggaaattgtaacactacgagcagttgcaccatcgaaaccaatcgacagggcagtcgcacctgtgccgtagtcgcggagtcgagaggactccgtgacttgctcgcttcgtcgcaagcccattggttgcaccacaaaacgaaactgccgacaagaacaattgggtcatccaccacgacctcactgaaggaacccttaattaagccccacttagactgaagacagacttcacatgcgggttgaaatgacctattca

SEQ ID NO: 434438 - DNA, 407 bp, Oryza sativa
ttttttgtttttttattttttttttttttttttttttttttttttttttttttttttttttttttttttttttttaatattttaacatttaatattttttatttttaattatttttattttatttaatatttaaacaagaaaaacaaaaccaaatgttaatataaaaaaaaaaaaaggaaccctttgcaaaggaaaacattgaattgggggcccccctattaagaaaaaaaaatggaaaaaaaaaaaatgccctttaaaaaaaaacacccgggaggaacaattgtaaaaagcaaaaacaactggggaaagtaatttttaaccccccacgaggaaaaaaaaaaaagcccccacaaaattaaaaaaaaggaagtaggaatttaaaagaagaaaacaccctgggtttttg

SEQ ID NO: 434439 - DNA, 445 bp, Oryza sativa
aaaaaagggggatttataactaaatatccacttgcaaaaggggcaaagacatacaggagaaacactacgattcaagcagttttacttttacaaagatagaaaaaacattaatacaagagaaacgctttgatacaagagttcagtgaaggggtaaacaacttcaggaaaagaatttgaaatcacaccttttcgtagcaaatataccccacattgacattgactctataaaagggttctttcattaacatgtatgaagagattgggaatagacctcaaatttctagtatagtccttatctgctcaggcgagtgttttactaaagaccttgggtcagggtagcaattctttggatccaccactgccttataaaacaggtcataagcttccgccagagctctagccaaaccatagcatgcatcagaacgcaaccttggtacctgcagct

SEQ ID NO: 434440 - DNA, 520 bp, Oryza sativa
  unsure (1)..(520): unsure at all n locations
ttgagaccccgcgtaccccggcgccggataggccgccgcctcccgtgccggtgcgcgttcccgtgccagagccccagcccgagcccgagacgccgcaggcgtcgccgtcgccgcctcccgcgcccgatccgccgacgccgctgttgtttccggagtcggcgccttcgacgccgcgcgaggagtaccacacgccgccgtcgtcgctggacgaggcgcgtgacgaggcgctggtgcctcatcaggagggcgtcgtcgacgtcaacgggggatcggaggccgtcgacaagagcccgcagctctcgccggtgcggctccaggtgtcgccctcgccccaccggttgctcccgcctgcgccgggctctcccgtcgtcaacggtgaagatggcgccgtcgggacggagcaaggtcgccgtccgggacgcccgcaacttcacctcgcgacgggccgtcttttccgacgccgtcgangggtccctcgcatgtcgtcgcctcgcgtcgctacgcgtcgtaccgtgactca

SEQ ID NO: 434441 - DNA, 312 bp, Oryza sativa
ctggcgtacgggtgctttgagttcctggggcagacggcgcccgatcggctggagcatatcgtgccggtgcgcgttgtcgtgtcagtgtcatatcctgagccaaagaggccgaagacagagagagagagagagagagtaattgatacgccgaatccggctggggagtgtgagagtgagatttatggccgcggcgaggatttccagacgcctgctacgtcgatcgacgaggcgcgggaggaggcactagctcctcatgatgaggcgcgggttcacgacagcggagggatcagggcccgtcgtgatagacacgca

SEQ ID NO: 434442 - DNA, 324 bp, Oryza sativa
ctataagccttttggaaacaaaatatttccttttgagatgttagacttccctgatctttgaagatttgaaccccaagtgtacaacaattagatcctactttcaaggggaggggatatgaccttctgcagatttaggtgaactggtactccttttaaaatgaaatggacactcctttagcttttattttaaggcgaatgccctgaaaatctgaaacctaaaggcaccaaatttaaaggatgctagtggtttaccacctacttctaaaactggtttggccatttaaaaaataggcagagttcacttggatgctttggaaatagccg

SEQ ID NO: 434443 - DNA, 502 bp, Oryza sativa
gcgcctctagaaaggaaaaagaacttattaagttgggaatttagtccccctggatgcatttgaagcacaaggtaagcaaggttaaaaacacacgcacacacccatctagagagagaagggaccggccagggggtgtaatgtacatcacagtacatgcaaacaatactactttttacagttgaaaaatatctaatgcatatcaaaagctgtgataaaccaaaatgtaattataattatgcttcgattggggtgcattaatattgactgcatctagcatgtctagccttcattctgatgtaattaagcacaacaatacctttgcccaaactttttttgtcctctcttttcttttctttcaacaactttgtctcttctatcttggagtgtccttgcacagttaatttgatctcccttttttcatggaggcagatctatacagatctctttaatctttttcttctcccaaccatagtacatacattcttcaagaaagcaatgttgt

SEQ ID NO: 434444 - DNA, 347 bp, Oryza sativa
ttgactcgtgggaacgccgcctacttcgcctccgccgccccaccccccgccgccaccaacggcaccgtcgccttcgccgtcgcctacccttaccctgcgccgccgccccactcccactgccaccggccacatactactacggacgcgtaccaccaccgccactacctacgagctactactcctaaccacgacgcctacgcgcctcaccgcgctacgtccagctgcctgcgccgcctcctcggactagagatccacgcattcctcctgctcggcgccgacaccttcaacgtttggattctcctgggtccccgcaagccggacttgtccgttgagtacctcaccctctg

SEQ ID NO: 434445 - DNA, 335 bp, Oryza sativa
tttttgtttgtgtttttttttttttttttttttcgacagtttgaaatctaaaacatttaattgcgggggagcactaaggtgaaacacatttttagtgactggaatacttcacaaaccaaacaggtttatgaggggaatgagccacccagaaggagacacttaaatgatgccctgactttcggaatgctgcctgaaaaaaacaattttagggaccttgagaaaattactaccaccaaataaattacctggaattcccctaccagtcgatttcatggaacgggaaagaagggggtggccggggaaaagagctatgcctttggcgccgccggagccgg

SEQ ID NO: 434446 - DNA, 427 bp, Oryza sativa
caaaaatatacttatcttccctttatgatagaaactgattgtgctttgtgaattgtgatcgagaggagaggaaatggcggataaccttcctagtcattcctttgtactgacaatgtttcagtacttgaggaaatctcagtgatgatacctcgtattgacaattaatacctgtgttaatagatggatacaacacatctttgactgaaatttgcatcggcaatgattgtgtccaaggctctttctccgccagctgctgcttatgtgggatggaacccatgtataacttgaggaagagaagtaaatccaccttttgtttatttcattgaattcatcctttttccttttgaacactgaaaataacagcttgtatgtctttaggattggttcaagaaaatgttattatgacagtgcactagcttttcacctt

SEQ ID NO: 434447 - DNA, 278 bp, Oryza sativa
accttcttggcggggtattcacaagggctttccaaagttgcgaattgccaacatgctattggtttttcacaaaccgctttaaattggctgattgccattcttcatgcattacaatttttcccctccctttgatcctcatcaaaagtaaaaacaactttttttccctttgttttcttggcaacattcgcttttttgcaattgccttttttttttccccaaacttttttaaactatgttaccacagactgtaggtttatttggctattaatttggactcc

SEQ ID NO: 434448 - DNA, 334 bp, Oryza sativa
gtcccgttttcagagggatcgactgtctgcacgtgagaccatgtcacgaacaagacgcttaggacatcaacgatgggaacaaggctcgtgtcccaccattctgaagaccatcagtctgaactactaatgccgtttgagattgtgtagtcaaaatacgcacgctcagatgacaagctctccatcgttagaacgcagacgcgtatgactgctaagcaggagatcaaactggcaggatgcacgacatcctcaggcataagaggcatggcctacaagcgcgattatacatgtcgctggtagatcactaaatgatgagactgcttactagacgatagtg

SEQ ID NO: 434449 - DNA, 344 bp, Oryza sativa
gttgatcctatattgttaggggaggcagggaaaagggggggatctccacaaatagtccggcccattatttgcaaggggggcggaaaactccttcccaggaaccattagtacccgcaataggaaggtccctacaaaacaaaagccaccaattgaagaccgaggccccccacttagggtttgttacccaaaaaaagcccgaacacaaggagattttcaaggcaaatgggcccccccggggggcccatgaaaggcgggaggatcccccaactggggggacacaaaaattttaaagtgcccccggagagaatacggggccccccgctggcaagggcctatttggcccc

SEQ ID NO: 434450 - DNA, 362 bp, Oryza sativa
tttttggtgttttatttttttcgctttatatcgttctattttgttttttacaggcggaacggcctacatgatggggggcccagccagtcaccacaataaccgcgaaagcccaacccaaactggctgaggaatgtggaacaaccgggctgcaaaagcacacgacgacgccgacaaggaggaaaacggggactaccggcccaagacatgcaaggagggcccaccgggaccaccgcgacaaccggcggggcgcaagcataaaaccctgatgcagacggggaggccggaatgcggcgccacagcgcggtggaagcgggcgctggccctggggagaccacaaggtgagggggcccccgaagcactgc

SEQ ID NO: 434451 - DNA, 316 bp, Oryza sativa
ttcgtcttgcgagtgcaatggccttttcctggcggccattttattgtaagctggctcgttaagatcaacaacatgccagaagagacggagaggcagaagacatgggacctccatgggcaacacactcacacgcaagaagagcggcgcactaggaggagcggacaaaaaggacagtggcgacagcagggacacaccagccattgatgtacgccacggatggatcgccgacacggcaaaaatcagctatctacgacccacagaacaccgaggaccagatgcaacgaaaccaaacgatgagcatgtaacactgggacca

SEQ ID NO: 434452 - DNA, 339 bp, Oryza sativa
ggggaaagccactatattttttatgggaattaattaattataaaacatgtccataccccggtgttttgaaaaatatgtttaaacttaaatctgaactcgtaaaattttttaacaccctatcctttattccaacaatgttgagggtgggtacttattcctgggggacaccttatgctaggtacttaaatacccaattctaaaaaaaacctatgacacattttgatactcccaatttagatatcccattttttggaccaaggggatttattttaaaaatgtgtgggtgggttcaacccccccccggagtgctaactcctttgggcacggggtaccccccct

SEQ ID NO: 434453 - DNA, 420 bp, Oryza sativa
tcgttttactgccaatccttccttacgactcggcggctgttatccacatagccgccacgatccccaaacgccaagccgacccgtcaaatccccgtcatgctgaaggcccccacggatgcgcgcctaagctcaagatgtaggcagggaaggtaaccaccacgccggctctggataaacgggtgttgcaacaacaacaacaaatacaacgccgccgaaaaccgcaagaataacttcagacgccggcgcgacaccaccagcaacggcaaccactacctaacgatgagaccaaacgttcctcatgtggatgagagagaggacatacatggacagctcccaggagatggcgaccccaaggaccgccacgttctaggcgcacgaggaggagaagaaggccgccacgttggacgatcccgaagaggt

SEQ ID NO: 434454 - DNA, 500 bp, Oryza sativa
  unsure (1)..(500): unsure at all n locations
tcgttatatctgggggagcaaacatggagaaggcatattacattggtaccaggtgtattgccttagatctgagctttgcgcggcatgacgctctgattcctacaagctcgcatgtgggtgctccagattcacgtggatacgagaggtggagagcaaccgcgatctcaacagggtggtgatttgccagtccttagaggcttgcagtgctggagcttgtgggcactgnccacagccagacgatccaagcgccagctggcgctaccaaaagtggcgtagcgccagcttccgcttctctgacgaccacacctgtgccgacgccagctgtcactgggcctgcttcttatgtagccatcaattgctgaggcctctcaccagagaatgcgtcaatccctcagtactatggcggaagagaatacgggtacagaactttctacctgtccaacaatactttggtgtngaccagaggaggtgggaatggcgccattgtgtttcagtctgac

SEQ ID NO: 434455 - DNA, 442 bp, Oryza sativa
aattgaaaaaaaattaaagcctgaacccaactgtgacgaccatgttttgttcacagacgccattcggatacacgaggaaggacgtgctgctcatcggcgtcggcgtgacactcttaggctacggcctcaaatacgggctggaggtgacgtctgttctttctctcttctccatcactactccagttcgctgcttcttggctttgacttcatcatcaagtacacttcactgacgaacatgtatgccttccctttcacatccttgccacaactgaacacagctggtcggagtcgatcccttgcaagcaggaaacgccgtccagctgatcatcgtgctcgggatgacggtggggtggatcttgacgtacatgttcagggtggccaacaaggacatgacctgaagtttcttgctctttgttccagaaacgattggggagcttgacag

SEQ ID NO: 434456 - DNA, 355 bp, Oryza sativa
tttttgtttgggttattttttttttttctttttttttttttttttttttttgatccttttttttataaaaacccgactccggggtgctgggttcgttataaacagaaaaccccaagaacccagaggccccgaaaaaaaccgggccaaccaacgggcggctggggcccccacgaaaaaggggagtacaaaccccaccctgcggcgaggggccaggggccacccccacccccgctgggaccaaagaaaagcccgcaagaacgggggccccgaccgaggaccccgggggtgggaacccccccccgggccgatagccccccccccttgcggggggggcgggggagaacccccccggggg

SEQ ID NO: 434457 - DNA, 442 bp, Oryza sativa
aaaacatacgccctctctctatttttatgcaaggaaatatcccgaatggactattgccaccagcacttccacctttgcgtgactatgatcctgctttgtcattattacttactaacccaccattggctactatggttcatggcacaacatcatcgtccatgggcaatgcagctactgtttctacacaaccacaagagattgtgaatccaggtgctttatccaaccctcaattgaatcaatctaaaccaagctccagcaccagcattgcttgtggctcttcactaccttataatctcacgcttcacccttatgctcaagcaactatggctcttgggtatgcaagcatgataggctacccatctcttgcctcaagttatacatatctcccgcctcctgcctttcagcaaccatacataatacagaggcctattgcaccaagcag

SEQ ID NO: 434458 - DNA, 358 bp, Oryza sativa
atcttactccgtggctgttcctcttctgggtggagggggacgggtggatttcttcaattcaaccaaatatcaactactttactttaaacagaacatcatttataactatccttctactataaatctcaatttccaaaaaaaatttgacaaacaatattacttataaccacctatacagatacaacatgaaaaaaataaagaatcatacacaaataattaaaaaactcctactgttcaaaacaaaaccttaaaacatatagactatcaaattaacctttaacacccgtatataacaatactcaagtaaccacttcaattacaccattataataacaagctttatactattataaaaatt

SEQ ID NO: 434459 - DNA, 529 bp, Oryza sativa
tttctttctctctcaccgacggcagcggcgggctcggcaccggcggcggcggcctcgaccgccgatcgccgacgccccgcgccgcctcctcgctcatcaggatgggctcggcggtgtgtgccggtgccggcgtgctcggtgcgccagacccgcgacgtcgccttcgaggccgaggacgcgctcgacgacttcctccggcggcagtccactttggtcgcggtcgcggcgacgtccccaacctccatgacgtcgtcgcctcggctactccggagcccactgcccctggccggatttggaagccagctacacaacgacgggcgccggcctgccgttcttcgccctcggcctacaccggcttcccttccgacgtcgccgccttgagctcctcctcacgccctccccgccggccctttccgatctgctctacccaagccaccacgacgaccagatccaggaagtctctccatcgctctggtcctgacagtggctggaggaccccggccggttgcagcacttcatccccgcaaaa

SEQ ID NO: 434460 - DNA, 163 bp, Oryza sativa
gagggctatcaaacccaaaaaatctttctgcagccctcgggaaatttctttggaaagttccattttccaatgggtatccacccataaagaaagccaacagcaccccatttttggcaggctttcactttttatccccctacattagagccgccctctggggggg

SEQ ID NO: 434461 - DNA, 536 bp, Oryza sativa
  unsure (1)..(536): unsure at all n locations
tctacttggtttccctatcttggaatcatttaaatctcttttcgatgagttcctgaagagattgactgaccgagctgtagaaattcgtgtttctgtaattgagcatttgaaaaaatgtctgatgtcaaaccattcccgtcctgaagctcaagagattatcaaggcactttgtgacagattgttggattatgaggaaaatgtgagaaagcaagtggtagctgctatttgtgatgtagcttgccattcacttggtgcagtcccagttgaaactatcaaacaagttgcggagcgtgtccgtgataaatcagtttctgtgaagtgctataccatggagagattggctgacatctacaagttctattgccagagtggttctgatagctcagtaaattctgatgattctgagtggattgctggaaaaatattaagatgcctctatgacaaagattttagaccagagtcaattgaatcagttctatgtggntcattgttncaccagagtattcaacaaggaaagagtgaaacattgggtaact

SEQ ID NO: 434462 - DNA, 232 bp, Oryza sativa
ataaaaaaaaaaaacaataaataaaaaaaaaaaaaaaaaaaaaaaaaaaaaaaaaacaacaaccaaacaaagaaagaaaaaaaaaaaaacaaaaagccaaaggaataagggaactaaaaaggaacataaaaacaaaatagagcgccgaatacaaaccatggaacagaaagtacaaagaaagacaagcaaaataatttatatagcctgcgcgatatagatgaaaaagggttga

SEQ ID NO: 434463 - DNA, 301 bp, Oryza sativa
ggccttggttttgttgcttgcgatggtcacactggagcatgcttcgatggtgagacactggcgcgtgctattcttagaagcgtcggtgttggttgtgactgtaccgacaacgttcatgaggagtttgacaggaagctgttactactgaaccacctgtggctacagatatattgtcggacactataaggggaacgtcagatatgttgctgattgatgtgacccggagcgcgatactgtcaggagtagctcctctattgggaagagctattacctggctgccggccgggtctgcagcatttga

SEQ ID NO: 434464 - DNA, 357 bp, Oryza sativa
gttttgtttttttttttttttttttttttttttttttttttttttttttttttttttatttaatataaaaaaaaaaaaaaaaataaaaacaaaaaaaaaaaataaaaaaacaaaaaaaaaaacaggcaaaaaaaaaaaaaaaaaaaaccgacaaaaaaaaaaaaaacaatggttttaaaaacgaaaaaccaaaaaggaaaaaaagaacccacccccggaaaaaaaaagaaaaggagcaagtacaaaaaatttaaaaaaccccggcgaaaaaacgggaacccttgaaaaattgagaaaccttaaaccccgggaaaaaaaaaggaaacaggggacgaacgcccactaaaccctcttaaa

SEQ ID NO: 434465 - DNA, 395 bp, Oryza sativa
attcattacagggctacggggcccaaacaaatacaacatgaagggcagccatataatgcaatagaacccccgactgatgtaccctacaaaaaagagaaccgtccaaaaagaccaaggggattaactatagctaaccaaaatgtttaaggcccgactatataccaaacacggaagcacctaggaggccttgaaggagcggacaaccaaacaaacacatagcataggggacccccctgacattggggccagtacccctcccgggaaccgggggagcaaatgacctgttccagcgcacaccctgggacctgccaacgggcaggtaaccttaggccatggtgggggtgaaaatggccaagccagcctagaatttggcataaaccaaaaaacccaaaccg

SEQ ID NO: 434466 - DNA, 378 bp, Oryza sativa
gggggaaaagggaaaaagcaattatgcttacctccaaaccattttgggcccttttttaaaaggggacccccggggggggggagcccacccagtaggggtggaacccaaataaaaatatgggggccaaagccttggggcaaaaaaaaaaggggggggggccccggaaaaaacccgggaaaagggtgggggtgttgaaaggggcaaaccccgggggggagcaaagggggcctgtacccccgggaggggtctgattgacccccccagggttgggccggacaaaatacaaaaaggcccccaggggtttggaatttcccccgtattcgaaaaaggcccacagggtcaggtattcccctttttccttttaggggaaaataaggg

SEQ ID NO: 434467 - DNA, 331 bp, Oryza sativa
ttttcccgcagtcttataagggtctagacgctgactcgaatctttgtgcgctcaaatcaaccgcatctgtgggaagaaagaaggccgcaagactatcaccctgctgctgaccgagcctgcgagacacaccgagtttgcataggctgcgaccaaggatacggaggccatgtcatcgggccactagtgactactaataactggaaagcgatggtagaatagaacaaccctagctaactatatcatgcagaaggagtggaggaaaaagattgcaataatgcattagttcgtggatgcagatgtaattcaagactgataccggaatgactatgag

SEQ ID NO: 434468 - DNA, 524 bp, Oryza sativa
  unsure (1)..(524): unsure at all n locations
ctcgattcctattactgttactttctcggtgtgatgcctctgatttccacactgctctaccaccaccttgattcctattactgttactgcctccacggtgtgatgcctctgatttccaaactgctctaccaccacctcgaccgcgattattattcttcctgttccattcacctggtcgggatgatcctgcaatggtgaagttatgtgtgcctgcgctatttgaactataccaacttggtttatcatcttgctgtggtgcacctgagttccgttactcttcgtcttcagttgccttctctggaacacctgaccagtaaattctactgcagtagaatttggggaactccaggtgtttccttcatgccaatttggcttcctcggatgtttttggccagtgctgtgcatccctgccctcctaccctcagattccgtcagaaattcagctttnggtttgtctgtccaggtgatctgattgtttcctttctaacatactntatcctctggaatacaatcaacatcatata

SEQ ID NO: 434469 - DNA, 411 bp, Oryza sativa
gccccagcaacatattaaactgcgccatcttaaggctttttcccccactggggggcggggtcaatccccaaaggaacgtttgtttcgggcagaaaaaataccccaaggccacccagacaagtggtgaaagtctgaaccttgagggagaaaacccggtttaaatgctatcttatttcgggggcagccttccgggtgggaccgctgtcccgctatgtgcctaacccttgaccttagaaaaggtttggcccttccaatattaggcaggggcctgcccttaaagcccattgatagggctggctctcaaggcttcttgagttcccgggttttgggaactgccgcctcttggttaggccaggaagagaaaagggcatttgggagctccattgtgttaacggacaaaacacctaagcc

SEQ ID NO: 434470 - DNA, 359 bp, Oryza sativa
acccccaactttttaaggggggaattggagaacaattctttccccccaaaatccagtttagcgacaattttttaaaaaaaccctttggtttgcccccctgggtgggaagccgagcaaaggcgtttacacaaaaaacccgagaccactttaaaccaaacgggaacgaacaaaaaaaaaacaggggcttttttggctgaaaatacccaaagggggggggtttcttttattttaaggcccccctccccccaaaagaagggggtatggcaacggaaaaggggaggggaacttgggttaaatgaggggaaagggcttcccgatccactccttgagggagtcatgcagggggtcgaagagcttgc

SEQ ID NO: 434471 - DNA, 390 bp, Oryza sativa
agggggggcccgaccccccaaaattaaaatttccccccgatttcaagttgaacagaagacccccaaggagctctttaatttaaaaaaaccggccaaaaacaccaaggggttcataataacaaaaaaggtttttaaccccccccctcaaagggacacctagggcataaaaaaactcgaagggggggtccctaacaaattttgggcttaatggcccccccccaagttgggggccaaaccctttcccccgggcgggggagaacaatgctccataattccggcgggcattgactggccaacacccgggtacaatttgggaaaaaaggggttcagaaagccccccagccccttgaacttggaaaaaaacccaaaaaacccggggagggtggtggc

SEQ ID NO: 434472 - DNA, 251 bp, Oryza sativa
tgtgcgggggcggtgacgaccacgacggtgaggatgcatgcctgcatcgagccgcaggagggcgaggtcgggggcggaggtgcgatgatgggcgttgtgggccgcagacgccagtacgtgctccgatcgattcgtgacccaaactacaccgtatgctatcgtgaccgcatggagagcgagtgcattgacataacaaggtcgaggagatctaggttggagtgagcgctgaggaagggccagcttgcaggacg

SEQ ID NO: 434473 - DNA, 359 bp, Oryza sativa
gtcttctccgatcgcggcggaatggacggcggcgcggccacgaacgcatctggagtcgccgcggcggcagcggcggcggggaacggcgtgcaggcggtgggcggtggcgagagggcggaggacgcgtcgaagcagaacctggcgctgatgatggcctcgatccagaggacgctggggctcctccaccagctcaacctcaacgtctcctccttcagctccgcctcccagctacccctcctccagcgcctgaactcgctggtggcggagctcgacacgatgcagaagcacgccgagggatgcaacatccaggtccccatggaggtcgtcaatttgatcgatgacgggaagaatcctgacga

SEQ ID NO: 434474 - DNA, 524 bp, Oryza sativa
  unsure (1)..(524): unsure at all n locations
ccaatcaggtcctcactgcctgtgtcatgtgttgtgcactttgctagaccagaaaccaattttggcttctgccttttgatcgacccatttaaacttcccgaatcaacagttcgcttactactgcctgcctcatcagacttctttggactactactcaagatttcagggtggggctttttagcaccctttttccctttggatacaggggttttaacactagcaggcgatgttaccaactcagtatcaaccgagtcatctctttttttggccccctcaaccttattttcaaatgagttgatagtttcatctgggtcaacagactgcagtagaagctcatcactgtttttgttgcctttcgttgaatgtggtctactcttagaaactgatctcttgcgttttggtgttgaaaaatctacaggcttgncattactctcttttgcatccatccgctatttctttggtttgctcttttctgattcccccaaattnttttgattgtccaagtttatttctctaaccagtcc

SEQ ID NO: 434475 - DNA, 349 bp, Oryza sativa
caccaacacacccaccttctcctcctcttcgtcttcccccaattcaagaagcggaggagagagcgcggcgggggtggagagaaggttctagattgttctggaggtggagggatgtgggggcggcagtactggggcggcggccggcggccgagcggcggcagcggcggggtggtggtgatgttcgcgtggctgtcgagccaggagcggcaggtgcgggcgtacgtggagctgtacgcggcgctcgggtgggcgtgctctagtatgccactccgagttactcaccctgcatatatctgctaaggctgccatgcttgctgatcgggtgcttgcagaactagataaagaactg

SEQ ID NO: 434476 - DNA, 512 bp, Oryza sativa
ctagatcgcgagcggtgttcttttttttttttttttttttttacagcaaggtcaccattcactcttggataccgaaatacacagattaaacttgtttcgacatctcatgcatccttacagataaaatactatctggtagcgattacaaaagttattttcaatcacttccacgcagctttggatcaagaggtgcacaaaactcttgtcctggttccttagaaacaaatatatattgtaatccaggtgcatatactcttcgacctgaaagaaaccacaggtcacaaaaaaaggccgccatggatcattcatttctttgaggaacggaagcctccgaaacccatcatggcagcaacatcagggtctatgtcctcctcaggttcattctgggcagccagctctttctttttctctgtcttcttttctttgcgttggcgcttcctctcctcatcctcttgctgctgtttcaatattctctcatgcaaatcttggtcactaaagctacctgggtcttt

SEQ ID NO: 434477 - DNA, 366 bp, Oryza sativa
tttttgttttggtttttttttttcttttttttttttttctttggctttaaaagtggtttttgttctaaaaaaacaaattacgggggcaagatggacaaatcctgggcaaaccgggtttgaaccccccccccagggcacctcccggcttggccacagaaatcccattcaccgaagggcaattgggattcacaccggttacagaggaacaccttggaaaagaacctacctccagatatgaacggggcccggcgggccccacggggagccctcccttttgaacccccccctttgggaccgcaaggggcccaaccagaggggggggacctccgggcctggaaatttgacccgccaggttaccccaggaac

SEQ ID NO: 434478 - DNA, 394 bp, Oryza sativa
ggtttgtttgtttaattacgacttttctattgagttgtccactttgctagatatgattggtttatcatttttacatttgggaggcacaacaggatacaaaacaggggacacactgagatgacatagggaccaaaaattgattccagtaagccgtcgctcaatacaagcttgggaggggagggatctggacatggacgggatccctcgagaaccattggggcatgtggtgtaactacaggcagggtggaggaacacacaaatgcgacatattcctataggggctcccaagattgcaactgagtgccagttggagagaaaaccctcggctttggacttaagcaagagaccgacctgcagagcggggggggggggcaaaaaaaactacaggaaaaac

SEQ ID NO: 434479 - DNA, 496 bp, Oryza sativa
aaggggaagaaaaaacttacatattattattccagccagtttcagaggaagtggcaaccaagtttctagtgcccagcagctactgtatatccaatgtgggtatatctcaaaacatatactccctgccagatgaaccgaaaaaaagcgccggcacacgcttctggaccacggtctcatcatgtacaaattacacatcatgtaataaacacatgtacactaagtctcgacaagaaattaccatgtgaaaaacgcaacaggaaaaagacccgcaaccatccacatctcatcccaaacctaccttctcccaattgggagggtaaaaggtcgtgtcctgtgaatcaaaaccaaatttacctcatgccctcatgtgccctgtgctgatcgaacagcatcattcattactggttcaccgatcaggcaatcaagaccatcttggaggcaaactccacttacccaatttgagcacgctgaacatatgctgtatattctagcctaa

SEQ ID NO: 434480 - DNA, 213 bp, Oryza sativa
caccaccagacgtcgactctaatgtagggggatagagagtgaaagcatgacaataatgggttgctgttggctttcttgatggatggatacacattgtaaaatgaaactttccaaagaaatttcacgagtgctgcagaatgattttttgcgtctgatagcactgtaaaaaaaaaaaaaaaaaggaaagataaaaaaatacttaaaacagaacaa

SEQ ID NO: 434481 - DNA, 529 bp, Oryza sativa
atatgatcataactatttttatttatattggataaatcatcgaagttacagctcaacggtacatttaaaaaaaaaggtgcaatggcaaaaaaaaactgaagttcacacaattgtctcactaattaaagctatctacggctttctacatgtagaactgattcattggccgtttctcttttcatctgtaatctgtaaatcctttagtcttctatatcctctcacagttgtaggcaagtgaagcctctgctaaacgtctcttttcccctgtgtactcctgatgcttccagttgtcagagtatcatccatcttggctgaagaaaatcaacccaccacatgccgaagcacaccaacctgatgcacatgcgcaggtacatatccatcgagcatttgacaacccgagcaaaaccaaattagatggaacatcctgattcacaaattcttatccaaatgaggaggctgacgatgtcaactttgatatttttgcggggataagtgctgcaaccggcgggtcctcagccactgcggacca

SEQ ID NO: 434482 - DNA, 510 bp, Oryza sativa
ctagttctagatcgcgtgcggttgcccttttttttttttttttttttttttttttttttaagccaagaacgaatgtgtcatcatcatctaaataaaattgacagtaaattacatcagtagcatcatgaaaagatcatgtcttgtatgaaaccaaaaccaaatcgaaagaacagtacaacagtctggataatcacagctatggctacaagcaatgaaatggccgtaccaaaagctgcctgtccattcagggaaatggagaacgaatcattgatgagaagatgagaagatgatgccaaatgcccaattacactaacactgatggtgatgtaaaaaaaataaatgtaaggtgtaattacaggtgcagcaccgccatggatttcagcttgctggacatggcgtaggtgtccgcggcggcttttttccgcgcgagccggctccaccggtggtcgttggtgtccgagacccggcacgccgtcacgaagtcgagcaccttgccgaagaccctgaaca

SEQ ID NO: 434483 - DNA, 468 bp, Oryza sativa
tcggtgtgtagcaattaactgaaactcaaatcgtcgaccgctaattaactgaggtattcagacaaagaataacaggcatcatgcaacggtggacgcgcaacgggatgctgaacttctcgcagccggcgtcgtcgtcgccgttcggattctacgacgccggccacggggcgtcgagcagcggcggcagccggtcgcacggctgcaggagccagaacaaggaccagcgcaacctggagaagaacctgaccaaggtgaggaaggagtggatgaaggtgaaggaggagatgggctacgcgaggctcctcagcgagcacctcagcgagacggtgacggagaccgaccggaaggtggctgccatgctcgaggagctcgaccggacggacaagtacatgcaggatatactgtcgtcccagcagaaatagtagtgacccatgacatcagatattcagatgcgtattttgatggatt

SEQ ID NO: 434484 - DNA, 359 bp, Oryza sativa
ttctgctaactccgacctctcgacagaggtgcgtgctccaatgccttcccccctacaaccgtagccgaattccgcctccaccgcgatccgctcgtgccgcgctccaatgagggccttcatccgctctttgcagattttgcgattgttttatggggtgcaaccaggatgggcgagccgcttgttaaggatcggaagtccaacggggcgggggtttgggtggtggatcggaccgccaggtggccgggagggttggccctggtggtttcggggtttggtttcacccgacgcacgtggagaatcggaagacctgggagaggttagggctagggttatggggagcacggaggagcccgaccgga

SEQ ID NO: 434485 - DNA, 322 bp, Oryza sativa
  unsure (1)..(322): unsure at all n locations
gttagcgccatttacagaggattgctcgggttctataggtgaggctggaggcgcagcttcaccgtggacgcgtgatggcgccatggcctgcagagctgatggtacattgccagcttgcgcgccgccaggcaaggaggctgctttcgtgatagcatcgccagcactgcgccgagcccggctgtccctggctactggactgggctcaccacgaatccttgggccgtatcctgtcgatgcngcgcgttgaggaagataacctgctgatctgcatcgaccggaaggccaccttcaagagcagcgacgacgccggcagcgccaacta

SEQ ID NO: 434486 - DNA, 361 bp, Oryza sativa
tttttgtttggtgaaacagaaagaacaaaatttctttgctgaccactcaactcaactcttatgctacacgaacataacctatattattttagacaacggtgttgactaaataaaactccgcgggtcgcaatccacaaccacaaccgcggaaatggtcctctgcacaacacagggctaaaacttgggcctatgagaagcatcagggtaatgttgctcgatttatcaatgtcacatacactgacagttaccaggctagttgaacttaccaattactctgaacaacttggggtctaccagcttatggactttgaggccccaaccgtaaactaatccttcgaaccagagaacgcggcacataccc

SEQ ID NO: 434487 - DNA, 52 bp, Oryza sativa
  unsure (1)..(52): unsure at all n locations
agtaaagctggccgcctcgcctgcacgcgtaccgganccggacatgtcccgg

SEQ ID NO: 434488 - DNA, 380 bp, Oryza sativa
gtgggtgagattcatgacgtgccctttactttcagtggggctgccattgcaagcggatagtccgcagtctatacgggcgtaccgacaacgagatcaggaacttctggagaacccacatgggcaagattcgcaccaccactccaagaagaagaccaattcaccatcgtcagggccgacagacctctgtcggttaacttgtactcctgtgatcaccgacggggacgatcaacgtatggatgacacgtctgcggctgctgcagagaaagcgagcaggctgagggcggtgacgatcgaggaccgtggaccagcatggtgagcagacggtcaccaccgccggaggagccatgatgttgactatgcgactacaccatggcaccagc

SEQ ID NO: 434489 - DNA, 523 bp, Oryza sativa
cgcccggcccgtaccggaacggccgggccgggctatgctttctgtgattttagagagattcacaatctctggatggggatctgtgcatcttcagagcatctggagcatgttcatgagacagatgagagcattgtgtatgtgaaggatgagcaaggaaggggtgatagggagatgaagagtggggctaggaaggtggacttcctcttctcccagaggggcaagaaaggccctaaccaggactctgtcatcctctgccaggtaccatcttcagatatttactctctgtctctgaatctttgctatgtgtttgatgtgctcagctcagatcaatctgctcaatttctcctcttgatgaggctgcgcacgccaattgtttggttttgtactcaaaagggttcagattagttcagggcttcagggtgttcttgagtccatgatttgagcttccatgagcttattaagccagcagttagttcactaaccttttttttttttgaaggaagagttagtagagtacttggta

SEQ ID NO: 434490 - DNA, 402 bp, Oryza sativa
ggttaagggaataaaaccatggttaatttaacaatgtaatgggataacaaggggaaaagctagggcactggcataaaaacattttcctgaaccaatcctaaagacatacaaggtgttattttcagggttcaaaaggaaaaagggtgaattcaatgaaataaacaaaagggggatttactttttttcctcaagttatacatgggttccatcccacataaacagcatttgggggaaaaagagccttggacacaattattggcgatgcaaatttcagtcaaagaaggggtggttccatctattaacacagggtttaattggcaatacgggggttcatcactgagatttcctcaaagactggaacattggccgttcaaagggatggcttgggagggttttccccct

SEQ ID NO: 434491 - DNA, 400 bp, Oryza sativa
tcgttcgaagacacggacgcgacggcgggggcggagcgcggcgcgacccagaggcgacggctacggcgacggcgacggcatagctctcttctccggccgccaccttctctccagttccatgaaatcgactggtagggaaattccagataatttattcgatggtagtaattgtctgaagttcctgaagatttattgcttcagacagcatgacgaaagtcagggcatcattatagtgtctcctgctgctcagctcattccactcataaacctgtttagtttgtgatgtatctgagttacaaaaaatgtgtttaaactgagtgctcccacacagtgaaatgtgtgatatttgatactgtcgaaaacaacacctacctgaacaacgacgcgcacctacattagg

SEQ ID NO: 434492 - DNA, 343 bp, Oryza sativa
accaaaaaaaaatccccccaccaataaatgaacaacacggggtccaagggagatttgaaaccagggccccattttgaacgggggaacatttttgggttccaagcaatagctgcttaaaatatgaatgtcccccgggggcccaaacagggtaaaaaccctctagggggggaaaaaaccccccgggggataaacccctcagccaattttccccaacaaagggtaaatccccccccgttaggggtaaaataatcccagcttttccatgtgaaggattttttggggggcgggtaaactttgataccccaggaggttttcctgatcaagtggggggggatcaactttt

SEQ ID NO: 434493 - DNA, 482 bp, Oryza sativa
  unsure (1)..(482): unsure at all n locations
gacaactaaatgtagcacgtgaaaatgccatatatatttcacacttttccccccctaaggaagtaaggaacccattgtcattcatgaaaaaaccactatatcatgtcggcattcaacaatgtacagttactggttccgtcttttcataacaatgggcttaaaattcccccaaatcaaccccacctatgatacaacatatccagatcatctgagtgactcatcaaatctccttcacaacagtgaaaagaaaaatataccctcatttccctcgcaaaactggccttagtgtcaagagcaatgctttgcagtttccaaccataaaccccaaaacacgatctgctattataaactaatgtatccaacttcatatctaaaatacacttctcatttgttagtccctatgaatgcttccgatgttttctagaaataacatcacctcttaccgnacttcttgtttcaatattctggaagcaaagcagatg

SEQ ID NO: 434494 - DNA, 547 bp, Oryza sativa
gtctgcttagttcatccagctattggtcttggtgtattacttctctcacatgccttccatgcacactccaccctttgcagtttcttagcagcttcatttcgcagtatcactcagaaaaaggatttgtataaatccatgggtgataatattattctgcccgaaaataaacaagatggcctcgagcaacttctgccgatggatgatagcccaacatctgttaaaagttttactgactgccaattggaagtatttgactgtcggcatgggatcatgatcttgcaccttcttgccactctaatgtttgcaccttctcttgttgcttggctacagagaatcggaatgggtcaaaattttccatggtttgtggattcagtactttgtgttggcactattctgcatggactttttggatcaccaccaaatggagctgtatatcttttcagctacctggaaggagagggcgagatgttggactaagctttctctaccttgtagctggatattattcaattgttagctcatggctcttgctccttatagggcgctc

SEQ ID NO: 434495 - DNA, 368 bp, Oryza sativa
cagagtaatcgcgagctaattcaaaattgtatgttttcagcagatcagagtagtttcatgaccttcccataaatacaagtacaatctccaaatctatgacgataactccatccacgagcttgcttctaataatgatgccactgcagcttcaagctgacaactccatgaggttgctaccaagaacggctctgatgctgcttcaagctcatgcaacgggagcatgtgcatctataaggctagtatgtttctctcattgtcccaataattttgtctgcgtaactattttctcactttatctgtttggtaaaattttctcatggtagtacacttttcacatgatagtagaggaactacccccactaaaacac

SEQ ID NO: 434496 - DNA, 528 bp, Oryza sativa
ctcccggatctcgcgcgccacgaccctcctcccccttccagaagcttctcgaagctccgttcctcaccaccccaacccaatccccactccccactccctccgcgcggatgagcggcggcggcggcggctcgggccccctcccctactcgatgcgcgatgtggacggccgcggcgcctacaacaacgccaagttccgccaccgatctcgcctcaagatggcctctcaggctctgtttaccaatagcagcaagtaccaatgtggaaagttcactgttggaaaatttttgagtcttttaatggtttctggcgtaatatacttacttgtgcacaaaagttcggatggtttttgtatccggtgagctccatgaaaaagtagggaatacacataccaagaaagatttttcaaaattcgtacattttggagaaagccaccaaggctgccgccacgtctttctccaaatgaaatctatagaaacaattcattgcttctacagtctcctcaatctggatggacactcagacagaaga

SEQ ID NO: 434497 - DNA, 395 bp, Oryza sativa
acagtcaagtgatagctttattgattttgcgcctggacactaatgaatttctctcgagatctgagaatattcagcaatgttcttacaattttgtgaaaaatgagactgtaggtcgtgtagtacaatcggtgctaaaaccgaacccaactcattttcttcgtcgatgtacaagcctaatctatgtatcccaaatcaaaacaaaaactgcgagaactgtaattaagcgtgtcctctcttctcaggcattctttgggtttgttctcttcaacctggaatacaggaaaactcctcccaatgcaacaccagttcctgcaggttggcacataaagaaatccaaacaaaaattagttaaacacaagaacagcaaaactttcagctgctgttaagttctgaag

SEQ ID NO: 434498 - DNA, 438 bp, Oryza sativa
tttgatgcacgaagctttgtttgacataaacctcttctcaatactcactatactgtcatttctgctgtctttgcctctgatgctgttctcagaaggggtcaagttcagcccaagatacctccggagcactgtgagtgtttgaaaaattcagataaacagacactattcccaaaaatatatgaacaaatggaatgtcctgtttggcttgcagggccttaacctccaagagctgtgtgtaagagcagcactagctggcttttgcttccatggctaccagaaggtgaggactgaggaaacagtcacctcttctttgggtcaagaaagatttgtgcttgatgattcattgacctgtaaacaaaaggatcattctgtgttcttttttgaaattggcagctctcctacttgatcctggccagagtgtcacctgtcacccacttg

SEQ ID NO: 434499 - DNA, 357 bp, Oryza sativa
ctatccatccattttttttttggatccttcattcctgcccggcggcgtgcgagatataggcggaggagattcgagatggccgtgtgcgggtggatggaggatcccggcgagccaggaggtcgatcatgtcttggcctggactaggtgtgcctctggtatcgtgctcgattccgccaccttggtccttgtccagtcgaagaaattaaaggcggattggactgattggacccacaaatgtatacttcaccttcagattgatagcaaaccctcaaaacaggttgggatggtacttttaagaaagactgttcctaatatgggtgacaacttccaagaacttttcacaggatagaacggctc

SEQ ID NO: 434500 - DNA, 380 bp, Oryza sativa
ggaaaaccggggaaattgttttttttgggggggggggcggggcccaacccaaaaggaaggcgttctttttttttttttccctctctaggggggggcccgagtactctctcttttggggggggaatcccccttgcctcaagcaaacaaaaccttttcgggcccaaaagggggccccctttgggccaaaaaaccggggaaaaaccggggcaagccaacccccacccggggaaaccccccccccccaaaaacgggccattgcggggcccaaaaagggggaaccgcctaaaatggccggttttttttccccccccccccggggcggggggaaccaaaaccaacaaaaagggggggggggggattgttcccctaaaggggggggg

SEQ ID NO: 434501 - DNA, 306 bp, Oryza sativa
ctgacatgcacttttgtttgctgaccaacaaacccaaccccgacccgcgcctgcgcccgccagcgaggtcgtcgccggcgcctaagctctcattcatggcggcggaggcggcctacggtggcggtggtgggtaccggatgctgccgcaggcggagatgccgatcggtttccggttccgacccaccgacgaggagctgctgctctactacctccgtcacatggctatgttgggcgccctagccgcagtagtcaggcttgtggtccaactcttccaccaacattcgtggtgacggaaccagtcacctt

SEQ ID NO: 434502 - DNA, 245 bp, Oryza sativa
aaaacacaggccaagtttaccttctgttggaacgccaaaattgcatatcccagcatccaacctaaagaaaaaaaaaaccatgttggatacatagataaggggacattttccccagtaacagaagaaaagcctagttcatcctccggatgagctcgttgaatgaaacctcacgggtggcggtatcaccccccttaaaaaagggggtccttttttttttgaggccccccgggggggcctttaacttg

SEQ ID NO: 434503 - DNA, 277 bp, Oryza sativa
ttcatatccgggtactctccatttgagcaagctgctcttgtgcttaatgcctcacgccgcttcagatatactctagaccttaaaaaggaggaagagaaagagatgataagaagaaaaatccgagcacatgcacaagtgatacgggcagcatttcttttcaaagaagctggggaaaaagatctcagagaagcttatactggtataaaacttgaaacggcctctcgcagttttccaattgaactggaaaagcttacagcattgaatagggatcatgata

SEQ ID NO: 434504 - DNA, 241 bp, Oryza sativa
tggtgtgtaaaatattgaaataaataatagtagcaaagtcacaaggattcaagatccacacgcacattttcacatactttacacaggctctttgcatgcttgcattacatctttccagttgaagttcaaaagcatgcaaggtacattgtcttctgttccacatgctagtcttacagtgaatcgtgaaacaccttatggtattgtgcatcagttcacactttatcacatgctcaatcattca

SEQ ID NO: 434505 - DNA, 124 bp, Oryza sativa
gaccgggccggaattgctgggccgacgcgcgctgtagttttataccgagagcggccgttctagaggtgctattgtttcatacgcgggcctgcgacctcttaggactgttattgactgacctgta

SEQ ID NO: 434506 - DNA, 466 bp, Oryza sativa
  unsure (1)..(466): unsure at all n locations
tcgtgttctagatttggttaccttgcgtccttgccttttattcatcagtgcaattagggccaagcttttgcgtggccttgtcagagagatgaaaaagtacatatgcagtgcatcacttataattggttgtgcaacctcctcatccgcatgctaagtacaatgagttgaagatgatgtgctgcaagattgacatattgttttccaaaggaacataatagatcgggcagtttctgtgagctggatcagtacgggcatatgtgctaactgcctcctatgcagttgtgctttgcacaacgaagtgagtgtggttcatctttagagccatgttcaaagagagtntgggtgttgatcaattgtgagaaaatcatgtgtagaaatgccttgggatggtgtctaaatagggcaattgattcatctccgtgaatgctgcacaaatattttttgttgactttatggtgaacatgca

SEQ ID NO: 434507 - DNA, 346 bp, Oryza sativa
agtgttattgtacagttggagcacccaccatcgaacttataaataaaccttagggctcccatgggccaggggatatacatcgaactggaacagttttaccctgtgccattcaaatgctttggcggacggagattggttttatcgcggaaatggaacgcatgcactgtcaagctatccatatagatttaggggacggcgcccaatgggggcgcgggggggatcattcgcattgcccggctccaaatctgataggcatcaccatccagtgactgaaagtggatctatgggcagtaagtctgttccaactcgttcaaacagagtatatccacctaactggtgggagtga

SEQ ID NO: 434508 - DNA, 409 bp, Oryza sativa
agcttaaaccaaatccttgttggcattgatactttagacaaactggtagtagtacattaacccatgaaaatactagaatgagctatacatagaggacctttacttaagtagttctagcttacattgcatgcttgaggcttcaaccttaatgctgggtacttgagtacattaattactactgattgttaatgtgattatgctaactgatttttgaagcgagtgattatgctaattgctaattaaagtgagggactactgttcagtgtgttcatcagtgctggctttgtgtgatcaaacgaggagaggcttttactccgccatggccttcttcttgctcttcggccggagctccagcagcagtttcacgactgacctgattgacgggcggttatcgggaggctggacgcgc

SEQ ID NO: 434509 - DNA, 364 bp, Oryza sativa
ttcatgcgtccgggccggcgccgccggccgacggttggtgaggagaccgactgggcgagacaggagaggaggtccggcggccggcggcggcggcgacggcgactactcgagagcaggggagcaaggcggcggcggcggcgactaccgcggggccgatgtgcacttggtcttcggtgaagattgggaagtcgttgtccccgtaggattcgtgcctcccgacgatgcgcctggcttgccgccgccgcggagatcgtcggcaccatgaagttcttcgcggcgcccgaggggcgagcgggcttgggcgccgtcttcctcgtcgccgcgtcacgctgcccgctgttctccttcttcgcgctacttggtc

SEQ ID NO: 434510 - DNA, 534 bp, Oryza sativa
tcgttgacgcgtgggcggacgcgtgggttcggaggcccaccaattcatctggagaaagctgcgctcctccgcctcgccgccgccgccgccggggaggatggccgaacggcggtacaccgagcaggaggaggcgctcgagatcagctcactccgccgcatcatcgccgcctacgccaactaccacgatgctgcagaaagggatgtcaagagatatgagcgatcattcaaaaggcttcctcctgcccacaaggaacttctttttaaccttggtctgaagtaccaaaggctgagatggtgtatatccatgaatgcatcattcatcatggacatgcttgaggcatttgagcctcctttcgacatgagtcagcatgtagatatggatggtcatgattgcgcagagaacatgcatgacattgtcatgcagattgtgctcattctgtcgataggggtgattgctttagaagttctatctctgtaagcaattcccaggtgcatgaaccagacggttgccccaggaaagacgaccagactcat

SEQ ID NO: 434511 - DNA, 385 bp, Oryza sativa
ggggggaacccccccccttttttaaaaaagggggggggaaaaaaaaaaaaatttggggccccttttaaacccgggggaggggggttaaaacccaaaaaaaaaaaggggggaaaacccttttaaaaaaaaatacccccggggggggaaccaaaagggcccccccttttgggggaaaaaaaaaagggggggggggggaaaaacccggggccccccaaaaaaaaaaggggggggggaatgaacccggcccaacccaaaaatttaaacacccccccccggggggccccctgcctttaacacccccaaggggccccagaggggggaaaaaagggctttcgggtttcccccaaaaaaaaaaagggggcttataaccccggggggggggggg

SEQ ID NO: 434512 - DNA, 379 bp, Oryza sativa
aaggaattcttaccctcctcggtttattccaattgggggccggcttgatccgttctagggaacagagcccaaaaaggaacccccccccgggggaaaaaccaccccccgggggggtcggcccccacaggcccccaaacaaaaaccccgaggacccaaaccccggggagaaatctcccccccgggggaaaaaaagagagaaggggcccaggcgccagctaacccctcctgagcaagacccctaccggcggaggccgggtgagaaccccacccaaaggggccgccttggggggcgccccccccgggggggacggccccagaccaaccaccgaccaggagggggggggcccttgggcaaccccccccacggggacccccgggg

SEQ ID NO: 434513 - DNA, 456 bp, Oryza sativa
gtgtgacaacaaatgtatatacagataccccattcgaaccggaagctatggggctacttttgttagaacaccggacacacataccgcgcatggaagcttcgcgtgatatcatgcactaccaaagacacagcaccaggatgcgtggttggaattacacagatgaggcaggacctttaccctggcgcacatggcaaacaaattgggcttgatgggagcacactgcacagggtgactctggttctgaagatccagtattattaacccaacttgaccgccttgaatgtgggccagctcgctctttcatgagagcagatggaaggtcgaacgtgctcagagctggggatgcatgcgatagtttaccctctttgtcatccaaaaagcccttgagacctgctaccaagtccctgatatcagctgctgtgctcagttcattccaaggcaccggcttactgccca

SEQ ID NO: 434514 - DNA, 254 bp, Oryza sativa
gcggatctgccgctggcggcggcggcggcgggggtgggggtgttggtggtggcggcggcggcggcgtggggcctactaggcggcccttcaagaggacggggaacagggcggagccctaccagccgcccaaggtactaacagcaactgatcgaacgtagggctagggtttgttgcacgccgattgcggaggagctgggcttccgattttcgacggcaaggcggctaaggatgtggatggatggtcgggtggtttt

SEQ ID NO: 434515 - DNA, 514 bp, Oryza sativa
gacgcctccgcagccggcctcatagaagaggggggagaacaagtggcggcggaagctgattaagggcggaggcgttgggcggtggctttgggagcccatagttcaggggagggaaatggggttcctcctgctccagcttgggttcgccatattcgcgctccgaatgctgcggcccgagatcgcgctgcctggctcagagccccggccacagacaacgtacgtcagcgtcccatacagcgacttcctggcgagcatagacaagaaccaggtgaagaaggtcgaggtggacggggtgcacatcatgttcaggctccgtcctgaggttgaggcccgtgcaatggagcagccacaggtgcagcgtggaacagattctgttgctgataatgctggagttccaaggcgaattgtcttcacaacaacacgtccagtggatattaagacaccatatgaaaaaatggtggagaatagtgttgagtttggtcgccggacaaaggtctggtggcttgctcaatta

SEQ ID NO: 434516 - DNA, 500 bp, Oryza sativa
tttttaccggaccggttcctaccaacctcaagaacctaaccaagcttgcagaattccatctagcaaacagcaatcttactggtccattgccagacctaactggaatgagctcactcagctttgtggacatgagcaacaacagcttcagtgcatctgatgcgccctcctggataaccactttgccatcgtcattgacttcactgtacctagaaaatctgcgcatcagtggggaggtaccgcaaagtctctttagtctcccttcaattcaaacactgaggcttcggggcaaccgtctgaatggcaccctaaatatagcagacttcagcagtcagctccaactagtcgatttgcgggacaactttatcacagcactaactgtaggaacacaatacaagaagactctcatgctctcaagaaaccatattgcaaccaagtgaacgacgacgtgcactgcaaagccaccggacaatcgaacccggcattgccaccatacaagacta

SEQ ID NO: 434517 - DNA, 455 bp, Oryza sativa
gacacccaaaactataaagatgattttatttctcagcttcattttccatagaagatgcacgtcaagctaaacggaacgaggccgcagattaacaccaaaccatgtacaccaatgctgacctactactgcctcaacacgagcgttaacaactgtacacaacagtacacggctgctacctgaccagtctctgattgtacaaccgaataaatggtgcgaaggatagctaaacctccgttctctactacaggtacaaatgatgcatcacacaaatgatctagtatttcaccagcaatattgcacagaacaacagcacatgcaagcttaaatggtgtcatggaattggatccctctgcgcaccaggtggagctgttggcattgggaaattgaatgggtaataggttcctccaaactgtggggcctccacatatgggctctgagcatgaggagggttaggg

SEQ ID NO: 434518 - DNA, 373 bp, Oryza sativa
atcgaaagggggcgggctatacgggtcacgcttacattgccgcgcgtgctgctgcatagaggatagatggatacaactaagtacgagcacgtgttcgtaacggtaccatttctggactggaaagaccatgtgattagcgagctttatctgctgggagagaataaccatttaatgaggtgccttctgatgatgaaagtcaggagaacacagtgttcagaccattcacagatgctgaattgaaagacactcacgcggatgcgtagggatactgactatgatcgttgctagcgagaaggatgcataggggcccgatgaacgacttgaaggcgagcgccgcgggctttaattttgttgcgtcacattctatgcacga

SEQ ID NO: 434519 - DNA, 239 bp, Oryza sativa
tcgtttctgctgctcgcggcgccccggagcgtctcctttgggggagaggagaggcgaggagaggagaggggggtgagccatgatggagtcgtgggtcccgtcctgcgtcttgtgcggggactactcgcaccccgtctgccgtgcctgcattctcgcgctctgcaaggtctgcctcgtctaggactccgcctagggacgcaccacctgcgcgcgctgttgtctggagtacggtgcgccct

SEQ ID NO: 434520 - DNA, 333 bp, Oryza sativa
gtgatagaaggagaaaatgccgagccattacatacataaaccaaaatatggaaggctggggaacgagctcaggacacacaacaggctgaagatgttttaagtaaatagcaggggatacatccttggggagagacacttgggttgtttaagagaagtttgcaggagaaaccgcatcttaaacatgtccttggattaatctagcgaccatatctggtcctcattatcatggtcttggactcagtacaatctatttgaccatcatcaacagtgatgtgtgctttgcaccatgcatgtgagttttggattggagcacatttcacctactggcttggg

SEQ ID NO: 434521 - DNA, 115 bp, Oryza sativa
gccttcaattattaattgttttttgaaaatttgtggggtaaacctttttttatctttttcttatatctttttttttttctcaatattcttatattttctcttaattaatattgat

SEQ ID NO: 434522 - DNA, 470 bp, Oryza sativa
gggggataaaacattgttgcatgattcacaggttctcaaaatgattaacggcatacaaacaacacgaagatctagagcttcaaatagtacttcattgtagaatggaaaaaagaacagtactcgccctggacctgagttgaggatagaaattgttacaatcgaggatagaacagtactcgccctgcacctaaattgttacatgcttgtcggaggatgcctggtacatgcatctacgattttgacgagaagaaatgatatttagacatagtactatatcatcgtaattgatgtccttgttgcctgctccagttcttcaaactcagcgcctagcgcttcgcttcctgctcttctttcggctgcccttgtcatcagaatcactgtcagatgcagatgcagattcggagtcagattcagacgatgctgatgatgaggtttcccttctgagcttcttttttggcgcctccttttgg

SEQ ID NO: 434523 - DNA, 395 bp, Oryza sativa
aggacaagacacaagcccaagcccacagggttttattattgattaagaaatggggattttttttcgatacaagcattacttagtctaggaggtggcatatattaaagattaattttttgggcaagggtgcatattcccatacaagcttgtatcagcatacttagggggattggtggcatttgaaacaggggggggcaaagcccgagaacaatacttaagggttttttatccagctggtatacagggggaaaaaatccatcatcatccatggggggtttacttgggggtgtacttgggccccccgggtatatggaacctggagaaaaaggcctcccaaacaaggggctttggggcgaagttgaaccattcatcgtcttggggggtgctggtttttc

SEQ ID NO: 434524 - DNA, 249 bp, Oryza sativa
gaattattggggttttttttttttttatttttttttttaatggtttttttttttgaaaaaaaaaaaacgggcaattcacagggtaagagacattgcaaccccatcggaataacaggggtcccaagattggtttagaggtttcacaactacaaaaacaaaaaatgggtgggggccgaggaagactaaaaccggccccaaactggttaacaaggggggatcgacatggtagggcccgttgcgaggggtcgc

SEQ ID NO: 434525 - DNA, 538 bp, Oryza sativa
ttatttagcagtcagtggacaccaattatgatataggtaattcaggagaaaatgacaatgagttatcatccagcacttccaaagcaagaagagatagcaagagatcatcacggcgtggatgtggtaaaaactcatcgatagaacaaaccccaatgccagtttttgcagaaaaagttttggagaagaccaggtgcatagcttgcatggctgcatccatttttagggcttccgtgatgtatataatagaagaaagcaaattgctacttgagagaaataggccagcaatcacaactttcatggctattgtgcacaaggggcatgactatgtccgcagcaaaattaagtatacttatcctatttgtcgggcatggatgtttagtgcttgaaaagtgatattgctcttgttggcagtttggttcaactgcaacataggggcttcgattctttgctacgcctagggacagactcacttcttacagtactttggtgccatacactatcagattttgcaatgattggactaaagaaaatgctaata

SEQ ID NO: 434526 - DNA, 457 bp, Oryza sativa
ttctttgctccgtgattatcatctcgtcctcgcatcgtcggagttgtcattagtctagtcgtctccctcgtctccggtgagctagctggtggtgtggtggttggttcttgggagcaatgggggcgtgcgcgacgaagcccggtgacctcaaggtgaagggcggcgaggcgccgctcgtcaaggaggacgccgccgtggcgccgtcgacgccggccgctgaggagaaggagaagaacgtcgacgaggctcctgatgacggggctgctgctgtggtggtggcagccgtggagggcgagccggctgaagccggtcgccggaggtctctcagcgacttgctcaatgaggatgcagagagcgagggatcataggcggctccagctccaagtgcagaggcaaccaaggccgttggaactgaatcttccgctgcgctgctgaatcttgaatagcagcaccagca

SEQ ID NO: 434527 - DNA, 316 bp, Oryza sativa
gtaatgatcattgttactttttttatcagtggtttctttttttttctttttcataaagacctcacaacttggcatctcatggacaatcttattggcacgggcattctggagacactgttaaacttgaacgacacgaggggaccaggggatcggtgacagccctaaaagatgacgcttttacagtgggttgaggacctattcaccaccatagatggggaattggccccctttctcaatgttagcaacagtaaccttggggctgtaagtaaggagcgcttcccggttaaaacgaataccatttgcttcctccgaaagg

SEQ ID NO: 434528 - DNA, 447 bp, Oryza sativa
cttcgtaactaagatgaagtatttttgaaactgttcattattgaaaaccaggcattttaacgcccttcattgattgtggatacaagaacactaacactaccgatctcgggagcagctcaatatccatttgagccggttcgcacagaaaccacacaaattgaaccattcaattcattctagtgagtggaacctacaccgatgaccaagaaattttccctcgctggattccaggaaataatttaccttaacagcatatgggggtaataacatgaacccacgcttgctttatcactgatatttgatgacattcctttggagcctgacatttatgccttctcttgcttacggaagagattcattgaatcgctgtataaagcaacataatttgttaggacagtaagcaccatcatggctacaggccagatcttggcactcttggatgcgatt

SEQ ID NO: 434529 - DNA, 462 bp, Oryza sativa
gtacaagttacaacgcgaatataccattgagtttgatctaatctgtacttacaaattgcagaattcagctcatcaggcacatagatatcctctcaagtagaagtacgaaattgctcaccatcagtgaaaagcacttctcttccaccgacagctgcttctatgttccaccaaaacaaaatcaaccagatcaactccctaattgctcactaaccagagcaattttcccatttactggagcaaaaaaaaaaagcaaaatcattttgctattcacctcatgagaagatgaagttttacattgtcatgtatggctcctgccccagcagcgaacgagacgcccggtcgcggatcctggccgacgccgagcgtcccacggccatctcctgctggacctcgtcgacgttcggcgacggggtgggcgccggcggcgccgccgaggaagtaaacgtggagaccatgctgtgc

SEQ ID NO: 434530 - DNA, 539 bp, Oryza sativa
  unsure (1)..(539): unsure at all n locations
ggccgcccttttttttttttttgggcatacgaaaacaaggaatattttttttggagggtgggcatccatctccagatacatacataacacaaccataaacaaaattaagatcttgttagcgaaatgacgcccaacaatcttcatcggaccaagaagggattattccttcttttttgacgaactgcctcgattagctgctctgatttaagcttattccatcctaatcagcaacatcatggtcttgtgcaccaatggtctctgcaaactttattaccacttatgtaccaaatctagcggcaagcagcatctccattcctggaactctgatccttactggccttgatgttggcagcatgccggcatgtcctactgcttaatcaatcagtttcaagttcacggaatggtaatgggacagtcttcactgctctgaacttgccaacgtgttcaaatgttcattctccaatnctaaaagttccaatggcctcgtctgattatctctagtgaagcgagcgagaaatcagtaagcgcgactcacctta

SEQ ID NO: 434531 - DNA, 470 bp, Oryza sativa
tttcttgaccccccaaaggccctttgggaaattttgggttttagggaaaacaacaaaaaacatctccttatccattttcagttccctattttccaacaaccataaacaaaattaaaatatattgagcgaaatgacgcccaacaatcttaaccagacaccatgccgattattccttcttttttgactaactgactcaaataaataatctgatttaagcttattccatcctaatcagcaacatcatggtcttgtgcaccaatggtctctgcaaactttattaccacttatgtaccaaatctagcggcaagcagcagctccattccctgaactctgatccttactggccttgatgttggcagcatgccggcatgtcctactgcttaatcaatcagtttcaagttcacggaatggtaattgggacagtttttactgatctgccggagccaacgttgttcaatgttcattctcca

SEQ ID NO: 434532 - DNA, 58 bp, Oryza sativa
tttttggggtatattgttttttttggtttaaccaaaccaggaaaaatccatcccttga

SEQ ID NO: 434533 - DNA, 110 bp, Oryza sativa
taatcctccttagcggccgtccttttgtgagctcgactcccaagtagccagaccggctcctgcatgcgtaccatgctatccctatagagagatcaattagagcttgagca

SEQ ID NO: 434534 - DNA, 471 bp, Oryza sativa
  unsure (1)..(471): unsure at all n locations
tttttgtttttttttttttttttttttttttttttttttttttttttttttttttttttttttttttaaaaaaaatccgggcaacaatcggaaaaactggggggtttttaccccggaggtggccccaagcaattttccatcaaaaacagagggggaaggggtagtccatgaaaacgggtcaaaaaacaaaaacccctggggggattgggtcgatttcccccccaaaaaaggggggggggacaaatgggaaacgaaaaaactcccccccgaaatcccgaatttgaagaacagattttaattggggccccagcaaacgaggggaaccccctttgggattttttccccctccgacctttttgacctgggggccctgccccacccggnggtgggaggggaggacccccccgcgcccccggtttgggacaacagggaccccgggacggggcggccggagacctgtttggggggggg

SEQ ID NO: 434535 - DNA, 454 bp, Oryza sativa
tttttgtttttttagatgtagtatttttttaaattgttttttattgttaaccagggggggggaccacccacctatggtagagaaacaaaaagggaaaccaaacaaaaaagcgcaagcaccttgaaaccaaaccgggcaatttaacccagaacacaatgcaatggaatgaccagaacaaagcgaagggcggggagccaaggcccgacccaacgaagccttggactaaaccaaaccacacgaaaccgatgctagaacggaaccgaaacggaaagggaaccgggacgcgaggacaggccagacttggaccgaacccaaccatttgcacaggaccgggccacaaaacaaacccgacaacaaaaccaagggcaggggggggggactgcacttcaatcaaccaaaccaaaacaccgctggggaatacaacacgccaagcaaaacaaccggtggcccttac

SEQ ID NO: 434536 - DNA, 51 bp, Oryza sativa
atgcgacatcatagcctttgctatagagtgaccgaaataaagtgaacagga

SEQ ID NO: 434537 - DNA, 473 bp, Oryza sativa
gggacataatttccatatggtttggtattggatgatccactgaatgcttacgagcgaaacaccatcaacactagctccagaccgaccgggtgatataccagtatgacaccctgatgatcttaggctcggtacaatacagattctgtggaccaataatgtcacttcggtgcgaaaaacccaacaataagaaatgttatgatcagtaatcctcgatttgccttggaacagccaaaagaataacagccagtacttggtaacaggatttagaggccgaacatcaggtccataactttggacaatactgattttgtgggtgaagcaatggcccccgaagcaccacggccactcccgttgccgattccatttggcatagaattgctaggcaaaggtgctagtgcatttctagttgtaaatgaacttggtgctacatgctgtgatggaaatggatctgttgcaccaacttgaaagttctc

SEQ ID NO: 434538 - DNA, 506 bp, Oryza sativa
ctcgcttctccactagggtttctcgccgccgccgccgccgctcgccgtcgccgtcgccgccggatcagagatgagcgcatccaggccggatcaccggcggcaccacccgccgtttctccgggacctctcgtcgccgatctcctcggccgtgcggctgcccccggcctccctccgccgcgagacgcaaggttccaccaccccgccgccgccgccgccgccgctgctgttcctcgacgacctctcccaccactccccctcgccgaggcccgccaccccacctcaggcggcggccatgagcccctcgcctccccctccccaccgaggcggcctcttctcctccaccccgctgcgctccaatgggtccccctcccccgccgcgtggtggtcctcctcgagggaggagatggccagggagggctcgccggtcgatggtgtcgtgcagccgcagcagcagccgtctccgacgacggcgtctgggcagcagtcgcagcagcagaaggtgacgc

SEQ ID NO: 434539 - DNA, 501 bp, Oryza sativa
ggagtgtcactagctctccgattaccaaatctcaaagtcctcctgttgcgcgtgggccagcagagaataagaatattgttgataagcaaaggctagaagaagaaaagaaaaggtggggagtatctactttgctatgcggagtctgcataccatctacaaaccaaactgtttactatttattcgcttccctattcctcatttatgttgacagcatgctattcattaatcaacatttttaacatcctgttaaaattatattcatctaactgttgtttttaccagaatatatcttgaggtcagctctattggcaatctgtgctctaaatacattatttaagttcttttatgaagaataatgttttttttaaatgaccttcttgattatttaatctgcaaaacttttctttaatgaaacgactgcacgtcttgcttccaaattgttatggtctcttgttatccttgcatataactgttggcttaagatgttgaactctagctctg

SEQ ID NO: 434540 - DNA, 277 bp, Oryza sativa
ctctcagctcagattccggctcgagctgccatggcggcggcagttactggcggtggcggcggcggcttcaggcggtggctgcgcgaggggtggagccagcggcggctcccctccttcctcccagatccggtggaggcggaggtgaagggtggaggcggcgcggagggtggatgccacattaacaattccattcctaatagacgccgacacgaggctagctagtagataacatgttacagatcggtgagaccacactatatggtagctgattgatcta

SEQ ID NO: 434541 - DNA, 379 bp, Oryza sativa
acagtaaaccaattgttttattaggccacaaaattggcatgatatcatttaactgtgaaacaggggacatgatactatattaaataagacaagaaattgccacctcgttgtttccagaaacgaagagattagacaaattttacatgagactattgatttaccacacaaaaaggttttccacaagcacgatcaacttctttaaacacgcgccgcgtgggaacatctctggctcatgaaaggttagtgcggagcttgatcttctggacgaatatgggaaagacacacgggaggggtggaccgccaagggctacttgcaaagataggacacattggacggtggatttgggcctgtcaaaaggcatgggccaaccagaaattg

SEQ ID NO: 434542 - DNA, 371 bp, Oryza sativa
gtttctggctccatgcatagatgcatccaaggagggtgggacgccacacgtatatttgttttatctatgctaatctgagcattatcggaggagagctctagcagagggattggattaagtcgtagtagtcagataggtggtgtgtactgatactaatgagcttggagtatactgacaggacaatgacgtgcatgatgttggctgcgttcatggtcacgagaggctgaggtgctccatcgatctggtggtctgcaacggtcagacgtcataagccaaaactcgaacggaagaattatgagctcttatagatcacacacgcaacacgcacacagttctataagcttaagaacttgaacaactggagtactaat

SEQ ID NO: 434543 - DNA, 366 bp, Oryza sativa
gaggtagaacccattcggtaggttcggaggttctgaactgttaacaaattgtcaggttacacttgagatgagatggatgaatgcccaaggccattacaactctggaggttgccacacgcttgtgtagtgcagagaacattgtttgagctttgttgtttgccacatggtgaactcactctaccaatcggcgaggggctctcttcaggcctagatagactgttacaaaatacagacttactacttagtatgggactacttgccttcatctactctatcccaagttcgaacgacagctataggcgcgacttgttgttgcccagcatctgcatacggttctgcacatgatgctattcgtagcttgattgc

SEQ ID NO: 434544 - DNA, 300 bp, Oryza sativa
aaaaaaaaagcccaattttttttttttttccaagaaaaaaaaaaacccaaataaaaaaaactccgaaaaaaagcccccctttccaaaaggggttttttttggggccaaaaaaaagattccggggggatggggccctgggggaaaaaaaacttttccgggggggggaataaaggggccccaccccccccggttgaaccccacgaggggaaaacatttggccccgggggggagggccccccagggttcttttttagggggcggggaaaaacttgatcttttttttccgaaaacccccaaggg

SEQ ID NO: 434545 - DNA, 372 bp, Oryza sativa
ctcgccgccgcgccgctattcacccatttccaagtcgtcggcggcgtggttcgtggtggcggctgccgtacggaagcggaagcgcaccggcgccactagaccagttctctaagagccagatccgcttcaccgagcgccttgttccgttagggcctttttaatgacattagggtagcttaagagaagatacgtggacgaatgtaagcggcaacaagagcttcagaattaactgggtattcgccgaacctttaagcttagagatagaaagataaaattctttgagaggcgaaagatcgcgaggttgatcaccgcgcttgtgtaggggccccgttcaaatgccgatgatgccagcaataaacctgtaaaaattaa

SEQ ID NO: 434546 - DNA, 506 bp, Oryza sativa
gaacgagctgaagctctcgtgcgcggcgcggccatgaaggcgtcgtcgtcgtcgcaggggcagagcccgaggacgccgtcgccgcgcgccacctccgccaccgccgagcacacgcggtcctcctcggagccgtggctcgtggcggcggcggtggcgagcacctgcgacgactcgtgcgtcaacgacgtcgagaacttcgcgcgcaccgtcgccgccgccaagtctaggcagctggtgggctcgtcggcggcgtcgcgccccgacatgctcgcgtccgtgctgtcccactacgccgccaagtggctccccgacgtggtggccgcgtcgtcgtcgtcctcgtcgccggcgacgtcggcgtcggggcggttcctgcccccggagagccccaccgccacgtggctcaagaagcggctcctcctggagtccctcgtcgccgcgctcccgcctgacccgccggctcccgccggcggcggaggagcggccgacgccggcatcacgtgcgactt

SEQ ID NO: 434547 - DNA, 427 bp, Oryza sativa
aagggccctgaaacatttttatttccccatcctttttattcattccccccaaagagacggacccctggaagttttcttgccctcatcaggcaagcagagcccccccccccgggggcaggggaattgttatgaacaagacccttatcaacatccagggctaaaacaaacaaggggatcaaagcaaatcccgaaaaaaaaaacccaggggaaaggccacattttttttttgtccccaacccctccgggtcacccccccgttttggggatttttttttaccctgttctattcgctcagggggccacgatctcgccgtcgtcctttgaccccaggatcaactccgggggcgccgcccccggcggcgtttttttgaacgcgcccccaatggggtttggccggcccagcgcctttagggccaggggccccccc

SEQ ID NO: 434548 - DNA, 374 bp, Oryza sativa
caagagagttggtccgaccagggatttagttcatttgttatccaaattagcatccatcactcaagcggtttcaacagttgacaaagctatttctgttcttcacacagcacaaatggtaatgacagcacaaaaagcccacaatgatattggacagtttttcaaacattccattttcggttatatcccataaaatccgatactttacggagcgctcatctgtgattttgccaacttctattcggatgctcatgaagaatcggtttgaacctctatgggggccccttcctctatggaaatcttgggtctgcttgccctgaaaccaagcacgcctctaatgcattgattggacctgccccaatgagcccaaagggact

SEQ ID NO: 434549 - DNA, 512 bp, Oryza sativa
ccccacccttttctccatttcgtggccaactcctccgcagacctgcccttccgtatgggccttcccggccgtcgccaccgcggcgccatggccggccgcgccctcgtcgtgctgctgtggtgcgtgtccgcctccgtgttcctcccctccgcccgcgcgcagaccaccaccttcaccagcgccatcgacggcaagaaggcgaccaccttctccttccccacgttcgacaagtccctgatgcagctcggcgccaacctgaccttctccagcaacgccaccgtcagccagagcgcgctgcaagtcaccccggacagcagcaacaatcctctggactacctcgtcaaccaggccggccgcgtcttcttccccaccccgttcgtcctgtggtcctccaactcgtccaactccaccgccgatggcaagtacgtcgcctccttctcacggtgttcagggccaacctctaccgatcaaacacgaccatgaaaggagaggggctggcgtttgtcatcgcg

SEQ ID NO: 434550 - DNA, 294 bp, Oryza sativa
catggcaaagaccagcatgcattcagttaataatcggaactttttggatggttactgtaaaacaaatgagtgattgagtgaagagcgataggagattcattttacatcgagagagggcgcacaaaatcagcaacttcctcagggcacacatgttggctccattcttttgatagtaaccagccttagtacacactttggtgcgggaataaaattaagttccaccttacgctccaaaatattcatgccagcttttttttcttccgatggcttcttttgggacgtggtttatgagcc

SEQ ID NO: 434551 - DNA, 211 bp, Oryza sativa
aaaggaaggttaaaaaaagagaagaaaaaaaatacattacttggaagaatgaagcctgagaaaaatacaatttgatccaacaaagcaatacccaggaaaagaaactgaagaagagaagagaatgagaaaaaaaattggcaaagaacagagcattggcatacaggcagccaaagaacctatgcaatttttaaactttacccctgaccaagaa

SEQ ID NO: 434552 - DNA, 509 bp, Oryza sativa
cgtgtgggcggggtagcattcatgctatcaacaaatgaaccccccttgtaacaaagtgaaagaagtaattgcaaatagttcgaaataggacttatctgtaacgattgatttcacataaaggtgcgctaaaacccctaagttctcagttggcgctgtacgcgtgatcgagaaagatggggacgtgcttgatccgatctgtccctttcctgctttctatcagaagcagatggacttgatggaggaggggattgctggctcttcgaggaaagagaaaatcatctactgaatttggaattaagcttgtggatgggcggatctttggtggactctagcgccgaaggtgttagcagcagcttatgtctctgccacagcacctctgaaaaggcaggctttgagcatagctcatgtgctagctctggagatggaaattgtgaagctggcatagattttgggcaagatgatttggttgtcatgaaactggaaggctattgctgagtgatgcatgtctg

SEQ ID NO: 434553 - DNA, 469 bp, Oryza sativa
  unsure (1)..(469): unsure at all n locations
cggacgcgtgggccgcttcgaaacccccgacgcgaaggaagcgagacgaaaccctcgcgcgagccgcctccgccaccgccgcctccttccgaccagccgccgccgccgccgccgcgtcgccgaatccgggcgggggctaggcgcgggctccccgctccccgccgatcgaatccttcgagggagcaatggccggcgtggtgtggatgaggacgtgaggtgggagcgatggtggggatggaagggaaggggngatgccatcggtgacaccagtgaggactagtgaccggctgcgtaagcggcccaagtacttcggtcgcaattatatgtactacaatccagccatacgcaagangatgaagtctaagaagagagcggctgcatcacagattgccaagaagctgcttcgcaagtcagctgccagggcaccgcctgctgattctattggagcaaatctacgtcgttcaacacg

SEQ ID NO: 434554 - DNA, 509 bp, Oryza sativa
  unsure (1)..(509): unsure at all n locations
aggacaccagagacaatattttataatatccggatcaaaagaaatattcggatcaaaagaggcaagaatttttttgaaatggcaaagattgcccctggctccatcttcctccacctgaaatcacacacacacacaaaaatagcagggagcagctgccggcgaggttgtcgacggcaagggagggagcgcgaggccggcggcgtggagcgcgagcaggaggcggccactgtcgtcgccgtggtttgagccgccgtcgccgcagtccaaagcgtcgatgccttgccgtgccgttcctccttcgccgcccaaccataccacagccaccacgtgtgagcgccgccgtcgtcaaccaatccatggacagagctccacttttctccacacaaaaccgagctctctctttttntctttctcttctcatgccgggtaaagccagctgccggccgatctccttccttggagccccgccggccataacctttcaccattagccttgcctcgccgaggag

SEQ ID NO: 434555 - DNA, 428 bp, Oryza sativa
tttgagaacaataagtgctttttggtcgactgtgggtctgcttcatcactacctcctggtcgactaacacaagtggaggagagaaaagctcctggtgccctttcagcagcttaactccttcttctacaaccgctaccaaccacttgaggcctccgcgccccaccactttgcccgcgatcatccatcccccacctcctcctgagccagccccagtaaatagtgcccggaagtccctgcgtcgattgagcggcgagcgcctagttgcaggtcttttcaaccagcccggcgtttttctctgggtccgctcacgaactcagcgcttcagtagactaggaagttcctccttggctctctgggaggccgactttgcgcgccttcgtgtcaatggcagtgctaagactgctcttccaaaggaggaccttggaaga

SEQ ID NO: 434556 - DNA, 216 bp, Oryza sativa
gaaatgtcacttccttcattgactgcatttggatccaaagtttggatctaaacacagcctgaatccattttgcaattccgacaaacgaaccgtacaacacgaccataaaaaacttttggggatcaaaaaaaaacacggaggtgggaaaaacaacttgtgccggggagtgttctgttacacccccaacactttttttctcccaaaaaagaactgaaa

SEQ ID NO: 434557 - DNA, 372 bp, Oryza sativa
atagaaagaaagagagagaggctcaagctaaccaatgaggttggtgccgactccaatagacgagataggctaagcagcaaaaaaacgacgggtgtgggaacgccggcgccaacctagacaaccggagggggctaagactgggacttcccatgagtggcagcaagaaccgcgaggcggcggccaaggccaaaaatacgggcttcgaggagaccattgacctgaagctgaagctgcccaccgccggcatggaggaggccgccgccggcaaggcggaggcgccggccgtccagaaggccaagaggccggcggaggccgtcgtcgacgacgccgagaagccacctgctcccaaagcgcaagcagtgggttggccac

SEQ ID NO: 434558 - DNA, 561 bp, Oryza sativa
ctatgatcgtgagatgcacgcgtacagtgcgccttggctcctgtttggcggccgaccttggtcgtcctttttaggttcaaatttcacgtgagtcataagggatactgtggtcctatctgaaactgagagaggaacctacatatcatactgcctgagtgacttgatcccgatttcatgtacacggctggctacaaacatccatggcaaaactgtgtcactgacacactgagcatttggtagtttgttactttcttacatcatggaagcagggtggtgactctcatagggggcgttccactactattctttgtggcaaagagaatgtacattggggaacaagaatcttaatatcttattaccgctccgagttaaaaattgtcgctgttctcaacaaatgtcaacaaatacctaacgactaaccgcctatgatcctcgttgctttctttaccgctcaattctatcatgcctttcattacccgggtgcaaagcctttcgagctgtggcacgccatagcctgtggtgagttccatgaagcgtcgcttcacgacttcagttgttcag

SEQ ID NO: 434559 - DNA, 459 bp, Oryza sativa
aatgcatgggtactggctgcaccatatcttctgctaagggtagtgatgatggttcttctattgatttggatttgaatcattttactctgggcaatgaaggtacttccaggcttgataagcgggcctgtgattctaggagggctttggataagcctgaattgaatcttgagctgtctttgtcatcccagtctgctattactggtgcagacttcactgcagcgactgaatataatagcccaagtctgcagccatactatatggacttagtgccaacagttgatgaaggatctacatctgctcgccgaccatctggttgtcaggtactgtctttccttaataagactgcaaagatgagtgaattttctccaaggaggttttcccaggtagctctaaccagagtcaaggtcccgctccaatgccaacattgcttcaactgccaaaaagtccagtagcctgtac

SEQ ID NO: 434560 - DNA, 376 bp, Oryza sativa
aacttgtaaatttatgcccaagaaggggtaactgatacatgtgattgcgggcaacctacatgctcaagtatttgtacatttgaagagttgttcatttactacactaacgagtcactgcttactagacatcggagacgccggacacaaaaacgacgccggctagcagcctccggaacctaaaaaaccaacacaaaaagaaaaggatctacacaagaacgaacatataatccatcgcctcgccgccgcgcagaatgcctaaaacctcatctgcgccggccggcaatggcgggctatggaggagaagagctagttattgttgttgagcagcgagtcccagtcgatctcgtacgacgggtacttggtgagcgcgaacccc

SEQ ID NO: 434561 - DNA, 73 bp, Oryza sativa
atttttaccttgcctctgactcgatctcgcgcccgtgaggatggcgggagactcgacgccgccgacgacttag

SEQ ID NO: 434562 - DNA, 458 bp, Oryza sativa
gtcctttttgcaaaaccgttatattttcttgaccaacctctcattgtcttctacagagaaaagggaaaccctaacaaaagatgagatgagagaaagaccatggactgattgatcgatcactagaaacgaaacgactgatctaacataaatagcaaatgtatcgggccgggcgtggcgcgcgcgcttcgcggcagtgcatcgtccggcggcggtgcggtgcggatggaacaatggggggagggatcgatcgatctcaggcggacgcgtcgccggcgccgagcttggcgaggagtgcggcgacgagctggtggcggcgctcctcgcgctcctcggcgcgcgcgcgccacgcgtcctcgcgctcgcgccagcgtcggacgagcgcgaggcgctcctcgccgagcgcgaccatggcggtccgccactcctccttcggggcgcggcgttcgggcttgcgcgcc

SEQ ID NO: 434563 - DNA, 465 bp, Oryza sativa
cgagaatttctccacctactttgagctgagcctgatcgattcgcgagatttccgttcatggcggcgaagtctttgagggagatcaggagagcggcggcggcggggattgggagtaggagatgcttctccggcgacgcggcggcggcggcggcggcggcggcgggggtggcggaggggaaggtgggaggaggagcggagacagacctccacctcttcgcagccataggcgccggtgaccgatggagtctaggctgccaagcccgctatcaaggaagttagtgaacctgccgtcctagagggcactgacactgcccctgagaacgagctgggcgattcagctggggaagcacaagccgtgcgcaatccagctgacggggaggtgcatgtttaccctgttggtgttcagacacagtctggtgaaaagcttgagttgcacctttaccctggaacttcctcatggatgtg

SEQ ID NO: 434564 - DNA, 172 bp, Oryza sativa
cggtcgccctttggttttttttgttttttttttttttttgttttttttttttttttttttttttgggttcaaaaacccagggcattaaacttttgaacccatcacctttcccagggggaatggaaattcgagaagaccaaaaacgacgaacccaaaaacaccttgacccccc

SEQ ID NO: 434565 - DNA, 118 bp, Oryza sativa
tttttgtgtatggttttttttcccgtaatcatggatgtttaaaccatctttgtgtctggtttttgatgtatccacatggtttacttcaaaaagagatgttaggacttcccaatacggg

SEQ ID NO: 434566 - DNA, 402 bp, Oryza sativa
gggaagcgaccgaggcagctttattcaacttggccagaaccacttttttaccgactaccacttttgcatgggtaaaattaaccaggtaccacgggttgattgtacagtatttctcaatgggacacagacatgccgaaacatcaactatttccccctcactctcactactctccatctcaccgtttttcaaaaccttggcaaaatctggcgttggagctgtcaaacatgtaagccgtcaggtcccgtctcctccatggtaaacaggcacaagctggcatgcctttttttcactactatgaaagccatgaacagggatatggcatcatcggccacaaagttggtagttgcactcttgagctgaaggttgcattcagtcggggtaactggggtgttttccgtaac

SEQ ID NO: 434567 - DNA, 513 bp, Oryza sativa
tttttttttttttttttttttttttttttttttttttttttttttttttttttttttttttttttttttttttttttttttttttttttttttttttttaaaaaaaagggttataaaaacccttttttttaaaaaagcagcaaaaaacaaaatggaaaaatcccgggagcaaaatttctggggggaaccccaaagggccgggggggggcccccaaaagcttttggtaaaaagaaaaaacagaaaaaacaaacaacttgatgggggggggggccccagtttccccccagggggggcccccttttttggcccaaaaaaaaagtttaggggaaaaaaaaggggttttaaaagccaaaatttgggcagggttgggaaacacaaatttttggaggggtttaggggggggttttaattgggaaaaaaccaaaattggggggggtttgggcccggggggcaaaaaaaaaaaaaccggggaaattgcttttcaaataaaaaaaggggccctaatggcccct

SEQ ID NO: 434568 - DNA, 90 bp, Oryza sativa
gatacagggaattgacagtagttctattacaggtagggcccgaattttgattacaacaaccttctacatttgtgcaaaagaacattggaa

SEQ ID NO: 434569 - DNA, 70 bp, Oryza sativa
ttttttggggtttttttaaatttttttggtttttttatcttttttttattttattttattttttattttt

SEQ ID NO: 434570 - DNA, 287 bp, Oryza sativa
ccctctgtcctcgcacgtatgccgtaactcctccatcgtggctgcgcgtccgtcaatgcgcgacgttcgacgcccaatcgcagcatgagtagtagcagagaggcacgcgcttctgctcgcgttcgtcgtcgtcgccgtcgagctgctgctggtgtctccgagactccacttgagccaacaggatcacgcgctgctccgagggaaggcttcctatgaggcgaagagcggcgcgctagactcgtggcgggcgtcagacgcgacgccgtgccggtggctcagcatttgtc

SEQ ID NO: 434571 - DNA, 279 bp, Oryza sativa
aagccatccagaaacaaaattattttttggaaagattatgcccatgtgcatgtggccggacaatttgggtacataatttttcaaaaaattcccccgcgaaaagaaatttttaaaaaaaagttttaaaacagcattatgcactgacgggtcccaaacagttaagctggtcgtcatttccacgggtggaaagccatttttacctcattggagttgggcatttgggcaagcggggcatgttttggggcccgcaaatttttttctgacatcaaccaatggggg

SEQ ID NO: 434572 - DNA, 267 bp, Oryza sativa
gctccacactgcctcgccttctcaatttccgctacacacgaggcggtgcgtggccggtgagcgagaaaaggctacgtacccatcgatagcgagaaattaagttgccggagaggaggaggatgacgatgaggttgtcggcagcggtggtggtgatggtggtggcagtcgtcggtctctttgcctggatgggaacccctctctgatgcataccacaggcagatttttgccatgatggccaatatgttgaagctcaatgtggtcatggct

SEQ ID NO: 434573 - DNA, 404 bp, Oryza sativa
tttttggtttttttttttttttttttttttttttttttttttttttttttttttttgggaaacaaccaacttaggggaagattaatagcaaggaaaaaggggggcaaaccatgcaaacttacataagggttaagggcagtcataacacaatatacccttgttgggaaaacaaacttttttcagcagcaaggaaataagggaacccaaagggaatatttgacccccaaaagcgcgcccggctagacaaggtcggatcatagagcattgccatcgagaactaggccaaaccttaaaaacaagggacattgggggcctcacaatgcttggagggaccaccagtttgggcactgggaaattcagcaacaggccacgagaaagattcagggggggttggcttaactcgg

SEQ ID NO: 434574 - DNA, 444 bp, Oryza sativa
cgaagatcgctctcgttttggctaagctcgaggtcgccacgctgcggcagcagcagggacgcgcccctgccgccgagccagccgccgccgcccagtggagcgtcatggacctcatgttcggcggcgtcgacgaggagatcaacgggctgagggccaagctccgggcggccgtgcaggcggaggagaagagcaggaaggcggccgacgacctcaccgtcgcgctctccgccgtcaccatggaggccaagcaggtgaaggcgtggctgtccgacgcgcaggccgagctggaggacgccaacgccgaggtcgaccggctcagggagtcgctgcacgccgccgaggcggagctgtggtcgacgaccgagcagctcgacggcctcacgtcggactggaaggaggccgccgtttcgtggcgcgccagggagaaggtgcttctcgcgcgcg

SEQ ID NO: 434575 - DNA, 395 bp, Oryza sativa
ggacatgaaatttataatctttattatcacgagttttccacatgggaaccactggggggcggttccaagatgcctgacagcccttgcaccagccgtctttgatcaattcttgtcgaacgatccattgctgatcataccaacgtacataccaatatctggttcaatatctggttaaatatcacatgatgtgatgtatctatttccaacttagcatgtttacacaggctagaccccaaggaagaaccgatttccgcaacaggccgcggcaacacaacagtacgtccatccaaaaaccagagttggaggataacataaaagctctcgttgctgtcctagactgtgactcaatttttcaagcaagtgggctgacatttccttggcgtgaacagggttgg

SEQ ID NO: 434576 - DNA, 488 bp, Oryza sativa
ggccacggcgtacgcttatggttaatcttacggccacgcgtccggaatcggtcaagaggacagcttccctggatcattctgaaaagactgctgccctaaactcagctcgattccgtgcaatgataagcgggccaagcctgcagagctactctggagcatacgggcaattggatgaggtgggaatcattgaggccgacgactttgttgcagatgagttttgcagggcaaaatgccaatcagtgagcgagaagggcatccggaactgcatggacgacctcctggaactgaagcgagtctctcggatgagatgcggaagaagtgcaccacaattatcctgttttcattcagacttctcggtgggtctccgactgatggggaagctgctgttggagatgcgcaacctgctatcgcaggaggctgccaccatccatggattgctaggggggggcccactttgctgccgcagaagagcatcacagtggaacaga

SEQ ID NO: 434577 - DNA, 142 bp, Oryza sativa
caaatatgccttagcacaactttatgatataaaatttcggggttccgaatgtttgctttacatttacagagcgcttcctgtcagactcaaaataagcaagctgggacaaaatacgctccaagatgaatcctgtaaaagagga

SEQ ID NO: 434578 - DNA, 374 bp, Oryza sativa
cttagctcaactttatgatataaaattccggaggaccgaatgtctgctctacatttacagagcgcttcctgtcagactgaaaataagcaagctgagacagactacgctacaagatgaatcctgtcaacgaggatacgctacaaccgatgtacagatgatgagctacctacaacaagatgacagacacaactctgttaattacatataaggaacactatctatacttgacataaaacgagtggcgggaaaacgcttaaaaatcaacctcccatggaggtcaagtggaacttgagaggatcagagaatcgggagcagccagtggatatgtgcttatacgacaatcatgcctggagagaacagcgacaccgggtggc

SEQ ID NO: 434579 - DNA, 123 bp, Oryza sativa
gggtgccactcgtgctttcttgctccgtagctgcgagaggctccacgccagagggggagggtcgggcatgggacgcggcgttgcggcgggccaacacggatgagcgacctttctgacacgtcg

SEQ ID NO: 434580 - DNA, 398 bp, Oryza sativa
atcagcacaggttcatctgaatattcagagtctggcagtgcactgaacaagaagtcaaaatcagtttaaagagcaaatacaacaaattgtctcaagtaccggcaaacttctacttacaacaatctcttgaatttttttatttatttactgacataacacttacaggctgtaaaattaactgggaaagagactaacatacagaggagaacaattttacagctcagaatagggctttacccagttggccaaataaaatgaaagaacaacaatggcctctctgcagatccggcattttcagcagttaagcatacaaaatctgactgtttgaaggtgtcagatcaccaaattccctaggaacatccacatcttgccactgaattaagtagcttgagctccta

SEQ ID NO: 434581 - DNA, 290 bp, Oryza sativa
aaaaaaaaaaaaaaaaaaaaaaaaaaaaaaaaaaaaaaaaaaaaaaaaaaaaaaaaaaaaaaaaaaaaaaaaaaaaaaaaaaaaaaaaaaaaaaaaaaaaaaaaaaaaaaaaacgagggggcccggggaagaaagcaaagagaccaaaaaaaaaaggaaaagaaaaagaaaacaccaaaaaaaaaaaagggaaaaggcaaaaaaaaaaaggaggggcccctaaaactagtggagtggggggaagggacaaaagggggaggggaggggagggaataggaaaggcaaggaca

SEQ ID NO: 434582 - DNA, 177 bp, Oryza sativa
ttttggggtttttttattttttttttttttttttttttttttttttgggcacatgagttctatacatccatttttaaacaaggtcaaccaaacaagggtcaaatcatgatcatcaaaaccccttttaatttggaccatattttaccccacaaccaaactacatacacacccccccaa

SEQ ID NO: 434583 - DNA, 288 bp, Oryza sativa
aaaaaaaaggggttttttaaaaaaataaaaaaaggctccttggggtttggggccaaaaaaagggaaaaaaaattaaaccccaaaagggggtaaaatttggggggaaaaaaaattttccaaaaaaaaaaaaatttccccccccggggggtttttttaaaaaaaagaatttggggtcggtttaaaaaaaaaggggattttaaaaaaaaaaaaaacgggggggtttaaggttaaaataaaaaacccccgcattttaaaaggggggggccaaataaaccccccaaggggccc

SEQ ID NO: 434584 - DNA, 424 bp, Oryza sativa
ttatgaatatttacggtctctttcgaggaggtatacgattaaaaaccataacacagaaactttcagcagatggaccattcatacctggagcaacaccgaatggtcaatggtattcaacaccatcaactgatgtaatgatcatgggtaagttgtttaataatgtatcagtagattacttaaacattgcaaacaacataaccaaagcaactggtaacaattgtgttggacaagttggtattgaattttctgatccagttagtaattatacaaatttgctacctggtttcactaattcttcttcaactacttttgttgatcaacgcatagagggatgtgctgagtttgaaataccttattataattcaacacatattactcctgcaattacatctgttcaaagtgatcctttggtacctgttacgag

SEQ ID NO: 434585 - DNA, 95 bp, Oryza sativa
tttgggggtttttaaaatttttttgtttttattttttttttttttatttttttttttttttatttttttttttattaaaaataaaaaataataaa

SEQ ID NO: 434586 - DNA, 371 bp, Oryza sativa
tttttgggggggttttttaattttttggcttttttccttttttttttttaaatacttcagttttttttttttttttttttttttttttaccaaaaaaaggaaattttctgggagggggtaaatcataaaaaaagtaggggaagaaaaaaaaaacccaaaacggaaaaaacaaaggaaaaaaacacaccccaaaaaggggggggccccaaaaaggcacaaaaaaaaatccagggggggaaaattaataagggggaaaaatttttctgggggcaaaaacggaagagggggaaacaaagcccccccaaaaaaggggttccaggaagggggcccaaaaataaaaggtgggaaaaaactttaggggggggcccccc

SEQ ID NO: 434587 - DNA, 391 bp, Oryza sativa
cgcagggaaaactcaattcattaatcacactggaaaaaaaggcatgtcaaattacagaacactgaacatcaccctatgaaaaatcagaagagctactgatttaactggaatggaacaatggtaatgaccaacagatcactactgggagaattaaatcccaaaaaaaattatctaaagaagatcagaaatcagcagaaaaacctcactaaagcaagcggctatcaactttgctgaagctctctataagccagtaactatgcagcctagctagcagctacctttgctaaacaatggcgctcatggcgctgcagattcatccttctgcttctcctccgggggtgttcttgacccggagtaggaattccggatctcaacgatcctcctgatcacc

SEQ ID NO: 434588 - DNA, 319 bp, Oryza sativa
gagagaaaaagaaggggtccctatattttagcttaaggcaaacaaaaaattggggggtttttaaaaaaaaaaaaattttaaaaaaaaaagggaatttaaaaaaacccccgaaaccaaaagtcccttacccaaaaaaaataaaaaaaacttgcccaaaattttgaacccccgggtttcttcccgggagaaaaaaccggaatgtttttgtaaatttcacccaagggggggcaaacccctaggggaaagctgggcttatttgccaaagggaagggggaaaaaaaaatttgggggggggaaaattttggtggtgaaacaaaag

SEQ ID NO: 434589 - DNA, 328 bp, Oryza sativa
ggatcacattctgcctctgattttgtagccatccagagttccccatgaagcaaggctgacatgcttctttaatccagtgctgcattttataagcagctttgttgccaattcacttgcataacctgcacatataaagagggactgcaggctaggcgtgctagaagcagactctcaagctgtgagggagtcgtaactgaattttgatcagttcattcagttgcatgtccttgcatgccatggcctgtctcaagctcagacatgtgtgcctcactgtggtgcccttctccattggaatctccagctgtagagggcaaggaggagggggagc

SEQ ID NO: 434590 - DNA, 197 bp, Oryza sativa
tcgattccctttatccccaaaagccccaaacccgaggaggcgagaggaggaggaggaggagctcgtcggcggcgagcgatggcggcggcggtggcggagctgtgggagacgctgaagcaggcgatcgtggcgtacacggggctgtcgccggcggcgttcttcaccgccgtggcggcggcggatgcgctataccacgt

SEQ ID NO: 434591 - DNA, 132 bp, Oryza sativa
aatatcagtggggtaagcatccggaacaacaagagtaatatttccttaatctgatattcccagtgtttaaaccacttcttgacattgcttttcaaggttcaagactaccaaaatcatatcttaaaaataaag

SEQ ID NO: 434592 - DNA, 71 bp, Oryza sativa
ctctctctctctttctctccccctcgacgcggcgagatcaggaggcggaggaggctagggggggaaggcac

SEQ ID NO: 434593 - DNA, 362 bp, Oryza sativa
ttctctctcttaacctttctctcctctctctctctctcttgagttcttggttgatcgccattgccgcggaggagctagaggagatgagatgaggggtgcggggtttctgctgctcgttgtgttcgccgttgccgtcgccggtggggcggtggctactgtggtgtatctggacggtgtccatggtggtgtggatgcagagtcaccatagtgtgtgccgcactagtagacgatggacgccgactaaactccaaacacttataaactagggacaatgctcattttaccctcaagaactcacaaactactggctgtgcccatacgtgtgccccaacagagcggtatgattgcacccggatccttag

SEQ ID NO: 434594 - DNA, 422 bp, Oryza sativa
cttctcttctctcttccccggcggcgacgcggcggcgccggtcaaaccactcctcgccggcgaggggagcgcggatcgggctcgggaggaggctaggggtttggctcgctcgctcgctttcggcgtgcagctgaggcggtggacttggcggctgtggcggaggtggggaggtggaggctggaggggagatggatgggttcctgctgacgctgacggggctggactcgtaccccaaggtgcacgaggacttctacaagcggacgctctgcggcggcgccatcacggccgtcacctgcgtggtcatgctgccgctggtcgtcttcaagaccctctgacacaactgttccgagcgtaccatgcaccctactcagtgatgataccacggatatcaacgcagagcagcaccatgacatgaggcagga

SEQ ID NO: 434595 - DNA, 185 bp, Oryza sativa
tcgtgtggagtttccccgccgccgccggcggcgccgccccccagaagctctcctgcttcaagctccgccgcttgcagagccagtccatggccgccgacgagttcgacaacgtgtaatcgccctgacgccatggacccacaccgtactgctatactgtatacgtatatacatatgtatgtatgtac

SEQ ID NO: 434596 - DNA, 111 bp, Oryza sativa
tttagccgccctctttttttttttggggcatttaaacaaacgtgttagctcgcacaaaacttcatctttcttcaatgttgactacgctaataaaaatctgtaatcttcata

SEQ ID NO: 434597 - DNA, 398 bp, Oryza sativa
tttttgggaagaatagaagattcgcaatcactgcgatagtaaacttgtattactagatgtttatatatatttttctccctgcaatcgccatcgatgttattcagcatgaggattgcgaaaccgtgtgtcagcaaggtctattacatctggtgcacagacagggtcgatgcgcatcactgaatcactactgtaattcgtcttcagttacacatttcgcaaggaccgctggccggcacgctgcaagcgaggccaacgatcaatgaaagtcacagaataatatggccatcgtttgcaactacttttgatacctctaatttcttggcctggttacagttgatcctgacgttctgtatgtactaagtcagacgtatgcatcattacccatcacgagtagaact

SEQ ID NO: 434598 - DNA, 348 bp, Oryza sativa
aacccgggaatctactatagcattatatattatcagggccacgttacattttaccactcacacttttatctaatctaaaaactcatttaacttttatttttcaacttgcatccaaggggcaagggggaaggcaagaaactagcgaagcccttttacagccacaggacacagggggaattgcacagataaacaaaagggtagcacaccagcgaagcccggagcgagggcgttctcaacaggtgggggcaggacccccaccggatcaccgacttggggaccgccacatccaggggctcgggcttgccggggccaaaggggggggtccccccggtggacaagcccaaggcc

SEQ ID NO: 434599 - DNA, 130 bp, Oryza sativa
ctgatgcttcgcgctgccggaggctgacctcgccgccggcgactccgctcggccgccggagcagccagcgcgcgcggattcagtggccgaagaagcaaggatgatgcactgaggtggggggggggggggg

SEQ ID NO: 434600 - DNA, 334 bp, Oryza sativa
ggaaatcccaacgcaattttacattggggaccccaaggggaattggtataaggccatagtttataacatttcataacaaaaacaaaataattaacccttaaaaaaaaccacaggggcccagacaaaaaacccttttttttttaaacccaaaatttttataaaaagaggtgtaaaaaaaaaccttaggggcgccgcaaaaaaaagccttgaaatttttaaaggcccccagagaaaaaaaaagggggagcctttttggggccaaccacagtttaattaaaaggttattttcccaggggggggggtttgtttaaaactggagaaattgcccgggggg

SEQ ID NO: 434601 - DNA, 412 bp, Oryza sativa
gccccacccacacaaaccctccaccaccaccacccacccacccatccgttggccaccggcggcgtgggcggagggcggcgggccggcggccatggggaagaacctgcgtatcaagaccggcaaccgcgccccgctcctcgcccagggggagacgtcgagggcgctctccgatctcgaggaggggagcaacgtccagccggagaacgtcgggttctgccgcgtcatcaagttggcgaggcatgacgcggggaagctggttattgccaccatggcgctgctcgtcgcttcgctcagtaacattctcgttccgaaatatggtggaaagataattgacattgtttcaagagatgttcggcgtccagaagataaagctcaagccctagatgatgtgacgggcacaatattgtatatt

SEQ ID NO: 434602 - DNA, 254 bp, Oryza sativa
gccggataaaaatccccccttaaagggtttattactttttttaaaaaaataagggattttattttgtaaaaaaaaaaaaacctttggtacaattaaaatttttttttacttttgcgcggaacttgatggattttttaaaggggtttcttttttttccgtttacttatagtggatcttaaaaaaacgggttccaccttcccggtgaagggcaaaaaattaagttttttgcaaaagaggtttttttttttttttgg

SEQ ID NO: 434603 - DNA, 100 bp, Oryza sativa
caaaaacacagggtatttttttttgcattggtttaccaacggtcttgccaccctttacaagttctaaaaaaaagggtgattagcccctgatcacatattc

SEQ ID NO: 434604 - DNA, 467 bp, Oryza sativa
cagcttcgagcaaagtgcgtgttcttgagagactgaaaatccataatcatacattgatgcaggctgaaactcattcaggacgcccacaccaaattaggatacaccttgcatacattgggcatactgttgtagatgaccctctatatgacattgagaggaaggcaaaatttgatgaaccagaacctactagtacggctgattcttttgcatatgatggaggttatgagagacccttgcaacccgtccctggagattgtgggtaccacctacatgcacattggctaagtctttggcatccaactaccaaaggagggaccggtaaaatgaataatattgaatttgggtgctattctgtacctgactcgtacaatagctttcaatcccaggaactggggttaaattcatatatcgaagatgatcaaaatcacagctcctctgccacatatcctacagactagagaggaaca

SEQ ID NO: 434605 - DNA, 139 bp, Oryza sativa
gttgcacatggatttacatctgctttcccttccattattgaagaaagcattcctgttggtgacaaggttgtggatgatggatggggcagtcctagagctagttcatcacccttgagaagtttgcctatcacatttgatg

SEQ ID NO: 434606 - DNA, 306 bp, Oryza sativa
tcttcctcatagggaagggaagagtaaggaggaggaggaggaggaggaggggaggtggtagatgctcggagggtcgccccctcctaggactaccacccctatccttctcaccacttactatctgtcaaccaactccccttcatcctcgatcatgacatcgctccgtatctgtccctcataaaccactacaacacctaccatattcctctacactgcttacatatacctgcagccactccttcatccatgactctgccccggtggcctgtatccatacaatccacctcaccacctacattaaccttt

SEQ ID NO: 434607 - DNA, 242 bp, Oryza sativa
ttttgttataaatgataccaaggcaagagggaggcagggcacggtgagagtgccatcgctgagatggacatcagcaaggcgctgggcgcaacggcggcgagggcggccaccttggtggccatggctgagggtcttctggtggtggtctacttgtacgagccgtaccggaaggtgtggcacgtgccgggtcccgtgcctctgccgatcatcgggcaactccacctgctggccatgcacgggcc

SEQ ID NO: 434608 - DNA, 282 bp, Oryza sativa
ttttaatatggagaggagaaatatgagagagagggacgtgtctaaaaaaaggcatggttgcactggagcttaatagcgaaagcagagatggcatgaccttagctaagagcaaggaattggtggtggcggcatgtgtgatgcatggctggctgatgctaggcaggaagaagaaatggatctggcttaagtcgcttaacttagctatgggtgtccatgccatgccatggatgggtgataacgccttgctgatgctgctgatactgctggcgctggagctgagga

SEQ ID NO: 434609 - DNA, 334 bp, Oryza sativa
tttacttgtccgatctccccaagggggatatggtggggctacgatagatacatctggctgggagggtactaattcgacttacacggactccaccccctgcaccatgccggactactacaaccagcggcgaggcgccctcctgaggagactcatacttgtcgtcatatacgtcgtgaccttgttcatcctggatgtattcgctgtcaccaatcgcggatcctcgtcgcagttctcacaaaggatcgcgaagccactggaaaatgctgagcgacccgacaactttatgctcgccaagccccgggcaccgggcaccggcgacaaggaccttctggga

SEQ ID NO: 434610 - DNA, 354 bp, Oryza sativa
gggccggaatacctgggacgtcccttgcgaccgtgacttctgggcatagcccatcgtccccggggggggttgacttgaaaaggggggggctcaaccagccagtgaagaaggagaagaaagagaagacagagaaaaaagaaaagaaggagaagaaaaaagagaaaaaggcgtcgtcctgcgagcccaaacgcaagatcgcaggacttctactcggtttcaaacatcgtagcttggtcgaggcgcatgctacattgtgcatctggccaagcgcaacgagaccggcgactagggtgctgccaaagtgatctgcaagaaagatcttgggagggactatcaaaaagaatttgagcgcga

SEQ ID NO: 434611 - DNA, 430 bp, Oryza sativa
tggaactgctattctgcggccaaaacagcctttgttttggcttattttttgtctgaatacaatgctcagatttccttcgaagtgttcctggatatgtatgacaggaactttcatatgtgtagaatgctttgtgttaaattaagtaagacactggacatgatgaatcatttggcccatggcatctcagatctgtgtgactcaggtctcaaatataacgcttctaaggttgaaatgctttgttcctgaagtttatgaatttgtgattatgcatatattatcttgcccttctttttctagtttaaaacttcatgtttacagtccatttgcagctgcaatagatttgctggaaaactaatagagcaacttgttttcccagattagccaagtttgatcagattgttcacgtgttatggctggacatcagtataat

SEQ ID NO: 434612 - DNA, 364 bp, Oryza sativa
gctaaatgtaccgccagaacgagtcggccctctcctgcttctacctcttcctcctctggttcttcttcttgaaatagactccacgccgcgccaattcccagcccgagcgggagccagctgctcaatccgtcgttgagattggttgcggtttgctctagcttgtgaactcggcggagatttttggttttttgttttggttttgggtttggttggggaaaggggttcgaatcgatcggaaagggtgttacgactcgattggcttgccctgcttctgtgactggagtttggcatctgaaccaacgtggcggaggggttgttgggaaaaagcatgagaacggcggcgagggagcgacttcggcacgtc

SEQ ID NO: 434613 - DNA, 217 bp, Oryza sativa
tagctgaggcttgggttctaggctggcttacctatagctagatagcttacatgatggccggcggcggccacgctgccgcggggcaccggatacagataccagctggcccggcgtcgcaatcgggaccagctgatcataaggcggtcgccgcggcgccgccttatccaagaatataacttttttcattttaatgcggaggtcgcaaggacagccaaag

SEQ ID NO: 434614 - DNA, 384 bp, Oryza sativa
ttgtcttctgaatctatctctcgagcggccgcggatcctgctaataggagttcctccgtctacgccgcgttgtcggcaatgtccgctctggagctatatgcatacacgatccggtgcggatgctgggacccgctccgacgggcaggcgccatgccctggggcacccaaattctgccgaactagaaccctagccaggaagcgggaagccttatcgcgactgctcaagctataccagccttgatgcggctgagaatgctgcctttggctacaacgcggaggaagaagttgaactcggtgaattggctgataatgacggagatgatgcagctccgcaagaccgtggagatgaaaaatgcccttacgttcaagaacagtgtttgttag

SEQ ID NO: 434615 - DNA, 61 bp, Oryza sativa
ttagcttccgccgcagccgcagccgcagccgggcgtggtctcctccgcccgcgagctcctc

SEQ ID NO: 434616 - DNA, 356 bp, Oryza sativa
  unsure (1)..(356): unsure at all n locations
ttggattgggtgggggaacccgcggcacctcgcgttgtgggaccccgcctcggcggcggcggcggaccactgcagatgggaaggcgtgacctgctctaatgccaccaccggcggcggcggcggtgccggcgtggtgacggagctgtccctgcacgacatgaacctcaccgggacggtgcccacggcggtgtgcgacctcgcgagcctgacgcggctcgacctctccaacaaccagctcaccgacgcgttccccgccgcggcgctgtcccggtgcgcccgcacttcgtttcttgacctcgccaacaacgccctcgacggcgctctgcccaacacgtcgnagggttgtccccggcgat

SEQ ID NO: 434617 - DNA, 310 bp, Oryza sativa
gtgctgaggcttgggttctaggctggcttacctatagctagttagcttacatgatggccgccggtggccacgctgccgcggagcaccgcatacagataccagctgccccggcgtcgcagtcgggaccagctgatcataaggcggtcgccgcggcgccggagaagtggctgaattactttcttcgcttgctcgcggtgatcgaaagcgtgggcaacgccttcggcacgctggccttcacctgggccaccgtcgtcctgctgggtggctacccaaccgttctcaagcgcgattttggtattgcgactgcgat

SEQ ID NO: 434618 - DNA, 462 bp, Oryza sativa
tggaatagccccgcggatgctatcaatcctcggatgatactgcaggtgctccaagagctcgagttggattcccccaagagcacagaaaatgaagaaatagggcgcttgatcactcctcaggaggcctgtaatcgtattgcagaggttgtccatgaagccgttaaaaagatggagcttgttgctgaagagaaaatgcgactctacaaaaaggctcgcattgctgtggaggcctgtgaccgggagcttgacgagaaggccagagagcttcaggagctgaaggccgagaggctgcgcaagaagcagcaggtggatgagctagagagcattgtccggttgaagcaggccgaggccgagatgttccagctgaaggcaaacgaggcccgtcaggaggctgacaggctccagagcatcgcgcttgccaaatctgagagggccgagcaggactacgccagcctatacctg

SEQ ID NO: 434619 - DNA, 415 bp, Oryza sativa
  unsure (1)..(415): unsure at all n locations
tttccccccacctcgccgccggcgaattcctcgcctccgccgcgaccgagcccccgccgctcttggggcttcgctcgcttctccagcgcaaccctcccccccctcccccgccgccgccctcacacagggttctcttgcgggttggggatctcatcgcggcggcggcggcggactaataagggattccggccgatggcgtggcggcgcgtcctttcgcaggtcgcaaggaacccgatccgcatatgcaatctgcaatgaaataatatatgccaacccatcgaggattctaggaggtgacaccatagcaggtggaacacttagaaacttacatgagagtatcagtcagctatgttggtagctttgcacgcangatgcgacagatggactcacccagtgaagcctctctgctgaaaga

SEQ ID NO: 434620 - DNA, 364 bp, Oryza sativa
aatgaagtgatgccacaaatcaggcgttcaagattcaaagttattaggaagattgttgatctattattcacaatatattctaacaaatctgcattacagcagctatacttgtctagtctgcactttgcggtgcaccggcttgacatagacttatcccgttcttctaccagaaactctgaacctatctggttcagttctctacaaaagcaccaagcagaaactgcaagaacccctgtcatcaagtatgatgtctgaacttcgccatgtacatcgcggcattcgtcgctgtcatgtgttttggcgtctcaaaacgaatgggacattgcaaaatgttcaaccttgcaactgcctagctaagcatgct

SEQ ID NO: 434621 - DNA, 487 bp, Oryza sativa
ctccaggttctgaagggtttttttgtgggtggcgccaccagcaaaagtaacccatgtcgtctagcagatctagctagcttgcccaagctgaggaagctgagcattagcactgggcggcgagcattagtggtacaggaagatgagctgaacaaattgcaagggtgcacagccctagagtccttgactataacatggggagcagcagcagctgcacaagggccgaagcgtcaactgatatctggtgttgaaggaagcatcaaaggaacctccatgggatcagagctgttgcttcctccaagacttgagaagctggacctgcggcgcacccccatggagaacttgatgcatttgcttcatccaggaaatgctgagaacttgaagagactgtatattcgaggagggaagctgaagagctttggtgatgtggaaggttggaatgtctagacgcttcgtgtgaggtttctgaaagtcttggagtgtgattggg

SEQ ID NO: 434622 - DNA, 218 bp, Oryza sativa
cgacgtcctcctcccacacgcctatcgtcatcctcgcgatcgccgcattcatccatccactccccccgcacgccgaaggaataacctagaccagagacgaccaaggagagcgtctccgatggtggtggtggtggtgggaggcggaggaggaggaggaggaggacgaggggtgaagaaggaggagggggaggaggaggcaaggggaagaggaagaggac

SEQ ID NO: 434623 - DNA, 276 bp, Oryza sativa
ttttcatcaatcacgtgatgacacactcttagattagcttagctaagctgagctagagctattccacgagcaggaataacctggtcgcgagaacgaccatcgctggcctgtacgctggcggtggtggcggcgatcctcggaggcagccgcgacgcggcccacggcggcggcggcggcggcagcagctggctgctgcatgacagagataatcagcctggcattgtgcctgggctacatgtcccggaactcgacagcatcctagccgtcctgctgcac

SEQ ID NO: 434624 - DNA, 55 bp, Oryza sativa
aagggaaagaccccggcccggcagggaccggaacccccgggccgacccacgcgac

SEQ ID NO: 434625 - DNA, 319 bp, Oryza sativa
tctgactcctcctcgtcagtttgcccgccgcggcgccgccgccgccgccgccgatccccatccatcccgcgagcgagcagggcgccgtcgttcgtcctgctgcatccgccgcatcctgtaaacatgaaccctttaaagaggtcattggaatcatcttctcaggaacatgaagcaggcaaacagaaactgcagaagagagagtgtcaagatttcactcccagaagatatcagcttgatgtctatgaggttgcaatgcggagaaacacgattgcgatgcttgacacaggagccgggaagacaatgattgctgtgatgctta

SEQ ID NO: 434626 - DNA, 283 bp, Oryza sativa
aggggtaaagcagctgccagctatacatatagcttgcatgagttgcatttcaacttaatttcctttgtgtcatcaatacaacagctatcctacactgaacaagatccctcttgttttacacataacctaagctaactctttacagcaccaaagggaaaccgtctcaggacatgcatcacatgtcctcccattgcctgccttcttgaggcgaagagatggcggacgacgactgagacctccggagctttgtttatgtcctcccattcccagccttctttgaggc

SEQ ID NO: 434627 - DNA, 286 bp, Oryza sativa
ctcgtcgcctacctagggtttcgtgtttgggagatctgagagggggagggggatggaggtgagggcgactaccgtgcccggcgcactctccccgcgccgcctcctgggttcgcgggggacaaaatgccggactgttccgaagctgatcggtgacctgaccttccccgcgcggggggatttctgccgccggaaggctggatctttgattcttgaggcaaatggtggtgcaagcgaggagggtgaaagtctctactctctccttccttacttcctgcagcacctgccc

SEQ ID NO: 434628 - DNA, 360 bp, Oryza sativa
  unsure (1)..(360): unsure at all n locations
tgtactcgcacgccgcgacgcctctgctgaacatttcgctctcttccaagatattttttcctcccacgattccttcctcccatccctgtggggattcatcggctcatccgtactagcacaagatgtgcgagggtgtgcgggccgccggcgacgccgccgccgccgccgacgtcgacgtcatcacctcctccggccgccggaggatccccgcgcattccactgttcttgcgtcgggcgtcgccggtgctggagagcatcctgcagcgccgcctgaagaaggagaggggacgccgccggcggcggcggcaaggtccgcaggcccgtgtcccggatcggcnggcgtcaccgacgacgccgcgg

SEQ ID NO: 434629 - DNA, 404 bp, Oryza sativa
ttccattaccaccgcgccaacccttcgccgccgccggggccgacgacgacgaggacgacgacgatcgaaatggcctcctccaccaccgcctcctcccagctcgccctcgccctcggcatccccggcctcggcggcctcctcatccccaccgacgccgccgccaccaccaccaccaccgccgagggcaacgatctccacgccgacgcctcccaccccgtcctccgcctcgccggcgccgtacagcactacgagggggggggacgaagtgggtactctctcgtcgcgcgccaggccggcaagggcgatgatgagaatgagaggccatacgcggagctctggatggggacgcacccggcggcgccgtcgtcgctggcggcgacggtggagttcctgagggagtggct

SEQ ID NO: 434630 - DNA, 388 bp, Oryza sativa
cagccacgagctcgaggagagggagaggtgtacttaaaacggggttggctatggcacccctcgtccggaggatgctgctgctgtgcgcggaggcggactcctgctactactaccttctagtactccacacgcaggcctccgtgccgtcgagctactactggaacgcttacggggacgaccacacacgtgtctggaaggacaccatcctcagcgaggcctaactcgacccgctctgccccgacagcacgaacaactgggcgcccctaaggctcgccgtcaaacggtacgcctgcaaagggttcctcacagaacacccctttcgcctcccgtaccacacacaaattaaatggttccctgaagggcactttacatagctaacaaattgaac

SEQ ID NO: 434631 - DNA, 464 bp, Oryza sativa
tttgcttggagcggtggcgtcccaatccaatccattcccaatgcgacttctcaggaggatcccgctgctcttggacgagtccgaatgggattaaggccatcggggtgtttcgtctagtgcattggtggctggatgttttgcttgctgaggaagcgaggttgagctgggagggagggctctggtgtggtgttgacgaagagtgttttattgtaggttgacaggatcatgacatgcaactggaaaatgcttgattatgtttgatagtacgaggattgtccgagtttctgagattattgccttcaaggaggttgaagctgcttgtggtgatggagtagctcagttcaagcaatgagatgcaggaattgtggccactaggtgaagtagaccaaaagggaaccaggttcccttgtgcattgtttggacacctctgcggtggcttttggctggctccctcataggtcatg

SEQ ID NO: 434632 - DNA, 467 bp, Oryza sativa
ttttggtgcagaactaggtggttgaatgggcatgttacattgaagatgacccacgtgcagctcattctgagcatgtaggcaaccgattgcatatgtctggcactggaaattcgatgtcagaaaatcaatcagggagtgaaaaaaccatgatagctggcagtgagggtgagtaaactctggacaattgggacctcaagatgcaatcatgctcaacagtaacttactgctgggggcacaattcaatggaaaaagaaggacttggaattaaactacagactcttaagaaaatgaagagtctaaaaagcaaatttcagagactgagtctttaatgggtattgaactgggtaaaagtccattggcattcatgggattaaacaatagagatcatgaatatcaaaggcatagagagaatatagcttcagcacctggaagatctgaacagccattggtgatgaaaaactggtcag

SEQ ID NO: 434633 - DNA, 462 bp, Oryza sativa
cgccgtccccattcccatccccatcctcctttgcaccttcgcgccgcctcttgaccgcatcagcgtgcgcctctcgcctccgcctccatcgccgcccgtgcgccgcctccaaccagcctacctccgcggctccgcctccatcgccatgcgccgactccagccgggccgcctccacctccagccggcgcgcctccacttccatcgccgtatgccgcctccagccgacccgcctccgtctccatcgccgtgcgccgcatccagccagccggctgcatcccggctcggtggtggtcctggtggaagatgacagccatggccatgagaagctgatttcttttctaaatcgtgttcgatttgcttcttttcttgtctaaatcgtgcttgatttgatggtgcaccaattgtagtgtgtcatctgcgatctaattgtttgattattcgatcttgcactgattatttgat

SEQ ID NO: 434634 - DNA, 483 bp, Oryza sativa
ctcgctcgctcgctccttctcgttccggattactgccaccgcatcctcgccggagccaaggtccccttccaccgccgccggatccaaccatctgccttggccggccccatcctgcactgcactgcttccgccgttttggatccgggctcccttctgcactgcactgcttccaggtccccagatcggcgaggggcgcacggtctcacatgatgttgtgatgtgctcatagggagagtggctcaggagattggggcttggggtggatcaacaacttgatgagggaggccggtggcaaagtatctaggaaggccccacgatgcagatccatggcagagcagcttctcttaagagctcagttgcgacgccggcgcaagatctcgcgcagctgtgcgggaatcatgcagcaacccatggatgattggtgggtcgagcaacaggcatgcacacgataatcgccatcattaacagaggaagtgctttgag

SEQ ID NO: 434635 - DNA, 218 bp, Oryza sativa
acttttacatcgatacacgcagtgcatccttgcggggacgggttgattacattggtgtggcagagataatggctgctgttcatactagcgcatggattgggcatgatttacatagcgagaaaacggtgactgaaagaatgcgcgcccagactccactttgtgaagttgaccacgattatggctccaatgttgagagaaaaaaagtgcgagggcttata

SEQ ID NO: 434636 - DNA, 289 bp, Oryza sativa
tttccatctccatttccttcatcagaggttgttctgctcagtcagaggcatcctttgccaaaaacatttatctgcttcaatggcaacttcttggtctgttgctttcactatcttcttctcctgtattctcctgcttgaaaccatctcttcttcagcatctcttgattgctcatatggttcagctcaagtgaagatactgtccagctcggtggtcagtgagcagcaaaatgtgtaccttttcttgaagccgtttcaaaccacaagatcatgcagcgcgaggcggctcgcc

SEQ ID NO: 434637 - DNA, 308 bp, Oryza sativa
gtccacttcgtcggcggcgaccaccccggagcataccggcggcgagggggaggaggagaaagctccccgaggaggaagaaggccgaagctgcctcaggtcgccggaaccctaggattccccggcggaggtggaggcgcggagagggggcgtcctccagatgcggccgtccgggatttgaatggggggcagatctccggggcgaaggaggcttctagaagcgggctgagttgaaaacctagggttaggtttggtggggttggagctttcgtgcttggtaaccgggatgggtcggagctcgcgaggtgga

SEQ ID NO: 434638 - DNA, 461 bp, Oryza sativa
  unsure (1)..(461): unsure at all n locations
ttcacgcgtccgcgcgtcttgcacacgcatgcatatccatcgatcgatcatatgcgctttttagtcgtcacttgtccaactagctagctctacttccatatatcgatcgatcgttcgtccaatggcggcggcggcggcctgcacgaagctgccgttgctgctcctgctcgtcgccgtcgcagcgtcgtcggcgtcgtcactaacgccgctgcacgcggccgtgccggcgaagggacctcgccccggcggcagcgttaccttacacctcgaccaccgccaggtgatggtggacaatggcatcgtgcaggtgacgctgtcaaaccctgggggccacatcaccggcgtcagatacaacggcgaacgcaacctgctccactacgacggagaagccaactccgccgggtctgngatgtggtatgggaacttcctggggtcaatagtccaagagcatgatcgatatg

SEQ ID NO: 434639 - DNA, 326 bp, Oryza sativa
ctgactctgtgagacaatcatttcgaggtcggtaaccaactcgcctgcaatggagttctgtgacgacttgctcgtggagattatctcgaggctcccgttcaagtcgcttgcaagattcaagtgcacctcccgctcatggcgcgcgctcatctccggcggcgacctccgccgccaactcacgatgctcgccgacagcttgatcgtcggcgacggcggcgacggcgagcacgggtacgccaccgcgagctacgacgatggtgttgagatctgcgacatgagcttcttcgcactcgccgagaccgcgtgcagggtcagcgacgcgtgcg

SEQ ID NO: 434640 - DNA, 406 bp, Oryza sativa
atttatgtgtgtgacatgtatgtcgagttcgttaaccaactcgtctgcaatggaattctgtgacgatttgctcgtggagattctctcgaggctcccgttcaagtcgcttgcaagattcaagtgcgtctcccgctcatggcgcgcgctcatctccggcggcgacctccgccgccgactcccgctgctcgccgccggcttgttcgtcggcgacggcggcggcggcgagccgaggtacgccaccgcgtgctccggcgatggtgttgagttctgcgacatgagcttcttcccgctggcggagacggcggcgagggtcgtcgacgcgtgcgaggggttgctgctgtacaggtcgctcgccgcggcgtcggcgatgtacgtcgcctgcccggcgacaggaggtgggcggcgc

SEQ ID NO: 434641 - DNA, 437 bp, Oryza sativa
cagaactgtgatttcatttcatgttatcatcagaatacccgccctgcttacatttgacaagggtgacagtagagatatgaagagactcaagtgaagttcatataacagttttcaggcatacgctactaccattacattcggaggctgatcaaccaagacatttggacgtgccaggaatctctacccatgctacgtgtgtggccgaattacaagccctcagtaccttgcctggaaaaaacctgtatctttgctgtcataggaacgcatgccaaacatggccacccatttccaaccaaaactgtgcacatcagcaagtacagtccacttgcaagcctgcttatagttagcctattttcttatagaccatcaacgtgtggtttttttcagcatgcttcgacgactcggcaggggatttctgcagcacagagtgctcacgt

SEQ ID NO: 434642 - DNA, 429 bp, Oryza sativa
cagtgaaaaaacgctttgccaaatggaaaagttctagaagattgatgctcagttgtggtactagcggacatctgtgagatgtacaagcttgatctcctcctggaaaaaaaaaatcatctttacttcttcactaccgacatttttcaggttggcagccttgtattgtaccgtagtatgcaaatggaacagtaagtaatcattcagaaaactgtacaacattgcattcagggcttcaggccaccgttttgtaataaaggttggccaccggatggatgccagtatggctgcacatgagatagatccaaagcatgttgacgatctgcagtgcacacgagtcagagtcatgctcttgtcttgcacactgttttcttcagaatgttcagttgattccatccaatggatttgttcgtttctgcagaccaacctgcc

SEQ ID NO: 434643 - DNA, 386 bp, Oryza sativa
tctcgtgacggagcaggaggacgtgcagaaggtttggtttgtgcggatgctggacgaacggcagcgggatctcttagcaaaggtgtcagcgtactgcgcggcccgaggttgacgagcatatgcgtgcgcgcatctaatctatcaattaattgccgatgatgtcgatcagaaggatggatgcatgcatatgccggacatagtacattcgatgatagcaactgacataaatataatgtatgcttgcgatcaacgctggttgctggatcgaccgcattgtgtatgggtggcgtgcggcttatgcacgtttgcaacgcaccgccaagagctgccttctacactgggtgaactacctgcatccaaggcttaaacgagggaagatgatcccc

SEQ ID NO: 434644 - DNA, 282 bp, Oryza sativa
tgcaacatgaacatcaccacacaaaccaggaagatgaccaggtggttcatctgcactctctctagtgtgagtctctatagagggtaacgcgctttaccgtctaaagcatggatgccgttgccgaggccgctccaaagacgatgagagctgagcagtacgataagtacgagggaggaccagaaggccttaagcatgaggaagtgcccatcccagcgcagaaagaaggggagttgctgatcaagatggacgcggcgagcgtgaaccccatctactggaagaatc

SEQ ID NO: 434645 - DNA, 176 bp, Oryza sativa
tcgtccaagcgtacatgctgacccggcccgtgatgacgtgcttgaacttacctgtgaacggactactggtgatgcagcagactctaaggatgacccaatagaagctgcggcgacagtcattgaatacattacacgtagccattgtatacatttggctgtcgcataaaaatgaaccg

SEQ ID NO: 434646 - DNA, 347 bp, Oryza sativa
tttcttcctacagaacatgctgcccccacacaagatgatggcaatggtctgcaatgtgaaggtactactgttgatgcgtctggttctaaggaagatattatggaagttgaggagaagctgattgatgatatttccggaagcccttctagtcatttgcctgttgctttaaaatcaactgagtcaaatcagcctacgcaacatgctgtccccgcagaagatgatagccatggtctgcaaagcgaaagtaccagtgttgatgtggttgattccaagaaagatgaaatggaagttggagaaaagcagattgatatctctagaggctcatctaactttctggctggcgcttt

SEQ ID NO: 434647 - DNA, 472 bp, Oryza sativa
actattatagaggagctaggacgtaggctggccgccgacggcagggaggctcttgttcggccgccctcctttttttttggggtttttttttttttttttttttttttttggggaagcaactctttttttttttttcatgggaaaaaaaccccacgtactcaattaacccagggaagatgggccctcccaagcacacatcttgaaatataccctccggggggcttgaaaaacgtttgtacattcataaccggggggaaaactagcttgccggcatccagtttttaagaaagatttatgggtgggccaggcgggccacaggctttggacttgccggctggtacaccatgccgtattcttaaccgttttttttccactgtaggagccggttgatgggccctaataaacaagttttgactctcccttaaccacttcggggtttggaaagggaagagaatgtttcagtattatttct

SEQ ID NO: 434648 - DNA, 189 bp, Oryza sativa
  unsure (1)..(189): unsure at all n locations
ctataggtaaagctggctcccncgccggcacgggcccggacggaccgggcgccggacccacgcgttgttgggcatggcatctggcggtggaagccgggcgcttcgctcgctcgctcgccggcgacccgaatccggccaggagggggggcggttggccggagctagggtggtcgggcggttggacgcacc

SEQ ID NO: 434649 - DNA, 388 bp, Oryza sativa
gttgtgtgctgtggtggagaggagaaagggaggaagaagaggagagcaagaaccaaaaaccaagagctgctgccaaccctgcacagcctgggcttgtgatcattgattgcccaactattactaccttcctgtttttttcttctcatatagaagaatcccatctatctatcccttatacatatctcttcttctctttggttcttggaaatctcccatctcttctagatttcctttgtggcttcaagggcctccacaccatatcttgattagtagttggttgctcttcttcttgttcttggtttcttggtctttccccccaatctttgcaagtcttgtagagagtatttgagttgttccttccgctttgtggggagccatggatgatagg

SEQ ID NO: 434650 - DNA, 411 bp, Oryza sativa
gccggggcggcgacgacgacggtctcctcgatggcctccaccgtcttgctggtgccttcatcctcggtgaccacgacggtcttctcctccgtttccggctcggccggcttggcctcctccgccgacgcctccgccttgggctcctcctccttggcggtctcctcggtcttgggctcctcggcacttgggctcctccggggcgggggcctcagcctcagcctcgggctcggccttgggctcctcggcggcgggggcctcggcggccttgggttcctcctccttgcccggctcctccgccttggccggtgagggcagccgccgctgtggaaggtcaaactcatcagcgggaagcgcggcggcgactagctccatgagctggtcgagcgcgactcgctccggctcagggagctc

SEQ ID NO: 434651 - DNA, 63 bp, Oryza sativa
ttgacgcgtgggccgcagccgcagccgcagccgcgcgtcgtctcctccgcccgcgagctcctc

SEQ ID NO: 434652 - DNA, 424 bp, Oryza sativa
ttttgttgtttttttatgtttttgggcttattttttattcttttccgttatacacagaggccggggacatttgccaaattctttgccagggccacgggtaccagggcctttgcttggggggtcaatggggtcaggaaactagaattactgttcttcgcgcacaaataatggggagattaggacaacatcaactttgagccttgtgccctgccctagccgaccgtcatataaagcacacaccttcataagccgtcgtgtatacacagactgccgggccacgaccacatgggccgtgtgcaacctggtgaccatgggggaagtaacggccaccagtttgacaagtgcgcgatcggagacaactgccaactgttgaggcttgcgatccacttggggggcttagatgaagcaggactgggcgatcctg

SEQ ID NO: 434653 - DNA, 373 bp, Oryza sativa
ggaacaaaaaaggggcgggcccttttttttcccagctgaacaaaggcgccgccgaaattatccgggatcgggacaaacaaacggggatcgggaaaaaacattattttttcgtttccgctcaacaactcaggggagcgtgggaaaagggaagactaaaaccaacgggccatcactaactccccctttggaatctttaagcctttgacataaactaatcgaaaaaaaagctgcgaccgggggggatccaactttgggtttctcccttctcgaggggttttcaggcggggaagcactggccaacctttccttgggctttggtgggagaattttatttttgcctcgggcaccccacaagagacgggccggattagga

SEQ ID NO: 434654 - DNA, 377 bp, Oryza sativa
gccttatgactcatattacatccgataccgtaatacacaaatgacgtggcggctgccaaaacactttgccagggccaccgatgtgagggcctttgcttgagacatcaatgatatcaggatactagaagtactgtactatgctaataaataatgctcacgtttgaaaaacatcaacttggcgcaatatggcctgcgctgaacaaggcatgcaaagcacacaccttgcgcgcactcctccatccacagactgccgggccacgccccacatgggccaggtgcgacatggtgaccatggggtagaaccaggcaaccagcttcacaagtgcgccaccacatacaagccccaactgttgaggcttgtgatccacttggggcct

SEQ ID NO: 434655 - DNA, 243 bp, Oryza sativa
cattaaaaattggaggtcccatacagagagcccataaaaacacaccccatttaagtttaccgcggagaatttcctgtaacatttccaacaagacaagaaatactgccaactcaaataaaaaggaactactcgtgcctatcatattaacatagacagatggtgctaatgcaccccaaatatacaaggaaataggacagtgaattacttgaaaaggaatttggctaaataaatccacccaaagcc

SEQ ID NO: 434656 - DNA, 304 bp, Oryza sativa
gggttaaataacacaagactagctttatttatttatctccttgaaaggccaaatcataaacacctagccattacaggaattaaaatagtactgcacaaccctgggcggttaaggaaaaaaaagaaaacagcacaagagaagagatatttaaccaatgtgcctattcaatacagacaactgcccagagtcacctttgaacaggttaaccctcgatggtggattcaaccttgagaatggcgatcacatggacctcgtccatggctgactgagccatgattcccttggggcacgttatggacagaag

SEQ ID NO: 434657 - DNA, 420 bp, Oryza sativa
tttgggggtttttttaattagagagggctatccttcattttttattatttttttttagtagaacattttttttttttttttaggggaagaaaaaaagcacggcaacaattcaacagggggaagaacaaaaaaaaaacagaagagaagaccacgacaaaccacaagagaggagagcaaagcatggcaaagcaagggagctccacaatgccaaaacaactaaggagggcactgcctacacatgggtcccaaccacccaaaaacacaaagacgcaatattattcgcagtcctgctctgctaccttaggctcaaaggcccagagcaggccaacaaaaagcagaatggccggcctctgggaggggagcccggcggtgcagaggaaggcgaaccgcaaggcctccataaaaagcctctccagcccg

SEQ ID NO: 434658 - DNA, 443 bp, Oryza sativa
atgaacttctccaaagtccttgttgtacttgtattaattgctgccttgtgcttctctgttgctgatgccagaaaagccaagagaagagtcggtggatgccgtatcttcagaaccagaaagggtcgcgttgttaagcaatgccgtctctcccgtacccgtgtctctcgccgtgtttgcactgtcatcagacgtgttggtcgccgtgccaccgtttgctgccgtggtgccaagcgtgtcgttcgtcgtgtcgtcagaagacgtagagtcatcagacgtagacgtgtgatcagaaaaagacgtgttattcgtcgcagaagaaacaacagacgtagacgtgttatccgccgtaaacgtgtcgtcagaagacgcagaaacatcagacgtagacgtgtcattagacgtagacgtgttatccgccgtagacgtgtcatcagacgtagacg

SEQ ID NO: 434659 - DNA, 428 bp, Oryza sativa
gtcagcgactgactagcacatatttttttagataatgtccatgctgatcaagtatatatactatacatgcataattacatatatatatataaactcctaatttttcgtatgcataatttcaatccgccgcctacagagaccagcaatttctcagagcaacatcacaacgcatgattcccaaatttacacaaatagaaacgaacttcacatgagatcgacggacaggagcagcacggcgagggcagcggcggcgaggcgagcgccggaggcgccgccgtcgcggtggccggcgccgccgtacgggctgaaggcgctgctgggcccgaacgacgagccgctcccgttgaagctccccggcgggccgaaccccgacggcggcgtgccgaacccgcccagcggcggggtgccgaagccgcccgccggcgggg

SEQ ID NO: 434660 - DNA, 491 bp, Oryza sativa
atagtgaaactacctttggattcaggaggggagttatcaatttacgataaaataaacaacgaacacagagaaacaaaccgtgttaggttcgcgttctctctctcggcacacacaaacgaaacaacaaacacaagcgaaaagaactcaaaaacgatgtctaccagttgttcagtatgatgataactcagcttcattctcggtaccagtgccttgtgggtccgtcgggacagtcagtagatcgtcttgggacgacccagcatcagccaacatgagccccagggcgtcgggcttcacaaacaggacggagccattgtcaagcgcgaacatgatggagccaccagactgcctaacgatgctaacgcacgcggacttggctttgagcgtcatcgaactgatcccggataccatatcccacacccggattgtgttgtcgacagacgctgacaccagcgagcgcgcgtcgagtacgatgaccgccgtgatctctttct

SEQ ID NO: 434661 - DNA, 337 bp, Oryza sativa
tttggggttttttttatttcttggggtggattttttttgttttttttttttttttctcctaaatacagtttagcgacaattagttaaaaaggccgcctgaattccccgcgggcatgcccagcacgcagagggggggacaccaagaacaccaggccaaccaaacggactgaccagcgaacaagagaaatagaggggccccggtgtgccaagcatcacgaagggggaacaacccgattgtagcagacaacatgaaaggaccaggatgggggaatgccaacgagatgggcgatgaagaccgcggcttggggggcgggaaagggcaacgctgtgaaacccc

SEQ ID NO: 434662 - DNA, 429 bp, Oryza sativa
cataagattaagatatatgataaatcattcattcattgcaattgcatctgcaccttcttcgcactcaacccctttacattcacagacatgactgtgaagactatggtcagaatgaaggtgatactgcagtagatgaacagcatcacgtagggactcgtcattgagttagtcacgaaagaaaaggctatgatggaggaaccagccagtatccagtttacaactgaggccaccaccacacctttcgtattcatcatgaagcttatgtacggccacacacttgaacccaaagacatgccgaacgtaaacatgaagaacataatggcgatacaggtcaccaatagtatcttatcctttgcatcagtgttcgctggatcttgctgctaatagagatacaggaatatgccgatcattgcatcaaggaaggccagc

SEQ ID NO: 434663 - DNA, 482 bp, Oryza sativa
gtcagctgggaggctcttgttcggccgccctcctttttttttgggttttttaaagcaaccgagactaggtttcaattggctttcaaacaaagaatatgggcattcacactagcaccacttacttgacactatgtcataatactaatggcgacaacggggggaaaatgacgaatgtacgctcgttatggagcctgatcactagggcaacaggaccgcagagctcatccctttcacaaacacaacctccacagcaattttgcaatttttgcttcccacaagcccatttaatcatcatcataccctcccgcttccctcgccggaatcggcaaccgcactcatgcctttggctttctccatgcccagcctcttctcgactttcattgccttcagatgcccagcagccttcagcgccctgatgttgctcacattaccaaagatcagaacaatgatgccgaggaagctgcctaggaacgcagcagcaa

SEQ ID NO: 434664 - DNA, 430 bp, Oryza sativa
gacagcaacttgaacttaatttattcactaatcagaaacaacaacagtaggaggagcagtagtactactggaaaggaaacatggtgccagaaaaagcagagatcacacactacgtggatcagagagcacccaattgctatcttggataaattgcagccaccagttcaccggtgaggaggagtaaagagatctgtgtgcacacgtcggcctcgacaatctggaggcatgcataagcaaaacagcagctttggtttgatgacagatcttttctgtcacatcgttttaattttggttttagacctttgctgcatcatcatcaggcacttgagcctcgctgtcatgcagctccagctccaggccggttttgcttgcaccaatcttgttcatctcgtccttctcctctatgtttttcccccacagaacattgtac

SEQ ID NO: 434665 - DNA, 438 bp, Oryza sativa
ttcttcagcatccttcaactattctttgtagccattggatacatccctgaatcaccgcactcgctcatcacaaaaaataggaaggaagctgcaagggaagtcttgtgcttgttctatgagtaatccttcgtcgatcagatggtggaggacagagagagtgccataatcaatgctaaatcagatatggatgagaataaggtagtatggactgataaaggatatatgattggcatcattctttcagtactgcaagtactgacaggaattgcatcttttgtcacccaggccggccacgttatagcctttaccttcaaatcaacagcgattgggctctacactcccattctcatcactatctctcaactggttggtactttcttatcagttccaatgcttaagtacttctaatggaggaagatgaccatcattggtggtttt

SEQ ID NO: 434666 - DNA, 432 bp, Oryza sativa
ttgtcttttcaggcacataatgtttctctttgttgcaattgattaacatgtctcatatattaagtatatataaatcgaatctcagaaagcctatggataagatagctgagatttcttataaaatggtaacttcctttcctgttgcctcttcctgttaatgtacatactgtgaatgggaagcctatgttgccatgctgataccaactacaggtttggagcctcaatgtaaaacatgtctatagtttctttggtttagatagtagactgatttcgtgttgtacagaaacaataaacacggaataggcccatattatgtctgcaatcatcttaatctgctagatgatattatcagaaacgtagcattctggctggttgtcacttcttattccgggaactagaagatgcagtccagttatgaattcatcattttca

SEQ ID NO: 434667 - DNA, 315 bp, Oryza sativa
caaaaacaaaaaaaaggggggggaaaaaacccaaaacccacaccccaaaaaaaaaaaaggggggccccccccaaagaaaaaacccgggaaaaccccacccgaggggggcccccccccccccccatttcaggggggggggggggaaaaaaaacaaccctgttaaaaagggttggccccgggaaccccaccaaaaagagggttctgccaaaaatacactggccgccacaccatgggaggcacaaacaccgaaaaaaaaaaacggatcgctacttacgcttgccggccacaaaagaacacattggctccggagcaagc

SEQ ID NO: 434668 - DNA, 423 bp, Oryza sativa
tgtgtttttttttttttttttttttttttttttttttttttttttttttttttttttttttttttggacgggggggctttgtttttattaccgggttttaaaaggggacagaaatcctggcaaacctacaaaggtaagttgggacctacaggggggggaggcctggttttcctcaaaaagaaggggtaaaatttaacgggcaaactttaataacagcagggccaaccctagttaaacgggtccactttaacttttttttttttcccctcggaagaaaaaagggggaaagaaacggaaaaaaactggacctaaaaaagccggggagctaggagaccaaaaagggcaccggggggggagtaattttgttttaatcccacaaaagggtgttttttttctttgaatgcgtttttccgccccattacc

SEQ ID NO: 434669 - DNA, 437 bp, Oryza sativa
ttttgttgttttttttttttttttttttttttttctttttttttttttttttttttttgttgaaaaaaaaaaaggattcgctgttttcaaatcccccattcatttttgggactcgcatacgattcacaggaccttggcttacattactactacggtgggtcgtcttacccaaaaggggggaacaatcccaaatttcttttcaataaacccaaggccccaagggaacgactgcatccaaaggtttggggaaacacctttttccctcacaagcttgatagcagttccccctcattcattgggctttcaagcccccaaaatgccctgttcaatgcaaaaggtcagatttttggataagagcaaccatgcgggccacactaaaattctcaaggtggggaaagaggacaactggggctgcatctaacagacaaacttgctgt

SEQ ID NO: 434670 - DNA, 440 bp, Oryza sativa
ttttgtttttaaagaagcgacctttggatgctagttcactccaaatcgcccacaactaagaggcgatataagcacgctgatatagtctaacagaaatttactgcaaccagatttggggtggaagcataacagaactgggcaggtattaacaggtctccaacgagaagcagtagcagtagcttcagtgaaacatcatttcagctgattacattgatggattgtctctggacaccttgacagctcttgtgtcagaagacaccatctcggtcgcgctcagcttcaatcttgttaaccacattcattacatgcagtaccttgccgtacactgactgcttgcgatctcttaaccttggtaacaaccttggaggtacagaaacccttcaatttggattgccaatcagcagtggcataggtctaaatattggcatcgtaggagagtt

SEQ ID NO: 434671 - DNA, 437 bp, Oryza sativa
  unsure (1)..(437): unsure at all n locations
cggttatgcgctggacggcgacttgccggacctctcgccgctactgtcactgtcctacctcaacctgtccgggaacaggctccggggctccgtcatcggagcgttccatgagcagatgaaggtgatagacctcagcaacaacagcttctcggggctaaactttagcagtggatatgcaggctcatctttggcatacctcgatttatcaggcaatgagcttaccggggaattcagtgttggcaacaggtttcagaacctgaagcatttgaatcttgcattcaaccaattgtccgtggcaaatttgctggtggtcatgggntgagatctctggattggagtttgtcaatttgtcgagcaccgggttgcatgggcaaattccagggagttggcttccaattgtctagatgaaggtgctcgatttgtcgcggaacatatca

SEQ ID NO: 434672 - DNA, 461 bp, Oryza sativa
tttttcggccgcgcctcctcagcgcgtggtctaccctcggcgacggcgccctgatgctgccccccggcctgccctcccagctatcagcgctaatgagtctgagtcaagctcaacaagccacctcgcaccgctcgtccctctcgggctccggctcagtccacaccgcggagactgcgtgtcagaccgaaggccctgctgtcatcctgccctctctcgacacagcgatttccatgggcagcgggaaccacatcccagaactctctccgctgcagataggcgttctctccacgatcagcgatgtctcctggccacgggtcccatgatgggtcgagcaccagcgcctcgccgaaccacgagcacccctaccggttcccgaccgcgaacggcgagtggaaggtgatgagctcggggggagtcaacgctgttggagttatcagaccgtccaaacgcgcgctcctgct

SEQ ID NO: 434673 - DNA, 279 bp, Oryza sativa
cccgccgccgccgcgtttcttccatggccacgcaacggcctctcgccgtcctcctcctcctcctgctcgccgcctgcgcgctgccgctcgctcgatcccgcacggcgccaagaacggacgtgggtggaggaggtggcgcggcggcggacgacacgatacacgagctcctgcggacgcacgggctgacaggggggctgctgccgcgaggggtggagacgtacagcctccacaaggccaacgggctgctgaaggcgcggatgacggcaccgagctacacca

SEQ ID NO: 434674 - DNA, 429 bp, Oryza sativa
aaaggaagcattaatagggtttattaaatctgagatggcaatatgatgtgaatgaaacaatttttctacaatctcttaaatgctcttcctactgcgcgagcagctcttctgatccaagaacgtctcttgcggagtcttctgatgtcaccagcaacatggcgagcagcaccagccaaacgacgaccaccaattctgaagtctctcatgcattctctcttgaaacctccacggaacttgcgacagaatctaccagcacggacgcgcaatctacgggtccattttctggccttaccagctggcttcttgtggaatttcttgacaaagagagatctcttaaccttggtaacaaccttggaggtacagaaacccttcaatttggattgccaatcagcagtggcataggtataaatattggcatagtaggagagt

SEQ ID NO: 434675 - DNA, 179 bp, Oryza sativa
gttctagatcgcgagctgtcgcccttttttttttttttttttttacaggcaacatcagtcttcattttatcagcctgaaaaaaagaaacaatctgctgctggtatcgtcacaaaccaacgaaggaagccaattactaccagggggaataccgcggtgacaaccgcactactaaggacag

SEQ ID NO: 434676 - DNA, 342 bp, Oryza sativa
tgcccaatggcagtccagccgccactcttgctcccggctgtcgcgaccgcgagacgcctccacggtggcggggccggcgtgcggcggacggcgacgacggtgacggtgacgcgtgcggcggacggcgacggcgggggctcggcggcgcgaggcgacgacgtgcggcggacggtgacgagcggaaccggcggcgcggaccttggtgcggacgggtcacggtgacggctggaactctgcggctcgaggcgacggcgtgcggtgatcggatacaccggcctaagggcggtcggatccgtggtcggaagccctggtgccgcgggatccgaggtagtgaggctaccg

SEQ ID NO: 434677 - DNA, 290 bp, Oryza sativa
gccgcccccctttttttttgttgtttttttaatatttttggttacaatcctttctttttttttttttttttttcttttttcatctttttgttctcctcatacgtttttcgggcatcccctcgggctatttacccaccaacagagccccccacgtcaccagaggaaagaacaaccccgatctctggtgtccgaaaaaaaaactttcccctctggggacccggttacccccaaccccatgtaacaggtgaagaaaccccacttaaaacccaaccccccccttctcttaccaa

SEQ ID NO: 434678 - DNA, 436 bp, Oryza sativa
ttttgaagaaatggctgaaggtctctaaagctggaagcaggaatttatcttgagcaaaccttggaagattgaatggacaaggtgatcgatccgattattgagaatataacctaaccgcatacactaataacagtgggcattctatgaagaccaaaggaagctgtccaaaatctcacaacaattctttatttcattcgtgccaaaatgaatagaaatcctgaactaaatagagacacagcatgagcagacttcaaattgtaacacagctcactcgccgattaggatagggttgatcaatggcttcagctgcgcaggacattcaaccgccaagatgatacaacaaggcacctcatgatgagtataccgccagcaaatgtgatgatgcgagcatatgcaccaccaatcatctacagcaaagcacagcagcatgtgatca

SEQ ID NO: 434679 - DNA, 408 bp, Oryza sativa
tgttgttttttttttttttgttgttttttttttttttttttttttttttttttttttttttttttttttttttttttttttttttttttttttttttttttttttttttttttccaaaaaaaacaaaaaaccggggggttttttaaaaggggcttttctaaaaatcaaaaaaaggaaaaaatttttttttcccccccccaattttaacccaaaaggggggacgggcccccctttatcaaaccaaaaaaacccggggggggaaaaaaaaaaaaaaaaggggaaaaaaaaagaaaccccaaaaaattggccccttttcccccaaaaaaaaaaaaaaaagagggggggggggggggccccccccttgaaaaagaaaaaaccaaacccccctaattaaaggttttttcacac

SEQ ID NO: 434680 - DNA, 254 bp, Oryza sativa
  unsure (1)..(254): unsure at all n locations
ttcttgcgtacccccacgcgnccccacacgcgggggggacgttttaagccctgagacagtaccggcccaccttaccagatgacaatccacactaacccccctcagcaaagaacggaactcaaaactcggaacctccacacgctgccgattatcaacctagaaaagacccttgccgatgaacaaacttgagcaagacgggtatggaatagatccacatatacatcctgcactcctcgaaatgatgcctactgaac

SEQ ID NO: 434681 - DNA, 342 bp, Oryza sativa
tcgtctctctctctctctcctctctcctctctcctctctcctgtcgccttcccacgcgcgccgctcgatccgtgtagctgtcagcgatggctgaggaggcgaagcaagagacccccgccgccgccgaggtggtggtggtggagaaggccgacgaggtggtggcggtggagaaggccgtggaggtggaggcggaggagaagaagttggcggagcaggaggaggaggaggagaagaaggcggaggaggcggaggaggccgctgggggcgatgaggcggtggcgatcgaggggacggggtcgtgcaaagaggagatgaacctcgtctgcgagctccccgacccgg

SEQ ID NO: 434682 - DNA, 322 bp, Oryza sativa
ttgtatcctcttatttgccgcccttccattttttgggtggttttttaatacgggggggtttcttttttactttttttacttttctcgttttacggtgcatgcattgtcatttgaccacaaaaaatgttgagccactgcacacggtgcagcgttagttgtagcattcacaacataccgagtttcttttttttgaggtaaaagttttcgaggattacattatagtttaagccttgcaggatttactagataccagttgcatttttttagtcgcattcaaatggggtgcagtcccgggttaaggggggcaaaatgagctttactt

SEQ ID NO: 434683 - DNA, 269 bp, Oryza sativa
tgttgtttaaaacataaggaaggaaagcacatttaatggcaccactacgggcgaataacagcgaacactttatggtttgatcacggaatattttgctccactgagcaccgggcacacgatagctagctcatctacaacataccgagtttctttttaggaggtaaaacggtacgagtctcacagggtactaaaacgtaagctgctattactagatacgaagtagcattttttaagccgcaaacaaaatggatacagagccggcttcaggg

SEQ ID NO: 434684 - DNA, 282 bp, Oryza sativa
ttttgttggttttttgagaatgatggcaacaaactcaattcgtactgctcatcattttactatgacatcacgaatccatggtgctaatcctaacacttatggaggtacattgcaatttgcaaagctcattctgtgcctcccattaatacaacgatcttgcccgtgacatggacttgcatgcacttagcccaagccttctgtgctctgctcaaagggtccttggaatctatggtggtcttgacctttcgttgcttggccatgtcgaccagccactccatctac

SEQ ID NO: 434685 - DNA, 439 bp, Oryza sativa
ttttgttgatcttttgactaacatgtgtatataaattcctcacatccatccctatatgcaagctagtaatcacagttattagcaactgtagcaaggatgtaacaattgacatgagctgagtcctcccacatgatgaggaggcatatatcgatcaaattgatgcaccacgtcatttgacttggcggctgatggatgatttatactttccccagagagggcgctcatatccacggccaaatggaagagaaatagctatccaaaaaatgtactggcgtactatagctggctagcaacgacaatgtggcttgtttgctcgccacccaggcagctcatcaaacccgaggagaaaccaagcaaccaaaacctgacgacatggggctcaattacgagcttccacgagcttaccatttgcttactactcatctcacagcttgccacc

SEQ ID NO: 434686 - DNA, 265 bp, Oryza sativa
gggtttctgcgcgctaaggggccgagcgggcgcggggattcctgagcacaagagcccgacagaccgaacaggaaacgcaactgcaggtcacaggaggccaatgcagaccaagcggcagacgagctaaggcaggagctggcgacaaccgcacgagcagaggaccccctgcgcagaggagacaaccccgacaagacgccgctgaaacctaagagaatcgagtatccagacgcagaggtaccgaaaggagcactgagctgaaaaatga

SEQ ID NO: 434687 - DNA, 483 bp, Oryza sativa
tgctgccctccttcatctggtagcctctttttcagcggccctcctttttttttgttgaatatccccacatatggggggacggcgggagtatgtaacaagctaattaaaagccctgggacggcccctcaaaactgggttgaccgtaattgatatacaccttccggtcagaccaggcatcattgtttctctagttgtgacaatgtacccctcatattggtcactttctaacctgcacaaatccattctaagataggtactccacaaacatcatatatctagtatgggcaagcaccttgttcgtttgagttggataactgaggatcgatcgtcttgacaaataccaacagttgagaccatgtgtacctaaaaatggcttaattatgcctcacctgtaaaaactggcaccaatggactataaggggccagtgccttctatcaaagagcaactgccacattccatgatcaattttcagagcgagagat

SEQ ID NO: 434688 - DNA, 303 bp, Oryza sativa
gccgccgccgcccgcgggcagtatatagggaggcgacgtagccccaagcggcggacagaggccgaggaccacaccgacgcaccggagccagcgccacacagacccaggggagcgccccatccacatggaccgcctcttgccagacgcaagacgcctaacgcgccgtcgtcgacgacgtgctcaccctcttcttcggcagatacaccgacaacattctcgcagaatacatcgtcgtaccactcctggatgagcaacaccaggaccaagcacgtgatgacttggaggcctatcttggtgatgata

SEQ ID NO: 434689 - DNA, 438 bp, Oryza sativa
tgttgtttttttggcaaaaacacgacgttattatcattacaccatcacccatgtgatcggcaactccaactctaccaagaaacactaagtcacaacacctatccgacccaaaccaaagcacaattcaaaagggcttatgttatcgttgccacacgccgccaccatccatttaactttttcttcaaaactgcgttttgatatatgagttctgaagcaatcaaatcgaaggtcaaatggaaaagaaatagcagaaaaaaaatatactagtatactatagctagctagcaccggcaatctggcatgcttgctcgccacccaggcagctcatcaaacccgaggagaaaccaagcaaccaaaacctgacgacatggtgctcagctcccagcttccacgagctcaccatctccttcctcctcatctcacagctcgccaccttcc

SEQ ID NO: 434690 - DNA, 406 bp, Oryza sativa
ttttgttttttcggcaataacacggccctattatcattacgccatcacccatgtgataggcctgtgaaagtctaccaagaaacggtagaacacaactgctatccacccgccgcccaagcacggttgcaaggggcctatggtagtgcgaggtgacaccgccatcctccatcgatgttattacctattcacacctggatcctgatatacgaggtcggaaacagtaaacaccactgtgtggtcgaaaggaggttgctcgaataaagaatactagaatactatggctaggtagcacctgacatctggcgtgcttgctccccaaccaagcggctcatcaaccccgaggggaaaccatgcatccaaaacctgacggcatggtgctcagctcctagcttgcacgaggttacca

SEQ ID NO: 434691 - DNA, 254 bp, Oryza sativa
ccaaattacagggggggcctaaaaaaagatggcctaaccccgcataactaacagaagggggcccaaaaccccatcagattacttttaaggggcctcaataatgggaacaacccccacaagagcgctgagtattacaggccctaaaaacacgggggggtgcatataaatgacacaccttaactgtaacatctttagcaccttctggccaagaggggcggtccttaagggccttttcctggtggctaatggggggg

SEQ ID NO: 434692 - DNA, 256 bp, Oryza sativa
atgcccccctgtccttagcttggatcctttttttcggccggccttttttttttttttggtttttttttttttttgggtttttattttttttaataggcgctgcaagcaccacaataattaaatttctcacgcagttcatagttgtcatagagctcccaacgcagttcttcaattcaaaaagactgcccaaacagaccaagggtatcattatagcagcaaagttttttaacaggcgctgcaagcacggacgcgtggg

SEQ ID NO: 434693 - DNA, 305 bp, Oryza sativa
tcctttcgtccgtgcttgcagcgcctgttaaaaaactttgctgctatgatgatacccttggtctgtttgggcagtctttttgaattgaagaactgccatgggagctctatgacaactatgaattgcgtgagaaatttaattattgtggtgcttgcagcgcctatttagaaattgactaaatacaaaaatcataaacatgataaaaaaagatgagagggcatgccggtttctagatggattccaaagtcttatcgtacgacgtagcatgacgacgtgataccttctcatatagtgaaacctaaatt

SEQ ID NO: 434694 - DNA, 390 bp, Oryza sativa
ataatggtgttttgaaaaatttgggggtttaaatttttttttttttttttttttttttttttttttttttattttcccttttttcccttcccacaaaagagggacaaaaccagcaaaccacccagacccaccggcccaagccgacaaaaaaaccggcaacaaagaaaaaggaaaaaaaaaaccctggcccaaaccaaaaaggaacggcccaaaaaaaaagaaccggcccccaaaacaaaaaaaaaccgcgccaacccaaaggggaccccataaaagaaaaaacaaggaccaagggggcaggaataaaaaacgggaaaagaaaaccgctggggggaaaaccacaaggggaaagaaaaggcggcaaaccaacccggggccaccaaggggggg

SEQ ID NO: 434695 - DNA, 405 bp, Oryza sativa
tgcgtgctcgtgggcggtcgcgggggcttggtgaaaagaaaacacgacgaacaccctaaaacaaggacgtagtgaagagggagacccgaaccggaacaatgtgtggaggggccatccttgactagctcattccggtgccgtcgtgcgccgcgagagcgaccaagcgggtgaccgacagccacctgtggccggccggttccaagaacgccgtccgcagcaagagcaagagcaagatgcagtatcaagagctttgccaacataactagcttgaggccggcttgcagcagttcgaggatgactccaactgcaacgacccggaggaagaagacgaaggacacttgcggtttggggtcaaatctcgtgtctgaggcgggcgcgcccacgccgaggcatcacgagagccac

SEQ ID NO: 434696 - DNA, 347 bp, Oryza sativa
gtgatgaaactacagccctgaagttgctcgtgtgagactgttcggtagcactgcaaacttggttattgaaggccgcatacccaaaacttaagtgccgcttataatttatttggtggtttgcccccccatttaaaatccttttggttctgccaaaagtaaaacctggcatggttcaagggttacagaaaccataaccccattggacaaacttttcaaaggccattttccagggttgaacccaacccccaagtgtggcttgataataggcgaggacaccggtcctgtggtccatgtgggactctcacagtaggggtgaaaccttatggggtattgtggcggtgtcacac

SEQ ID NO: 434697 - DNA, 392 bp, Oryza sativa
tttttgtttttgaaattttgggggtaaaagctcttttctttataattttgaaccatttcttttgttttggagtcctttattagtgaaaaacaggggagatcattaaaatcttatcctaaacaggaacaggtggtagctctgtaacgattgcagatttgtccagtcaccacgaaaaacatacaagatgttcctgtttttacaccaaaccgacttatacaaaacgcctatcttttttgcagggtcatcagggaaataaactgtgggccttacccctgacatgactattagcaaaaactacaaaaagggcaatcttcttagtacaacacgtttatttttaaagttgggttggagcagcccaaagcaggagacacagggtagatctggctagccat

SEQ ID NO: 434698 - DNA, 396 bp, Oryza sativa
aaagagcccaagccccagcccctctaggaccttcattcgatactacaccacaggccacaccgggacccacagcatccaacctctcaaccagtattaattcaacgaggtgaacccaacaagcacacggcccattgctagcaaaacttaacgcacgatggaccgaagagcgaagcccgtggccaacacacaagcaccgcccacaaatcccaaatgcaaacgaaataaccaacactaacccatcgtgcatggccagaggtgacacaattgccacgggatccactacactacctgcataagactgtatagcatccgtctgcaactcgctttgctcccatgccacgacagaaggggtccagcatggaagctactttccccaacccaatctgaatcaatgcc

SEQ ID NO: 434699 - DNA, 339 bp, Oryza sativa
ccccggccaataaccaattttttttaggggggaaccaataatgcaataacagaatttactccaaattacaaccagttgcccaaagggtaaaacagaattatataatgcgtccggaaatgaaaagttccagggggaagccacatagcatggaaaaacaccacaaaagaagagcccaagcttttgcctgtttgtcggtatggttgggagcttaataaaatgcctaacgatgttgggcgtagggacacccacacccccaattgaatttgcccaagggagatctaaagcggcccccttgggttttttcgcgatgcctgcaaagtacttcccctgggggaaggg

SEQ ID NO: 434700 - DNA, 406 bp, Oryza sativa
  unsure (1)..(406): unsure at all n locations
ttttttgtgtttttaatttttttggtttttttttttttttttttttttttttttttttttttttcttgttttttttttttttttttccattttttttattaaaaatcattttgtctttattaattcataagagaggggtcggaaaaccaaggaaaacacaaaagggggggggacagagggggccaaccccacaaaaaaacccctnnncagggggccccccacaaatgtaaaaaacaagaggggggggggggggtaaaagacccgaaaaaacccnnnncgggggggctgttcgcctccctccggggaccaccccccgggggcaacgccagcgccttctccagcgaaggaggggggtgaaaaacgacaaacacaaaggggggaggcaacccccgggcccggggccaac

SEQ ID NO: 434701 - DNA, 341 bp, Oryza sativa
caaaaaaggttcaaaaggggccaaaacggaaaaatttcccatctttaaaaagacccctacaagtatgaaggcgaggcccgtcttatcggaagacgccctcaagaagttgattccaaaaccaacccatggtttgattccatcccgattaattaccagttttgggaatggcaaacaaatgggaaaaaaagccatatgagccccttttggatacctggttcgcccagaagggacccgccaatagattgaaatcctcatcaggggcggggggggccgtcgctctcaccccggatttggaggggacccgggttggcacggtgggacacaagttggcgcggccggac

SEQ ID NO: 434702 - DNA, 415 bp, Oryza sativa
tttttgtgttttttttttttttgggtttttttttttttttttttttttttttttttttttttttttggggacccacgggggaatttcccgccgctttgtttttggggcctctaaaactcccaaccagtggcccaataaattggggctagtaaactggaagccccccttttggtttcccatcccgcccttttttggggacataaatttttggcccctggttggcaaaaataatgggtgggggggaggacaaaaccccaaatgtttttttttcaaagcccctaaggtactgggggaaaaaataaggggaccgcccgcccaccgaaaagaaaaaacgtcagggtggtgtttttttttggccaagctattgggggggggcactggaggaccccgccttttgaagcttcaaactgggggt

SEQ ID NO: 434703 - DNA, 303 bp, Oryza sativa
tttttgtttttttttttttttttgtttttttttttttttttttttttttttttttttttttttttttttttttttttttaattttttatttttttttttttttttttttttaatatattattttttttaaaattttattatcttttaaaaaacaaacaaacgggggcccctggacaacggggtcgtccccggcgaagggaaacccaaggggcagcctgggaacttggcggcccggggggagacaaaaaacccggggccgcccaaaaccagggggccgaacgggaaaaaaaaccccgggaggcc

SEQ ID NO: 434704 - DNA, 397 bp, Oryza sativa
tttttgtttttttttttttttttggtttttttttttttttttttttttttttttttaggaaaactggtcatgggtattttttttacccatgaaacacacaaacagccttcaatttgatgtaatcgatcgaactgggtttttttatccttaccacgcaacaaaacccaaaaattaaagctggtaattcctttaatttctcctagctaaaaaatccttcacaactttaacttggtcaaataaacaatggcgccatggggatcaaaaaaaccaggtgtcaatgggcggctccacctcctcctggtgccttcctcccggggggaaccttatcccgttgcccccccccggggggaagggaaaagaataccacccccacctgcggaacccaccgcccgggttg

SEQ ID NO: 434705 - DNA, 397 bp, Oryza sativa
gaaagatcaagatttatatcaagaagagatcgagaggatcgaagctgtaatctccgtagagatggcggcggcggcaatggatgactcgttcaggagggcgggggcgataccgttcaagtgggagatctgcccggggacgcccaagcacgccaggagcgcgagcgcctccgcggcgtcggcggcggtggtgtcaccggtgccgccggcgctggccaaggtggcgacgaggcagcagctggcgctgcctccctgcatgacgtcgccgcgcgcctcgccgtcgccgtactaccactccccgcgcctctcctccgccgccgcgtgcaggtcggcggcgtcggcctcgccgtgccggagcaggtacgccggcggcggcagcgcgtaccgtccccgccccacc

SEQ ID NO: 434706 - DNA, 294 bp, Oryza sativa
tgcaatctcctccgtcgcggtcgcagctgcgggagtgaagccgccccgcggagctagctaaaccctagccactgcccgggcggggagctggggtttgggttggtggcggtgggccggtggcggctcggtggcggagctccggtgtggggtggtgtggaatggagtggaagttcttcagcgatttgccaagatccagggtaggacacacctggttgcacgggtggtccacggtcaccatggcaggggcacctacagagtcttcggagagcatagccagggggctgggcactgttg

SEQ ID NO: 434707 - DNA, 375 bp, Oryza sativa
atttgtgtgaaggtgtgcgcgggtgggatccatcaatgaaaatcgatgaacatggggggacacagtgagaggcgctcttattagcattacgtggctaaccgtgacaagctttaacatgagtaatctgcatatgaaagccaatgggatcaaagtgggaaccatagggaaccatagcataacaaacacatgaaagctcgacaccgtctggcaccttcaggaaggtacagagaggattctcaacctgaactatgctggactcagctgggaccattgccgacctctgacgacaacggaaaacaatgggcacagttgcacgcacctccagggccctaatgctgactataccggatgatcctgcttgaactggctggaact

SEQ ID NO: 434708 - DNA, 423 bp, Oryza sativa
ttctttcctccctgctgggcttcgggcggcggcggcggcggcggtgggggtggatggcctccgcggcatcagcgccggcgttcgagaggctggccgggatccgagcactggcggagtccggccgcttcaaggcgtggttcctcgatcagtttggtgttcttcacgatgggaagaagccttaccctggtgccgttctcgcgttggagaagctcgctgagaaaggggcgaagatggtaatcattagcaattcgtcgaggaggtcgtctgtaaccatggacaagctagagagccttggttttgacccatcctgtttcctcagggccattactagcggggaactcacacatcagtaccttcagaagagagatgatccttggtttgcagctcttggaagaaagtgcgtgcatgtgacatggggcaatc

SEQ ID NO: 434709 - DNA, 367 bp, Oryza sativa
ggccccttcaatgctaatgatttccattaagcaattttccaaaatgacaatgcacctgacaaggtacattaaccacgatacattatttgaagaaaccaaaccaatattttaaaagccaaacttttttgttcaagtgataaatgggcaagggcataattcctttgcataactaacatgacttgggggctacatatttcatactacagcatcaaaaatttgcaaaaataaacttggcaaggcccaacactccaaaatatgctttattttaacacgggcaaaggtggataattccataacctcaaaaaccgaaggaagaaaccatccattttgtctgccattggacaagcatttaccttcagctggtggg

SEQ ID NO: 434710 - DNA, 527 bp, Oryza sativa
  unsure (1)..(527): unsure at all n locations
ctcctcttcttgttcttcttcttgttgttccactcttattgttcatcatcctcctcctcatagctgaccaaatctctgctgtgacagcaatctctgctgcttggttctgcctcccatgaggagcacaccatcagtgtgattacaaagcaaggaaccctcctaccgcgtcgctgagctgatgaaggagctctgacgactcggatgcatgcttctgccatcaatcaattgatccaacaaggcaactcgatcggaatttgagtttggtgaactctgtaattgattccctgcaagtatccatgcctttgcagcaatcttgctaattgagttgtcaaagctgcatacatggctacttactactcgagccctggcaatgaaagggactcgcaagctatgtacccagcggattcaggcaattcatcatatcctgtgccatcagcaataggaaacatgttatatcctggcaatgggtcttctgggccatacacngatattagtggctttattcagcatcagcagactttcatgga

SEQ ID NO: 434711 - DNA, 403 bp, Oryza sativa
aaacctgtagggtgttcttttatttatataggtttttgagtttaaagtggttttacttcatttgttattttttttctgaaacggaaaaaaaaaagggcgtgttattctataacttgtaaaaaacgtgcctataattaataaattgagagaaattcataaacaacaggcgccaacaacttgtaaaaattccacccaaaaaacgggcgggtgaaaaactacgaagccctctggatgaccataccctctttttgggggacggttttctaacccacctttagggacctaccctgaaaagaaaaaaaatttggtttaaacccaaaggggaggcaaccccaaaaggccccaatctccccggttttggataggatctgtatcacgcgggaaaaaactccgggctcctgca

SEQ ID NO: 434712 - DNA, 467 bp, Oryza sativa
ggatcattatctaaaaaaatataaattatttttttccttaatatgctgtacggcatattatcagagtatattcaaaagatgggggcctgatatcattcctagaacctcccaaaagcacattcagccatagtattttctcaccagtcaccacatcattacattacattacactacacactcgggtacattgtgtagcgtacaatgtttccttttcagttctctcgagtggtcagagaacaccatctaaacacccctaccctttttccctctttggtgaaaagaatttaaatcaaatgaatttccactagagtccgtgtcatacaccggagttagaatattagatagctgtacaccattgttaccagcaacacagccaaatgcttctgccaatgaaacctccatcctgaggagatgttgtgagcgtcaacagtgcatgccgcccctgtctgttcatccttaattttaat

SEQ ID NO: 434713 - DNA, 538 bp, Oryza sativa
ttttctcggacacggttgatctcacctgacgacgcctactatttccgcgtcgcgtcgtcggcccgtctccgtctccgtctccctccccccgcatccccgggcggaggaggccaccccaccgccacccgctccctttcccccccttcttccctccctccctcccttcccccaccttttccgctcccccaattaacctcaagctcacccgcggaggcggaggcggagccggaggaggaggagggaagggccggtggcataaggcagcagcgattctcgccgccgccgccgcccgccgccgcactcccacgatggaccgcccgcccgcgccagcgccagcggtggcgctgctcctcgtcgtcgtcgtcgtcgcggcggcggtaatgctggcggcggtggagggagcgggggcggaagcaacaggggtgttccacgtgcgccgcagcctccccgccggtggtgcggtggcggcggcggatgcgtaccgagcgcacgacgggagccgcaggggagggctcctcggttgccgcgacatccccct

SEQ ID NO: 434714 - DNA, 348 bp, Oryza sativa
accgggaaaaggtgaaaacaaacccccaaatagcggaagcccatgggccggagatgggttacaaccattcaaagggcacacatttttttacataaacgggtcaacaaaaaaacagggggcgccatgtccgtaccccggcagggagtcccatccgatccggccattccatgcacaaatggggcctgccccgttttttaaggtttttttacagagccccacttgcagattccggggtggtttttttttaccggggccctccaggacgggaagaacttcctttggggctccaggacgcttttttgggggaccaccccattgtcgcccgattggtgtttcgcgagggggctg

SEQ ID NO: 434715 - DNA, 286 bp, Oryza sativa
ctttaccgagttgtgcttggcatagagaagctcctcaattaactgcagattattgagaggtaagccgcctgctaaacgtattcagaatggtaatgctttttattatggacgtattatagctgttttatcactccaccaacagtttttagaacgcttttcagtaattactccttcttgagtgctcacgattccgcagattgaagtctcaacagacacacactgttgttctttgtgatccaatctaacatatcaagagtggaagacatagatatgtgccatattctat

SEQ ID NO: 434716 - DNA, 323 bp, Oryza sativa
gtgagggggaacccccgggccccaaaataggcccccattttttggggaaaaaatttacattattagggggcgccaatttttggggcccaccaataaaggaaatttttcttgaaacaaaaaggttcttgggaaaaaaagggcaaaaaaaaactggttacaaaaaaaaatatacagggggggaaaaaaaaaaccctttttattgggcacttttagggggctttgggggacctatttatctggaaaggggggggttttggtcaaaagagcccccgggggatgggtggaatttaatagggcacttaagggcgggggttgggggcttc

SEQ ID NO: 434717 - DNA, 390 bp, Oryza sativa
attttgcttccgccgattttctccgtctgttctcgctcccttccctccctcccatctccctgcggtctgcgagccatccacctcgctgcctctgccggcttcgtgtcgtgcgtccctctcctcctcctccgggtgcagccacggcgtggcaggcagctaccacagcagccgctattagctcaaatcctcgctggttgacctcagctgcgacgactcttcaggatgagcgagtagagtttctgtggcctcgtttctttcttgcggattgggggtgggttcgtttgtttctttacttccttcccgcgtgtgaggcagcgagccagtgacacgcgggaatcgatcgaaaggccggatctttttctagcttgggaggaggacgaggaggaggag

SEQ ID NO: 434718 - DNA, 395 bp, Oryza sativa
ggttggacacaaaatcaccaggtgatttatgacactcaaactgggtctaaacccaggaattgccaatggggggccggtgagatgataaaggccaggaattacttttgacgaccggcacaaaggtcatttgggtatcttattaagcggttgagctgcattacactgaaaaagttttttatttcaatgcatgcacttccagtttgaagttgcttatgataagatgcataggaatgtaacaatacactggaaagttttttgctgactttgcctgcccaataaaccatcaaacgaacattattacaacttcagggagctcatcggtggaagaacagaaattgtggtagatctaattaagcacagacaaaccccaagtcctgacctcggatctagtgggg

SEQ ID NO: 434719 - DNA, 356 bp, Oryza sativa
ttctttcgtgctatgggtggcggccatatcctatccgatttcaccggagacagggtgcccgcgggggtgaacccctgcgggctactgcgggtgaggtgcgttggacgcgccgtagacaggagaactacccggcaacaccagcgccacctcgacttagaaggtgtgttcgagatctccgaggacgacgacgacgacgatgagccggagctttacgatgatggggaagaacacctgcccgcacaatgcttttggtggcgcaaaaactagggaggacctatgttggaatgacaagaagacatctgctgtagctacaggccgcggaagcgcgatatggatgttgttcgcggtgcttgatt

SEQ ID NO: 434720 - DNA, 431 bp, Oryza sativa
ttttgggttgtttctcgaaggagatcgggatatttcatatttctggtgaattacatcatatccacgcttacatcagctattactatcacggaacccagcgccgcactaactgcggcagtaattctggttaattttttctgcgaaaggaagataaaattgagccatacagcaagattggtatgatgttttccattgttacatccacacaaagacaagaagtcgatatgagtcagaactataccctgtatacatatgcccccctaccaaaatcttatgtaccgaaactttgctctaaaaatgaagcaacatctaccctaagggggcattcacacccaacttaaggaaattcaatagcacgcaccattggcccaaagcatggtggaaaatcatgaaaaaattgcattatgaaccatgaaatcaagggcactttt

SEQ ID NO: 434721 - DNA, 367 bp, Oryza sativa
ccccaaaaataaatagatggatccacttgaccctatagttggctgtataaaatatggattcatgtccaccgggccagtggggctccaaaaatatggattcatgtccaccgggccagtggggctccagtaacactgataagcccgttaaatacaattgctggggggactatttgggttttgattagttataatcgggcacagtagacaattgcaatttatttccaaaaataatgactcaggggaactcaaatgtcccccttgcgtaagatttggagctggagtttccctggaaatagctttccaaagtccaaactgggcgtccactccatcaccttggcaaaatggcagtgtcaaaccccaccttttt

SEQ ID NO: 434722 - DNA, 516 bp, Oryza sativa
ctcctccggccgcggcggcggaggaggcggcggcggggaccccggcgactggaagccgaacgtcgtcgcggcgttcgccggcgcccaactcggccgcgccctccgccgtcgcctcgccggcctcctccgctcgccggaggcgcgacatcttggtgccttgccgagaataggtgacatttggtttgaaggatcagactcattcgccacacactcgattcttggagtgttggagaatgcgctctccgcaccatatgcttgcagctctgttttgttcaatggaaatggatcggacaggagttacatcggtagggggaagttgccatccagaaggccaagtggaatcaattcgaagaagaggctttggactaatattcttcttgctgttaatattctggcttatgtcgctcagataactacacaaggacgattacttatatggggggctaagatcaacagtatgattgatagaggagaactctggcgtctggctacatcatctctttttatgcaaatctt

SEQ ID NO: 434723 - DNA, 342 bp, Oryza sativa
agtagtagtaaaatgagcacctctgtttttattacattaagaacaaacaacagcatcgttcaaaataattaagaatctatggatcacaagatctaactctggcacctaagatttctgtggatttccacggttctaagtggtattttctacacatttcataccttgagcatcgataacaacaacgaaatgctgatatgtaaaaactcatgatgctttggcccctcggaggtaaacaaaccagggcgccagacatcatgatggtacatcatgtacaacaccaaccaaagttcctgcaagttatcggaaatactcctgaacctgaagtgcttttacaggaagcga

SEQ ID NO: 434724 - DNA, 431 bp, Oryza sativa
tggagtctcgcgtgcggaggcaggcaggtgccgcaagccggagacggacgacgctcttgacgctgccgttgagcaggcccagcgggagctctatcttggcgagggactccgagaactggtgcatgctcttgatggacatgatcatgatcttcttctgggggaccttgacctcctgctagaggttgacgcggatgaccggtggattatccaccgagcttttggacatggcgccaggggagttcgccctcgggctggcgctgctctggacggtgcggaaggactccaccttcgcgtcggtggggaacgaggcggccttgtccttctgctgcgacgacgagacggcattgcccgaggagacggactggggggcggccgggaccgacctggaggtcagcgactcactggaggacacgctgctgaccggggtgtca

SEQ ID NO: 434725 - DNA, 301 bp, Oryza sativa
ctggcccagtcctccatttcttacaacggtagaggtggcggcgctaggtgccttggaatctcagctggctatggcggcctctgctccgggggtgaacgataccgagtgcgcctgctgctgctgagctcatcggctactttgaccagcacgtgcattagcgcgcggaacatccagaacatctgcatctaccacaagacggacgtgtactcgcgggtgtcgttgccggggaaggatgctcacggtagcatgcacacaagtcattaactgctgacctcgcatcttgttgtgtcaccagtacttc

SEQ ID NO: 434726 - DNA, 375 bp, Oryza sativa
acagggaaaaggggaaaacaaacccccaaatagctgaaggccatgggacggaaaggggttacaaccatacaaggggcacacatttttttacataaacaggtcaacataaaaacagggggggccatggccggaccccgccggggaggcccatccggtccgggcatcccatggacaaaaggggcatgccccgtttttaaaggtttttttacagagccccacttgcagattccgggttggttttttttaaccggggccctccaggacgcgaagatttcccttttgggctccaggacgctttttttggggaccaccccattgtcgcccgattggtggtttgggagggggctggaaaactttaacacctgggcccaaagg

SEQ ID NO: 434727 - DNA, 377 bp, Oryza sativa
ttttgggtttttatttttttttttttttctttttttttttttgagacggtccaacaggacacccaagcgctgcataacttgcataattcgataacattgcacaggcggtgttagcaataggcaggaaactttttggttatacacaacaatcgagggcctgtgaaaggaatttagatcccggacctgacaaggtaacgattcaatgagaaaacgctatccgcggctagcgaaaatgatcccagtcggcgtttatttgagaggaagaaacccttggggggggtgcatagaagccgcccatgccattgtcgaaggtgtcccactgggttgccactgaaccagcattgttttgatcgctgccgggactggcattttttgcc

SEQ ID NO: 434728 - DNA, 433 bp, Oryza sativa
tcttctgatcggcccggttgggacctctggctgctagtgtcaggtccgtgctgccactatgcttgagcagccaagacgggacacggatgccgccgtcagctcatggtctccgacgctggcctgcttccacgacgtagcggtgcctgcaggctccatcttcgacgtacggaaagaggctcttacccaagatcctgaacgtacagcctgacaggcagaggatcttgtttcgtgttaaggagcatagtgtcaatgcagtcctggatacacgctgatgtcagggatgaaccaaaacttgttctacttgagaagcatgaccctgccagtggacaagaccgggccgtgccaatgattatggatgagctcatgatgaaggcttgtgaggctctgcgccgtgtaagaagtcaagttgacagactgtgtggcaaggtatgtg

SEQ ID NO: 434729 - DNA, 428 bp, Oryza sativa
tttttgggtttttttttttttttttttttttttttttttttttttttttttttttttttttttttttggaagctagaaaagaaaaaaatttccgttgggaaaaaaacccgaaaaaaattttattttaaaaaaatccccctttggggctcgaattaatcaaacaaataaggaggggggaaaaaaacggaaacaggggggggggggagaacaagtttaaacagcagggggggggaacccccggttttttaaaaattttaaatttagaacccgaggggggggggggccaacccaccgggaaaagaaaaaagggggaaggggggggaaaccggcccggggggtcttttccccggccctgtgggcccaaaggggggccccgacacccccttggacggggcccccgggggccccggtttgggggggcccggggc

SEQ ID NO: 434730 - DNA, 404 bp, Oryza sativa
tttgcgttcatctctcccactagcgcgaatctgaaggcacttctgcctcgtcttgaccggcgaagagaccaccacgaccaccgcatcaatggcccgcctcgccgacgccgacggcgccgtcgcgctcgtcgccatcctctccgccgtggcggtgacagcgcagagcccgagcgctgccccgaagatggccccgctgtcgtcgccgacgaagatggcgcccctgccggctcccccggcggccaaggcccacaccgtctcggcgccatcgccggtgacggcggtctcgccgacagccccggcgatgtccccggactcgtcgtcctccgacacggcggctgcggatccaggccccgcacgacaccggagccgagaagtcccgagcagcggcgtgtacgtgcccgcac

SEQ ID NO: 434731 - DNA, 326 bp, Oryza sativa
gggggggaaaaaacccccccaaaaacggggggggggggaaaaaaaaaaaaaaaggggggcccccccccccgggcccccgggaaaaaaaaccccctttcccccccaaaaaaaccggggggaaaaaagaccccccccgcccaaagggctttttcaccaaaaaaaaaaaaaccccggggggaaaaaaaggggcgcaaccccccccccaaaaaaaaggggggggaaaaaaaccaaagcgggccccccagggggttcccccccccggcagggggggggggggggcccccctttttttttatggggccacccccaaaaaaaagggggggggg

SEQ ID NO: 434732 - DNA, 408 bp, Oryza sativa
tcgttcgggcccaccaccgtcacctgctactcgacgcccctgcccaaatttgccggccggttcctgagacctcgccggaggtgagccggcaccctctcgacacccacgatgcgctgactgctactcctcgtcctcgcgctcctcgcggcggcggcggcggatgccgagcccgttctccgcacggagacgggcgtccccacggaagtgtcctccggcggcggcggcgggggtggagaatcttccgacgagctgtactgcaacggctggaggctgtcggtggagacggggaacgcggggccgtggaccgccatccccccgcggggcctggagtccgtgcgcgcctacatggaaggggagcgctacgcctccgactccgccgtaggcgacgcggactacctcgccttcgcc

SEQ ID NO: 434733 - DNA, 386 bp, Oryza sativa
gcaagaaaacatcgaagtctaaaaaatggcatttgtttttacaattggcaatggaataaaaatcaagcccctggcaaataaaatttttgccccaaatttttggggcccatcagttggaaattgggaaaattgaatccaataccccacctacctccccgggatttcccagatctgaacttttgaagccgggttaattttcaaaatcaacgggccgaaaaaacaggcaaacaaaatccccacccaaatcaacttgggggattagcagagggcccaccctccaaacgggggggggggggggcccaccaacagggtaagcccccaggggggagctgggagcctgggacgggcaacggggccccccttccatgggttcaagccccgggggg

SEQ ID NO: 434734 - DNA, 325 bp, Oryza sativa
atgtagagctagccccagccggcgagctctcccacctcctccatggcgatggcggtgctgctccgcaaggtgtggggctccgtgctggcccgcgcggcggcgggggcggtgccggcggaggcctttgccggcgtcgcctacccaagccgtccgcaagccggcggagagtacggctcgttgggcgcgctcgacgttatcctgatcgacgtgctcccgcaaatcctgtgcctgctccgccacgccgacgccgcgcggttcaccgacgggtgccaagcctggcgcctggtggccttcgacaatggactgtgggacttctcaattcttt

SEQ ID NO: 434735 - DNA, 343 bp, Oryza sativa
ttcgtgccaagctaccattctcctcctcggcggcggcggcggcggcggcagcggcgatgcagatggcggtgaccaccaccaccaccgactccttccaggcggtcgtgccggctcaccaccctcaccctcacgcccacccgcacccgcacgcgcacccgcacccgcaccaccccatggcgcaggcgcggggggtcgtcctgccttacccgtctacgccgtcgcccatggtggccgctccgccgcccccgccggcgtaggacgccaagcacttcgcggcggggctcgtccccacgccgcggtggccgaccggcgcacgccgacccctcccagccccgtgggatcc

SEQ ID NO: 434736 - DNA, 371 bp, Oryza sativa
ggtgtaaaaaacagcaggggggcgaaattgcattaccactacataggcagaaatgaccaaagtctgtattatgactatagccatcgcatcatctactgatgaaatcctgaccgcagaaggatacataaaaccaggtgagctgggattaagcatctcaacatgactgggacagactacccactgatcagaacacccgcaaaaatgaataacttttggacaaactataattgtgcaaactcaccccgtatggcctcagcttttggtctttctaacatccttcaaaattgccgtgggtaaattcattggccctgtgaaaagacccccccatggccttacgcagggggcagcctcatctgttgtgggccctggag

SEQ ID NO: 434737 - DNA, 323 bp, Oryza sativa
ttttgtgttttttttttttttttgggtttttgttttttagggaaacaaaaaaaaagaggaaccatctttttttttaaattctttaggcgaagtttcctgaacctttgcatgcatgaccggcacaaaaccaatatgggtacttgaggggaccaatgacgtaaaaggtctggaggatgcaaaccaatggttcgatctcaattcgtttaaaaaaaggattgcacacgggtggttgggggaacctggacggggaaggtgcccataaggattttgaacaagccccctgctagggctcgtcggaatccacagcgccggtgttacaaaag

SEQ ID NO: 434738 - DNA, 382 bp, Oryza sativa
ttttgtggttttttttttttttacggcacaagcatttgattcgattattactacagggcaatggcaacattgtttagcagcattttcctcagtatgattcaggactagcacatatagggaattccaaacaatattggcactttaactgagacaattcataaagcatcttgacttgaagaaactaacatgagggtggcttgcagaaataaaaaaccataacggtacgaaataccggcatcatcaacataagatgacgattaatggcagcaacctgagatcctgacactgaagcctcaggtatttcccattctttggtgaaacaaacccaaatattgggccaccccggaatatacacgatggagggaagacaagtattcacagg

SEQ ID NO: 434739 - DNA, 373 bp, Oryza sativa
gtattttccaggtacttttcggtgtcgtcaaacagggcaatggaagaaaccaagggcgcaagccgtgaactggagcataaacagaccacacaaacctggcacaaaaaaaaaaaagcaaaccaaaaccccccaagaaaacgcctgcacaaaacaccaacaccgaattggaccaccataaaactcccgagggaaaaaacaggaacacaggaaaaaggctatcgccgaaggcccgtagcacaaagggaaagggcaccaaccaaaccgacatccgcttacaggggacttgatgaatagcaaggtcctatagaaacacgccgaacccccaaaaaatggggggagcccccgggccgccaatgacccccgttccccggga

SEQ ID NO: 434740 - DNA, 186 bp, Oryza sativa
aaggagcatcaagaacttaattaactaataaactgataattccaagagctaacacagataaactagataaatacctatcttagttaacctcaatatagactaacagtgtctgttggatacttggacgccatcatattacaagctaaaaaacctatcctctgctgtctgctccatgcgtgaaactgg

SEQ ID NO: 434741 - DNA, 322 bp, Oryza sativa
tctcgcctgctacagtaaaattcccctttgtggaccctttttcctcctcgattccggcggccttgtcgccggtgacgggagggagaggggtcgtccccctcccctagtttagtatagtagccgggctagcctcgctaggtcgggcttttcccgtttctcgtttctatggcgatggaagttgaagacggtggcggcggcgcgattgaggccggtgaccgaggaggcgacaaggttggcgacggcggcggtgcggatccggctcgcggcggccgcggcggcgcggattccagtctgcggcgactgccggggcgcggaccagctc

SEQ ID NO: 434742 - DNA, 179 bp, Oryza sativa
gtggaaaaatatatatggattacaagtagaatgctgaacaaaaatatacatttcccttttatgatccttgctactggaacatatacatcttgtcccccgaatatgaactaacaaaggtacaggtcaaaaagcctccaagcaccatgatatcctggcttaattccgaggcaaaaatagac

SEQ ID NO: 434743 - DNA, 180 bp, Oryza sativa
ggggggatcatttctgtttccaaaaaagaaccctcttttattcctatatgcacccaagcattacaggatacgtattcacattacagtttacacttcgcattacaggttacactatttggtgggagcatgggaaaaattggaagggggttgctctctgggattgcattgaagatgattaaa

SEQ ID NO: 434744 - DNA, 321 bp, Oryza sativa
tgatgatcgacctctcctctccgcgtcggggcgtggtggtccattgatccaaggtgtctttcctctgccggggagtggtgcgaccgggttgtattggtgggagtgcctgtataatttttggttggatgttcagtcggagggatcggcgattggctgcacggggtccaggcacgcgttccggggtggcgaccggagcggcaagacggcgaacgcgcggagccattccggacccgacggcgtgcaccacaccgtctcgctgaagtcctgcacactgtgtatagctcaggcttgagcgggaccgggacgaggagatgatgaaaa

SEQ ID NO: 434745 - DNA, 195 bp, Oryza sativa
tttttggggtgttaaaacaggcaggggtttgggcgttatcgccctcatgtattctgaagaaattagcaatggcaatacaatgcaaatagtctggagcctttccctacgcgtcgacaagagaaaattctagcctggaaactaaaaggtatcaagagcctcttccgtttattatcttccttgtattgattccattct

SEQ ID NO: 434746 - DNA, 393 bp, Oryza sativa
actcactccacgcaggctccgcagccaagatcaaggcttcgaccgggaagaacacattctcgcctgaagaaacgagaggaagcagcaaatcgccggccgattcgctcgtaggaatccccaccatccaatccaccggcggcggggggccctcaccctaggggagggggtgggtagcgcggctggtggccggaaccctatcctatccgatcggcgtgggcgagaccacctcctctttttgccgccacgcgcgcggggcggcggccgtctggttttgcggggcggatgccggtgggcgcgcgcgcccactggtctggcaggcatcggcggcgccttgcttcgcgtgccctcgcgctcccggctgaggcggcggccgttcagctactaatgaggccg

SEQ ID NO: 434747 - DNA, 197 bp, Oryza sativa
ttttggggttaaaaattttttgccatgaattttgaggaattttttcccagaaaaaggcaagccaacccttgcaaaaggattaggtatccttccccatcctaaaccacattccaattaacaaactgaatcccttgtttttttgctcattcccccaaaaaggaaagaggaaagcttctattacaattctgggagtttac

SEQ ID NO: 434748 - DNA, 367 bp, Oryza sativa
ttaacaatactacccgcactctgcttctctgttgctttctctagatgagcattctggatacgacgtactacagcggtagggtcagctctgcgctgagcagagacgaggtagaggtcgaccccgacggcatcagcggaggagaggaagccaatcggcccgaaacggaaggcgacggctacaagtgtcttgcacagcaacaagtcctgcatgatggtcgaagagccgacagcaacatagaacagtgactctgctcatgctgtggcatctgcaaatgctgaccacggcacgattgctgctaccaagctgaccatacatcatactttgaaaggcgccacatggacagaatgatctgcccgtggaactggaa

SEQ ID NO: 434749 - DNA, 188 bp, Oryza sativa
gttagttacatccactggattatgctacattagttgcaattcttagatgctgtaatcaacagcataaataaagtgtgtacggtgcctcctctacattaatatcatatacacaacgatgaggtcataggcaaaatcaggatccctggcacaggccaagatggaaacaaacttaccatgcaaacgtcaga

SEQ ID NO: 434750 - DNA, 149 bp, Oryza sativa
actgagaagtcgctgttggccgaggccaggaggaggaggcggaagaaggagtttgcgagttggcgttatgaggcgttggattagatcacaggaatgccctcttgtgggagcgcacgacaggggcacgctgtgacacctgctgaacacca

SEQ ID NO: 434751 - DNA, 186 bp, Oryza sativa
ttttttcgtgtctttacaccctcttgggtttttattttttttttttttttttttgaaaacggaataccccccccaacccccctcaacgattagtgggggataaaaagtaaaaccacaaaaatgttacaagttacaaaggtttttaaatccggggtatcccaattatcattcttagatcgaagtttt

SEQ ID NO: 434752 - DNA, 150 bp, Oryza sativa
gtgggttcaacgttgttgatttatttataatgctataattatttcttgaaactttggttttgtttttttattttttttgttgattattttactactaacttattacacaaaaacatttctgcaagaaccaacattcgccccccccaataa

SEQ ID NO: 434753 - DNA, 194 bp, Oryza sativa
tttttggtttttttactagcaggggttttacattttttataaattacaatcaaaccaggctggagaaggagactgtactgtccacgaggggccgataccaaaaacagctagtaagcagggcggattcccaaatgaacaggcccacataataaacaagtgcgctctggtttgaagcgcacgtttgcacaatggaa

SEQ ID NO: 434754 - DNA, 186 bp, Oryza sativa
attaaaccttcagtggtacattgacattcatccatgaagattattagcaacagaatcagtttaaaatccacccaagctatgctctactttctgctacgaacagaggaacatcatcaccagtaactaacatactcacgtctgtgacaaacagcatacataacccttcttctcatagcagttttcctt

SEQ ID NO: 434755 - DNA, 188 bp, Oryza sativa
gggaagtaaaatgcgccggctactgaaccagtacaacaccattgcgacatggcactctgcatctgcacaagcagaagcagaagcagagccaagctgcaaggtgacacgacaatcttaggacactcagctcactgatcagctcagctgagatcattacagcaacacaaagaagaagaagaaaaaaggag

SEQ ID NO: 434756 - DNA, 183 bp, Oryza sativa
gcgtcactccccacctcaccttgcctttttagagagagaaagataagagaacgagctcgacgaggagagagagagagaggagtcacctcacctgcaccctgagctaaagagagagagagagagagagagaagaggaggagggttgtggaggaggaggccgggagggggagatggagaggacat

SEQ ID NO: 434757 - DNA, 364 bp, Oryza sativa
ccactctggtggctggtccaaagactccatgtccatttagttgaccatccttctagttagcgtcctcttgtgttcttggagttggagctggactgcccatgtgagccatgttgcagattgggctagctttgggagcaagagagtggtagatcttcttcttgccagatttattgtagatacaatacaatcccatttcttgttcagatttcttggtgaaaattcctagctagatccatactttctccaggtagtgtgtaaagaagaagaggccttgcgaatcttatcttgggaaaaagaggtatatgcatccacccatctgtgtgctgcacttgattggcggcaatggccatggagccgacggtga

SEQ ID NO: 434758 - DNA, 192 bp, Oryza sativa
gagtagtaattgagtatattgccatggctgtgttctttgatgaaggacatagaagcttttgagcattgaaatgttgtgtatccaactcaaacatacaaaaaccatacatatgtttgggttaacttatgttaatcgtcaatctcctcccagggaaaaattgaagatcttggtcgcatcgatttaggcacttat

SEQ ID NO: 434759 - DNA, 194 bp, Oryza sativa
tttttgggcaagcggatacaagccaaataatattattgttctctgaatgcacatgaccttcattgggaaaaaactgtaaagaccgcgcaaagaaagacatggtgctctggagcaaaagcaagaagatcattatttatctctggaaatttctcaaaggactaatattctgaatcttcatcctctacagatccaga

SEQ ID NO: 434760 - DNA, 195 bp, Oryza sativa
tttttggttttttttggagcagggggctcatctttattacaggcaagcacgaatatgaacaccgggagcaccatctcctactaccattccccccaccatctgtgatatacatatatgtacatctaccatatcaaacacagagtaactaaaagagtaataaagacctataaggtttcagcaaaacttagtagttat

SEQ ID NO: 434761 - DNA, 388 bp, Oryza sativa
ctcaccacctctctttgatactatggcaccaccgctctcttccgtcgatgcgggtcacggatacacagctctctacccctcctcctcggctccgatctgtacgatcgatctagggttgggtcttatgtcgggggatggaagttgctctaccgcgcgaacgatcgacgccgcggcctgagggttagaggggtatgcgccctcccggcgcacgcccgaacccccacgatgaccggccggagctcgccgatgaacgaggggctcgcgcaagcgtcccgacaagagagacgtcgacctcaaagcgaagcatggcaaaactcttaagagggtcggagggaatgagcaaagaccacaagtcagccagaacttatccgctctccgggccaagatt

SEQ ID NO: 434762 - DNA, 168 bp, Oryza sativa
ggaaaacaaaggaaaacaaatgacatagtcactttataatctgttcattatacacgacatttagagtttttctagttgagatgttgcgtaccattcaaaatggtctaaatagcattcagcttgaaacaacctttacttcaggaattggcagtttggcactgataaact

SEQ ID NO: 434763 - DNA, 381 bp, Oryza sativa
ctgacgcgcgggtcgcccacgcgtccgcccaggggtccggttctagacttgcatcacccgcatctgcgcgtccctctgcgggggcggcggcggcgacggccgccatggggctggagatggaggggatggcggcggcgaccggcgtgtctgtgcccgtgctccgactcctgctgtgcatcgcggccaccatgccgacgggcctcatgtggcgggcggagcccggcgccgcggggcggcacctttacgctgagctcaccggcgccgcgctttcctacctctggttcggggccacatccaacctcctattcggcgtgcccatggcgtgcgggtaccttgccatgcttctctgggcgcggattcgcggggcttgtaaccttcctc

SEQ ID NO: 434764 - DNA, 197 bp, Oryza sativa
tttttggtgtttttatttttttttgtgttttaattttttgttctgtttgctccttatttatttttttttttacgcattttattgttgagaacaatgggggccaacatttttgcaaaggggaaaagggcaaaaacagaccaagggtattttcataccaaacaaacccggacaccgggggcttccaagaaatcccaaaa

SEQ ID NO: 434765 - DNA, 274 bp, Oryza sativa
tactgatagcagccgcccaggagcgtggaaggttacacttattaccacgttaaaacccatccccaaccatgatgctgctgcgccaccaccaccaccgacacagtggagccggcaccaccagcatcagctgcaggggcggcggctgatggtctagaggagggcacacaccaccaccgacaccgacacgctcgccatgccaccaagcgaggcggcggcgtgaggcgacgcacatctgaacggacgaggaataggaagaagggacgaggaggcgagg

SEQ ID NO: 434766 - DNA, 178 bp, Oryza sativa
ttttgggtttttttaatttttttggtttttttttttttttttttttttttttttttttttttttttttttttttttttttttttttttggaaccaaacggggccctacccaaggggactaaaaacaggggaacctcaaatctcaggggtgggcaacaaattaccaccagcggcccccg

SEQ ID NO: 434767 - DNA, 187 bp, Oryza sativa
gcagctgtcaaggtgacaaccaatatgattattgtatacacacgagggtcatttgaaaaatcttccaaagacaccccttcagcaatagtaggtccggacatgaatctcagtgcttgacaattctagctgatgaggtctatgcttctgcccttgacgacatgcctgcatggctggaaaaacctgctgt

SEQ ID NO: 434768 - DNA, 249 bp, Oryza sativa
atctcgccggaggcgatgccggtgacggaacaccagggctcgtcgtcgtccccgtcgaccttgtccttcggccgctccctcctctctctgcgccgcgaccacgtggccatgccgacgggcgaggaggccgtcctggaggcgatccagcgccatttcgcggcgagcctcggcgagctcctgcctggggaggtggaggggggaggcggcggtggtggtggtggccggaaatgaatataaaaaggccttcca

SEQ ID NO: 434769 - DNA, 198 bp, Oryza sativa
tttttggtttgacagagtaagctgattaaatatagattcatttttaccacagtgcactcaacacacagtacaacttcttgtaccagttggcttatagtatatataaagctattacccagtaagacgaaaaccgtaaatgactacaaagcttcaggttgcagatatttgaagtatcccctagcagctagaatgaaatat

SEQ ID NO: 434770 - DNA, 430 bp, Oryza sativa
gaattcacaggtattccatgttgccatgtactgaaagttcttgaggtaagaaatattaaagaacttccaccacactacattttgaaaagatggagaaaggatgctcagagtgaatctccgagggagaactatggttttgaagctgtagatgaagatcccaggttcttgttgtctaaacgatacagcatgttgtatcgaacgttctacaaaattgcagcaaaagctgccgaaaatattgaagcttatacatacatggagagccaatgtgatcagtttatagagcaagttgaacttctattgcaagcaaagttacatgataaatcttcattgagcactatactgaaagttcaacagccaaatttgttttcgaatgaagccagcaacagtgaaactcgcagagtaagtagtaagaaaattaacaatgtagata

SEQ ID NO: 434771 - DNA, 183 bp, Oryza sativa
ctgcaatacaaatatacaattacagctccaggaagccaagcaatggtcaaaaatcaaggtacaacttattgtacgcaacaaatgaagttagaaactaagtttccgaaaccctcttcaagtttccccttcctctagcatcatcggtcagaggggaacaaaattgtagaacaaaaacaattaatt

SEQ ID NO: 434772 - DNA, 89 bp, Oryza sativa
gggggggaaaaaccccaaaaaaaaactacaggaggggttttgggcccaacccccgggggttttaacaactgggttccacccccccccct

SEQ ID NO: 434773 - DNA, 89 bp, Oryza sativa
atcgcccacacaaagaacaccgattaccagggggcgattatataaagcctaccctcccttcccccccccagaaaaaaagcaagagctac

SEQ ID NO: 434774 - DNA, 195 bp, Oryza sativa
tttttgggggacttgaaatcggggggttcaaaactaggaaaactaatcttgctcgagcccccaacaaaaagggcatatgcttgtgccaccgattttacacactcaaaaaccttacctgacccctaataacatgtaaactgtgtccatacgttaaatttattggaacgcaacagcatccaaaagcacctaatatgt

SEQ ID NO: 434775 - DNA, 193 bp, Oryza sativa
ttttgggtttttttttttttttgggttttttttttttttttttttttttttttttttttttttttttttgttttttttttttttaaaaaccaaaattgagaaaaaaaaaaaacccccccccttgggaaacccaaaacaaaatttacccccatgctttggggggtagggaaagggaaaacaaaaaccacaaaaa

SEQ ID NO: 434776 - DNA, 422 bp, Oryza sativa
caactccaacgtccggtactgctcgggcctctccgtgccagagagtttgactttttgcggagaaggaaaaaccggtggcgcgcgcgcagtcgtggccggggttgggaagatccgagaggcaaggggcaagggcggcgtgcggttctgcaggatcaggatcccgaaaagctagcccgcggcgaagtaataataactgctcctctgaatctctccgatcctctcgaaccacgagaagctcagcagtttcggctccgcgcgccgcctgcctctcggtcgacagcacagtaaattccgtcggcgcgtggtgcagctttgccggcagcgtgccgctcccacggccatttactttgccttcttttctgaagcaggcgcgcggctggagaacgggaagacccgtgaggacaggatgatggtgccggccg

SEQ ID NO: 434777 - DNA, 197 bp, Oryza sativa
tttttggaaaatcataagaaaactttgtatagatgacattcaaagcaaggccataaacctgagctttttggaaattggataccattgatctatgcagtctggaccactctttaacatcaaaagtctggtaagataccactgatctaggaagctttaaacacccattaacatcaaaatatcttgaaggagcctgttta

SEQ ID NO: 434778 - DNA, 151 bp, Oryza sativa
tagctttggagctcccatgggcgcacgccccgggcgctagctgaagcagccaggctggggccccacccacgcagccgccggcgccggcgccgccgtttcccatgaggcagccggacctgctctcgacgcagcagctctccccgtacccgga

SEQ ID NO: 434779 - DNA, 197 bp, Oryza sativa
tttttggggactgtgaaaaaatgagggggtattaatttgtttatgatcgatgagaccaaacagtttcagtaaatcatttggggtagttgttgtcagagggggacgagggtttcatgaatggacatgaacaatgagattctccgaagagaaatacaacattggtaggctaacaatacaacctatggctaaagattgat

SEQ ID NO: 434780 - DNA, 189 bp, Oryza sativa
ggggaaaaacgaccagactggaattgcatcagtgctaacgaaaccaacaagaagacatatagtatcatatatgtaaaataaattggttcacagttccaatcaattttcacatcccttaattgagaccgacaccacagtaaactaacaaaccagctgtatatacaaccacaacgaacacagcacaaggag

SEQ ID NO: 434781 - DNA, 255 bp, Oryza sativa
actgtttgtcagaggaagaagctgtgtctgtgtgtttgtctgtcagagagacagtgcgctgggggcgcgggcgctgccgtcgacagagcggccgggtggggaagatgagaccgaggatgacgccgtgatggacgggcggatcccgctgacgccggcgagcggaggggggcgggggcaccaccggcgggcgcactcggagacgttcctgcggctgcccgacgcggacctactcctcgacccggagggggacttttt

SEQ ID NO: 434782 - DNA, 207 bp, Oryza sativa
ctacgcgtggggcctggcccctcaggtgaaggtcagtctgcttggaagaacaaagaatatcaaccaaaggttttaacattggatgttgaagctgctttgccttcatcaaaacgtcttcatcgtgccttagaagctatgtccgctaatgttgctgaaactaataatctgcctgaagtgacagggtcaaagcaattgattccaaatggt

SEQ ID NO: 434783 - DNA, 172 bp, Oryza sativa
ttttggggtttttaaatttttggggtttaataatttttttttttttttttttttatttttttttcttatatatatttttttttttttttttttatttttttttttccgggcaaaaaaaaaattaattttttaggggtccccccaaaaaccccacaaaaaaaaatgttgtttt

SEQ ID NO: 434784 - DNA, 191 bp, Oryza sativa
ggatcaatcgagatactggggagtactgtatatgtgataagtaacgtttgatggtcagactctaccgtgtctgcgttacacaagacagaactagtcgacttgttcgatcatccatgtccatcgccccggtttgcccagttgcccgtgtggctaaccccaacaacggcgatgctgatggatatcgagtccac

SEQ ID NO: 434785 - DNA, 489 bp, Oryza sativa
  unsure (1)..(489): unsure at all n locations
ctttctccgccgttgtcgggctcgagctctctctcctctccaccggttaaatcgagcttccgcctccactccttttctagtcgtcatagccggcgtgaatcgaggtgccgctgcttggcttggacctctccggtgatggtgcgctcttcccgctccggcgatggtgcctatgacaagctccctctctgccgctgtgatgggctcccaccggcctctcttccctccccgctgctgccacgagctccctccccacagaggacgacaaaatcagcggcggcgagctccatgtggtggcactcgatctcgagctctctctcctctccaccaccgagatcgacctaccaccgnctctccttcggtcacctctatcagcatggatcaaggctccctcccggctgctgcgatgggatctcaggcaacgcggccatgacgaggtgtggccacgcagctcatggacttcgagcttgccggatccagcctcatgctcac

SEQ ID NO: 434786 - DNA, 200 bp, Oryza sativa
ttttgggtttttttatttgcctggggtgtttagcaccgtcaaaagagagagttgtacgtacaatacagcagagagagaggcatcagttgttcagccattacagacgcagagccgccacaacaatgtgttgcaattccgcccggccatgcatttctaacgacaaccaagtgcagagcctacttgaaaattaccgaggcacc

SEQ ID NO: 434787 - DNA, 72 bp, Oryza sativa
gtcattctctctctcacgcgacagcggctgggggggggttgtgcatagcttgctacatacgcccagaggcgc

SEQ ID NO: 434788 - DNA, 383 bp, Oryza sativa
tgtaatggatgagctgctaaaagcatttcagtggtagctcatgagagagaagagagagaaatagaaactgcccaaacatgggggtttctccatggattatcatctctttgttgattgctcttgtgcaagcttttgtcgcttcggccgatacgaacgcacaggacacttttggacttaacgggcttgcaggtagctggggcagcgcaccatcgaattgggctggcaacgatccatgtggagacaaatggattgtgataatttgcaccgggaaccgggtcacatccataagactgacaagtttcggactgtccgggacgcttttcggggacattcagtccttttcagaattgcagtacctggacttatcctacaacaagaacttg

SEQ ID NO: 434789 - DNA, 195 bp, Oryza sativa
tttttggagtcagacatgcatttgcttttattgagctcacctactcagaggatgccactactataaaacatcaaataggtatcggcactctagatgccagaagtgctaaaaccggtacctataggcctttttcctacttccgccggttgaaatcgtaaaaaagatacctttaaagaactataggtgttggttcta

SEQ ID NO: 434790 - DNA, 250 bp, Oryza sativa
catgcgcgcgtacgctagctctgtgtcctctattttgggcgccctcttttttttttttgggcagtatgggttttggtgcaaactcatctccaccagctgattgtgattggtgagacacgtcctcctggaccaggtcccccgctggcaggactcgcagatgcttggaataaggaatgactgaccgtccgacccgtgccaatgcctaacactacgtgccaacaccaaccacgccgattaaccttatgagaca

SEQ ID NO: 434791 - DNA, 191 bp, Oryza sativa
ggttgaattgtagctgcatgcattgcatgatatatttgtcaagtgctcaacaactggagcattcccaatcatagcgtctctgcacatttccattattcataaacacagagtgcttgctgaaaatggcataataacacattaacacacgagtaatctactcaggcagaaggattaatgcatagaaggatcaa

SEQ ID NO: 434792 - DNA, 475 bp, Oryza sativa
tcgccgaaacccactcttggaagtgtcagaatgtccgatttctcttctcagacacatcccggcgagagacgagagacggcgccaccgccgccgccgccgccgccgtgctggactccggctggccaccgcgctccgctcgaggcgtccgcgatggcgtccccagagccgtgcgccgccgccgccgcaccgggaagcgggttcggagccgtggacggcgtcctgcccccggagctgctgctcgaggtcctgctgcgcctccccgccaagccgatctgccgcctccgcgccgtctgccgctcgtggctgtccttcaccacggaccggctcttcctcgccgcctacgccgacgtccaccctcacccgctcctagccgtcttggttgacagcttccccagtcgatgctgcgttgatctcgtggacctgttcggcaacgtcgtcgaggagattctcggcgtgggcggccagtgcaaggtgc

SEQ ID NO: 434793 - DNA, 199 bp, Oryza sativa
ttttgggtttattggagaaaatcgggcaaaatttttttttgtaatttttttatttttgttcattaaattcattttttggacaagttattttaatgtgtaacacaagtttacataatttttactccacactttcagaacaaaaaaaaaaaagtttcatttttttagccaggaggaacttccacttaaaaaacgggggact

SEQ ID NO: 434794 - DNA, 200 bp, Oryza sativa
tttttggttttttttttttttttggtttttttttttttttttttttttggggaacaacagccattccaattttaaatcgaccctgggtccaggttcacatagacctttaactcatttgaaggatttttgaaactggccattattggaaaccaggcattttaaagccatacattgcttggggatacaagaaccctaacaat

SEQ ID NO: 434795 - DNA, 172 bp, Oryza sativa
ggggaacaccaactgatgcttatctttgtttcagaaattctagacgcaaaactagcaccttgtaagaaacaagagggattacactttaaagatgagatgacagataagataatcacctaccaaaaacagtaaattgtgttgaacgcaaagacggcatcagatcaaacgcagc

SEQ ID NO: 434796 - DNA, 191 bp, Oryza sativa
gtatgaaccgaaaacattgttttggaaccgatatcattatgatccgtctttgaaagaaagccaacacggggacagggatttctttagagattcacaaacaataattaaaagcagcatactgtggattccagttttaggtagaaaataccatggaacaacccacaggtccaaaaactattcactagctgcat

SEQ ID NO: 434797 - DNA, 402 bp, Oryza sativa
  unsure (1)..(402): unsure at all n locations
ttttgtgtggtttaagaaggaggggtttaaacacccataacacaaatccatccccaacaaacaacaattatttccccccacacatgccggccactccagcggggaatgcacacgtaggcctcaatccgcgaaatcgtccaccaagtggaataggcccccaacacactggaacaactgctacccctaagggccaaaagcacgccaaatcaacaacttggacattgactgccaacagtgctgatccttctggaagagagaacagtgccacccaaagcccttcgggtgagcaatgaccttttcaaggggttccagtgcaccgggaaacggagtcgtcccgagagcccccctttggaccacccaccttccacccccctaccccatttnnncccctccccctccctg

SEQ ID NO: 434798 - DNA, 219 bp, Oryza sativa
  unsure (1)..(219): unsure at all n locations
ttttgggtttttttattttttgggggttaacatctcaaacnnctttttttttttttaacntttatttttcctttttttttttttttttttttaccatattactttttgttttttttttccattaggcaggggaaagcccctagttgcttatcaaacaaccttttaaatggttgaagggggcacaaaccattaaatcttctggggatagataaccaacgg

SEQ ID NO: 434799 - DNA, 337 bp, Oryza sativa
atgaataatggtttacccccttccccatttataacttggggccaaaatgggggtggggggggccaatttaaccatggggcttaccaagtttggcccacccagaacaacaatgtttgggtttaaaacacctgacaattccataaccgagggttccaaaacacttgggcttgggccccccccattaaaatcaagtaaaccctgttccgaaaagagaagaccttcaaccattttttttaacaccaggatttgccggcgaataccctattgggacaataaatagggttcaagggttgacgggtgcacacaaaaccggtagcaacggttggggtttcccttt

SEQ ID NO: 434800 - DNA, 304 bp, Oryza sativa
ttctatctgtcgccattcgccctccatccctgcctccgtcgccgtccatctccgtcgccggctgcgacggacgatggggagccggctccccctcgagagccatcgccaagtccgctccctcactgccctcgccgacttctcccgcgccagcgcccctccatcgacgtacgactccccgcctgccccggtatcggcggcttccctccgtagaagcccttgctcgacgcccatgccgccttctactacgaccgcgtctccgcgccggcttgtaagcccccagcattgtcgtgcttcacactagccc

SEQ ID NO: 434801 - DNA, 424 bp, Oryza sativa
ttttgtgttttttttttttttttgtttttttttttttttttttttttttttggttaatttcaaaactgttatttttcaacttttatctgaacactgggcttttttcggaacccccctttacattatagatttaaacataacaaccccaaagttttgatcttaaacaaaacagggtgatcctaggtagggactggttaactacatccgggtgatgggaacgggtcatcatttacctccagagagggcaaagaaggggcctgccctgggggatgtcatcgggtaggacatgacgtaggggtcgaacccctggtcctgcatgagcgccagcatgttgaagctttggtacgtcggggacaggtccggcaggggcacgttgccttccagggactggacaagctggcttgtccccggccgtgcgccgggc

SEQ ID NO: 434802 - DNA, 451 bp, Oryza sativa
tttgtgtttttttttttttttgattcacatactgcaaattcatttttatatgctctaatcagactgcaaattcatttttatatgctctaatatacaactgaatggcttttgcatgcactacccctgagaaggcacattttaggaagagggccttttaattgtagcgtacatcggagtaggatgtgaagaaaaaatgcaactgattcagcaagaactcatcttggaaggcagaactagtatcagcaaggccagaagctggagaattgttaggcagaggaagatttggtccaagctgtgatacatcttgttagttttttttccccttcacaaccgattgttgccaacttctcttactgcggtttgctaattgctcccaacttgcgaaacagatgtttcacctgcatcttaatgccatgaccaaggttcaatacatgcccactattaccagctt

SEQ ID NO: 434803 - DNA, 381 bp, Oryza sativa
ttttgtgtttttaatttttttgggttttttttttttaaaaaaataaatcgtgaatgtgggtcccaccataaacactgacaaaaaaatttttgtgagggcaacacaaaaggggcccccctaaactgtgggagaaacagaagccttttcatcccacatctggaggggggggcttacaattattaaaagcccaaatagtttatgtggcacgattcttaaccaaaatcccggggccaaaaacacaaatgattcatcccaccaaaaacatgccacggccatatagcctttcccaaaaaaaatcctcctaatcacaaggccgtagcggagattacaatgaccgggacgatgggccggtggacgatttaccaccgttagctccttggc

SEQ ID NO: 434804 - DNA, 427 bp, Oryza sativa
gctttcaatccttgttttctcgtcttctctcatacaccatgggtgtggcttgtgctttcgagtttccaccattgatttgcactgagaaagaaccgatggatgaggccagctctgcatgcacgatagaggcagcggaggtggcggagatcgaacgacagctggttaaaaggaggagccagagtccccgccgtcgctaggcatgccaccaccatctgtcatcgcctccgcctctgatctccggcgacgagcgggctgacgatgaggtgagccacggtgaggtagcggtggttgcgaaagtggacgaggaggcggtgcgagcggccgaagcggtgaggcggttgtggcggaagcggcaaggaggctatcgaggagacgatccgagctgttgatttggcgcaaaggtggtgaagaagccccatgacagtat

SEQ ID NO: 434805 - DNA, 364 bp, Oryza sativa
aatcagaatggttacaacacgtaagcatgataacattataaatggtgaaattctgatctgatagttctattcatacatgtatttccacttccatacactctagctgagcatttttttggctattgctcagatatcacaactctctactacactgacaaagtgacaagtgactacctgtacaatgtctaccatgctactgatggagcagagatagctccgaatttattatattttttacatacaggttttgctaaaaaaaagaaaagaaaagaacaaccgtgtgtatacctttaattagtcattccttccgaacaaaaaaagacacaagacgtttggtttcctgtggtttctgcttattaaccct

SEQ ID NO: 434806 - DNA, 571 bp, Oryza sativa
gtggttgaatcagatgatgttgcatacggattggtggacgtcatctctgagcataatgtttccatgcttgtaatgggggccgcagatgataagcactatacaaagaaaatgaaggttctgaaatccaggaaagcacgagttgtagaacagcatgcagatcatttctgcaaaatatggttcatttgcaaaggcacactggtatactgtaggaaggctgctccctttggccatgatgtgatgcaggactgtaggcaaagtgctacttctgcacaatgttcagtggagagatcgagtagcttgtcagagatttggtgtgtttcaaacacatggctacacaaactaaacctcgaaccacatatcgagacaactagttcagacagatactctgataaggaaaaggaagatactaaagagcgtggtgagtctgacaatgagctccagcatatacccatgcagttagagagagtaagacacgaagcttatgaggagaaatgtaggcgtgagaaagcagagcaggagttatttgaggctctccagaaagtgcaggtatcagagaatttgtactttggag

SEQ ID NO: 434807 - DNA, 295 bp, Oryza sativa
ttacatactgagcagcagcagcagcagcatcagacagcgaggcacaacgagagatcacttgcgtttcaagccatcaaacgttttgacatggtgaagacggcggcgagcaatggcgcggcggcggcgaggcgcgtcggcggcggcggtgatgggaagagggcggcgtacaagggggtgaggatgaggagctgggggtcgtgggtgtcggagatcatggcgccgagccagaagacgcggatatggctgggatcctactccaccgccgaggctgcggcgcgcgcctactacgccgcgc

SEQ ID NO: 434808 - DNA, 409 bp, Oryza sativa
tttttgttttttttttttttttttgttttttctttttttttttttttttttttttttttggcaataaactgggtgtccccaaaaactaaaaaaaaaaaggctttatttgtctttatcaacctcgcccaataaagtccgctaatttggagaccccttctgttacaaactacctggaaaaactaggttaccttacaggggggggctttggcttttgaaaggaagggccccacagtttgttacatactttacactttttttaaaaaccaccaccaacatgcgggacaaaaaaattggggattttcttccctcaacatccctataacttttttgccttggacccacccggacaggaacctcccaccgccaaaccgggttacacccagatgggccttacatgggtttggggggg

SEQ ID NO: 434809 - DNA, 401 bp, Oryza sativa
tcttttgcattggagagcccttaggcttgcgcaaccaccaccgcgtccgtcatcccatccaccttcatagccgccgccgtgtatgcgccggcggtgaccgggatccatggcggagccggacctactcgcgcccttagtcgacctcttcttccacctcggcgacgatttccgcgactatccgaccctctgggatgacgccttcgcgctggaggatttcgatctggacgatctggacttcgacttggatgtggatctctttccggcggatgcgccgccggcggtgacgacgtcggcgacgacctcggccgccggatcggcggaagaggggacgtaagaggccggcgacgggggctccaagaacgaggagaacaaggattcgtcgtcgccgtcgaggagcggga

SEQ ID NO: 434810 - DNA, 441 bp, Oryza sativa
ttttgtttttttttttttttttggttttttttttttttttttttttttttttttttttttttttttttttttttttctttttcttttttttttttttttttttttttttccgggacaacccccgggggggggtaaaaaacaaatgggttttttttgcaacccgccacagtccccccgggggggccccttttggggggccacaaaccctggcaaaacaccgggaaaaaaaattcatccgggccgggggcccgggctttttccccccccgggggggggtgctccccggggccctggggggggacccccccaatccccttttggaccccccccccgttttttcccccgtcttgaacccccattagggggggggcccgggaacctaaaccccccgcccaacggaacaaaacctgggggcccccacttgccccccctggggggggg

SEQ ID NO: 434811 - DNA, 304 bp, Oryza sativa
cttcagttgaatatagtcttgcacatgctgtaagctcgacttcgtacaaactaccgttgcatcatgccacgggctttgggatcatcctcagctaaacagcgcattgtacatcttgagcatgatagccctctgttgaaccggtcggagcatgaaaacattgatcagtcttttggaacaaacacggaagatggaaaactgtgtatggtccatgaactagcaactcaaggctcttcggctgctctatattaataatacgcgtttcaggactcacaagtctcagcgttcacaaggcaccttttgaata

SEQ ID NO: 434812 - DNA, 246 bp, Oryza sativa
ttttccgcccgctctacgtctccacgggctccgccgtgtcgtcgccgcgcggggcgttggagatggcggcggcggcggcggcgatggggatggggctgtcgtcgctccgggtcgtagtggttcacgccgcgattgagctctcccgccggttcactcacctgcgggggcggcggggggggcggctcgtggcctgagccggctagcgtgccgcttgtatggctgcccagtggggccgggaacgtacac

SEQ ID NO: 434813 - DNA, 303 bp, Oryza sativa
ggaaaaaaagggaccccccttttctatggaaaagccaaaggaaccgccaaaacaaccccagggtctatgggaaaaaaaacattgcacagggaattacacagctccttggtgaaatggggaataagggggtggtctaacacacaacgcagtctttgggaggtggcccccgcggcaacaggaaactttttgggggatacattctccaacctgggctgggaaagaaattggtaaaaaaaatgaaacccccccccgcccaaaggaagaggaagcctcagttgaaaaaggtgcaggggccgaaaaacc

SEQ ID NO: 434814 - DNA, 501 bp, Oryza sativa
ttcttatccaggatttgagagtaacagttttatgggcatgccaccggcttctactggattcaatgaggcctttgatgcaactaatccttttggggatcctacgcctttcaaggctgttcatgaagaaactcctgcagtttctcagacaaatgctgcacctgctggttctttccatgctactgaacctgctgcagatgcaaatcctttccagcctgcttcagcagcaagctttggttttggagacactcttggcgacctctcttttggatcgaatgctgcacccgggcagcaagatatttttgtgcccacctcatcacattcagaggtaccacctgcaaacccatctgtgcaccctgaacaggcagtcccatcttatgtctcctcccaggcacctcagcctgcagctgctggtccacaaactcatgctgctcccgcttcatttgcttctcaagcacctcccacttcatttgcttctcaagcacctcaagcaggggcacccta

SEQ ID NO: 434815 - DNA, 158 bp, Oryza sativa
aagaaaacctgaatccatatccatttagggagaaaaaaagtgaaactcccatgggggggatggggaaaaacttaaccctaaaattattgtcaaatggggaaaaataaaaccacccaggtccaaactacaaaataccacacatgttttgcctcactacc

SEQ ID NO: 434816 - DNA, 418 bp, Oryza sativa
aataataaactcatctgaattttttggccacaccagcctgcctgacataacaaaacaacactgacacgctacatagtgcggacgtgacagttttatcttgtcacactaaccaaggtgagtattatgatcattcatttaccttggctcgtatctactgagcataaccatcatcactagctcatttttggatgtggattgaactttgactacgtatttcgcttaccaaaacaccatgcatacgtactcggggtgtaacctaccccctccatcccaaaaagaggctaatcctagctaccaacctggatacatgcgtgttcaaattcgtagctagagtttgtctttttaggggacagagaagtagctcatttcagaattcctgcatcatgtatgcacttacactcattctgttgtcaaacaa

SEQ ID NO: 434817 - DNA, 280 bp, Oryza sativa
tctactggattattccgtattcgttggatatgagtactccaaacaggagatgctttttagcctccccactagcctgcaccaagtggcttggcaaacaaacaataggtgatgctgacacctttcgatggcatcagcacaagtgcacaacacatgttgagttttgagattgtctacctcatccatttttttcttgggagcctgttcaacttattatagatgcattgcatgtatatatgtctgaataaaaaggtctgaccctgttatttcgtgctttttcacc

SEQ ID NO: 434818 - DNA, 467 bp, Oryza sativa
tttttgtttttttttttttttttttttttttttttttttttttttttttttttttttttttttccaccaaatttccgatttgtcctcccgaaaatcctccaattttccatactgtccctaacaagcagggtaaaggaaaaatgatttcctcccccatggtttttttccccccgggctcttttttttttcccaattttttgagaattcctccaaactttttttaagaaaaatcaaaaaatgggcaaaaaatcgggccgggttaaaattttggccattgattggcctaccggggttttactaaaggggcccttcctggtgggggcaatcagtttcaattttagccaggaagactgttaggggcaattgcccctttgccctccccgggagatttaaaacattttccccccttttccgggcccgggaaagaggttatcttttctgcatcttcctgggaatagcctcctttg

SEQ ID NO: 434819 - DNA, 442 bp, Oryza sativa
tgcggccggcaatccgcgacctccacctcctcctcctcctcctctcgtcaccaccaccacggcgaccccgtcctcctcgcccctctaaaagcctctcccttcctttctctctccccttctcgtgggatcttgtattcttgcgtcgtcttgggactcttgtggtggtcaagaacgaggacgagagaggtcggagagcgaggcggcggctgtgccgttgcgcgtgcggtgcgggtgaggtagctagcgagcgagaggggagatggaggcggtggcggttgcgggcggcggcgcggggctgacaaggtggcaggcggcggcgctgtcggcggtggcggtgtgggtgtgggcggtctcctccttcgacctcacgcggcggtcgcgcgcgctggtgcagccgtgggtcacccgccgcgtgctcgccgagacgccgtccatcgtcaga

SEQ ID NO: 434820 - DNA, 357 bp, Oryza sativa
ggtgttaaaaaaaaaagggtaccacattgtatatgaggatgaatgcatcctaacgcgaaactggctggattcccctaaaccccataggtgcgttatttggggcttataggcgaacttattggacaggtgacggtctatagattctacaacacggtttctaaaaattatactgcacttgacctgtgggagaacataggccctggtgtgtcctggacgattgacctcaaatctaaagaggctgtatatcacagtgttccctgccacagtataccccccgagagtcatactggtgatgaggcccttcgggctgccacctgtcctttaaaaagcataggggcctgatgcaccaggacacga

SEQ ID NO: 434821 - DNA, 510 bp, Oryza sativa
  unsure (1)..(510): unsure at all n locations
ctccggccaactccatgactctcgtcgacttgtcccgcttccacaccgtgtgcacggcatggcgtgacatggtccggttgccggcggcggagccccaatgccccgcgctgctgccgtggctcgtcgcccgtggctggcccggctgcttctcccgctcgcacctccgctccatcttctccaacgcgacgcccgcctggcactccccgaggacgaccacccgcgacatgtggctggcgtccacggacggcgccggggtatgggtcctcaccgccgacggcgacaggctcgtcgaccccctcaccggagccaccgtccgccggctccctcgcctccctcgcaccagcaacaatgaccacgtctgctacatcgacggcgtcgtctgcggcgacggcaccatcgtggcgtacgccacttcagaagggttcaagcacacctnccagatcgaggcagccatcctccgccccggcgacacggcatggacgacggtagagtcgaaggggatgaattact

SEQ ID NO: 434822 - DNA, 241 bp, Oryza sativa
gcaagcggtggcggggaggcgccggcgcgccagcgacccgaggcaccgcgcggccctggaggactgcgtccagcatgatggggctcgcgcgcgcaccgctcgccatactcgcagggttgcgacctacagaccaacaacgtcctctacctgctaataactgaactgctggttgctgacgaatgtcatgccgaagctccaccagctgggccacgacgttgttgcatgtagagcgtcatggccc

SEQ ID NO: 434823 - DNA, 291 bp, Oryza sativa
tttttgggtttttttttttttttggttttttttttttttttttttttttttttttttttttttttttatctgatttctgttcatttgttcttggattaagaacacagggaataaattccaggaaggggaaagacatacacccctaaccaaaccggaatatggtgggctataaaaaagactactacggggggactgacacatacccgaagtggaaaaaaaaacccccccaagggagggacggcaagagaaatcacggggggcccgggggtttgcctacttaggcggggcccc

SEQ ID NO: 434824 - DNA, 183 bp, Oryza sativa
tcgaggaggcgagaggaggaggaggaggagctcgtcggcggcgagcgatggcggcggcggtggcggagctgtgggagacgctgaagcaggcgatcgtggcgtacacggggctgtcgccggcggcgttcttcaccgccgtggcggcggctgcttttctttacctctttcttgcttgtgatcttc

SEQ ID NO: 434825 - DNA, 422 bp, Oryza sativa
ttttgttgttgtgaaatagaaaatagcatcatataatgagaattgagaagttgagaacatgcagcaacagactactgttcaactgttcaagtatctagttacacatgaatcatttcccagtaacctcatagacatccacctcttcccaaatcgagactatgttgatctattcaaaagactactatgcctgtactgacttaaaatcgtcgctaaattctttccctttttaagttttggaagagaagtgtattcacgtagaaccagtttctttgcctacttacaatgaacaatcacaacgaaccatgccggatgcagtcacgaagaaatggcaggtgaaactgctcccgagtggctggcgacaatcttactgcatctactgataccttcgaacgcctgcacgcatacttcggaaaaccccatca

SEQ ID NO: 434826 - DNA, 223 bp, Oryza sativa
aaaaagaaaaccccccaattaatggggggaaagggggagaaaaaaaaccaaaaaagggaacccgggcaacaaaaggggggaacccaaaacccccccaaattttccaaaaattttttttttttttttttaaaaggggaaaattttccaaaaattttttaaaaaacgggttaaaaacccaagggattttttaagggtccccggggagaaaatttttaaccccaaa

SEQ ID NO: 434827 - DNA, 106 bp, Oryza sativa
atataaaaaaaacaaaaagtggttgaaagtttcttataacccttaaaataaacccagaaaccaattttcaaccaacaaaaccgcagaacggatcacgtccccccac

SEQ ID NO: 434828 - DNA, 554 bp, Oryza sativa
  unsure (1)..(554): unsure at all n locations
tattcctgctacctttgttttttgattagtcctggactcctgatgctggtgtagaatgaaataaatttacgactgaagttttagttcattaatttgctgacgctgatagcctagtcctgataaatcttcagagcttcaagtactaagttatccacatagtccgatacaccgtcttaagtaccagagcctccagttccaggaataaatttctctctctatctctctcccctttttttttatttgcgatgagaaatagtaaaattttcttgaaaacattacaggaaaaacgctacattaggcagatgtggtccatactctgagtagtgttggtctgcggctgcttccatgacaagcctggtgatgccatgaagggtaataagttcctcgagtccttttgcgacatcgtccatgtcaattagtactttctgacaatcagtctgaaatagtaggattaatgttcatgctcatatngaatatattttgactgataaacaacatttcgtcccacgtttctgatgcaagtatttttttcacaagcctaacaaaaaaagtat

SEQ ID NO: 434829 - DNA, 381 bp, Oryza sativa
ggccgcccttttttttttttgtgttttttgacaaaaacgggggaagcttagaacattgaagcttcctaagcaatacataaaatttagtacccgtgtatggacactgggtgtaacaagtcacaaacccatagggaagggaactgttgaagggaggaaggaaactgttgggtgtctaaggtaccaggatcggaggcatacttttaaagacgtacgagaaccatttaattctttactttgagccaccatctcacaagaaagaccaaatatagttactccacaaatcattctattgtagtggcaaagtacattgccgcaagttctccccagaaggccagttcaataaatgcggtgatgacacagacccgaaagtcgaattacatt

SEQ ID NO: 434830 - DNA, 384 bp, Oryza sativa
ttcccaaggctcccgcccctcctcctcctcctccccctccgttccctcgcagaggcggcgaccgcgccgcgccgaggccgcctctcggctgggctagggggttcccccccaacctcccgccctaactaccccgcgccaccatggcggcggcgacggcctccgcgtccgcgtccgcgtctgcggcggcgttcctcctcctccccctcctcgccgtcgccgccaccgcaggccacggggtctgtccgaggcagcccgccgccgccgccgtcctgccgcgccaggcgcccgccgcttactcctacttctcctccttctcctgctcctgccccgcggcggagacgccgggccaccgggcgcaccacgtgggcgtcctggaaggggatg

SEQ ID NO: 434831 - DNA, 315 bp, Oryza sativa
ccggaaggggggagctctgcccttatattaaaaagttggtttcacactcccattcaagggttttccctggaacaaaaagcaactgggctttccccataaactccattgcttagcgaatttagttggcccgtttattttttggtaaatttcctgcaaatagaacctctggggggtacaaaaacccgcccaaaaaacatttgcctgggttccattggggcccaacaaagttttttcgaaattgttccagggcatttaatgataacctgagccctgattggaattttcgatgcctcaaaaaaccctactcttttttta

SEQ ID NO: 434832 - DNA, 501 bp, Oryza sativa
tccttgcgtccggcgcgcctctctcgagcacctgccgatccgatccgatccagaccggatcgcttcccctccccctggcaaatcaccgccccctccacccggatccctcgcttccgcgtcgccggtctgcattcgcgccgcccccggtcagcccgtatcgccggtccccatcatcggcggtgccgcccccggtcagcccgcatcgccggtccccatcatcggcggcgccgcccccgatccccctcgatctgcactgctcccgacgagtttaacccttgcgcggctctgctggagtgtgagtgcaagaacagcgccgccgccgagaacacgctgctccgggcgggctacggtgggtggctgctctactcggcggcgtcggcgggggacatggcgttcgtgcaggagcggcggtggctgctcctcggtgttctggctggaaatgatgagtagggcagtccacgccgccgcggtgggcggcagcgtggagatgctgagggagct

SEQ ID NO: 434833 - DNA, 382 bp, Oryza sativa
tagtcctcacctccacgttctctcaggcaagcgagccccccctaccttgcctccgaagtaaccgccgccgccgccgccgccgccgcggcagctaggtcaccgagcccgggcccaccctcccctcccctcccccacgccggatgatcgccgccggcgccgcctcgatgggccgcgccaccgccactccagcccacggggcccattcgcggtggccccgcgccgtcgcgcgcctccgcctcgcgttccgctccccggcgcccgcggccagcggcggcgcgcggtggataggcttgtttcgccccgcgccaccggcggcggtgaaggaagcgaaagggaagcggccggaggtggagaaggagcctgcgcggggccgtagggaaga

SEQ ID NO: 434834 - DNA, 346 bp, Oryza sativa
ttttgtgttttttaggcagacggcgatatcatggtataataacaatttaattctttggcgcacgtatgtacgtacgaacgctcgtatacgctggcaagtatgtagaaccctagggtgcatgcgaatgggcatctgccccatgcatgcatgcaacaacacaaacgaaggaccaagctcacgccacgtatgcgccgtgcgcatgctagagcttggcggagccggtgtcggtgcaggcggaaaaccgccaggggcggaatatgcagctaggtggggagcacggccggcgccggcagacagcctgccatggcggggcacggggcagaccggcatagctgttgacgggtgc

SEQ ID NO: 434835 - DNA, 506 bp, Oryza sativa
cccttcgctagtttatccaattaagctaatcagcccctcgaaacctcacaaaattaacaaccagtcccttctccgatccgttagccttcgtttttctctttagtgtgtgtgtgttgcgtttttgcaaatacacccctgagtattattattattgggtaaaattgatggatctcgcgacgacgccggcgcggcggcccatggaggccgggatggcgcggcggctgtggcacgtcgtcctcgccgtgtgccacatgctccggcgaggcctctgccggaagcgcctcatggtggacctccacgtcctcctcggccgcggcaagctcgccggcagggcgctccgcggtctcctcgcccaccacgccgccgtggggcacggccaccacctcgcggcgtcgtcgtcgtcgtccgccgcgctggcgtcgttctacggccgccgcccgcgggaggtggagttcagctgcaccaccacgccgtcggtgtacccgcactacgggctgttccccttc

SEQ ID NO: 434836 - DNA, 130 bp, Oryza sativa
ttagcgcggagccgtcgccactccccgcgaggtttactctgcagaccattcggaaatcctacatccgagcctagccgcttgctatccaccggcggaggcgggcatggcgacaccgtcggggcctgacctt

SEQ ID NO: 434837 - DNA, 169 bp, Oryza sativa
tttggtgtcttttaaaggagggggagcttatatatactctcttccaagatgcatcaaccagacacactatcgtacaggtgcacatttgcgccaatattaacaacgtacatagttggcatataaaaaggagccatgctttcatgttaaggcaggtacaggccctacccat

SEQ ID NO: 434838 - DNA, 343 bp, Oryza sativa
ttttggttttttttaattttttggggttttttttttttttttttttggaattatttcccctttattttattggacaccattccaaacgggtcaaccaacaggaattacaagtttacaacatgaaacatcccatggtttgagtagaaaaggacttattgggcccgcacataatctggggggaaaccaggaaaccttacgggttttaacggcacccctttggaccatattgcaggggggcctccggaacgccggggactgaagacccgcccttcttcacgggctttcggcaaacgacccttgtgtccgccgggttagggcttggctttctaccctccttcgacgg

SEQ ID NO: 434839 - DNA, 492 bp, Oryza sativa
ctcgctcgtggacgatggaccggcggcgagcttgtccggtgaggggcggcaagcttccgcctgaccactcgagcttgactccaccacaaggactggctcgagactccttggtccaccccgcgccggatcttgaagctatggcgcgcgtcggcgtcgagaaggagtgagaggagtgggagtaggaaggtgagcagcgacatggtgcgtgggtcagcgcgggaagggtccacggccaccaaatccggcagccctccgcctcctaggcgatagatcggacggccctgttcctcctagcgctggataattcgtgtggatgtccatggcgatgtgatgtcgccagcgcagcgtagctgctagtctcgatccatgtctcagcgaggtagggaggaggcactgggttgacgaggaccgaggacagcgcagaccggcggtggctgcttccgctgcccccaagtagtgagttttctttggattctttggaatcgggtgttc

SEQ ID NO: 434840 - DNA, 189 bp, Oryza sativa
cataacttcaaccctactttctctggggggtaattaataatactatgggggtgcatgtggcaagtcatagtcggtagctgtagactctcacaagcgccatggttaagaacttgtgtaggtacctatcccttactggattaccactatcttcttgatggaagagcatgtgataacttctaatactgctca

SEQ ID NO: 434841 - DNA, 92 bp, Oryza sativa
tctttttagtacaacatattctaaaactgcatggggggttcttctagaacattaggtggattaaaaggaccagacgtatcaattaagtttct

SEQ ID NO: 434842 - DNA, 334 bp, Oryza sativa
cttccctggtcctccttttgtgtacccatggagtccagcatggaatggcattcctgccatggcaccaccgggatgcacagcaccagctgaaccatcaaatccttcatacattggtagcacttttagtgtcatgtggtacatgctctccaattgttgttgatacctgtatactttccggtaattccatttttagattggactctcatttctacctggtcaaatggtgcatggagctcgccatggatttaacctaatcgcagagagtcagatttatctcctacaagcactagtacatgttcaaacatcggtcttcccgtcctaggaaagcacttca

SEQ ID NO: 434843 - DNA, 151 bp, Oryza sativa
tttttattaaactctaatgtaaaaaagttaaacgggggggttcaaaaaattaaatggggaggttttacaccaacagaacttcatctttgttacagatactattcctataaaaatattatctgtattactatatttttacaaaaaacaattt

SEQ ID NO: 434844 - DNA, 86 bp, Oryza sativa
ttttaacacacactaatcaaatacataaaggggggctcttatagatcaaaatgcggattcaaatgatcaaacttataacctactaa

SEQ ID NO: 434845 - DNA, 330 bp, Oryza sativa
tcgtatacgcacacatatgtccagagcgagcagggcggtcattttagaaaacaatgcggctacagttgctctaaactatcgccattactactactgtatgcagccaatgctactagacatgagcatctcttagacctataacggattcactctatccagatggggcacataaataatgatataatacagacgtacttcaacagtatgggcatgttgtaacttatgaacagttaaactttggtctcttgacgtaagcatccattatataccattacatcaactgaactcataaccctgaagacaccaaaaatggccttttcatcatcataa

SEQ ID NO: 434846 - DNA, 103 bp, Oryza sativa
tttttggacacttttatgacgaagtggaggggggggtatttcacgagcgagtgcggtgacatcctactcatccgaccacccatacgtcgacagaccggatgct

SEQ ID NO: 434847 - DNA, 88 bp, Oryza sativa
tcttacgcgtacttttctaaaatgcaagctggcgggcttttttagatgtctaggcggggaaatacgcctcaacctaacttcaacactg

SEQ ID NO: 434848 - DNA, 93 bp, Oryza sativa
cttcgttagctccggccaccaactttgacccggcctgctcctccgcatcccccatcccctactccccggcggcggcggaggcgcggaggcggt

SEQ ID NO: 434849 - DNA, 490 bp, Oryza sativa
gcaaaggaggccaaagaagcgcaaatctgcagaatctgatcttgtttcttggcataaactcattgagcaccccaaaactttgagaaacatgagcacaactgagatggactgggcttgggcagctaataggttaatggagaaggcagaggatgatgcagaaaatctagaagatgtccctgtaaattatttatggcgcaaaaggttaagattgaccacacggttaatccagcaaattcttcctgctataccagcaaaggtcctcaaagcacaagctgcatcagcttatgaaggtgtaacctataacatcgctatgttcacactaggagatgcatgcaacatggcatcatataactctcgcactcttaccgatcatgaaaataactcatctgaacaaacaaatgccaagaaaatggaagacagattgtaaagggttggggaagtatttactggaagaatcaagaagatggaaaatgactttgtgagcttgaac

SEQ ID NO: 434850 - DNA, 122 bp, Oryza sativa
acgtttaaaggcacaaacccgccacactctagcggggggcaccacagacgccgtcgaggcattttcctacaccgacttcagacgactgtttatcgttcactcttacaagtttctttgttaat

SEQ ID NO: 434851 - DNA, 150 bp, Oryza sativa
tttttaagcgtacgcttatgagagatcgtctgggggggttttatagttgcctatatgggtactacgtgatacaatcttaatgttaaattataaataaatatttccaattcatttataataacatatttaagtatacttttacatatataa

SEQ ID NO: 434852 - DNA, 337 bp, Oryza sativa
catcaccacatttgcagcatatagctgcggtctttcgaggtgtacagtgagtcacagtgagaaaattcacgattgatcgaaggtagcacatctatgctatttattttagctagtcatggtgtccaaggctttgctcgtgttggctatcagtctcgctggtgcctttttcgttaactgcgcccagtagctttagccctacgccgacctctgcaacgacgaccccaacgccggctacggtagtagcggctacggctactcgtcttattagggacaaatcccagcgcattatggacctaacccgtcgcaacagggaccaaacccggtacagttgggacag

SEQ ID NO: 434853 - DNA, 144 bp, Oryza sativa
gctatcattagagaaccagacctagcgggggattcaaagcaccaaccgggcgcggtctccccaagtgttcaagtactaacacataaagtacgcaggcacgtgactaattccgtgtatccacgattcacacaatcaaacacttgt

SEQ ID NO: 434854 - DNA, 314 bp, Oryza sativa
tttttaaccagtgttggcagcatgtgccatgggggtagcttatatgtattgacacgaataaagtatcctcagatgtttgtctgacttgcaattggacagcctggtttgattcctatcgttgctatttgctttgactgccgccaggatcattctctgtgcgatcactttcctaggatcccctgtccagatagcttcatcagcctatgatcaataatgtatagtttacccattggcctcacaccagtgccggcgagtgctctatatatgtatttgcacttggacgcgctgtcggctcactatgtgtatatgatctt

SEQ ID NO: 434855 - DNA, 176 bp, Oryza sativa
ctttggcgaatgaactttacataaacaagggggggtttttttagagattttgagcggtacattcgctctaacttttggcctatactggggctattctaatcggttatgattatataaggctgacttgccttgcattaacctcaggactattgtggtgttcaaggattattaagtgt

SEQ ID NO: 434856 - DNA, 69 bp, Oryza sativa
ttctttttaccagcaataatgttaccctaccttggggggcctatctacaacatgatgcgggacctcgcc

SEQ ID NO: 434857 - DNA, 222 bp, Oryza sativa
tctgttatgcatattccaacactatgtgctgtgcgcggttaatctagatgagactggtgtggctatcattcctgaaaggagagtttatttgattaggccttcatacaagaccgaaaaaggtagagtgtgaaatacctatagtataatactttatttttgttcctgatcacatacggtttacgttagagtgccaacttatacattttatatgaaacataagca

SEQ ID NO: 434858 - DNA, 109 bp, Oryza sativa
gagggcatattcaaccccgaaactgggggggattaatgaacaaacagggggcattattatacgaattattcgttaaagtgttaatattactccttgccttatctaaata

SEQ ID NO: 434859 - DNA, 91 bp, Oryza sativa
actcaaagtagcacgtatactcacgggggggctctaaaagatcaattggggctcaattacccatcgatcattctatcaatctcgacaaatc

SEQ ID NO: 434860 - DNA, 73 bp, Oryza sativa
ctttttcgtgcgaaaaaaagtaatatattctcggggggttaaataaagaggagtgggggatctgaccaaatag

SEQ ID NO: 434861 - DNA, 67 bp, Oryza sativa
tctgtttttacgcaatcatactccttagtacagggggggatactcaaataaaggaggcggttattac

SEQ ID NO: 434862 - DNA, 56 bp, Oryza sativa
ttttacacaaacccttactccaaaccctacgggggactcaataaagatcaatggcg

SEQ ID NO: 434863 - DNA, 131 bp, Oryza sativa
gttacgcgtgtgtgtgcaaggaacaaactgggggtgctttttgaagattgaggaggaaggtagctgcaccaccagaatggaactacagagttttcattggaggcttcctactggcttcacttagaaccttt

SEQ ID NO: 434864 - DNA, 86 bp, Oryza sativa
tctgttttcgagtactatagccaccagctaaaaggggggctttttgaatttcaatggtggctaaacccgctaccttgtttcattgt

SEQ ID NO: 434865 - DNA, 345 bp, Oryza sativa
tttatgtgtattttttctccgaaacaccaggggggtcttttatgagctatgggcggcgacgtcgggaggatcctcgcgatccgtttgatgccgacgttcacggttcccaattacggtgacttctactttggttgcagttagcgcgtatacgcggagctgttcacgctaactgtatggagccatcagtgtaggtatcttgatacgtattcggtggagtactttgatgtcatcatgcttgttgatcagatggtctacatctattgtaactccgatgggtgatgtggtactggccatattaaacgtctctaggcgcgatgactttaaggagactgccaccggtaatgc

SEQ ID NO: 434866 - DNA, 413 bp, Oryza sativa
ctgcgaacactaaaactattctcatgttactactatacgttaggggcaccacaatcggcctgaatgaactctacttaaacggctctggtgcgaatggatggctcaaaacagaaatactaatgcaaaaagcatagaagcatgatacctccagacctggatccctaacagacatagagctcatggagatgatacaaagcaacagcaacactgatgattgcagacgatgagcatctagctccacaggtgtgaaaagtgttgaactatgacagcgcggacattgaggactaacctcacactgagacctatacatcagaacgataagggcaccctatatgcacacatggatcatgataagcagactgataagaggcggcgctaagcccatgctgagagcacggataaactagcgttgt

SEQ ID NO: 434867 - DNA, 190 bp, Oryza sativa
tttattctgacgatactatgtacttcccctccggggggtattattgacgacgaccgcgacaagctacatatccttcgtgctgaacgcgtggagtcgtggagaggagattctgtcaacgctactaggagtggacagttgtatatgggaggtgagtatccatttaattttacacctaactatcatttaatat

SEQ ID NO: 434868 - DNA, 275 bp, Oryza sativa
ctcaggcagcaacggaaccatattacgggggggtataaaagacataaattgggggatacccctcaacattccgacaccttatgttcttcttctacttacatagagacaatgttgtactaaaatatcaccataacatttccagtaacacgatctaccatatcaaattactattttctaattttgaagaaatcgccgtcctccaccgtcgacggggccgcgccggcggcggagaacgggtacttcagcaccgtcttctccgagttgcccacggcaaa

SEQ ID NO: 434869 - DNA, 339 bp, Oryza sativa
tcttttacccgtacgagagattctgaatgctagggggccttttataaaccgtgtgggggtgatacgcgataaaaactttgatatacggtcacattgtacaggcatatttattttaatagaagagcttgaaaaatggatcataaaattgaacgaccggatatatcatgacagcattcccttgcatgaggtgaagcttttgaccaaacagattagagagatttttaagaccaaaccgtaattcacttgcactcatgatcaccttgctcaaattcaagattcagaggtcgaaagagacgacatacatgatcatgttaacatcatttgttaggttattgatgt

SEQ ID NO: 434870 - DNA, 76 bp, Oryza sativa
tgttacgcgtacgataaccactaacaaactggggggctattaaagaatctaagaggggaaaaaccgcaacatccat

SEQ ID NO: 434871 - DNA, 282 bp, Oryza sativa
tctgttatagggccgcgcgggcggctatcacggcgggttgacgtggcctatggttgtcgcgcctcatgggtcacgagctatgcctgctgtgctgcctcaccttccacagacgcgtaggatcatctatgctgacctggactgttcttgcgcgccaagaaacccaaaccaccgccgtgtgttgacgccacgaagaaatggccggcctccaccgacgtccgggccgggccggcggctgatagcgggtacttacgaagcgtcttctccgcgttggcaaaggtacat

SEQ ID NO: 434872 - DNA, 444 bp, Oryza sativa
cggacttgtgggggtgttcttggcaacctgaggggcggctggaataagatcgccttcgtcaacgccgccttcgtcgccctcctcctcgtcgtctactccctcggctgctgcgcgctccggaacaaccggcggcacaagtactcgctggttgggaaatgatgagggtttttggtttttgctcagatgaaggttttgtggcgcgtgtgtttgtgttgtgttgcttgctggttggctacatgaacaactgtaggatttcaggaaaaagatttatgcttcagtaaatatgcgcttccatgttatgaatgaacgctagtttagtaaatatgtgttggttgagttcttgattgagatctgagaatctctcaggaaaatatggctggaccttttaatagttacttttgggtttggaacagtcacagaatgggcccggtccagagttgaagc

SEQ ID NO: 434873 - DNA, 98 bp, Oryza sativa
ctttctctcgctcgaccacgcaacctcttttcggggggttttttaaagagatacggctggcactgttcaaacttctcatctttctgtcttaccactga

SEQ ID NO: 434874 - DNA, 96 bp, Oryza sativa
ttttcttaaaagcatactagtaaattgagctggggggaatcaataaatgtatgtggggctaaataacaactatggacatattcctagattctttaa

SEQ ID NO: 434875 - DNA, 96 bp, Oryza sativa
atactctaatgcaataccaccctcgggggggatctgtaagatctgagtgggggaatatggtcatacgttgtggatagtcaaccagtgaatgtttac

SEQ ID NO: 434876 - DNA, 120 bp, Oryza sativa
tttatttagagaacaacaaataccaattgttggggggggattatagagagagcgtggcgatatctaccaagaagatggtcggtatcagtttggtgtactagcttgtcaagactatcattt

SEQ ID NO: 434877 - DNA, 192 bp, Oryza sativa
acgtgatcgcttccatcatcgaagcgggggggaattgatacacttaccgtgccttacatctgacacatcttattattagactgagagcagtttttcaaggcgtaaaagagatcgtctcgaacaataagcttattatatccattcatagctcaccccgactcgattcagtgccgtgaaatccttcgtagccta

SEQ ID NO: 434878 - DNA, 242 bp, Oryza sativa
cccacttgtgcgcgagctcgtgagcgagcgcgcggaggtccatctaacaaagggggcgctgaacgacacatgcatccgactaccactgtcgctagcgttcagacctaccaatcgcagtcggactggtactgggcctagaaatacgtaggtcacccctcacactggcgcgtatctgtaagcaagaagcccagcaagtcaactggagttctattacaaaatgtcgaccgcatagaccatcgacg

SEQ ID NO: 434879 - DNA, 106 bp, Oryza sativa
ctttatttcgccctgactaaaaaccaacaccggggggggtttatttaaatagatggggccgttcttccccccctcctaattacttatatacactccgaccattttc

SEQ ID NO: 434880 - DNA, 84 bp, Oryza sativa
ctttattcatgcgctcacgcccaaccccccacgcgggggatctacaaaaccatactcgggggaaacaccaccaccctccaacca

SEQ ID NO: 434881 - DNA, 68 bp, Oryza sativa
ctccatctcctaaacattctttggggggggatttaaaaacatttatggggggatcactaatcaaagtt

SEQ ID NO: 434882 - DNA, 100 bp, Oryza sativa
tcgttttcacaagccctatctccaaaacgtcgggggggttattataaaaacattaggggttcagaccactaccacctacaccttaagcatggcgataatt

SEQ ID NO: 434883 - DNA, 92 bp, Oryza sativa
tttctctaagatactatatttaataacagatgggggggttttaataaaatcatcgacgggtaagactcccacaatcttactactaaacttct

SEQ ID NO: 434884 - DNA, 207 bp, Oryza sativa
tgttaaggatactcttttgaagaacagaattgggggttatgatacaatcattggcgggaaagacggctactaccttactggtgctctgcagcataactttccatcttaaaatgaccattagatcgacaattaacacagtactacgctggatgctcaactcacaagcatgctgtgaattgaacgagtggtggtatgagggacaatgtc

SEQ ID NO: 434885 - DNA, 295 bp, Oryza sativa
attgagggaaaaaaaatgagaaaaagaaaagaaaaaaaagaagaagaagagagaactcgaactctcgcctaccatttcgcccccctccgcaagcaatccaccactgcatcggcggcgagggctcaccggcggcgagccatgtgcggcggcgccatcatccaccacctgaaggggcacccggaggggtcgcgccgggcgacggaggggctcctgtggcccgagaagaagaagcccaggtggggcggcggcgggaggcgccacttcggggggttcgtggaggaggacgacgaggact

SEQ ID NO: 434886 - DNA, 348 bp, Oryza sativa
ttgactcagctatcctcacaaaatgagagattggaatcctcggagaggcaaaggccaccttcacaaagctacaggccacagtcgtcgcaagggcagaggcctagttcagtacaaggccgtcagtactccgagcaaagaagaatccaggcaaatgatagagtaaagtcggcagaaaggcagataaggctctcctcgtaacccatgccatcacgacatatacctttcaactgaatgcgtgatgcccatgcaaagaaatttgctaccgatgtaacgaagatttattgatcttagcgttgatatgtatgtttccttttttcttttcttgttctcttcttttgttcttttctc

SEQ ID NO: 434887 - DNA, 238 bp, Oryza sativa
cctcctcgtccgcggacgcgtgggttccgacggcgaccgttgccgccatatccctcctaccgcttgttcctcctcctgctcttcttctccccccctatctctctctctctctctcccctccctcccctcctcgctcaccaactcctcctgtcccgactcgcgagcgaatccgccgagcagcccaagaacaagggggaaggaggaggaggaggcggaggtgggccgggggggcttgcct

SEQ ID NO: 434888 - DNA, 95 bp, Oryza sativa
ctttagattatactcgctgtagagaaaaaaaaaaaacaacaaaatgggggttttaatataaaaaataggggattataaataaataatattaataa

SEQ ID NO: 434889 - DNA, 54 bp, Oryza sativa
tttctatactaataagagaggaggaagagaggcaacggtttttttaagaagagg

SEQ ID NO: 434890 - DNA, 416 bp, Oryza sativa
gtaggggacgcacacgtttgtgaacaagcaccagacctggtgccataatgacattcatggtcatatcacctggactgagccatacgacctgttgattaccatcaagcatactggcgatgaggatgatagaccggtgtgagataccagcggttgtgccaacacctaaagagatgagtgccatggacataagcactagtacctgcaaagaagaactcaacgctttgcctatcaccaatgaccatgcttgccatggccgtgaacatagccactgtgaagaacccgttgctctgtactctaccggcgaacatgcttgccatgagcatgagcatgagcatatccactgtgactagccaatctgctcgtattgcgctgataagcatgcttgccatgaccatgaacaggttcatgagcatcat

SEQ ID NO: 434891 - DNA, 137 bp, Oryza sativa
ctaactattaatcctctcgagtaatcgccttgaaatcatcggttgatttcatgcagagattaagaagcaacagatattatataacttttatcatccaaacactttcaacacataataactaaccaattttaatcaat

SEQ ID NO: 434892 - DNA, 211 bp, Oryza sativa
tttcctacacccccaaacccacagccacgacgcggccgcaatggcggagcccgagtcctccacggccgcggccggcggcagccgcctccgcatcgcctgcggtggcgtgctgtgcgccttcaccctacttctcatcggcgtactctcgttctcgatcctctttttcttcgtgatttatgtctagagcgtgatccacgtgtttgacctcttc

SEQ ID NO: 434893 - DNA, 465 bp, Oryza sativa
  unsure (1)..(465): unsure at all n locations
aaaaaaaaagaaaaaaaagaaaaaaaaaagaaaagaaaaaacaaaaaaaaaaaaaaagaaaaaaaagaaaacaaaaaaaaaaaaaaaaaaagaaaaaaagagaactcgtagcaancaaaaaaaaaaaaaaaaaaagaaaaaaaaaaaaaaaaaaaaaaaataaaaaaaaaaatttattaaaaaaaaaaaaaaaaaaaaaaaaaagaggaaaaaaaaaaaaaaaaggaaaaaaaaaaaaaaacaaaaaaaaaaaaaaaaaaaaaaaaaagaaaagaaaaagaaataaaaagaaaaaaaaaagaaaagaaaaaaaaaaaaaaagaaaaaaagaaaaaagaaaaaaaaataaaaaaaaaaaaaaaaagaaaaaaaaaaaaagaaaaaaagaaaaaggaaaaaaaaaaaaaaaaacagaaaaaaaaaaaaaaaagagaaaaaaaaaaagaaaaaaaaaaagagaataag

SEQ ID NO: 434894 - DNA, 64 bp, Oryza sativa
ctctttctcccatccgcgtagatcccgtcccaggggcggtacggacggatcctcatccattatc

SEQ ID NO: 434895 - DNA, 154 bp, Oryza sativa
ctcaaggtcaacttctctttacgccgccgccgctcgtcccgaagcggccacggcgttcttcggcgaagcattcgccgcagcagcagaaggccaggtcgtcgttcgtcgtttcttcttttctttttatcattttttttttttttttatttatttt

SEQ ID NO: 434896 - DNA, 550 bp, Oryza sativa
attttaacttccatagtgtgaatgatctactaaggctcgtgcggctttcaatggagtctatcagctgctgacatgttcagaatccaggaaaatgacatccctttacaaggtgctgttggatgtgcattccatatttgagtaatgtcccagacttgccagtagcatttggttgaaaagttcaactgtgcgaaattcataggtcttctcatttaagtgtgctggttaatttgtacatgaagcgtttgtcttatcttctattctggaggcctgtttttacccattgctagcatctagttggatggttttatccatgagggaggttgctgaagatgtgctttgcagattgcactgatcaacttgattttgggcaagactgcctagttacagactgcacttgataagcttatacacaatgctactggacagcagcttccttgtagataatcttctttcctccatgctgtaaatgatgtattttcgtcatgggagtgacctatggcgaatagtatcatatgttcccttgagaaggcaaaatggtggttccacttag

SEQ ID NO: 434897 - DNA, 237 bp, Oryza sativa
gggagccggcccggaacggaacgggcaggacacgaaccaaaccttcgtttacacccccaatacaagaaaaggggggggaggctcaaaaaaaacgaccggcgggcaacaccaggccaaggggaagcacaagcggaaggggaaggcgacagaagaggcagaacaaaacaaaaaaaaaaaaaaacagaaaaacgacgcacacaaacaaagacagaccaaaaaacaaaacaagcaacaaca

SEQ ID NO: 434898 - DNA, 349 bp, Oryza sativa
tcgtttccactcccctccccccattattcccgcgattctcctcccttcctcccgccgcgcgcgccttggccatggggaagtacatgcggaaggggaaggtgtcgggggaggtggcggttaaggtggtcggcggtgcgctgctcgtgcgttgtccttttctctttccttcttcttgtctcccgctggtttttcttcgttccttgtctcttctctttttcctttcttctcctcttttttcttttctgttccttttgtcctttttcttttttttttcttgtttcccttttttttcttcctcttgtttcttttctctttgctctttcttctgcttctttccttttcttttcct

SEQ ID NO: 434899 - DNA, 69 bp, Oryza sativa
agcgttcgttcctacgcagcagcagagcctctcgaaattgtggtccttaacgcggagcgcgaagagaga

SEQ ID NO: 434900 - DNA, 708 bp, Oryza sativa
aaaaaaaaaaaggataataaaaaacaaaacttttttaaaaaaaaaagaagaaaaaaaaaaaaagggaggataaaaaaaaaaaaagaggaagaagaaaaaaaaaagagaagaggaaaaaaaagaaaaaaagaaaaaagaaagaaagaaaaaaaaaaaaagagaaagaaaaacaaaaaaaagaaaaaaaaagaaaaaagaaaaaaaaaaagaaaagaagaaaaagaagaaaaaagaaaaaagaagaaaaaaaaaagaaaaaaaaaaaagaaagagaaggaaaaaaaaaaagaaaaatgagaaagaaaacagaaaaaaaaagaaaaaaaaaagaaaaagaaagaaaaaaaaaaaaaaaaaagaaaaagaagaagaaaaagaaaaaaaaaaggaaaaagaaagaaaaaaaagaattaaaaaaaaaataggaaaaaaaaaaaagaaaaaaaaacaagaaaaaaaaagaaaagaaaatagaaaaaagaaaaaaaagaaaataaagaaagaaaaaaaggagaaagaagagaaaataagaagaaaaagaaataaggaaatgaaaaaaaaggaaaaaaaaagaaaagaatgagaaaaaattagagaatagaggaggaagaagaatagaaaagaaaaaaataaaagataagaaaaaaaaaagaagaatgaaagaaaagaaaagaagagaaagaaaaaaaagaaaaagagaaagaaaaa

SEQ ID NO: 434901 - DNA, 62 bp, Oryza sativa
tcttgctccatctatcttcccatccaaggagtgtggaacgccacacggatttattttaaata

SEQ ID NO: 434902 - DNA, 53 bp, Oryza sativa
tatagttgaaatgctggtaccgccctgcaggtacccggtaccggatatccccg

SEQ ID NO: 434903 - DNA, 470 bp, Oryza sativa
gtgcaatgctagaaagacttgtattatgaaacggaggaagtactgtatatgtacataaactgcaaaaatgagctatagcacaatgaaaccacatcttggatgtgtttccaggatgtggtttggtgtgatgtgctaattcttaaggattgttcctagtggtggtgtctggatttcctacccaagttgctgacaaccaagatgaggatatggcgatatgctgattgtcatcaccgatagagacaggttgtgcttctgcttctgcggactttaaattttggcatctttccttttaaatgctcgtccatcattattccgtatatattttttgcattctggtgccagtttttggttccttaatacccctttattgtcttcaatgcttagttctcaatgacctatttggtcttcactttacttacatgtcattcttctgtgtctttcgattcttctacttctcttatctctcttta

SEQ ID NO: 434904 - DNA, 456 bp, Oryza sativa
ctaaaaggcggcaaaacaatatatataacaataacattgataagttaagtacaagtcaatgtaagcacacggcagcaatgatccgttccacgcttccagcaaacttctaaaaggctatgtggtactctttcaaaggccggggctgggggtgatccaaacttcagaaatagggagataggtcgaatacccacgctcacaagaagggaaaacatccctcaaatatctgattttgaaagtcgtaaatccctacacctttccaaccttcccgcctagaaggaaaatgatcatcgttacacaagcaaggtgttgtgaagtagacacagttggacctaagctctggaaaatccctgatgggcaaacacaccgaatgattttgtccaacaaatatcgcatgctcccgaagggctgctgctgcaaccgcagatcttaatcttaccaatctgttattttttaacc

SEQ ID NO: 434905 - DNA, 171 bp, Oryza sativa
cttattggctccggaaactcactttcatttctccgatcagcattattgccaactgcttacatgactgccacaaatgaaagaattacacacgatccgtatatacatcaacaaaaaaatcgccatctgttgcattttgctctacaccagcgtgttgcatgtaccagtggaggg

SEQ ID NO: 434906 - DNA, 469 bp, Oryza sativa
cgctcagagaattcgtttacaccactgcctgccgccctgtgaggaccgtgaggcctgccatcacttggccattggttgcctcactggcttccacaacatataccgaacatgctgcggatgcatggcattaggcaagtgccataccaggtacaccaggccggtactgatttccaaccataacaactgcggattactgccagtgccactgcttcagtctaaacacaatgccaaggaggtgaccaagtactgcaagaacatcattggtgcaactgacaggaatgactgcggctgcagtacatgtgcttttgtcagctttgcttggcagttggtgacctggtggagcatgcaactttgggacaactgcccacttcaattcaacttgtcctgccctgtgcacgcaaacaaaacaatgcgaggctgccgagctgctgcctgctgttggcacatacagacatacaaatgacgaacc

SEQ ID NO: 434907 - DNA, 472 bp, Oryza sativa
gtacaatctatggttttgatttaacctttgttcatgtatatcaaagagagtatctgctttgctcttcaacagttccaatggaggggaacattcacatctgtgaggtgatatgtatgtatataacggacagaaacgagaaaaaaaatgaaatgtacatggctatatctagctggatgaatatggggaaaaaatgaacatatagaaaagaatgcaacagagagaaaaactttcttttgtcaggcttctcacttttcaactgttactagtatgacattatttggaccagatcttggcagagcagcttctcatgatcctggacgctaccaagttcaagaaggcatcattcacactaggatggcaaacaaaaagaggagcagccggacagttatgttattggcacaacagcatccagattcctttgaagcaaccagcccattgggtagttgacttgaggaggttccagttcgaaatt

SEQ ID NO: 434908 - DNA, 363 bp, Oryza sativa
gagggaaaaaaaccaacaaaatattattttggaaaaaaaaaaaacccgggggccaaaagaaaggggggaaccccaaaacaaggggtttttaaaaaaaaaaaaaggggggcccccccgggggggggggcccatgggggagggcaaaaaaaaaggggggggccctccaaaacaaaaggaccccaaaaaaggttaggcagggaaggaaaagccggtttttcccccaaaagggggaaaaaaaatcttaggccaaaccgggaaaaaaggaaaggaaccgggggactaaattggggaaaaaaaaaaccccgggggggcccccaaaaagggaaaaccgggccggggcggggtcccccaaaaaggtaaaac

SEQ ID NO: 434909 - DNA, 458 bp, Oryza sativa
aaaccaaccaaaatgaacttatataaacaaatgccatatacaaatacttatagccgcgcactccatgtacagcttgaacaaattacaaaaaaaattaactcgcatacaagtatacaacatgcatttacacacagaaaacaaatcaagcaggggaaattaatacataaccaaaagattaatcaaatcaaatgacccactaaatatacaagcactggcagcgtccttaattatgccgaaggaggaggtgccaagaacggcatcggcacggatggcatcggcggcagcgtcaccttgggcaccgccggaatcgacggcatcggcggcagcgtcaccttcggcacggccggaatgggcggtagcacggcgttcggcacggcgggcacggccggcatcggcggcaacgtcgccgtcggcacagcgggcaccgcgggcatcggcggcagcgccaccgcggggac

SEQ ID NO: 434910 - DNA, 465 bp, Oryza sativa
gatgagttcaaactgaagatatattagtaaaaacaacagagaaataaacttgcagtagtgtgattgtacaaggtccagaccaacaacaggtttacaacaccatacaggattatttttgaggtactaaacctcataaaggagtgcaggtagctcctgcttcatattaagaaggaaaaaaaaccgaagagttgccacacaggattatgcatggctgcttattccactatcaaaagaaaagacctatatgaactcactcactcaagaatgccacaccaacaatggcacattattggttcagtaatagtaaaccgcagtttcatccttgggggatgaaatggttattccgaggctcgctccgcttgcatattcccgggcaagggaagcgaagagcagcagtagtagtgtccactttcatcaaacctgcgtgtctgacaaagatgaatctcgggaatgagattttcgccc

SEQ ID NO: 434911 - DNA, 396 bp, Oryza sativa
cccaaaaacaaacccaacatttttttaaaaaaaacccccattgggggagggcacggattttaaaataaccaacccagggggagggaaaaggaacaccggggggaccaaaggggggagaaacccaaaaccggggggggggggcccaaaagggaaaaaacccggccctgggaaaagtttttaagcccgggggggggggcggctgcctcggggggaaccccggccaggcccaaactaggcccttaaaggggggcctaaacttgggggcaaagcccccccgggattaagggggacccccctgggggctttttagccccccaagagaaaaggtgggggaacccccaaaaatcttgggacaaaggcccaaaaaaccctttcctctcggggggggggcccccc

SEQ ID NO: 434912 - DNA, 400 bp, Oryza sativa
gggggggggacacgaaacaaccaactaaattgaacacttttaaaacaaaggttaaggtacaccatgatttattatgacggggaaaacccccaaaaaaaaaaaaaaaactttcacacaaggcaaacaaaagtaaagtttaaaagcagtttatacctgactagaaaggattatgtagtacctgcaaaagggccacaagggggacaaactggaaccatatacgacgcatacacgagggatattatggatcaaaaaccacggaaaaaattaacagaaacgggcccccatgacttaaaaaaaaaaaggggattaccatgcgggggggacacttggtaaccgcaggggaaacttaagggtacagggaccaacttagttaaaattaggccaacttaaaccgaaaagg

SEQ ID NO: 434913 - DNA, 353 bp, Oryza sativa
aaccaaaactttttaaggggggaaatgggaaaaaaaactttcaccccaaaaaaaaggttagggaaaaatttttaaaaaagccctttgttttgcccccatgggtggaaaggtgggcaaagcacttaacaaaaaaaacccgggatccctttaaaccaaacgggaaccaacgaaaaaaaacccggggcttttttgggggaaaaaacccaaaggggggcggttttttttaatttaagggtcctttcctcctaaaaaaaggggggatgggaaagggaaaggggaagggaccttggcttaactaaagggaagggggttgcccttcaaatttttgggggaacccaaaatgggggcaaaaa

SEQ ID NO: 434914 - DNA, 330 bp, Oryza sativa
  unsure (1)..(330): unsure at all n locations
agattcacgacccaaanccactatactacaaaattaacccttcttactagtaggatgatgaaatgatgacatgaaacccttactatttttccaacaaaaccaaacctaccattccgcttcgtggatgaaaccagacttgatatattacacatagattatatgacagtagcttccccacaaaccggctctggacatggaagaaaggaagaaagaccaccttgtgcttaaagcagcacgaaggaacaccataaacgtggctaatgcgccgagcactactgaccgcaacgacaacggttgaacgacgccttaattccttgggatccgccggct

SEQ ID NO: 434915 - DNA, 456 bp, Oryza sativa
gaacaaataaacatgatagctcatgttcctctacaccacatttgttcaccatgtccatgagttacctaacctagatattgccaatcataccaaggttcaaacttactactataatgcgagctagtatggtacacaaccgaccaaaacatgctcaataaacttgtaggggtactcattgcatccatttctgattcagcgttccaacaagaagatcccaattttactaataagcacgaagagaacacagaaagagtgctcactaggggaagacggccttgactctctcaacgtccagcaagtgctgcgttggcctcggcaccccgagcttgatctgcagcttcatctgctccgtgttcaccccaggaatggatccgctgcggaaggccgggatggagttggaggtgatggcgtccctgcaggcgcgcacggcggcggcggtgacttcctgcccgtgct

SEQ ID NO: 434916 - DNA, 463 bp, Oryza sativa
agccaagaacacacacttctgatttttattgctaccagatgcagcattacagggccaaacagtaattagactagatcatactactattattaagagcaacattttattattattggaacaagacagcttgctcttaccaccactggttagcatagaacccagagaggggggcacacacccacactaaaagagtagttcatcatttacagtgaggacggcctcgagaagcactgaaattctcataatttacatcaacctgacgtgatgaggtttcaaaatggccaagttgggaggcattgcggcgacggcaatcatggatggcggatcatgctcggggcgcaatgttcatctcgtgatctttcttgctttgctatggatctccagcctcgatggtgtctcagcattcttgggagctgccgatatggcctctcgagatctgctattagaattattgctcttgtag

SEQ ID NO: 434917 - DNA, 360 bp, Oryza sativa
aatattaaaatatatttttaaaaagaaaaaaaaaaaaaaaaaaaaaaaaaaaaaaaaaaaaaaaaaaaaaaaaaaaaaaaaaaaaaaaaaaaaaaaaaaaaaaaaaaaaaaaaaaaaaaaaaaaaaaaaaaaaaaaaaaaaaaaaaaaaaaggggaagaaaaaaaaaaaggggaggtgaagaatcccaaaaaaaaaaaaaaaagggggagaagaggaaaaaaggaaggaaagaaaaaaaaatcggaaaaaggccggctcaaaaaaaaaaaaaccataaagggagagaaaaaaaaaaaaaataaaagagcaagccaaggtgttcaaaaaaaaaaaaaaaaggaataaaaaatttacaaaaa

SEQ ID NO: 434918 - DNA, 425 bp, Oryza sativa
cccaaccaagaaccaaatcaatcataagttatactcatacatcctgggatcctatccctttaaaaggacgatgatcctgcaccggagggggggaacaattttgggaaaaacagcttgaacaaatccgctttttaattgttcacaatgggccccctttttttctttgcaaagggcaacagattacagagcagggggggattacacatttacgcaaactttacagtccccaagaaacctaagagctttttgggcaggagttacgggccgccaacacgacgggcagggtcacagtttttaaggctttgatccagcactggaaaaagctaaggaactttttcctccccgggggcaagccctcctgggcggcgtggagcggccggcgggggccctcggcggcggcggaggctttgggggcgggctgcggc

SEQ ID NO: 434919 - DNA, 400 bp, Oryza sativa
aacccaaaaatcctggtacaatatcaactaagtttaatggctaggaagacccggtgaaacatgaaaaccggggactgccgggcgagttacaaatcatttaggaaaagaggtaaaccgatcctgattcctaaggggaacccacaaaatatcagggttggggggcccgggggcccgccccgaatggggaacagaggggtctggaaacatggccgggggccatgcaagaaacaaattggggacttttgaccacgggcattggcaaggggaagagtgcccccatgccctggaaaatccccctggaagcccaaaaatgggaccatgttccctcacttcaggacagaaaccggggaacatttccttggtttcccattttatggacatccccaggggaaaggttttt

SEQ ID NO: 434920 - DNA, 128 bp, Oryza sativa
gcagaaaaaggtaaaatatggtattctcaatcatccagagttaaatgatcaaaattgtatgaagctccttatttttctctctgaaaccctgccaatgaatggcctgaggaaaaactatcaacagttaa

SEQ ID NO: 434921 - DNA, 459 bp, Oryza sativa
aaaaccatgacacacattatcagtactaatttgcaggcacggacagtcttattacagagcccacgggtacacatcgaccaataccgatgccggtttatttggtttacaattttccaccgaacatgaactagaactagtaggaagtaggagaaaaacacattttaaaatacaatggtgtcacagtacatttgatttgaatctggtgtgctccagttacggcacagtatcctggatatgaacggctacagtaaaaaaagattagcaaagcgtagtagtagtttcccagcaacagtaacttacgacactgttagtaccggggacagtagtagcgactaacgttagacagactcagattgctgtgcaaagataatgttatctacgtttactgcagaggacctgcgtcccagcaaggcatgttgaggtccaacggcgtagtccggctccggtgctcctccacag

SEQ ID NO: 434922 - DNA, 405 bp, Oryza sativa
aattaaagtgcaaaaattatcatttcgtctcatatgcatgatatggcagatacaagttgtgcgggcaatgcaacggcaagcccacttttttttttatctcgtctcctcgtgaactctacatatatagagatttatcacaagcgaggaaattaattaaccgaggaaaaattacacgcagccatgcaggtagaaaaactcgaaacccacatgtcagcgaaacaattttgacgccacataggcccttatatatatatataagcttctcgtgctttagtattcgcgctcgctcgcccatgccgcggcggcgatggcggcggcggtcggcgggctagccacggtaggtcggcgttggcgcggcggacgcctgctgctggaggagctggcggcggaaccactcgatgaagt

SEQ ID NO: 434923 - DNA, 83 bp, Oryza sativa
aaaatgaaatttagaaaaatttcaaaaaatgaaaaaaaaaaaggggaaaagacaaaaaaaattgaaggcaaaaacgcaaaagc

SEQ ID NO: 434924 - DNA, 474 bp, Oryza sativa
gataacactaaaaaagtgtcgtatataaaaggcattaccaacaggagatttctagcacaacaacttacacacccagattgttagctaattaatcatacagaaattccagaagaaagtcactgtacgaagcagttcagaaccttgatgaactgtacacaaacaaacaagcgccaagttatttacatggagatcattgtgggccgaccgaactgatcattttggttcaaccctggacgaagatgggatgccaccactgtaatcaaattgagactctccactgtatggatgacgcggtgtcctgctgttgtagctcatcgagtttgatgccgagtcgacctttgggtttacgcctgccatcttcatgatcttctcaatctccgccaccacctcactcattgatgggcggtccattcctgccttcttcacgcacttcaaagccaagtcgacatacagttcgaaagccgccagcgacgt

SEQ ID NO: 434925 - DNA, 109 bp, Oryza sativa
ggacttaaaagacagggccgctttttgaattaaccacgacgctcgggtaaagtcaaaccggtggcaaaacactggtacgaagtcacaattaatataagctgtccctgcc

SEQ ID NO: 434926 - DNA, 174 bp, Oryza sativa
aaggtcaatgctaagttttttagatgagaaatatttccacaaaaaagagggaaactaaatacagaagctcataactgcgagccattcctttacacagaggtacaatcaaactggaatatttgttagcaaatttttctttttactgaagttacccacctagtctgtaagtgcaaa

SEQ ID NO: 434927 - DNA, 453 bp, Oryza sativa
  unsure (1)..(453): unsure at all n locations
aaaattatcaaccttggaagccacagaccagtcctgtaataggcaccgggtacaagtagaatggcacctccctaaaactcgagggtcccaacattcatcactgggtgcattgtacaaacggcacacaggttaacagttccacgacctcaaaactcaattgtcaagaagctcatggccctagaatcacgctaatggcacttcctgattctaattgcttaacaaaaaccacacacctncacgctaggcattgcaggcgatctttcaactgctagcctcagccaaaaaaacaagccgctgactatgaataaaaaagaaacccactaactatgaataacatcctgcttatcaaccggctcgtctttcagaaagatgtgaagtagttggaagcaacaattgctccacctgcatttttacctgagattgagctttgttaagagcctgaacctgagcttg

SEQ ID NO: 434928 - DNA, 63 bp, Oryza sativa
caggggttggcataattccaagagtaaattatattgcaatcccattattttaagaaaactcaa

SEQ ID NO: 434929 - DNA, 143 bp, Oryza sativa
aaaacacataaacaggggggggatactattctggcatacgggccttcccttagggggcttaaacaagcttcttaggcccaggggggaaaaggattactttcaaaaaactttcaagggcggtcaaatcacaaattaaacccttt

SEQ ID NO: 434930 - DNA, 320 bp, Oryza sativa
cgttctcgccggcgcaggaggcgctcctcatggtgcaccggcggatcctggagacggaaccagacgacggcgatgaggatggcgagtatgggcccagggccaaggatgccagggaccgaggcaaggtgaccacgcgcctcatcgtgccgcgcctccatgttgggtgcctccttggtaagggtggcaagatcattgagcagatgagggccgagaccaaaacgcacatcaggatcctgccacgcgaccagcacacgccgtggtgtgtatcggtgtcggaggaggttgtacaggttgttggagaggggaattgtgttaaaaag

SEQ ID NO: 434931 - DNA, 141 bp, Oryza sativa
agaatagcggccctccagcgtgttgacctagggagcccaccaccttcaagccgaaccggttggaacgcgccgcttggcggtccacgaaaaaggtcggggcgggtcgtcgcagcttcaacgttgccctgaggaggagggggc

SEQ ID NO: 434932 - DNA, 448 bp, Oryza sativa
ggggaaaaaaaacccccaaatttttttttcccaaaagggtcatcccgggggggggggttttaagattccgtaaaaaaaaagggggatcttttcaggaaacggggggtttttttttgagaaaaaaagggggggagaggcaaaaagtatttggggggaaaaaaaatttgtcccccgggggggttatagaaaaaaaaagggaacgtgtggcgctaaaaaaacaacggagatttaaaattggaaaccctgggtaactggggggggttaatttctttatacagggggaattttggggaggggaattttttgggggagggtttttaaaaaaaagacgccttctccctaaaaaaaaaaaagggcccccttctaaaaacctggggggggccccctccaaaaaaaattgggggaaagagggggttattttataagtccccccacagggggggagggg

SEQ ID NO: 434933 - DNA, 419 bp, Oryza sativa
ggcacaaactactaccactaatacttaggtatacaaggggaaacgatctggttcatacagcaaaatcatcatgggcacgttcatacatgggacatcagggaaacaacagaaatgccacataccttagcacaaagtcagaacaggatagggtttcggagcacttgaggaacgcggggaatgtcatgttatccaaagctaaaattgcttgggggagaagagaaccctaagggtcactgctgctgctgctgctgttgcacatttgaagggttgccccccatgtcagtctcaattgctttggattccaaccccagatgccaaggttttttaattttggttttaaagttttgagaattttttagcgaggcctctaaaacagttgaatttaccgctgtgggaaggaggcttgcccaaatcatttt

SEQ ID NO: 434934 - DNA, 432 bp, Oryza sativa
agctagctagcttcagatcatctaccattcgttttcctagataatttacatatatggcagtaacaaattttcactaggtgcaagcaacagttgcttgcaccccagactgcagtctggacaaacgttttcaaccacaaaataaaggccaatcggtccacatatatattgggaggctttctcggtacagttgaacaatgttgccatgcgtagccttgtagattgcatcttctttatgattcaggcgacgcaattgagtcctacacagcccattcacaagcttttcacatgcttcctcccttttgccttcttgcggaggagttcagaggggactttgtacaagtcctcgtcaactggcctaacaaccctaggccttctcgatccatggacaactaccccaccatcaacaacaacagatggcccattccttcttct

SEQ ID NO: 434935 - DNA, 126 bp, Oryza sativa
aatggtaatcaaacgtatgcataaataaaggtaattatacatcaaggtgaaaaaaaatgtattcatatgtgtcatcgcgagacctgaaaaacaaaaaaaaaaagggcggtccttttgcgattttat

SEQ ID NO: 434936 - DNA, 144 bp, Oryza sativa
ttttattttgggggtttattaaattttattttttttttattttttttttattatatatatttaaatatatatacatttatattacaattaacctcatcaaaaaaaaaaaaaaaaaaaaaaaaaaaaaaaacaccccaaccaccc

SEQ ID NO: 434937 - DNA, 405 bp, Oryza sativa
aagatcaaagtgtctgtaggattcatttaatgagcctaagacaagtaccactacttgtcacaccatcagcatcagttcacagcgttaaacattgtaactagcaaaaaggataaaggtagaaactggcaaaacatttcaagcttttccttgcgaaggcgtcacatgatcacttcgtatcaggtatgagtattgttgtaggacagcaatctgatgacagtgaaaaaaaaaaaaagagccattctgaaggggaacatgcccagctacctccctaacaaaagtgtagagaaaagagtgcctatttcctctgctgataaataaactaccatcatgtatataggggcctggagatcttgttagacattgttagacaggaggaatacaggatggtaggggaaaagaattatt

SEQ ID NO: 434938 - DNA, 72 bp, Oryza sativa
cacaaacgcatggaggctaaaccgagaccgcaacagaaaccacacaaaagaaaggccaaaaaagaaaggaaa

SEQ ID NO: 434939 - DNA, 77 bp, Oryza sativa
atccttcaaatcactcatatactaatcataaatatcggaaccatgtttgacgtcaaaaaacttcaccctattttaac

SEQ ID NO: 434940 - DNA, 304 bp, Oryza sativa
ggggacataaaccctttgaagattagttacggatttgggttaacttgttaagaaacaaaggggcttaatatttaactgaagttttaaagttcaagggaataaattaaaaagggccacgttttaaactaaacccaaaaaaaaggggtgcaaaagctaacacaaaatgtgggaaaaatttttttcctggtcaaaccattttttggtgccttgaagaaaactttgttctaccccctgttggatgccacgtttttgctgaataggcaacggttgtaaacaatttgaaaagggctttgcccccatgaaa

SEQ ID NO: 434941 - DNA, 236 bp, Oryza sativa
aattaatatttaattaatatataaactattaaattatatttaaaaaaatatacaaaaaaataaaactaaaaaaaaaaaaaataaacaaaaaaaaaaaaaaaaaataaaaaaaaaaacaaaaaatataaaaaacaaaaacaaaaataaaaaacatacaataaacataaaaaaaaaataattaaataaaaattaaaaaaaaaaaataaaaaaaaaacaaaaaaaaaataaaaaatcaa

SEQ ID NO: 434942 - DNA, 336 bp, Oryza sativa
attcacaacaaaacaccattcatttggcccttgattggcgtccggccggccccagttacaacaatgggggattttaattcccaaaaaaaaaaattggccctttggaaattaagtaaacaaaccgggggtaaaaccctgtccacatggcaaatttaaagaaaatctggggaaaatttttgggttttggaaaacacaaaccaaaaatggccccaaaacccctgttcgaaacaattaggacaacaggtgggccaaatttgcccccccaaagcctgtaaaaagggggggaaaccaccaggggccctccaaaaaagcccgttggggccccccctcgggggg

SEQ ID NO: 434943 - DNA, 127 bp, Oryza sativa
gggggggccttaaaaggccccttaaaaaagggaaacaggcccattacagcttgcacaaaacatgaattcccccaacttgtcaacaaaacacacaggccaaaagagctccaaaaagcgatagcccggg

SEQ ID NO: 434944 - DNA, 305 bp, Oryza sativa
ttgttcgccaccaccgcggcgccaccacccgcccttccagcaagatcgtccacgccgccggctgcgtctcccgctggtccacgctcccgcccttcccagacgacgacggcgacgacgacgggtccgctccgcctcgagcccttcccctgcgaccccatcgagcgcaggaccggcgccaagcccctcgccctcgtctcctcctccgccgccgaagcctcctccccctgctccgcggcggccgccgcatccaccgtcaccgagaggttcttgccggaccttctcgccgcggctgggagggcgaaggc

SEQ ID NO: 434945 - DNA, 265 bp, Oryza sativa
aaaaaaatcttttccctataattgggctaaggggaaaaatattttttgggggggcataaagttccccaaattcaaaaaaatttttggaaaaggacgagggggaaaacaggggcaaaaaggaaacggggggcaaacatttgaaaaggggggggggaatttgcccgggaccgggaatggggggcggggggacatcaattcatccaaggggccaacctttttcctaaggggggccagggggcgttaccgaacgggggattgggggggg

SEQ ID NO: 434946 - DNA, 492 bp, Oryza sativa
gaacttcatcaccaaagtttataaaaaaagactgaactataattcatgtatggccctaatatcactataccagcaaaatggccagtggtttcactgtcatgtcaatggtttacatgtgaattacaaatgtgaatttcagtttactgtaacagttcccatatggattaagctcaaaacaagtaaaaacctgtcgaaatctttgtcaccctttccaataggttcatcaagttaagcaacctctgaacctccttggctccttgccattgtctgaaatgcacctaccatctcttcccaaatatctttttcagattctctacacatctataaactcatttcctcatcaagtgaaacctctaagagaaggtctggctgagcatttgagcatacttttagtttattagtatatggtgatcacttgaagcatgaatctgaaatgtcgtatccccagcatttcatattgcacttgcaaggcgcccagaatccatcgttcct

SEQ ID NO: 434947 - DNA, 403 bp, Oryza sativa
catcagtgctttcactgaagtgaccatgaaaagtatgtgttgtttcttgtctagatccggaatacatcgtacaagacacatgtgtacatgaccgatgactccgacgagctccattcgatgcagctcgatcgcccggtaaaacgaaacaatatgccgggtggtaacggagtcaggatcagttgatacaatgttcagtatgatacgtacataacacgaactgtgtcccacgagccatttggcaggcaccacacacaaccaacacccaaatacccccaatcctacctgaaatcgtgtcaaaagaaaagaaaattccaacctgacacgagtgatcgggtgctgcagctaccagggcgtggacgtggtccggaagcgcgcctcgctcctttggaccgccgccatgatc

SEQ ID NO: 434948 - DNA, 319 bp, Oryza sativa
aacttcaaaacgtactgggtttttgtatacacactgacagatggtttcccccagagaatcgaggtttgtcgctatgatagttggaccttccctacctccactatttgactctgggcttttagcaacaccgagagcaaagacgaggccacgaaaagcaccgtttgcttttgtgggatatcccccatcctcggtgttttttactggcgcactagttgtactacaaaactgccggcagcgatcgcctgccgtcaaaaagtgggggcttgaaacaacgtttaaactattttttccttgacacgcctacaagaaccggggacat

SEQ ID NO: 434949 - DNA, 104 bp, Oryza sativa
tttttttttgggggttattttttttatgctttatccattcttttttaattattttttattattttttttatataataatttttattctcttctttctatttttc

SEQ ID NO: 434950 - DNA, 172 bp, Oryza sativa
aacagcaaaggaagaaatgcatatttagatgcacaactctacgagtctcacggtgcaagcatagccatctgaccacaaaaaatgttgagccactgcacacggtgcagtggcaagtggagcatttacaacataccgagtttctttttaggagggaaaaactctacgagtctta

SEQ ID NO: 434951 - DNA, 89 bp, Oryza sativa
aacttaacacatatacgattggttcatgccaaaatttatactccggcatcatgccacagaaaatgtactctcttttttctagttcggag

SEQ ID NO: 434952 - DNA, 107 bp, Oryza sativa
ggaaaaagggacccaaattaactggtcttcattggaatggaaagagggggaccggattatggcgaaccttaaaccaaggttggacccaaattttaatggggcttgaa

SEQ ID NO: 434953 - DNA, 107 bp, Oryza sativa
cctcaagaagaaatcaaatagtattcatatttttccaactaaattcccagcgaaccaacgatggggcccagtgtcagcgcccgccggccacgcctttgacttgtgcc

SEQ ID NO: 434954 - DNA, 777 bp, Oryza sativa
ttttttttttttttttttttttattttttttttttccccaaggggaaaaagaaaaattttaaaccggggggtaattaaaaaaaaaatctaattaccaaattaaaaaaatttatatttaattaaaaaaaaaaggtcccaaaaaaaattattttaatttaaatcaccccccccttttttggggttaaaaaattttaaaaaaaccccacggggggtaaaaaaaaaaaatttttttgggcggggaaaaaaaaaaaattttttttgctttttttttccagttttaaaaaaaaaaaattagcttttttttttaaagggggagatttttcatttgaatcaaaaaaaacaaatatttaaaaaaaaaggtttaaatattatttttttttaaaaaaagtttcttttttttttaaaaaaaccattaccttttttatttaatggacttgcctgggaataaaaaaaaaaatttttttaaaaaaaaaaaaaactttttgtgggcggtccccataaaaaattttttttttttataaaaatttaaattgggagggaaaaaattttttttttttgggcccaaaaaaatgacccccgggttttttttaaatttttaaccaaaaaaggggaaaaaaaaaaaaaattttttttttttaaaattaaaggggtgttgtttctccctttaaaaacaaatgatatttcaaggggttaaaaaaattttgaaaaaattcaataaagggtaaaaaaattgtttttttttttgctaaaaaaattaaaaccccgttcttttttttt

SEQ ID NO: 434955 - DNA, 335 bp, Oryza sativa
gcacaaaaggacaagcaagtaatgtcatcataactgatacaactcaaattccacgaaacagaaccactgttttacatcctgaatttttacatgcctacacaatttacagatgaagcaaaatcagatctagagagacaagttctttttggcattaacaggcagacggctaagcatgaacgggactggattagtaatatcaagcactcacgcatgatggctcaatgatgctgaactgcaaccatcacagggaatctaatatgacggagaatacagtaacatggttgaaaatgggcacttgacgggcatcatcagactaagcaagatgtgcatttgat

SEQ ID NO: 434956 - DNA, 378 bp, Oryza sativa
ggtcaaatgaagagacctcttatttaacttatacgaaggccattcaactagttacgagaagatgtctagctacaacaatacatcacatttttctctgcatgctagctgctacattggattgttggctacagctcgatacaacttccttaccctactatatatatacatatacaaggccgaggaatccaagacaacacctgaatagctccttcagggttggaacggaacgaccgatatattatcacttcactggccaatgagctctactaacaaagcctccactccagcaccgtgcatgtggaatggttacattttatccaccaaacacacaagttgacagcaattagcagctcctgatgatcaagaatctgatctact

SEQ ID NO: 434957 - DNA, 424 bp, Oryza sativa
  unsure (1)..(424): unsure at all n locations
gtggggctaaagaaatgatccagtagtgattttcatgagataaaaacactgaagctagaacaactacttttgatgaactgaactaacttttgtatgctgctcttttggtgtttcatcaaacactgagatttaacttgtggaggcacttcctgaaaattcaaatcagaatgcaactgctttcatcatttttgtaatcattgactttcctgttgctgtagtaactgttggccttattaaaaattagagctcaagatcatacactttgaaaggtttgaagattgtggtagcaaagctcttattggttncaggttttatttttctttgtcatcctagggtttgataattggtcagatccatataattgaccacataatggcgtatggaatcccggggtccaaataattccaaatgcccatgtgctttt

SEQ ID NO: 434958 - DNA, 58 bp, Oryza sativa
atggagcacaaacccttattaccttatgaagaaatctctacaatggtcagaatttcaa

SEQ ID NO: 434959 - DNA, 448 bp, Oryza sativa
tttgtgtttttttttttttttttgacgtataagatttatccacatcaccacaaataaaacttttactcgtgatgacatggacaaatctctcacattcacttcataatcagacagtttgtcttacatataaagtttgcgctacatatattccccaaggctcccctcctactaatattatacacaacaccaccagatggcacacaatgaatatgaatcaatggcaatcagcaatcattacatgtaaatgtcatgcctggattggacctacttgatttgggtaggacgcagcatatacaaacacaacaacgttaattatagcttccaccatttcttgttctccattgatttcgcaagctcctgggccagggaagcaaaattctctgctccactctcaagctccgcggatcgttggcttattctctctagtttctcctgtcgctgcatgagc

SEQ ID NO: 434960 - DNA, 518 bp, Oryza sativa
ggactattagttctttttgttttatcagaggatcgtgctatttcggttagaggctatggtgatttgcacatgaagaatcaaatcacaggtgcacagagggatgctggtgaagatgaagacaataatatcagcgcagaagaagagagagaaatttgctccctttgttgggcatcgcaaggaggttcaactgttgctgttggttatataactggagacattcttctgtgggatatgactgcaagatcctctaaacaagacaatagaagtgatgaaccatctaatgttgttaaacttcagctggcttctggtagtcgtaggcttcctgttattgtattacactggtcttctcgttctgctgattctaacaaaggagggcatctctttgtatatggtggtgatgatatgggttccgaggaaagtctgacggttctaagcctggaatcaactactggattagagtcaacaagatgtatgtcacgaatggatctcaaacttgatgggtccttttgctgatatga

SEQ ID NO: 434961 - DNA, 458 bp, Oryza sativa
cgtcagcttcggagcctcctgttgcggccgccttcttttttttgttgttttttgatttttcgggtttatatttttttattttttttttttttttttttgttttttctttttttttttttggaaaaaaacacccacctaaaagcatattttgacccaaagcaggaggcgcgtcaccccccctacgggacgtaaacacctcccaccaaagatgaacccaactgtgcaaccggggcggggcggtaaaaggaatttcaaaaggtttttgcccgggaccccccccgaaagggatggctttgaacggtaccctttcctcctccaactagctgtgatgcggggaacacactaagatcctccgttgatggagggggaattgccggggggcccaaaaagaaataaaaatgcccatccccccgctgcccaatgacaccaagagggccgccccttcattcgggcaaacc

SEQ ID NO: 434962 - DNA, 385 bp, Oryza sativa
ttcgttcgacatcttcttcactcctcacttcccccactttctctactcctagcatagcagcctcactttccctcctcgatcgaagcagcaggcggaggcggaggggatcggcgatggagcagcaggaggaagtgccaccgccgccggcggggctggggctgacggcggaggagtacgcgcaggtgcgggcgacggtggaggcgcaccaccgctacgccgtggggccgggccaatgctcctccctcctcgcgcagcgcatccacgcgccgcccgccgccgtctgggcccgacgtccgccgcttcgactgcccccaggtgtacaagcacttcatccgcagctgcgttctccggcccgacccccaccacgacgacaacgggaacgacc

SEQ ID NO: 434963 - DNA, 426 bp, Oryza sativa
tgtgtttttttttttttttttttttttttttttggtactgcaaccaagaaagttattactgaaagactaaaccaagaagaaccaccttttatagagattctagaactccattttttttgtatcaagatcaacactgcagcaactaaactcccctgtgttcttgagggaatcactttcaacaagggccattattttcagaggagaaggcaaaaacacttttgtgaaaaattcagagaaatgcaaacgctttgtgggaagcatcgactccattttggtgggaccagtgcatgacgtacacgttgtcctcgacaatggcgtccccggtcttgaggtccagggtgtgcgtcctggcctgggggtaaccgcgggcaaagcggaaggtgcccgtgcacgctatcacgggtattttccgggcctttgtaaagg

SEQ ID NO: 434964 - DNA, 152 bp, Oryza sativa
agcgcgcgctcttttttttttgtgtgtttttaaagcgaggagtggatacataagatctaccaacagcagggctttggcattgtctaccactcatcataacacagacctactatctatctgcttgtgagtgcgctgaggatacatatctgcaa

SEQ ID NO: 434965 - DNA, 242 bp, Oryza sativa
gacccaggcgcagaggcaccaggccagcaagtccgcctcctccttaccgtgcatgtcacgcttccttcacctgcctggtactctttacactgctcctggatacctacctgtagactcgacagatcaagggtctctctagcagatgcgtctcatcccttctcgcctctcattatacagactcttcttatctatatactgtggaaggcgatcttgggtggggagagagcaagaaccgaagctga

SEQ ID NO: 434966 - DNA, 374 bp, Oryza sativa
ttttgtgtttacttcaaactagtattgtacatcttaaaattactataaatttcacggtacaatagcaagtggttatctgatacttcaaactagtattgtacatcttaaaattagaattctatgaagttccgctccagtatcgcgatagaaaacgaccctagttatgttgtcgcacagaccagttggctgcatcttaccacaaagagagttactttggtactactgctgaagcttggacaacacaacacgagctatatatatatagggtaaattttgataccttttggcacctatacggagtcaaggtactaccacatattaacagcttaacactacaatctgggatatttaccggtaactttttagtaccataa

SEQ ID NO: 434967 - DNA, 149 bp, Oryza sativa
ttgttgtgtactgacagggggtgtattttaatatcataatagagagttaacctcgtggatcaatcaaacagctgattgattaacctggacaaatgagcgaccatagatgcccgtacgaaaatgtccatgtgcattcgaaactgacatta

SEQ ID NO: 434968 - DNA, 161 bp, Oryza sativa
tgtttttctggcaccaaataattaccctatcttcctctttgtatatctagcacgctagttgcgagcaagaccaagatgggagggcaggaacagatagcaaccctagactgaataggacagactctctgttatgtccatcctgacagataccaaggatgctc

SEQ ID NO: 434969 - DNA, 91 bp, Oryza sativa
tgtttgtctagttccaaataattaccctatcttcctctttatatatatagaaagcctgttgcgagcaagatcacgataggagggaggggac

SEQ ID NO: 434970 - DNA, 149 bp, Oryza sativa
tgtgtgtgtggctccacctaatcacccttgcttacgactgccatcaacagcataccaggattgagcaggacacaggttggtgggatagaacggaaagcctccctcgaattcgggcattgctggcctgaaatgtccagtcgcttggaaac

SEQ ID NO: 434971 - DNA, 232 bp, Oryza sativa
ggtgttttaaactgaaagggagtgtgttttagaataatcatagaggggtaacatggtgtccaaaccatacacgcgaatagtaatcacacacgtacgacgattgggacgcacacaaacaaagtttatgttggtaggcgatacctcacagctaaaatatggggagacctttttttttcactttaacaatcgcaatccctgttgtacataccactaggtggactccattttgaaa

SEQ ID NO: 434972 - DNA, 182 bp, Oryza sativa
tgtgcgtgtggtaccaaataattaccgtggcttcctctttgcatctccagataacgagtagcgagcaccatccagatgtggggggggagacatagagcagcccatgatgaccaggacggacatcctgatatgtccaatcttgctgatacgaagcatgctcatgttcttaggaacagacggaa

SEQ ID NO: 434973 - DNA, 290 bp, Oryza sativa
actcctccccctgctcccatctcctgaagcccccctcctccccgtgttttagtagtagtagcaatatttttagtagtagtaattatttataacgattgcttccccatccacgagcgctcacgcccatcggtcctcacttcgagccgtttgcgttctccagttcgattcggttgagctcgctccgatctatccctttcctgctttcgatcagaagcagtcggccttgatggaggcggagcttgctggttcttcgtgcaaagagaaaatcatttacttactttggaattaag

SEQ ID NO: 434974 - DNA, 290 bp, Oryza sativa
tttttttttttttgtgttgtttttttttttttttccgtttgtcctctacatagaaaaataccggaaaacaaccaggagagggacggagagacgccaaacccccagtccgcaaaaaaaaacaccccccccgggaaaaaaaaaaagagggggaaaaaaaagggacggaaaaaaaaccacaaccggggaacaacaaaaagaaaacaaaggccgggggaccaacaaaaggggtaaacacgaaacaaaaaaaaaacacacggggcaaaaaaaaaaaaaaaaaacgccctcccccc

SEQ ID NO: 434975 - DNA, 149 bp, Oryza sativa
tttgtgttttaccaacatggggctttttttaaaaatacggaagggtgcaaacctcttgttcatttctaacaattaaaaaataaaccccactaaatgaccaatgaaagatccaggtacgctacttacacaggcaaaccatacctcacgac

SEQ ID NO: 434976 - DNA, 228 bp, Oryza sativa
tttgttgggtattcacagggggtgtattttcaaaaaataatagtgtggtattatcttgtttacataaaacagttgataaattatcattaataaaggagcgataagagatgcacatacgcaaactaccttggctaacctaaaatgacaccataaaaatgggcaggacaccatggatctgtagagtaatcatgatcacagttaactcttggcatatatgatggccagtat

SEQ ID NO: 434977 - DNA, 96 bp, Oryza sativa
ttttgtgtctgcttcctcatcaataccctatcttgctctttgtatatgcagcactccagtggcgatcacgaccacgataggagggtgaggtcatat

SEQ ID NO: 434978 - DNA, 211 bp, Oryza sativa
tttgtgtttttttgaagggaagtgaatttacaaggcataatagagtgcagaaagctggaatattaaaaacagctgatgagttatgagcgataaaggaccgactaaagttcaatgggcacgaacctcataacatggcctgaactgagcagtggtacatgctcagggagctgacattccacatattcccttttcattctgtatgccagtttcc

SEQ ID NO: 434979 - DNA, 268 bp, Oryza sativa
tccttttctgcttgcaaatgatcaccctttcctccgctttctatcaattatacaccagtccacagcgcgaccaataaccgacggcgtcgatcacagcgtttccctacgtcgatgagtgggaattctaccttatgacgaccacaatcgaaacaaggcggtatctctgctctaggaagaattttcctcatgcctccatagtggtaaacctaaggtacgaggaagagaaggaaaaaaaaagaaaatggataagtctgcccaaccccattaa

SEQ ID NO: 434980 - DNA, 271 bp, Oryza sativa
tttgggttttattcaaggggggtgtatttccaaagcagatcagagggcaaaccactcggatgcagctggcagcagacgatctagccgcgacacatgaggcacaagagatccagatgcgcagaccaccaggtaaaactggagctgacagcacaaacatgggctgggtatccagacctctgacgaaaaatcggtgatgactggtcctccttggactcgatggccgtgaccgcggcagaccactggattatctcgaccgggatgctgcagaaaa

SEQ ID NO: 434981 - DNA, 140 bp, Oryza sativa
tgttctcttggtaccggcaaattaccctttcgtcagctttgtattggtagagatcatgtgggcagcaagatattgatgggagggagatgacaaatacagaggacagactcgtagggcagacggggagtaatgtcgactgt

SEQ ID NO: 434982 - DNA, 105 bp, Oryza sativa
tttgtgttttattaagggggagtgaacttcccaaacaaactaaagaggtaataacctcgagcaattatggaaccagctcatgaacatggattcacaagcgacaac

SEQ ID NO: 434983 - DNA, 244 bp, Oryza sativa
tatgtgtttaattccaaacaaataccctgtgtatcttttttattcaatctgttttttttttctctcctgagttggatgtgtcggcttcgatgggcatatgtcttctgatcctttcttgtgcggctgttatatttctctaattttttgcctttttgacttacttttttatggttgctttttctgcatgtttatgtgttttaccttattgtggacagtgttacttgtccttaaaaggtgagagatg

SEQ ID NO: 434984 - DNA, 362 bp, Oryza sativa
gttgtttttttttttaagcgcaatttattacatttgaacagaaagcattgaaagaaagggaccataaccccctaggtggcacgcaattaacacaccaggaaactcggtgtatggatcacggggcacaaggtacaagggactgacaaacccaacaagcctttttacctggtacaggaccaataaaatataggaagctgcgaaaacatatatggcgtgcaaaagaaacacttgcgcggaattgcagatggagcctgaccgcctccaggaaggcataagaggttcagcgatgatctaagagagctaaaatggggggatgcttagaatacccagcataggaagccctaattgcacccaaggtgccg

SEQ ID NO: 434985 - DNA, 326 bp, Oryza sativa
tttcgttcgagcggccatcccacgtaggctcagtcatactctgattccactgctgatgctggcaaactcacaccttgacgaatcatgggacataggccgaggaggtaggagaagagaaatagatgacgagatcatatgaacttgaagtcctaagacaattcttctttccatgagcacaagcatatatatgctgaaagtacgtgatctttccagatgtatctctagtctacgtacagtgaatagcgaagattttgacatccgtcaaatggtgtgaaggcggtagcatagatggctacaatttgctctgaaagactgaaactggacac

SEQ ID NO: 434986 - DNA, 102 bp, Oryza sativa
tcgtgtgcgtctggttccacctaattaccttggcttcctctgtccagatgcttatagctagtagggagcaagtcaaagatatgggggaggagacagataagt

SEQ ID NO: 434987 - DNA, 415 bp, Oryza sativa
tttgttttttttttttttggttttttttttttttttttttttttttttttttttttttttttttttttttttttttttttttttttttaaaagggaaaacccaaaaccgcgcccttgaaatttaatggcccttcccgaagggggcatcccaggaccccaaaacccccaggtttttaaaaaccacccccgaaaaccgggcagggcaccccgggatgaaaaccccaaaaacttggggaaagaattgggggcccccccccttttacccacaaagagaaccgccccaagggggccccgactggggggaaaacccaaagggaaaagccgggcccaaaaagggggggggaacccagaaccggggggaattggtggagaacccccggggacccccccggtggaaaggggtttgtttggggga

SEQ ID NO: 434988 - DNA, 255 bp, Oryza sativa
tttgttttttatgcaaagcaggacaattattcaaatatagaatgatgaaagacgcaagaagaaaaaagaaagatgaaaacaaaatatgactacaagagccatgagagatgtgcatacacagataacaatggcagacataaaatgaaactgagaaaatgcgtagcagatgctacatcctactgataatcaacagtaagagttgccacgagtgaaataggatggataggaggatacagataatggctagctccactg

SEQ ID NO: 434989 - DNA, 138 bp, Oryza sativa
tgcttttctacttcctcctcatgagctagtcgtccgccttatatgtgcctatctccagtgggcatcaccaccatcgtcggctgcttgcgacatatactcttccgatatcaatagcactgatggtgtatttggacgatc

SEQ ID NO: 434990 - DNA, 428 bp, Oryza sativa
tttaatagcaggctgaaaggatgttatctaaagtgctgattctcttgacgtacgaacttgtggaaggaggaggacagttagaaataaaggatatgttgaaagtgaagaaagtgatgatagtgcggaaaagttagctaatcagcaaagaggtgtggaaggatgacccataaaaagaagaaggggaaacaattgaaaagaattctctgggatcaacctaaaggtggttctgaagaggctctgatgaatggccaatcaaaataacctaatttgatctgcttcacattagatgtggatgaattatgggatgatgtaaaattttatataaaatgggagggccaatgaattcttacattgccagtggaaagaattattttagctttcaaaccgttgggggttttaaaaaggtttttaaattacatgaaaagagt

SEQ ID NO: 434991 - DNA, 269 bp, Oryza sativa
agcgcgcgcccttttttttggggttttttaaatggatgcaaatatcaaaggaatcacaatagcgggcatgccgaaacattttcagcgtatgcattgattggttcagaactcgacacacctaaattgaaagcgagaattacacttttgtatcttgcaacaggacaccacaaaggaacttccggactagtatgtaacttgaaagctctgaatgctttgacctgaaccctactagaatctgtggtatccccaacatttacaagtaaggcaac

SEQ ID NO: 434992 - DNA, 201 bp, Oryza sativa
tttatttccagctagcaccagaaaagatcatctgaagcatcgtttgattatggatgacgtctagatgagcctgtcgtacccggtgcgtcggttatttccagaagctgactggtagcatagatggtcggagaacggacacgtctacgactagggttccactggtactcgtacctcctagagcaatggctttcggctgaaaac

SEQ ID NO: 434993 - DNA, 161 bp, Oryza sativa
tctgggtgtgctcgcacacaatgaccggggaactctaagtacgggaagctgctgcgagttacgaccatgcgaaaccgagggggtcggcaaaaaaacggttacccacagtcacagcattagatgtcggcactacacgcaaccgtcgaagggcgactttctag

SEQ ID NO: 434994 - DNA, 178 bp, Oryza sativa
ttgcgcgcgtggttccacatcattaccggggccatctctttaaatgtacaggctacgagtgaggagcatgataaatgtgggagggcggagatagtgagtttcacattatcactaacatatgttatctgaattgatgaatcctattgatacacgtccttttcgaaactattggctagaa

SEQ ID NO: 434995 - DNA, 447 bp, Oryza sativa
tttgtttatgaaatccatgtcttataaatgaatcttgcaatgtacaactacgcaatatggtaatagtaacattcatccaacatatcactactatgtacaagttgtttttgtttgcaacgtacagcagggcagtaaaacactcaaaaagagcatatgagtgacaaaaggaaaaaaaaactgagagactccagtaagccaatgaatgatttcatctgtttttttaggaggatgctgttgtacactactttcactctagcagcagctgtctaatctcatcgaattcatcgttttcatgagggagtactcctgattcgtcatgttcaactactgctagttcatcgcgacgtactcccgtcttttcgtagaaggcctccttctgtgcatcccattctttgacgatttcatctaccctgtcgcccagcagtttgtcattctgaacaaagtgcc

SEQ ID NO: 434996 - DNA, 401 bp, Oryza sativa
agtccatgcaaatatcaaatcaatcacaatttttttcatacggaaacattttcagagtctacattcacaagttcagaactcgtaacaaaaaagagaaagcagaattacattttgtatttacaaagacaccacaaagaactcctcacagtattaactgtaagtctgatgtttgactgaacctacagaattgtgtattacaaatctacagtaagcaaaatgttggatctttttaaagtatttatagtgataaaaaagttgactaatggacctacctttacaagcacatcagaataatacagtcaagaacaccaactcttgcagaagtttatgttggagttggagcagcagcttgccttatgagcatgaatctcctcctcgcaatattgttgcattttcaccta

SEQ ID NO: 434997 - DNA, 443 bp, Oryza sativa
  unsure (1)..(443): unsure at all n locations
ttatcagcaaggagaaggaagaagaagaaggcttccgtttctatcgccgaaaggttgctccctttctcctcacgattcgagctgacgaggtgaaggccatggagaagagcaccacgagctgacccgaatccccctctctccagcttactgttcctcggagatgggctgcttcggccgcgtgagggatatgatcaagaagcggaaggggaagaagaggccgccgccgcacgaggggccagcgccgccgccgccgccgncgtcggcgctcgccggctcgtcccactccacctccacggtgtcgtcgtcggccgtcgcgacgagccagtcgaccgaagactccagcgcggcggccgccaagcccgccgccgggtggagcaangtcgtccgggtcggtctcgtcggcgcggagcattccggagctgtaccaggagaggggcgcgagc

SEQ ID NO: 434998 - DNA, 454 bp, Oryza sativa
tttgtttttttttttttgagacaggtcacattggccaatccattagtaaagcctgctccagggtaatcagtgatcaaacaaacaacttgtcctaagagacccttttgatggtcaaagaatctttttcatggttagtttggacataagggattaaactgtaaaatggatccaaaactttcctatctttccacaaccggtctactccaactccagaggcaatcaatcagactatcgcactatgtgagttgatctggggaggcagcagaaaggcagcattttacaacacattctcttaactgtaacaaaagaattgactgatcagtagacttgtctgatgttgatatttatccttgaattttgaatgtagtttaagataaaagagtcatctttagcagatagctgcggaaccagcgcagagatttctgcctgatcacttcctgtgaagattcgtgga

SEQ ID NO: 434999 - DNA, 164 bp, Oryza sativa
tttgtttgttgtccaaaacaacagagttaccagcattaccaaatatggatgcaacatcaaagttaaagataactgcaaataaaattccaatatatgagcgaacagacgacggaccaacattgacacacaattcgactcccacaaaaatgtaagtttaacataca

SEQ ID NO: 435000 - DNA, 290 bp, Oryza sativa
ttcttgtctcgctgctcataatgacacactgctcggcagtttagctagctagaggctggcttgatcacgccatttgtctgctgttggatcgatctagtggtgcgccagccatggcaagaatgctggttgaggcggacgactccggatcggcggaagactcactcaagtaggaccggatcatcatcctctgcaggatgatctgcacgctcatgtagatactccgcctcgggatagtcgaccggtgcgcgtgcacgcgccgctgggcgtgggccgccagccgcggtacagca

SEQ ID NO: 435001 - DNA, 327 bp, Oryza sativa
tgcgtgtctccttcctcctcgcgagctcgccggccgcctcgcctgcgtcgatctccagtgggcagcggcgccggtgtctgctgcttgcgccgtatactcgcccgctgccaagagcacccctggtgaatttgcaagatcagttgggagtaaggacattctggatgctgtaaaattggtttttataagcagagcaggagatgaggctaactgctgggcaagtgcatcgacatgagcttgcattggcatctttgatatcatgcttggaccttggcgacaacctcccattgagaatgctttgaataccacgagcggtttgatttcaccaga

SEQ ID NO: 435002 - DNA, 183 bp, Oryza sativa
tgggtttataacaagacccccacactcacataattctaacgaatcgaataatgtcagggagcacacagactcactatatcacgaccggatgatcgttacatttgttataggagcagtaaaacgaaacacaggtacagaaggtattaacaaggctcgatgatcgagtgggcggtgaaaactaat

SEQ ID NO: 435003 - DNA, 305 bp, Oryza sativa
tgtgtttttttttatgtatgttgaataagaaatcctggcaacaattggtattttaaattgttaccacaacgttttacgaaacacacttttaattcttacacaagcttcaagggagccttttgcaccagaattaaggaatgggcactcctccaagcatgcaaccgattgcagcgcatttctatacccttagctaatgccaggagatcaacgtatgggcaaaccaaggctactactactaactactaagaaagtgcctaccaacacatgtagcatttccttagctcatggtgagcctatgagcaaaa

SEQ ID NO: 435004 - DNA, 418 bp, Oryza sativa
tcctttccgtcatgctcctagtttctcactctacctgtgccctcctcccctagctaacccctctctctttctctctctaaagctgcaatctctctacctttctctctctaaaagctggagcagcttaatttctatctctctttctctttctcagctgggatcgcacagtgaagctagggagaggctatagctatggggagcgtgtacctgagcagcgaggctagtgacaatctatctgtcacacacacacacacaaaaacactcgtggattttaggcagatgatggcctgcaaaggaagctgcccttgccagcccaaatgttggacgtgcacgctagccctacctattaaacccgtccttctacgatgctccctttccttcttctccactggcgacgccgacggcaccttttccggca

SEQ ID NO: 435005 - DNA, 147 bp, Oryza sativa
ataaaaaggaaaaggatttttattttataaaagaggggtaggctatttgataattaaaactggtgatgttaaagtaagaataaatgacctatgagagttccacgtacgcgggaaacaatggcaaacaaaaaatgatactgaaaaaca

SEQ ID NO: 435006 - DNA, 116 bp, Oryza sativa
ttctcgtctgcttcctcctcattaccggggcctcctccgtgcaggtgccgagctccagtgaggagctattgatatgtatggcggaggagacagatagtggcccatcatcactagcc

SEQ ID NO: 435007 - DNA, 431 bp, Oryza sativa
tgtgtttttttttttgcaacttgaagaggaatgcttgcaagcactagcaattgtaaatgtcagcaacacgtatttacgaaacccaatctacatgcgtacacaagcttcaatggtgcctcttgcaccagaatttctgcatgggcactcctccaagcatgcaaccgtctgcagcgctcctctataccttttgctaatgccaggagatcaacgtctgtacaaccaatgctactactactactactaagcaaagttcctaccaacacatgtagcatcttcatagtccatggagagcctatgagcaaaaggtctttccttgtagcatgaactggctgcctctggcatgaaagaataagcaatagagcgccagtcactaccaaggagcgactgaatgcaaccaaaatcactctacaatcgggacttgatcatggggg

SEQ ID NO: 435008 - DNA, 391 bp, Oryza sativa
tgtttgtctgctacctcctcacgagcttgtcgggcgcctattatgcgtctatctccagtgggcagcagcgccactgtctgctgcttgcgacatatactcgcccgctgccaagagcacccatggtgtatttgcgagatcagttgggagtaaggacattctggctgctgtaaaattggttcttatacgcagagcagcagatgaggctgactgatgggcaagcgcatcgacatgtgcttgcattggcatctacgctatcatgctttgtcatcggagacaacctcccatagagaatagttttattaccatgagccggttagatttcaccataccgcttggattggttctgaaacagtacaagataggaggggttcactaactctacctagtcttg

SEQ ID NO: 435009 - DNA, 330 bp, Oryza sativa
tgtggtcctgcttcctcctcacgagctagtcggccgccttggctgcgtcgagctccagtgggcagcagcgccatggtctgctgcttgcgacgtatactcgcccgctgtcaagagcacccccggtgaatttgccagaacagtcgggagtaaggacattttggctgctgtaaaattggatgtcatacgcagagcacgagatgaggctaactgatgttcatgggcgtgatgaggctccgggcccagccttgtatggggatatgctttatcctgggcgacaaccacccatagagaatgcttttattaccacgagccgtttgaatttaccacacc

SEQ ID NO: 435010 - DNA, 76 bp, Oryza sativa
aaaaagtagggagatttctaagcctatactaacatctaatttaaattggcagagagtggggcaaacaaaacattca

SEQ ID NO: 435011 - DNA, 72 bp, Oryza sativa
tagttttcgaccgccccaccatcaccaatacggccgtattagttcagtgcatctacagttagccccatctta

SEQ ID NO: 435012 - DNA, 101 bp, Oryza sativa
tcgtgctcgtctgcttcctcctcatgagcgagtccacctccgcacaggagcagatcaccagtgggcagcaactcaattggcgggggcaggaaatagataga

SEQ ID NO: 435013 - DNA, 142 bp, Oryza sativa
gttgttttttaacaaaacgtcatcacaaatggatgcatggaaaaggcaaagaccattgaataaatgatactgccaacgtaaagggaaaaaacaaatgactaatcagagcggcacttacgggggcaccagaggcacacacaac

SEQ ID NO: 435014 - DNA, 135 bp, Oryza sativa
tcgttctcctctagctcaacaccactaccgtggccatcttcgttaacgagcctggctccaatgaggaccagctgaattggagggcgtaggtgattgaatagatcccgctgctacctagcctatgtgacctgcatg

SEQ ID NO: 435015 - DNA, 63 bp, Oryza sativa
ttttgtttttttaaggggaacgccaactcccagcacctaaaagagggtaggcataaagacaca

SEQ ID NO: 435016 - DNA, 350 bp, Oryza sativa
tttgtattgtattataggagtagaagcaaagctccatcgctctgcagctaagccacgagcaacacaaaccacacctgttctgcggcgagaccatggcgccgccaccggccgctcacgccgctggcctccgcgtcctccgcacgacgcgcgtcgcgccggcgccgcccgccggcgagcccgcgctgcccaagcgagccctgcctctcatcttcatggacgtgatgtggctccgcgcccagcccgtcgagcgcgtcttcttctaccgcctcggccccgacgacgatgtcgacgccgtgctgtcccggatggaggagtcgctgccacgggcgatccacgccttctacccgctc

SEQ ID NO: 435017 - DNA, 407 bp, Oryza sativa
ttgtttttttttttttataaggtagtaaatattttactgcacgaatacgggtataatggactttgtttttacaattgatcgtgccatcatcgttacaaacacatatacacccggtacccaaaaaaaaagcacaatccagagggcatcgcatcgcctgccaccgaagcctgtcatcaattgtggtgtggtcgtcctgggctgaccctttgtgttggctgccggcgacgaacgttgacgaaggacatgttgaggatgccattccagtggcaccatcaccactggcataatcttctcatgttcttttctagtttccaccataccatcaagatgtgcatccacctgcaagagtgcacactgtagatgctgatgcctgcaaaattagaaggtaatcatttagtaaaatttag

SEQ ID NO: 435018 - DNA, 404 bp, Oryza sativa
tgttggcatcaggaagcggaggcggcggcgacggcgatggcgtgctacagggaggaggcggcgtgctggatctaatgggttaggcggcaagaacgggcatgtccatgtctggcgaggaggcgaggacggtttcgctctcgtttccgcggttgtcgtcggctccctccctcaagcgagaaaagcaagaagcgcgctgcctccgccaaggctgccgacgaggcctccaccaaccgcacccgcgctacctcccgacgccaacccctccgctggatccccattgctgtatcgttctcctcggtgaggtggggacttttctagggtttggggattaggggattattagggttcctctggccttcctgcgtataggaacgaatcagaattttggttttctctattttttt

SEQ ID NO: 435019 - DNA, 340 bp, Oryza sativa
tgcgtttctccttcctcctcacaagctatccgtccgccttacatgtgcagatctccagtgggcagcagctccattgtatgctgcttgcatctgatactggcccgatgtcaagagcaccgctggtgtgtttgcgagatcacttgggagtaaggacatttctggttgctgtaaaatcggttttgatacgcagagcaggtcatgatgctaacttgcgggcaagcgcatcgacatgagcttgcattgggttcttcgatatcatgctttgtggtcggcggcaaccttccattgagaatgctgtgattaccacgagcaggtagattttcaccagaccgctttgctt

SEQ ID NO: 435020 - DNA, 398 bp, Oryza sativa
tttgttgtttatcaaaggcacgagagttaccttcctctaacatggggtaagaccatgggataaaaaaatcagttgaagttaactctgcaccacatcacatacgagagatcgctatactaagaccccaatgtctgcgactaactgataccgtgtcaccaaacacgactgacaatatttcttgagggtattatgacacgatcccgccggcactaacgagacagcaccatggatgtcacagagagaaacatagtgtgccccactagaccccctcgctgggttgttcttataagcaaaggattaaacccactacttacactacgacgacggctccatttgtccaatgagcgcgctaggggaatttaagccttttgaccatgcattcttttagccagataaaa

SEQ ID NO: 435021 - DNA, 250 bp, Oryza sativa
tcgttgacgcctgggaccactcctggaccggtgcaagagtcattgaaggcgctgggctacaaggggcaccagggcaaatgtctgccacagtaaacgcttcgacgagcttcgatccgagcgccacctagccgcacggcggggaattggaccgcatcgtccgacggattacacggccgctgacccggagattgccagactgtggccgtctggggcgcatggaggcggtgcccgacaagcatagccatgccgt

SEQ ID NO: 435022 - DNA, 123 bp, Oryza sativa
tgttttttttatacaaaggacgacaattattcacatatagcaaaggtttagactaaagcaaaaataaaacggctgaaaacaaagtgaacaaaaatatgacctatcgagaggtgcccatacaca

SEQ ID NO: 435023 - DNA, 212 bp, Oryza sativa
tgctcgtctgcttcctcctcatgagcgagtcgacctcctttcatgtgttgagctccagtgagcagcatctcatctgtatggcgcttgcagatagatacacccccaatatccatagcaccggtggatcaattttgaagatccgtcgttagtgtcgtcagtctggttgctgtacagttggcctgtatactcatgagtggttatcaatcgtaaat

SEQ ID NO: 435024 - DNA, 285 bp, Oryza sativa
gttgtttttttttttttttctttttttttttttttttttttttttttttttttttttttttttttttagggaataaaaatcggccaaaataggaagaggtccgaccttaaagtgccaggaaaggcctggcgtgggtggaagaaaaaaaagaaaagggaaaaaaccaacatgagaaaaccctacccccgggggggtactgaacccaacacacgggaactatctaacccttagccggcaaagccagcctgaacaagaaccccaggaaagtggggcccggccccataa

SEQ ID NO: 435025 - DNA, 353 bp, Oryza sativa
gcctgcgcccaccgtgggtggtcgcctttaacacccccctcgctccgttaccgtctctccccttccccctccccctcccccacacccgctcgctgctcattcatccacgcgcggttcgatttgatctttgattgattgaaacgctgccgtcgaatcgaaaaaaataattcaaggattgtgtttttgttggttcgtcctgtaataacgttttttttgattgttcgttcgttcgttcgtctgtggatgtgaggaggaggaaagaggtcctctgattcgggagttgcggagttcttggatttggcctaaggaggagagattttcgtttttcgtatcaacccgaccgctgtgtgatg

SEQ ID NO: 435026 - DNA, 414 bp, Oryza sativa
tttgttttttttttttttccctccacagtcgttaactcactgccaggctacagccagtactgaaccccgggcaatgcgatgcggcatggaatgtcagctgcaccatccattgtttaggggcactgcatggctttgccactggccagaccggctgactcaacaacagacagtgctaggcaaactcagctgtccaacccttccatgtaccaggctgctgtagcagccgtcatgtcatcatcacactctgtccctagcgcacagtacgtcccagctgccactcactctactgctctccgctctattgctgttcctcatcagcagctgccttctgggctgggtacttggctgccacatcggcccagctgactgtgccgtccaccagctgcctgatgactgccgcaatgtctggcaccg

SEQ ID NO: 435027 - DNA, 443 bp, Oryza sativa
tttgtttacatgatctaattaattaattaattaaacagaagcaaactccaaaccagaccgctcaaaagcttaaacatagtttgggagaaagaaaagaaggaaaaaactaagaggtgacaagaacaaacacttgatcatgatcatgcttccatgtttgctagcttggtgtggtcgctagctaagctagcttaggctactccaagaacgtctccattaggtccgagtagacgccgccctcgtgtgggcccctgtactccatcccttgctgctgctgcggcggcgccggcgccgtcgacgccgacaccgacggggacgtcgacgtggtggacgagctcatcctcgccggcaacgtgaagctcctcttgaacttggtgctctgggcgctctccatcctcctcgccttgttggagtggctctccaggctcaggtactcctacacgttc

SEQ ID NO: 435028 - DNA, 318 bp, Oryza sativa
gtgatgtgagtgaagagagagacacagccaaagctcagctcagctaagctaagctctactcctactagtagtccctcttcaccctcactctacctcaccctcccccgagaaaaccccaagaaacgatcaaaaagagaccgaccagcaaggccgtagcctcaaagagcagccaaaaccacggagtttttaccatctatcttagctctagcttagctacctagctagcgccggagcagtgaaagagagagtgagaagaagaagaggaggtggaaagaagtgaaagaaatgtgtgggctccggggcggcagggggaggggg

SEQ ID NO: 435029 - DNA, 281 bp, Oryza sativa
gcggcgccttttttggtgttgagaaaccgtgggggctgtcatttctataatgataacatatatacgcacattggcaccattaatcacttacacttgccttacaatgatgaatgggaaaccactacaagagctcaggggtttcgaacacatgcacctaaagcacgcaagcctttaagacgtgccatgcagaactactgggagtagaacagcatgagtacatatgtcaagatcattcaggacaggtgactggaccggtctcaaaatctactgtggactgggct

SEQ ID NO: 435030 - DNA, 327 bp, Oryza sativa
gttgtttatgaattgcggtcgcactaaagaacggaaagaggttgaccagagaaaccctgaccctttgtaccgcaaacaccaataaaaggtcacgccttacaacactattgtcaaccaaccacatgcagattgcttgtggctcgatggcagcatgcgatcgaaaaccgagggccagtggggctggtttacacacacacacacacacaggggggtcgggaaaaagcagaaaggacgtccctcactccaagggcccggggggaatcgggagggggaccatgtagtggttgctgcgcacgttgagcagtcggaccaccctcccgaaggttg

SEQ ID NO: 435031 - DNA, 372 bp, Oryza sativa
  unsure (1)..(372): unsure at all n locations
tcgtattttttcgcctgcacctctttacttcatcccgccttcgttcgctcggtcgtcttccggtaccgcgtgcgcccttgccggccgcgcccatctttgtcgcccttatctatccccccccccccagcatccatccaatggcaattaccgaccccccagcccccggcagcgccagtcggtcgtccatgggcggcggcgggggccttggagagatgcgagaggtaccgttctgccccgaggcccccgcggatgggggcgaggggggcgccggggagaacacctgcgagctcttcgacggggagggcgnaagttttnaaggccctgcacgccgcggacaacacctgtcgcgccgtgccctgggccgtcctgcga

SEQ ID NO: 435032 - DNA, 238 bp, Oryza sativa
gtgtggttaagaagggcgggcgctctaatcaaagtaccgaggaaggcgagagaagaagtcgccgtatgcacaggacacaccacaacacttagaccttaagagcactggtaagaccaggcacatggcacaagaagcgacatggattgtcataaggggctagaaagcgctgtgtgagatcgaaagggaaagaggcacacacacggacacagagatcctggaaattgtgcctggacgagcc

SEQ ID NO: 435033 - DNA, 280 bp, Oryza sativa
tcgtatactcgtggcagcacctgtggacttgatgccgcctttggtcgttaggacgccttacggaacacgtaccgcccttgccggccgagcccatgtttgtcgcccttatggatggacaccctaccagcatgcatgcaacggcaattacacaacatagcagacactgatagtgcagaagagcattgcatgggcggaggtgtgggccttgaacagatacatggggcaccgaactgccacatggtcccagcataaggggacaaggggtgtacacgggagaaca

SEQ ID NO: 435034 - DNA, 446 bp, Oryza sativa
tgtgtttttttttttttttgtttttttttttttttacggaaaaatttcgctcacataaatggaaggcttacatttttattgttattatgcaaagttggtcttccaaagctctatgcgtggtcaaacagctggtttggacatagggaacaagtactctgtctagaccggccttgatgttttgctaaagcatgttaaatagggcaagggcaaatttccccacttgacctgcctactgaaaattgcaccgattattgaattttgtcctttataattgggaattgttagcctgtttgagaaatatgaattggtagcttatagaacatgctgggaatatgagctgcagatatatggggtgacaccaccggaggctcgatatcctgaattctttagattgcaatgcaacaaacaaaagaaattcagggtctagttcatcaagtactcctatt

SEQ ID NO: 435035 - DNA, 425 bp, Oryza sativa
  unsure (1)..(425): unsure at all n locations
tcgtgtacctgtatgagctggattcgcactgggatcggctgctgctatctgcatccaaagcaaagatcagctccccattctcccgcgaaacacttcgcgccattttggtgcagatgacggctgcgtccaagtgcaggaatggctcgatcaagtactggctcagcgccggccccggcgacttcctcctctcgccaaagggctgcactgcgccggcgttctacgccgtcgtcatcgcgtccgccgccgccgacgccgccggcgggcacccgcggctcaaggagggcgtgagggcgatcacgtcgacggtgccgatgaaggacccgttcttcgcggcgatgaagagcgtcaactacctggcgaacgcgctggccattgccgangcagaagaacgcggcgcgtacgcgtcggtgtgggtggacggcgac

SEQ ID NO: 435036 - DNA, 331 bp, Oryza sativa
tcgttaatctttaattaatttatttctcgcctctctttaacttattttgctcctcactttctcttgactagctcaaacacttacacgaactcggattgttaataatcttttactactcctatatacggcaataaaatcttcgatttcaccgattggtcgccactctccgattccccccaactcgtcggtagcaagtagctcgatcgcgcggcggcagaatttccagggtggatttggccgatttggggcatcaggtgagttgatttgtgcaaattttgccaagatttgccatgggcccttggatatttccctctctttttttggagggcat

SEQ ID NO: 435037 - DNA, 63 bp, Oryza sativa
agaggccatcacctgaaaggatgaagcttactggccgctcttccaggatgatacatccctgtc

SEQ ID NO: 435038 - DNA, 373 bp, Oryza sativa
ttttgggtgggttttgaaaagcttgcagataatcaattaattaataagcaattagtataatgctgaccaagaccaagctggtcatcaagcactccttaacgatcacatgtttggggcagcgactccaaaggtggaaaagctttttgatgaatgttcgggtgctagttaaatgttgaggagtttatattaggggaaaagcagtttagacaggcattataaatgggttgctgatgggcattgtggaagggaaaaggacgcgctgcagggcgttcttagagaagggaggcacctgaagaggaggatgaccacgtggcagcattgtacccctcgctgccacaatatggggcgggggcccaaaatcaagcccaccccg

SEQ ID NO: 435039 - DNA, 281 bp, Oryza sativa
tctaggcacacataggctagctccccatactgtgagaccccttggcttctggaggaggaggaggaggctatcgccatggcccctaccaccagcacgggcaccttggccgcggcgaaggcgctgattacgtgcacagcagcaaggtcttggagagcttcttcgtgagccaacccgggggcgttggtatcctcggtggaggaggtggcgtcaagcgacccagcggggccctccagatcctgccgtactccagattcacagactaccctgaggggtaattggac

SEQ ID NO: 435040 - DNA, 106 bp, Oryza sativa
agaaaccaaagtttggtataggaaagccatttttactgttgcatgttacgagttcaaagacaaaaatgtttggtgtcaatcaaataaggcaaggagggcccattac

SEQ ID NO: 435041 - DNA, 106 bp, Oryza sativa
tggatgggccctccttgctttatttgattgacaccaaacatttttgtctgtgaacttgtaacatgcaacagtaaaaatggctttcctataccaaactttggtttct

SEQ ID NO: 435042 - DNA, 91 bp, Oryza sativa
tgggtgttttttttttttttgtttttttttgacactcaagccaacttttaatttattaacaaggcacatcttctggaaagaatccggataa

SEQ ID NO: 435043 - DNA, 248 bp, Oryza sativa
catagcgcctggacgccaccgcccacggacgcctaaacaccgacggcacgccggcctcggagtacgccaactccctcctgtgaaaccccgggtcagccgtgagacgcccaaccaccttcaactacgcgtacgactactcgacgacggccgccgccccggaggagaagagcgagcagccatacgggcacctaccctgcaccaccaccgtgctcgggaacctgtccctggggctcccgtatggcctccca

SEQ ID NO: 435044 - DNA, 350 bp, Oryza sativa
cggcggcacgcgagacttcggcgccttggagcaccacgccgccgacggtgcgtttgtagcgcgggcggcgatggtggccggcagccacacactacgcgcgggtactggagctctgacagacggaggccaacccgggcgctggccgtgccatccacgcgcgcgccagcaaggatggaactctcaacagagcctacctacggaacaacctgctcttctactacggcaagaccgccggcggcgccggagggatgcggaacgcgcgacgcctgtgcgacgagcatcccctaggcgcgatacaacgagcacacctggaactcgctcctgcaaatccacggcaagaccggacgcta

SEQ ID NO: 435045 - DNA, 165 bp, Oryza sativa
ggggaggattaaaaaagctccgtctttgctgctgtagttgttgacgccagtaattgaacaagctaaagctgcccggtaacataggcgcggagaatacgactaacacgttcttccaaaacgcgaccgaaaagaaggcggacggggtggacggcgtggcgagaggcg

SEQ ID NO: 435046 - DNA, 357 bp, Oryza sativa
ctagcctctggggatattaggctttgaggcttgctgtcgaagagattgtgtccttttaaaacatgagcgaccctggcgaacttgacgcatatacgaagggagtagagaatgaactaaggggaacgggtatcagttgctctccactgcacaatgcaattagagccttgaaaacgggagttaccaaagtaaatggtgagagaaaggagcttcaaaggcaactgttgagcaaccagctgataaaggatttaatgaaaatacggtcgctcaatgaccggctcatgcaggctgaacgggcatttcactaacagggaaggcctgttcaagcgagaatggattaaacatatggtctatggacca

SEQ ID NO: 435047 - DNA, 378 bp, Oryza sativa
tgggggggttttttttttttggtttttttttttacacaaagttacgtacgttgacatgaacaatttccaattaaagcggttaggaggttccattcacattggacacaaaaaaaccgatattttccattcacgatcaacagaaatccactacggggcacacaaatctacataaattcacagaaatccgagcaccaccgcccgaggcccgacggggttggccgtgacgaggtcgaggccccgaagggggggctccccgggcctttggggggggggatccgtgctggttggagcccccaacggggcggatcgggacatcccggcccgttcttcataggggggggctactgccattggacagattttggaaaggggagagga

SEQ ID NO: 435048 - DNA, 72 bp, Oryza sativa
ggaccggaccggaatacccgggcctcgcgagccaagctattatgcccctccccggcggcggcggcagcgggg

SEQ ID NO: 435049 - DNA, 480 bp, Oryza sativa
atgcacgcacacgtacgttaggatgctttctagtgggcggccgcgctttttgtttttgggggacgacgactacgacgacactgggtgtatgaacgccagccccagtagcaccactagcatagaccccggcaccagaattagcttatgcggcctaggcggcggtggcataagggcgagcgggaggatcaccatgctctccaaaacacacaccaaaaggcgcagggactccaccgggaagtacttggcctacacgccgccgtcggcggcgtttgtcgacggctcaatgatattgctgtcgtcgacgcctgcggaggtacctgacgactactggggcagatgatgcagagccaacctaccggagtctagctataacctttgtacctcatgtatgtaaatgtcactgatgccattcatgttgtctgatatgaaccaagaagtctacgcgggatattttgaatagggatactacaaactatgctg

SEQ ID NO: 435050 - DNA, 167 bp, Oryza sativa
cgcttttggtgaggacggaccacaacgagccttacgtggagcttcaacagtatgctcctgctgacactgcgtgctatttgcctgggacaagatctagtttatctggcctccggtgcgagagtctagctgcaagaagcgattgaactcaaacatggcgatacttgcat

SEQ ID NO: 435051 - DNA, 245 bp, Oryza sativa
cgtactccaaataaagaaagcgagccgtgcaaggtcaccttcgccgcggtggatccgagcggcagcagcccgaatatgggcgatatgagcgcggccggtgcggacacaggcgcgatccagcgggcgacctgcgcagcagcggacagggcgtgcacggtgtcgaggcgggcaggtgggaccctaaggcggccagcttcgcgcacagctacgcgggcaagcgcgccggatactgccggctgcagtac

SEQ ID NO: 435052 - DNA, 296 bp, Oryza sativa
cgcttcttttgggggcggtccagtagggggcaaacaccgagtttcaacagaatgttcctgctgacgctacgggctatttgcctggaacatgatctagcatatgtggcctatggtgcgagacacgagacaaagatgggattgagctcaaacaagccgatacattgatgaggcattgtgaggatgagccataggaaagaagtaggcaataatagagggagttatgtagccttttggtaaagtacaagacacgggcgggtgctaatgtatttgtcataacagtaaaaatagttggacac

SEQ ID NO: 435053 - DNA, 117 bp, Oryza sativa
tttttggcggtttaaaccaaagtttggtatctgaaagccatttttactggtgcatgttacgagttcaaagacaaaaatgtttgggggcaattaaataaggcaaggagggcccattac

SEQ ID NO: 435054 - DNA, 196 bp, Oryza sativa
gggggaccaactgaattattggtcagtcaaacactagagggagacatcgcacccccgtgtagtgtgcagaggaacacaatcagggacgacggaccactaacacgagttgcaaggtaagggggagtggtaatacgcccgattccaccctagtataagccaccctagaggggggtaggggtgacaggaggggtgacag

SEQ ID NO: 435055 - DNA, 468 bp, Oryza sativa
cgtacgcttggttgcatttttgttggcggcctttttttttttttgggggggagcatctaaaatattggatactcaagcactatatggagacaacgcacactagtgtagtgtgcagaggaacacattgatggaagacagaccgttatctgcgctttgcaaagtatttgaacattaggaatgacgcccgttatgcaccgtagtataaggccggttctcgtggggcgaggccgagtacaatggtaggggatgacatgaccagcataaaccgggagaatgaagttttggacatccaaggaggtatggacctatttacggaattgtggaccccctgtgggcccgaaaggtcctgggcggagaccttgcaattctttacaagcattgcatggacatgagggccttcaccggggtggtttgtgagcgggtccatcttttaacaagaccaccatttttctttcaagaattttaatg

SEQ ID NO: 435056 - DNA, 533 bp, Oryza sativa
gggttggttttttattttttttttttttttttttttttttttttttttttttactctgtgattgtgatttgttttaatcgcgtcgacgacttatattatttttttggcgtagacgaggggttacgaagaaaaaaaacagagacacggaacgggggggggggaaaaagcaggataatagggggacaaaaatgcacccaccgcaaaaatggggatggggaactagaactccagtagaaagagagcaagccagtctagaacaagccggaaagggaaggggaggtctcaacggaccaaagaaaaaggtttcaataaaaaaaaatgtgggaaaaggagcaagggtttatttagaaattttacaaaaagcaacaaaaagaggggggggttgaaaaaacccgggggaaataaaaaaagtttaaaaaaggataaggggggggggggggaaaacccggaaaaaaatgaggcggcaaaaaaggttccagggggggggcccagaaaaacgaggccggaaccgtgggaaaaaaaaagtttctata

SEQ ID NO: 435057 - DNA, 426 bp, Oryza sativa
gcgttctgcgcaggcgagattgctggcagagggtgtaccatatccggatataaggactaaaagagttctgattcagacctggcttataaaatacactgttagctgacgcttgttgaaatgacaaacatacctactgccttttcacaatttggtttatggaaaggctgtctagggctggatgtcatgcatgactagcacatgcatgcagcactgcttcaagaatgtgctcgatctctagagggccattttggtgtaccgaaatgtgaaatactgaaataccatagtgccccactcgtcagattgtcataaatctggtccataggatccatctcatcatataccattctatgtgaatattcttggatggatgctggggggggccagggaggcaagcaaaggcaaaggcaggaatctgtttggggtttt

SEQ ID NO: 435058 - DNA, 205 bp, Oryza sativa
ggtggggtttttattatttactttttttttcttttttctatgcattatttgcaatctgtactgttaatatgttatcattgaggagccaaaagaaacaggtttaaagtcagttgaatgggcgacccagtgacaaaacaaagacacaaagctcagaggaaggaggtctaaggacacaggactcgtgggcatccaggtggcaccaagg

SEQ ID NO: 435059 - DNA, 148 bp, Oryza sativa
aaatggagctttttttttttcacaagtgtgatacacaggacacattaatcgtgttacagccgtgagtccagaacatatatttacataccaacacgaacaaaggcatgggtgctatgcactagacttaattgcaactgggaaaacctac

SEQ ID NO: 435060 - DNA, 279 bp, Oryza sativa
tttttggtttgtttcattaatttgaaatgcacttttttcacaggaacgagataaagggctccttttttttctatcgcaacattctcatgggcacccaatattggcaacaccggcacaccatcatgatctatgggcaagaggctcgacaatatgcaaaacacgcaggccagatgattgtcgtgacaccacgttacccaataagttggtgtaggctggagaacgaaacccgcagtgagcatggtatattttgcggaatgacccagggcattcaaaatccgg

SEQ ID NO: 435061 - DNA, 75 bp, Oryza sativa
atctttcgcactaccaacacggggttgggatgagatctttgctggttcttctgctgagaatagctacggacaggg

SEQ ID NO: 435062 - DNA, 303 bp, Oryza sativa
aattgcacttttttctcttgatcgggataaagggcaccctttttttttctcgcaacatttacatatgcacccaatattggcaacacggtcacaccatcatgatccataggcaagaggtacgttcatgtgcaaaacacggaggccagatggtagaagtgacaccacgttccccaacgagttggtgtaggcctggtgtacgaaacccgcagcgagcatcggatttctggcggactgagctcgagcttcaacatccggtgattgaccccttgacgctgactattgtgtgacgccaacagatcccta

SEQ ID NO: 435063 - DNA, 73 bp, Oryza sativa
ctgtgcgtgttccaacacggggtaggcattagatctttgctggctcctctgcaggggatatcttccgccaagg

SEQ ID NO: 435064 - DNA, 469 bp, Oryza sativa
tgtttgtgtatcaaaagtaacggggacataactctgtatttttcactttgaacacgatctatgtaaatcaagtttacatgatggagcctctgataccaattgcaccacttgaaactggaaagcccgtgtcttaataacaatccatgatggaggattaaaaatcccttagacacatgtctaaacacccctgatactaggaccagtaggggtccaaccaattgccaagcgtatagctggtctactctttgagtgccaccttggatacaggtgctgcctacgggattcttgatgtatctccaagcctaaaggtatttggggtggacgaggtgacaatggcataaggatcaccatatgagtgttgctaaccatcggctgggtgacttgcacctacttcttgattgccttgtgaaagagctgcattgcgttgtttttgatgagagggaccatgcgggtcggacccaccaagttc

SEQ ID NO: 435065 - DNA, 502 bp, Oryza sativa
ctgtcgcgtccgcccacgcgtccgcttcctcctgcgcacgcgttctcccgatgcgccgccgcctcctgctcctcacgccaccgttctgtgccgacggccccgcaagggaccaccgcgccgccccgcctcggaaaccgcctgggcgccgccacctcctgccgccgtcacctgcgccgacttcgcgaggagccgccgcgtcgcctgccttgggaagccgccgcctgccacctgggagcacccgccgtcgaagtccggcgccggttcctcgccgggaaccgccgccgccgtcgcaagctcctgcccgagctacgacgaacgccgcgccgagcaccacgccgctgcacgccgcctgcaatgacgcctccagccgcccgtgaactcgccgccccaaaccacgctggccacgaaatcagagagaacgcagaacaaatctttgaaaaggcaagcaagacgtaggtgtacgtgaactatcagggtattaggaaaacacatatggggagca

SEQ ID NO: 435066 - DNA, 259 bp, Oryza sativa
tgtttgtacaacttgtaagcttttcttgacccggaaggccaaaagaggacacggtgaaattttccactgagcggtaattttacagcagagaggggatgaacacagaacgccaattgaatttaaccatgtcatcatttttttttaccctaatactaaaagaacaaaacgaactggatcaattcagctaatccccctacctaatctatggctagctaaattactcatctggagttagcgagatcgatggcgatgaggagga

SEQ ID NO: 435067 - DNA, 301 bp, Oryza sativa
gaagcgggagagggagtcggtggagcagtatgcggcggtggcgtcgtgcgcggtgctgctgccgatccccgggatgatgaaggtggcggcgccggttagccggttggtggagtcggggatgacgtcgacgagtgggaggtcagcggcggcggtgggggatgcgctggtgtcggagctgtgcgcgcagagcgcggtgatcgacgcggtggtgcggatggagtgcgagcggatgcgcgccgggctggagcaggcgcggaagcggctgtgccaggcggtggttcgtgcggcgtttgccgccgcg

SEQ ID NO: 435068 - DNA, 298 bp, Oryza sativa
ttgttgttcctgatcaattattaaaagaattacacttccacacacacacatgttacatgtttgatgatatatgtaaagctaaagaggcccacccccacaacaacacactctcagtttggtggtccatcctatcagtcacactaccttccccatcctctgatcgtgagctccacacaaatgtgagctcaccaccaaagcttagccaaagccagctgctcgatcgatccactaataattctttctgcagcttgcattggttggcttttttgtctgggtgatccaccaaattaaaggagag

SEQ ID NO: 435069 - DNA, 444 bp, Oryza sativa
tctactcctcctcctcctctctctctctctctctctctctacctctttcttgtctccaactagaagtagctatagctacctagctccacgacaagtgagctcccggagagcaggaggaggcttttggtagcctccctcgccgccgcttcgccggatttcggttgacgttgtggcgacaatatgacgagtgggttggtgaccgccggcggtggcggcggcggcaaggtgatgagcctgcggatgcagtactacgcggtgctgggcagcgtgaccgcggtggtgctcctcgcctgcctcaggtacacgcctactgccgccgacgtggacgacgtccgctacggtttttggggcaacggcgacggcgcttgccttgccgcagctggggcggcggcgaccaccgacggtggcactggtactagcgctggtgctacgacaggcggtggc

SEQ ID NO: 435070 - DNA, 84 bp, Oryza sativa
ttagtgggcggccttcctttttttttggtggtttttttaaaataaatcgttcctttttctgaggaacggggttatgtgcgcttc

SEQ ID NO: 435071 - DNA, 243 bp, Oryza sativa
atcgtgcgtctgtcaaaatcgcgggaatcaatggatctttgatcgcgttgtgccacgagatatcttcccccaagaaacgttggagtgagggatgagagctatggcgatggaatcgcaggacccgaacgcggcgccagccattccagcagggttcaggagggtggaggacttctcgacggagtggtgggagcctgccaagaccactgcgtggttacgtgaccactggatcagggagcaccagat

SEQ ID NO: 435072 - DNA, 501 bp, Oryza sativa
tgggtgttttacaaacaataggtgaatttattagcaagtcaaaatttcttgaaagaataccatcgactcacttgggtctacaagcctagagttatacttgttgcaacacagacaacactacagataccatacatgcattttacctgtctcactcgcattttaggacgattttataacgctcacatactggctgctaccaatgcatgacacggacacaagaacactctgtctttaacatgtgcgaggagaatcggtatatgaaagctggtctatatctatcttctctagctcactagctgctgactgccatagacagggtaggctccatatgcaccagcatacatgttagggtgcgggacgggggaggcataaccgtatccaccgtaaaatggcgacccatagtacatattggttcttcggatgccagaatcagccgtagactgattatgtgatgggctgcgcccccatgaaaggagaactgccagctttccattgactgat

SEQ ID NO: 435073 - DNA, 414 bp, Oryza sativa
ttgttggttttttgaaaaaaaatctttgtttctcctgtgtgttgttgatttctgtgtgtataagaatgttcaattacagtgtcaaaaaaaattccctgtgtcctaaaactaccatgcctgtatgttttatccacacatctaactctcaaaaagaaaaatctacaaaaatcaactttgatcagaaattcagaatggcctcttgagacccttgaaatccactgtctcgatgcattcgacgctgcctcgcgacccgttgagcatcttgagcagctcgctggcgcgctccttggtgacgccggcgcagcccacctggagcagcagcagcagcttttggaacgcgccgactcggagcgcctcggcgcggcacggtgcggcgccggcgccggcgcggcataggcgccagagcgcggacac

SEQ ID NO: 435074 - DNA, 371 bp, Oryza sativa
agctaagctaccattctcctcctcggcggcggcggtggcttttgctgctgagatgcagatggtgctgaccaccatcaccaccgactgctcccaggcggttgtgccgacttaccacccttacccgtacgcccacctgtacccgcacgcgcacccggactccgaccaccccatggcgcatgcgcggtgggtacttctggcttagcctgctgctgcgcctgccatggtggtcggtccggcgaccccggcggcgtatcacggccagtacttcgcggtgggggcagcccccgtcccggcggccggtcggctcacgccacccgggcccgcccccgtcgaatctcggggggaccgttgcgacgtaaacaagaacattg

SEQ ID NO: 435075 - DNA, 214 bp, Oryza sativa
ttgttgtttttttatttttttttgttttttttttttttttttttttttttttttttttttttttttttttttttttatttttttaataaaataaaatataaaaaattaaaaaataataaaaaaaaaaaaaaaaaaaataaaaaaaaaaaaaaaaataaaacctaagaaaaaaataaaaaaaacctaaaacaaaaacaataatttaaaagggtca

SEQ ID NO: 435076 - DNA, 449 bp, Oryza sativa
tagatgctgatgcatcaaggtcaggtgctcagaatgtttgagccacctctctgcacaattctacttccaatcagtggtccgaagaggatactatgaggaatgtttctgttaggaggccaaaccagaacatatcatgtcaagcacaatctgaaggaaaccataagggtcagaggaacggatttaaggacagtggtcagagaacatcagatgatgtccttgtttcaagtcaaggtgttcaaaaaatacagccgtaaaacatattccgagagaatgttgattgtagacctcttaaacagaacaatctgaagcagaatgcattgtctgaaacttatagagcagcagatacagggcatatggtccaaaggcagaaacaaagagcttaggagcataatgtggcaaacacagccaatgactttgtctgttaaacagaggtatgaacaacagtgcat

SEQ ID NO: 435077 - DNA, 189 bp, Oryza sativa
gtacaaaacaggataagggacattgtaactgacactaccgtgggcagatgttttaagacatctcaggcacatgtcctttgataagagcgcgttactcttagctttgtttataagaataaacaaaaagaaatccataaaaatgcccctatacggtatgatttatacatactatatgtcggatatgatgca

SEQ ID NO: 435078 - DNA, 415 bp, Oryza sativa
gttggctgcaaaccaatatctgactttgtcaaaattttgtcagtaccccgatttagcatacaaatgttttggtaaggttttacattgatcgtaaaccaaaccagaccttactttgtcaaacgtaaaaacaaaagctagaacctaacccttcattttaatcattactcctttttcttgattctgagcagcacttagcagttgaagagagaaggccaaattttaactatgaatctaacacaaatcattcacatataacttcagggaggcacaccctcttcacagcaaatgtattgcgggtaaatgcgtactctttttggctacatgaatcaacttagggcatttttccttcaaaagaaggaaaattgctcgctagggcttttaggacattctgatatttacaagagctggttgatga

SEQ ID NO: 435079 - DNA, 463 bp, Oryza sativa
tttgttcgaaggtgattgggataatccaaattgttactaattgctagctctattgggagataatccataccgcctgttctatttacttgcattaatcgagtgtcaactgtattttccattggttcaaacaggtgtcgtcacatttcaaatggcctgaaacacttgagactgattttttctacagcgctttatccattgggacttcaattaatccacaattcattgcaagctttgctgcagcagttggtaaacgatgtaatcaggatttggactccgaagagtctgatccagagtggggttgctggacagcaaaccatgagctaaagaagccatctatgaatttgttgtttacaacaattgacagagtgaaaaatggggcttgtggaatgcagttatccaggcattcgctttctcttcctgagagaacatggcaaagactgagatctactggcatatttcgtga

SEQ ID NO: 435080 - DNA, 120 bp, Oryza sativa
ggatgcacgccaccgtcagcttggatgcctctcttgttggccgcccttctttttttttggggggttatcatgagctcccaattttcaaccaatcaaacccatttcagcctcaattcaagg

SEQ ID NO: 435081 - DNA, 194 bp, Oryza sativa
gccgcacaccccgacggggacctgccacgggacgggacggagcccgacgccgccgcgacgaggcctcccggtcggcgcccccgccccagcccaagccggccgggggagcacgccggagcgaacggcgccccggagagcgagaaggaagcggacgacctgagcaggaagaacgaaaaatgggcgcgggccgaaag

SEQ ID NO: 435082 - DNA, 475 bp, Oryza sativa
aggtatgcactcactctcgttgttgttggtaagaggacgaagacgacgacgtcgaacacgaagacatcatgatggcatggaggagcttgtcgctggtggcgttcatggcggcggtggcggcggcggccgcggcggcgggcgatgaccggaggccgtacgtggtgcggatggacgtgtcggcgatgccggcgccgttcgcgacgcacgacgggtggtaccggtcggtgctctcgtcggcgtcggcgagggacgcggcggcggcgccggcggcggagcacctgtacacgtactcgcacgccatgaacgggttcagcgcggtgctgacggcgaggcaggtggagggagatccgccgggcggacgggcacgtcgccgtgttcccggagacgtacgcgcgggtgcacaccacgcgcacgccggggttcctcgggctcagcgccggcgccggcgcgtggcccgcgttcaggtacggcgccg

SEQ ID NO: 435083 - DNA, 465 bp, Oryza sativa
ttctagttcaccacgaaaacatggaattatacaagaagatcagtttaattcgccacgaaaatgctgagctatataagaggagctacaagactgaaggaccaagtgaagccaatcgggattcaccaactccgtacaacttcgcagtaattgaaaaaacaaatgctcctgcgcaacttggactcagcacactaccacagcatagtgacgcccaacaatcaactgctcctaagctagggctacagctgaatccatgaccagaacaacattgctttgctacacccttgtatgctgaagggatactatctgctgtcaagagttgatactcagatcaagaaaaaaagaacttttcatgccatagcgattgagaaatggacttgtatactggaaataaatgccacagtgaattgagctgcggaatccacgccatgagtgccttatgattcaatttttgcatgtatttttcat

SEQ ID NO: 435084 - DNA, 350 bp, Oryza sativa
ttggtggttttattgaacattgtggtttacttcactatttatcattacgacaaaggtgtccataatcctgattgggtatcacaacataaagaaaatctaatacgcaacttaaacagtactatatagacaatccacacgatcttacggttccaataaacactaacggatcataacccccaaaattagccaaaatattccaagaacaaaaaaagcacaaactatgaacaagagagggtaacataacaaatccttaaataattaaaaacgagcgtgacacatgttccagaagcaatatattacctgtgccaaaaaaaataactacgaccataattagttgagagcgcaagcaa

SEQ ID NO: 435085 - DNA, 404 bp, Oryza sativa
ccaggcaactttcaatttatatattatgcccatctttggtcaagaccaggataaactaaaacaaatgggaaccttaggatgggcacaagttacaatgcacagggggaagggcacacagataaatttcagggggataaatttacaagaacaacccgaagaaaaagtaaccgccaaaagcaggagttaaaaggctttaccttatgaagcaaaagttcaaaaccatttgcttatgaccagccaaagactaactcccggttgtacaccacaaccagcgaaagggggtaaagcatgtaccccaccagacaggtccagagggggaatgtggttctgaagcttgtgaagagtcccatgatgacacatacgagcagtgtgatgcgcccctccgatgagaagtcccatggcag

SEQ ID NO: 435086 - DNA, 507 bp, Oryza sativa
cttttggcgactcgccgccgctccttcccgctcgtcccgctcctcctcttcctcctggccgccgccgcgtacggacgcctcatctccgacggctcgccggcctcggcgtccgccacctccctcctctccaaccccgtgtcagccgtgatacgcctcaccacctccaactccgcctccgcctcctcgccgccggccgccgccccggaggagaagtgcgagcagtcgtacgggttcctcccctgcaccaccaccgtgctcgggaacctgttcctggtgctcgcgtatgggttcctcatgtacaaggcggccaccttcctgtcggccggcagtgagctgctgctcgagatcatggggcccggcctcgtcggcggcctcctcctccccatccctggggcccttcccgacgcgcttcttgttctcgtgtctggtctgtccgggagtagagagaccgcacaaagtcaggtcctgactggcatggggttgcttgctggttcgaccgtttttttt

SEQ ID NO: 435087 - DNA, 377 bp, Oryza sativa
tttttgttggattagaagccaaccgtgagagcttgttcaaaacttcagttttctacaatgttgactaccctaattaaaagttgagactccataaaaactcggctacaccgagaaaactgttattacaacagatactgcgtacccaattaacgcaatgggcacccatacgggtacagtatggttaatttaacgacctgatagacgatgcttttaaggagctgccgcagggggagacaaatactgtatacagcgaggtaagacaataaagaaagaacattggaaatcctcttcatcggcatcccaaggctgtaacagatcataatcactcgaggtaccctgcatcgcaaatttgtacccgggttgcgatcgggctgctc

SEQ ID NO: 435088 - DNA, 485 bp, Oryza sativa
ttttgtgtggttttatttttttttttttttttctttttttttttttttttttttttcttttttcttttttttttttttgggcaagggacaaaaaccctaaattcatccccccccccaagggggccccaactgggcttaccgggcccccccacatttatccccacagaaacccggccaggggaccattttaaggcccggaaaattaacccaccagccgtaaaaccagcctcccccaatccctatctctaccaataaaacatacgaccctcaattcctctcccaaagtttacgccacccaccactatacatgagaccccataaacttggatcccccccatgcccatccccctcaatgatcccgtcaaaccccaccgctcggtccccaaacctttggtccccaccaactcacacgcatccccctctatgtaccgctgaattgcacaggttaacaaggctgcagaactgcccccgactgtttaaaatgt

SEQ ID NO: 435089 - DNA, 77 bp, Oryza sativa
agtatatagccttgattattcatccacaggcgggtgcattttgcacaaacacaccatacggtgaacagccacacgta

SEQ ID NO: 435090 - DNA, 141 bp, Oryza sativa
ttccattttttccacctacacagcggcggcgagggtttccgatggagaacggagacgagacgttcgcttcccccaccgccggcggcggcggcggcgagttcgagcagccgctgaccaacggcgggggaggaggagggggcg

SEQ ID NO: 435091 - DNA, 89 bp, Oryza sativa
tgggtgggttaataagataactcacattcaatttctgttctttagcgattcagcaaataagcactaaagcaagaatgaagcgaaagaaa

SEQ ID NO: 435092 - DNA, 355 bp, Oryza sativa
cgccgttggcggctccagtttgtaacgcaccctccggtctctgtcctcgagcgcgcgggccttggggctttggacatgcacggccagcttgtgcatcgctcgcaagggctcgagcggctggatcaccgtgcctcgtagtcagccggggacgaggccctgatcaccgcggtaatggccgtcgcgggggagccagaagccgacaatgcagtcctccgcgttgtaacggacgccatcattacctgcttcatccacgtcctcgtttgcaacaacaaaagatgtatgattcattatttcaagaacacgaaggctcacgaagcgcgacgccctggtgagggagatgacctgctgggcctgg

SEQ ID NO: 435093 - DNA, 520 bp, Oryza sativa
ttgttgtttttttttttttttttttttttttttttttttttgaaaggaaatgtgctgactttattcatgctgcaggatctgaccaagggcttcagaattccccactcaaaaagaccttgggtgcaaaaggaacatggaaatatgaattttcccaggaaaagctggcatataccttagggaattgacccatgtgccggcccttacggcgattagcgttatattgaagattaacattcattcaactaggggcttatacaaaataggaccttacactataatttatacaattgaaaaaccaatatatgaatggaattcttcaaacccatatgcctggcatgcaatacagaacgcagcaacaggagtccctttcagccaggttggttcaaaggggggtaaaattgattttggagcatttcatcactcaaggctgtggaactctgctccttacctaggccacaaatcctgatgaagatgatgaaccgtatattttttccgcttgcgccaccggaacatacaccac

SEQ ID NO: 435094 - DNA, 265 bp, Oryza sativa
tgcgacgaccacgcgttttttgaggggaggctcgttcttgatccatggcgggcttcttcttcgagctgatctaccgccgcggccacgacgcgcagccggccgtgggtgacgttgacggctgcggcgtgatggccgccgccgggtacttatcatcggccaagccgccgcacaagccaccactcggcccgctgcggtatctgctcgccgagcagcggctggtgttcgggctcgtcggcatggccatcgcgttgctgggcttcctcct

SEQ ID NO: 435095 - DNA, 412 bp, Oryza sativa
cttgtctacctgttgtttttttctattcacatatagtaaaaggcctggttaatttgtctccagataagacatacccataactacttagacacttagatatagccaagcaggaaatgcccaaggaggggactcaagataccacatacccataattagctagatcggggtaagaagtagacacccaaggacggatgcacatacttaacatgggggacataaatacagcagaagaatccttccattgggcgtgcaatcccttaagcaagatgacattaagcaatcttgaatccagcaagcggcctgctcaagtgagccaccattcctctactttccgggggcatctggagctcccccttcattttggtgagccccccaactattcgagcccaaaaacaatgcattcttttgcatt

SEQ ID NO: 435096 - DNA, 231 bp, Oryza sativa
ttatctcggcgttggctagccgctgctgaccgtgttgccctacgagcgcgcgcggggcaggatctgggatctctacatggacaggcagctggcgccgtgcgccgggagggtgtggcaggtcgccggcgggcgccgcggtcgctggtgctggagaggatggtaggggccagctggtggctgcgatgcggacgctggaagccgagctcggcggcaggaggtactttggcggcg

SEQ ID NO: 435097 - DNA, 452 bp, Oryza sativa
ggcgtctgtggttggggatgattacaaatgctccgtctaggcggcggctgtgggtgtgccgtcgttgagcaagctgaagctggccggtaaccttggcacggatgatggcatggacgagtgccttagcaatgcggccgctatgaagggggcaccggtggccgggatcgtttagacgcatacgttgccgcaggtggcgccggatgtggcgaaggattcgttgctggctaacctgttcggtggcgtctcggcggtgaaggcggcgaacgcccaggtgcagctagcgcagttcccctacgacgcggaggcgattcaggccgtggacgccgcgctggtggcggagcttaccaggatgtacgacaccaagcgggggaatttacgggaccccgccgaggcggtcaagaacgcggcggcggcggggcacaccgcgctgtacgcgcacgccgaggagcagc

SEQ ID NO: 435098 - DNA, 305 bp, Oryza sativa
ccttgggagccaaacttaaaatgccatttatattatgatcaccaccactacatcccttaatagagacataaccacccactgatcatcatcaccaacaccgtcgtcgccgtcgcagtcgggtgccggtgggagaccttgacggccgccccaaaagggacattcctccccctttatcatccggcggacacctgaaacaagacggttttgtcacaacccatcatggccgccgttccggccgcgacaggtagacccggcattggatcattggacggccaactttaaaccccggttccacggtgaacccg

SEQ ID NO: 435099 - DNA, 410 bp, Oryza sativa
tttttgtttgtttttttttttttttttttttttttttttttttttttttttttttttttttttggggaaaaaaacaaggattcaaacattgcttttttaaacaataacctttccaaactccaaaaggggcccttgccatttacaaacccccccctaaatttcaaacaaatcctcaaaactatgccaagccctaactacatcacctagctccattttaagggggtcccacccaaacccttttaccttgcccgtgccgccgtaaacgtgcccgggggggacctccagcctaagttggacgagcaacagggggggggccacctccgagatgtccaccgacataggggggatccccgactacagccgcccccccggcagggggaaggcattaaccccttttttccccccaccac

SEQ ID NO: 435100 - DNA, 347 bp, Oryza sativa
ttgtcctgctgctgccgtattgttaaagacaggagtgcacgtttgaccggaaaaactatccagtttgaacgccatggctcggcagcccgcgctcgtcggcgtcgtcgtcgcagctgtcgcgctcgccggcggcggctcgctcggcttcgagttccatgaggccaccgtcgacgccatccagctcggcttcagcaacggcagtctcacctccacggcgctcgtccgcttgtacctcgaccgcatagcccgcctcaacacgcttcttcacgccgtcatcgaggtcaaccccgacgcgctcgcccaggcggcgcgcgccgacgccgagcgcgccaccggacaccgttgcg

SEQ ID NO: 435101 - DNA, 508 bp, Oryza sativa
tgtttggttttttttttttttttttgacaagatgggcatatcattctactcattgttcaggtcctgcgtcatcaccacctcactagtcaccagtaagtgaaatcagcaggataatactgataatacatacatacacaaaaggggggtaaaagggacacacatgtaatacatacacaaattgggggcaaagaatgagaaacagatacaaaattgtacatgtgccgcatgccaaaaaaaaaggaaaaaaaaaaacagaacctgactgggctttcatggctttctccttgcacagctgatgccactcctgcaaaacggccgcctggagggcacggggctcagcttcctccgccgggagctttgaaagcgtcgaggggcccttggggttcccgaattcatccaggtcctcggttggcttcttctcctcttcctcttcttcctttgatttcgcaggcggcaccttcggtttggctgccttgagcagggctattctctccatggagatctttag

SEQ ID NO: 435102 - DNA, 398 bp, Oryza sativa
tggtgggaaatataaattggaactgaaatttttatttttattttgttttttttattgtactggagtttaacaaggattaagacagagttgtttaaaggataaaggttcaaaacaaaaaaaggggggccggggcatttgcaaacacaaatataaaatggaaaacaagggaaaaaacaaggccaagccttaaggagagagcaaatagctaaacagagggggtatgaagaaaaccgttgtaccggaacatgggggagctaccacaggctaagggggcacccccaaaaaaaaataggagaggtaatgggggggaaaaaaataaggtggttcatctaaaaaggggggataccgggggacgggggctccccaggcagggggagggcaaaaaacggttttttcct

SEQ ID NO: 435103 - DNA, 318 bp, Oryza sativa
ttgggagctcctcatgaagttcatggagagcggtagcgttggcgccggcgccggcgccgccgcgagggaccaccaccacgaacaccatggcggcgtcggctactcgctgttcgcgccggcgccgtacgggcagttcgccacggagcagttcgcgttcgccggccacggcggcggtggcggcggctgcggcgtgtcgctcacgctcggcctcccgcacggcgccgagcagacggggtcgttccttatgaccagcagcaacgggagcgaccgcgccggccacgtcgtcggcggcggcgggtacgacatgaacatgcagag

SEQ ID NO: 435104 - DNA, 71 bp, Oryza sativa
ctgggggggcaaatagaagtatctgtgtcttcaatatcacaaagtatgattattcacttggcacagaaaag

SEQ ID NO: 435105 - DNA, 191 bp, Oryza sativa
tgttgtgaccaggtcgacggctaggagctgcggttgttttttttagctcgaggtccgggaagtgcactcttaccacgagttcgacggctacgaaaggcctattgtagctggctgcgtgatcaaggcgctcgtgaacctcatgggcattcttggcatgaatcgctggtattataagtgggtggacgggatct

SEQ ID NO: 435106 - DNA, 55 bp, Oryza sativa
gagggcgcaataataaattttttttgtacaaaaacactatgatatgaaaattaac

SEQ ID NO: 435107 - DNA, 294 bp, Oryza sativa
tattcgggcaagatgatttggtcgtcaatgaaattggaatggttattgctgaagtgatgcatgtctgcagtgatcatgatgatgatgaagggacagactcggctgaagactttgatgaaaatgagggtctacttcctctggaatcagattccactgatgatgcagtggatattgataatgaatcggacatatcgcctacctttttttgttgcaatgaatttgaatgatcaatcaacaaattacactttggaaaattcttccatttatggcactccaccgttgggtactgcaatg

SEQ ID NO: 435108 - DNA, 99 bp, Oryza sativa
ggggggcggaggttgtaatttgcttactacccaattactcaaacgccaaaacactcaagaaaatggaaaggcctgtccactgctagcaaggaccgggac

SEQ ID NO: 435109 - DNA, 463 bp, Oryza sativa
acgcgcgtcgtaatctctctgtgcaggaactgaagcaaggtttggatttgtagacatacatcagacagtgcaacgatgcagggaatggttagtgcaaggaacacatgtgctactagccatgcccacactttgtaccaggggcgctagatacatacacccagatgatcacaacattccacagatcgcatcctggaccgcggagcgggcgcatcaagagggctcggcgggggtgccggaccgcttgtcgactacgacgggaaactcgcagtgctggacgcagttggttgatgacgctcaccaggagagttctttgaaggaaaccgtaaccaaggttgccaattaccaccaatgttcgagcgcgacttttccccggcccattaatcacatccctggggtcccttttttcacccgggtttcacctttacattggggaaggcagtgcaatttctcggccttggcacac

SEQ ID NO: 435110 - DNA, 92 bp, Oryza sativa
ggggtcaaattttttgggttacacaagccaaaaatttattacacaggggggaaaaagaattcaaatcggtgcatgtttacaaaaactgaaat

SEQ ID NO: 435111 - DNA, 449 bp, Oryza sativa
tgttctaaattgtgctgaattaccacaagagaggcttctcagtttggatgagacatcggtgtacaaactaaaagatcaggatcaatgtgttcatgaacgaaagcaaatgtcccatccagttgaaaggttgttttttacaaaggagaaggatgccatgcacggtaaaaaacatcatgaagaaacctcaaccatgcatagctcgtactcaaatttatttgatccagccccatcatcgtcgtggattactgggaatttcaaggaaccaagtgtcatgccatcagaactgaagttcagaatattggataaggctcctgaattcaatttagatctcaaattggatagtttcccagacagtagtgtattagcccttaggcacgataagttatttcgtggaggcaccttcagtggatcccattttctgacagaaaggcttgggacatactcctaca

SEQ ID NO: 435112 - DNA, 459 bp, Oryza sativa
gggggcatacagaaggttctttgatcataatacgacaccagatgcatattcacttgaagaggaaagcgccatactacaatttaacatgagccaaccttaaacattaactgaatgcttaccactacagagggtttctcagagacataacaacgaaaagaatcaccgcggataggctccatgcagatcacttcaagagcgtttacgagtgacggcctgaaccctctgttctttccacctttacggatggcaaacctctattacctgctcacaagtgacctggctggatgagatccacatccatgtggatacggtcaccaggcatgcacatgttatactcctgatccttgttgttcataatctttgtgacattccccgggccattggaggggcttgtgcataactgatggctgcaacaagggtaaaagggtcagggccgtccaaactgaaattcttaattac

SEQ ID NO: 435113 - DNA, 185 bp, Oryza sativa
tcttatgaccaggtctacaacgaggatctgctatagcttgattcgcttgaggtccgggaagtgctgtcctcccactagtaccaccgaaagcaagagcccatgatcactaggtgagggctcaaggtgctcgggaacctaatggacatccctgacatgcagtgaagggattataagtcaatggacga

SEQ ID NO: 435114 - DNA, 85 bp, Oryza sativa
gggggggcaagaataagtttatagttttcacaaacaatccaaaatgaataacaacatgcagaagcaaccttccaacatcacaaag

SEQ ID NO: 435115 - DNA, 59 bp, Oryza sativa
cctactcatgcgctgtgagacgacgagaagcgagtagtttttgcggaagtggtcctaga

SEQ ID NO: 435116 - DNA, 102 bp, Oryza sativa
gggggggtaataattagttttcattgttccaaaacactctgaaattgaagctatcacgaaaaagcttaattcccacatcacatatcacagaaccaaatgacc

SEQ ID NO: 435117 - DNA, 81 bp, Oryza sativa
tgtaacaagcggtgaggaattcagagaatcgaggggtcattgataaaggggggcgcgaagctcaaaataaggcattctgta

SEQ ID NO: 435118 - DNA, 82 bp, Oryza sativa
gggggggtattaactggtttgcattgaacccaattactctgatgctgaaagtatcacaaaattggttaagaccaacctctca

SEQ ID NO: 435119 - DNA, 119 bp, Oryza sativa
cttatacactcgatgtgacactcaaatgttcgcttctacatgggcacactgtgcggcatagccacaacttccgtgtatgtcccaagactcacatagcttagtttccaccgactacatac

SEQ ID NO: 435120 - DNA, 322 bp, Oryza sativa
gggggggtcaaaattcattggtagggttgagcattactccaaagcaaatgtctccagcaaaaaggatgagacaaacataaacttttcggggatcgcgagtacatgcacaggtgtgtttcgtagcaatagccaacatccaattttcccagtggatacacactgacaagggccatacttctgcccccaaacaggctcaatttgatatgaagaggtgcagacagccacggagtgtctgcgagaatgagagaccgagatggcccgcactgtcggcgtaatcaggtcgccctcagtatgatatgcaccggactgtctgtatcaacca

SEQ ID NO: 435121 - DNA, 66 bp, Oryza sativa
cgcgatgataggcaccgaaacccccgcagatgatggttacgccttccgcaagcggcccagcgacgg

SEQ ID NO: 435122 - DNA, 497 bp, Oryza sativa
caatagattataattagctgctacaatcagtaatatacagcttgtgccaagttcaaaataggaggatgggttggcttcaagaatgttcatttaacagttcaacagcgaaaactacagtgtgcagtttataacatttcattcaagcataaacggtcactgaaagtaaacaacaggcctaaaccagcagcagttttttactctttaccagttgagttggtgttcgatgttgaatcacgtgacttcatttgcgacgtcacatggtgtgatatatacctttcgttgacctcgactatctgaccttgacccacatattactgttgtctgtccattccagtttccacgcttcgttttccaccccaggggttgaaggctcttttgccaccccacgggttaaaaccctttttatgcagaggtttatctgaattgaactttcttttaccaccccaagggttgaaagcccttttgccacccccagggttaaacgctctttttccgcc

SEQ ID NO: 435123 - DNA, 379 bp, Oryza sativa
tttacaacacgtcaagatttgtgcgctgtcacccactatcgctttctgtgtcatcaacaactactcgctctgacaccaacctgatcgtgcaacgtgacgtcatcatgcagccctgtcacgtgatgttgggcctgctgctcgtgcttgtagtgcatctgtcagctgtctccacatcacctagcacttcactgagtgtcaccagtgatgccagcaagatactgacaagacttgatcagctggcaccagtggtcagtgagcgcgtctccttatcaggtgatgctggtaaccttgacattggcggtgagagtgatgacgtaagcagcgaatatgtgattgaagaggaagagaacagcaatgacgtcacttcatcacctggtga

SEQ ID NO: 435124 - DNA, 369 bp, Oryza sativa
attatgttaacagttgataatacactgattggtacatatcagaagaggacaacagcatcatattatattccacatattataaaagttttatcgagatcacataatttatttcacaggcgcaaatgcagacctttagactgtatgctacacttgcagtaattggacacattggctataaggtggaatgtaggtcaccttactacagggcaaactggcctaggacggcggccgggccggcgtcaggagggctcccctgctggccatcggattggctaaacgtgtggttaacatgccaacattgccgggccacttgctgaccagtgcgtactgcgaccggcctgtgaacaggtcctgtgcggaggggaacag

SEQ ID NO: 435125 - DNA, 138 bp, Oryza sativa
ttttagccgagtcagtggctcgctatgctacctcacgagcttgaactgtgcttgcgatcagagcgagctggttactcaatgggtgctcgccgtggatgccgtaatggccgcgctcttcgtcggtggcggctccggggg

SEQ ID NO: 435126 - DNA, 391 bp, Oryza sativa
aaacaagaaaagggtcttttaggaaaacaagcaggggcctgggaaatttgaaacccccagttttaccccaaaaattcaccgggggaacaaactaaagccaaaatttgggaaaaacgggggcaaccaaattataacttggacaaacacccccacacttggccttttgggccaggtcaaccaccacgggggggggtttgggggctagtagcctataggcgccacggggggcccagggggagcccaaaacttggcagggttttttaaaccccttgacggggcaggggtcaccgggcaaccccgggggggggcgcccatttccatttttcacggccaaggccgagggggggttgttccccccccccactattgccggggatttttttttgttttt

SEQ ID NO: 435127 - DNA, 211 bp, Oryza sativa
tgtacgcgtgggcggacgcgtgggtgggaacttcggctagggccccccgtgaggcggccggacaccttccctgcatcctccaggacgcggttagcagagtcttcaccgcccagatcctccacttgtccggctacaccgcggcggagccagccgccctccgcgccctcttcgacatcgccgggcgctaccttgcctccctgggccgcgctga

SEQ ID NO: 435128 - DNA, 331 bp, Oryza sativa
ggggagattaagtaaatgatgtatatctattaaacaacatgtacaagatcccttgggaatgggccactacatgcctacaataaccgaatacatgcatgacatgacaaaaattctttacttgaacccaaaggcttaactaacgcactgatgatgatgagataaggtaaaaaaaaatgaacttttggagccttcctaacatgctatttacagactttggacgggtagcttaggacaccagtttattttttggtttggatcctacggttgagatcaacggcggcgtcttctcctggatttggcgcacaagcttggacatggacgggcggagccc

SEQ ID NO: 435129 - DNA, 214 bp, Oryza sativa
tgtccacctgatctgcatggagatcgccagcgttgccggttttaagagggcgtgtcctcgtgacatagcgagtgtgcgtgtgcgcaagcgcccgcggcaagatgttggacgcgtgcagcctgttggcgtgcgcccgatgctgctgcgtgggaggcggcgagacggagagcggtgcacgcatgttggacgagccagacatgcgcgggtgcagctg

SEQ ID NO: 435130 - DNA, 217 bp, Oryza sativa
aacgggttatttattgttttaatgttttcacatataatccaatactattcccaacacgcaaaagagaccatccaacattacgaagatctaaaccgatctgaccaaacctttcagttatagtagtaaatactatacgtaccatacaagccggtaacaatactaacaaaatctaagtcccatggaacgagcaattacacaatttcacacaggttccaaa

SEQ ID NO: 435131 - DNA, 64 bp, Oryza sativa
gcgcttacacatgctctctgagatgacgagaagcgcattatcctttcggtactggtcctagaac

SEQ ID NO: 435132 - DNA, 162 bp, Oryza sativa
gggggggtattattttgtttgcattgtaccaaattactctgatattgatagtaacacgaaaaaggttaaaaccaccatctcatagccaggaaccaaatgaccaccgcacagatctgggatggtactagttagcatagagtgacgattaacagctgagaccac

SEQ ID NO: 435133 - DNA, 238 bp, Oryza sativa
tgttatcactcgctgagcattgcaaagcttcgattgtaccttgcaaaagcgctgccgaaggcccatacgaaagtattctttcaatgtcccaagtagattatgaaggagcctgtaacccaggtaatggatttcaatattatgggtctggtccccaaagtgcgacggggttacagcccgtttttatacacgaccgtggagttctatgcttcattaaaggatgagtctttaatgactgggg

SEQ ID NO: 435134 - DNA, 101 bp, Oryza sativa
gggggggtattattaggattgcattgaaccaaattactctgaaattgaaagaaacacgaaaaaggttaaaaccaacaagtcataatcgagaaccagattac

SEQ ID NO: 435135 - DNA, 63 bp, Oryza sativa
gtatacaccgtatgaggacttcaaagctccgggggtactttgcgaaagtgggccccaccgccc

SEQ ID NO: 435136 - DNA, 97 bp, Oryza sativa
gggggggaaatattaggattgcatagaaccacattcctctgaaagtgaaagtaactggcatttggatgagaccagccactcatagccgggaaccagc

SEQ ID NO: 435137 - DNA, 78 bp, Oryza sativa
tgtatagactgtgtgtggacttaaaagcttcggttgttctttgcaaaattgggcctcaaagctcatacgcaagtgttc

SEQ ID NO: 435138 - DNA, 410 bp, Oryza sativa
gggggaattattattcattggtagtcttgagcatcattccagagcaaatgttttcaggaaaatgtaagagtcaaacataaacttttcgcagatcgagagtacatgcacaggtttgttacgaagcagtaaccaacatccacttttcccagtgtatacagattgacaagggccatacttctgcccccaaacaggctcaatatgatatgcagagttgcagacagcgacggagtgtatagagaatgagagattgagatggcccgcactgccggcgtaatcaggcagccctcagtatgatatgcaccccactgtctgtattaaccacatgaattatctacccaacttttagagcaagaactgtcttgtcaaaagccttctgcatttggcctctttcaaatggacctaggttaccc

SEQ ID NO: 435139 - DNA, 84 bp, Oryza sativa
ccccaataaagggaccgaaaccacctccgacgatggcttctccatttgcaaacggtccatctccggtgacgcgcccgtgttagt

SEQ ID NO: 435140 - DNA, 88 bp, Oryza sativa
aattgcattcaaccacattactctgaaggagaaggaagcaggaaataggaaaaaacaagccaaagatagccgaaaacaaggtgaccac

SEQ ID NO: 435141 - DNA, 93 bp, Oryza sativa
tcttataaagaaactttgtgcattgaagacctgggatcctactcggcgaaagtgctccgcaacgcttatacctctgaatgcgtgaccctaacc

SEQ ID NO: 435142 - DNA, 176 bp, Oryza sativa
taaaatattataggaaataaaaaataatttcctggttagaataaacacatttttaaaaaaaccaagaaaagattttcctcttctgttacattccttcttccttctccggccaccggagccgtagccgaattgtgcctcttctccggcgaggggagagggagagagggggtgtgagt

SEQ ID NO: 435143 - DNA, 408 bp, Oryza sativa
aaaatataaaaaaatattttaaggggggggtacaaaagctaatagaggtataaccaccattttctttcctatttttcttttatatttccctatatggatagaggccatgcccaagaaggaacataactttttttcttgaattcagaaaagctaaaatgtttgtcaataaagctaatttcacctttgaacggaaatggggaatcattgaattccaaaatttccggagaagggggcaccttgttgagagaatcagggggtggcacaatttaaaaagttttatacaggtcaagaactttcactagaagagagaatgctttctttttacgggaagcatttatgatttccgggggctgtttaaaaaattgggtgaatatttggaagatttatccgtttaaaattaacattttt

SEQ ID NO: 435144 - DNA, 182 bp, Oryza sativa
gggggaacttacaacctttaagcatttatttcctgctcagaaaaaaaacgaggattggttggaatccgaagagagaacgcatttgggcctaagtaacattcaaggggaacaaactgcactgccttgcacttggagggagttccatttcattaacagaacaggggggttatttctataggaac

SEQ ID NO: 435145 - DNA, 93 bp, Oryza sativa
gggggggtattattttgtttgcattttacccaattactctgatattgaaagtaacacgaaaaaggttaaaaccagcatgtcatagcagagaac

SEQ ID NO: 435146 - DNA, 197 bp, Oryza sativa
tgtatgcacagggtgtacaataccaagtcgcgctggtatttcgaaaaacggttcgctgaagccgctatggacgtcttcattgaggcctttgacttaaattttcaggtgccggtgaccaattgtttacgtagccatttgttactgcgtggttgcttgaggttgccagggtagtcaggggtgtattgacgcgaaggtcc

SEQ ID NO: 435147 - DNA, 51 bp, Oryza sativa
acgcttaaacaacgggtgtaccctaaaaagccagggtgctaattaacgaaa

SEQ ID NO: 435148 - DNA, 84 bp, Oryza sativa
gcatataaccatattgcttttaaagtgaaagtatcatggaattggttaaaacaaaacacacctaattgactacaagctagacac

SEQ ID NO: 435149 - DNA, 57 bp, Oryza sativa
atgaaagaacgtgtccgcactgcagacctgcgggtgtactttgcgacagtgggccgc

SEQ ID NO: 435150 - DNA, 105 bp, Oryza sativa
gaccgcacacaacctgattactttaaaagtgcaagaaacacggaatagcacacaaccagacacaccaaacagacaacgaggctgccaccccttaaaagtgcagct

SEQ ID NO: 435151 - DNA, 73 bp, Oryza sativa
tctaataaagaaagtgtccgcactgcagacctgggttcctactttgcgaaagtggtccgcaacgcttataccc

SEQ ID NO: 435152 - DNA, 419 bp, Oryza sativa
ttcggagtccgtcgtcgtgttcaacttggagttatacatacaccaccgtggtcggggaggcgatccaccggtggcaaggagaggcgacggtactgcgggatgctgagaacccgcagctgtttggcaacgggatgctggtggccttgtacggaaagaggttcgtgctgggccgggaaggggcaccagttaaagctgacaagatgctgttagatcctggaggcatgctatggcagagggcacatggtacctgtcagacataaggacggtctttgtcgccagcacgcctgctgggaacttatctgctgttgatatgcgccctgtggtatgcgcatggtgagaaaatcaatcaggcaatatggcagtgtaacgacatatcgggtggaggtgagcccggtgtaccagagatccagaacagggcc

SEQ ID NO: 435153 - DNA, 91 bp, Oryza sativa
ggggggtatttactggtttgcattgaacccaattcctctgatcctgaaagcaacacgaaaaaggtaaaaaccatcaaccccaagtccagta

SEQ ID NO: 435154 - DNA, 122 bp, Oryza sativa
tcgtaggacaggctggccagtccaagaagcagtggactatttcaaggcgatcgccacgcccgacgggcttttcagaaacgcctacaacctcattggaagggctgggaccaagctgttgggat

SEQ ID NO: 435155 - DNA, 97 bp, Oryza sativa
gggtgggaattaccatgtttgcacataaccatattcctctgaaagtgaaagaatcacggacaaggtgaaaaccaaaaactcctatcagagaacaaga

SEQ ID NO: 435156 - DNA, 63 bp, Oryza sativa
gggggggaaatatcaggtttgcacataaccagatcactctgaaagtgaaagactcaagaaaaa

SEQ ID NO: 435157 - DNA, 62 bp, Oryza sativa
tttatacatagtgtgtgcacttcatatctacggttctactttgcggaattggccctcaccgc

SEQ ID NO: 435158 - DNA, 105 bp, Oryza sativa
gcatattacctgattcctttgaaagtgaaagttgcatgggataggtaaaaaacagacactcctatctgactacgagctggacacaccagatgttggtagttacta

SEQ ID NO: 435159 - DNA, 72 bp, Oryza sativa
gtgatggaaagtgtctgcacttcaaatctacggtcgtactttgcataggtggcccccaacgctgatacccat

SEQ ID NO: 435160 - DNA, 123 bp, Oryza sativa
gattgcatacaaccttaatcctttgaatgtgaaagaaacagggaataggataaaaccaaacacgccaaatagacaacaagctagacacaactgaagttgaaaggtactaccaggaccaagccc

SEQ ID NO: 435161 - DNA, 73 bp, Oryza sativa
tataagcaccctgcccgccctgcagatctgcgagcctaccaagcaacagtgggccgcaacgctgacaaccatg

SEQ ID NO: 435162 - DNA, 125 bp, Oryza sativa
tctgagactctacttgccggagcagcatcaccgtggtcgttttgcgcaatggcgatcctcaaggcggacctgcgtgggctcgagccagcgactccggggtgggaggcggcccgggccgaagtgac

SEQ ID NO: 435163 - DNA, 62 bp, Oryza sativa
aaattatgtttctattctctttaagtcattgttctttttcttttttttttttgggcagaaag

SEQ ID NO: 435164 - DNA, 435 bp, Oryza sativa
ttctatttaagtgaaaaagggtccttttccatcatcctagggactgtaatttgtccattgctagacccaattggagcgttacttcccccactaacagtttgatccatagataacccattcaatgctacagacacttccttgcttgaatcactcaacctctgaacatacaaattgcaacagaaagtgatcactttaagtactggctggatgtagacagctctcacggacatcggcaggaggctgatccttggctgcagaagtgcctcaacaagctcaacaggatccttcgtgaagttcacatactcacctgagacccatgcagcaacagatagaacaggacaaaggaggtggttcccaagcaaagcatgatcaatgagaagagttctagatgaatgtacaagctctggccgagcattctgcacccttagttccaca

SEQ ID NO: 435165 - DNA, 96 bp, Oryza sativa
ttctttggggggatattaggttttccgcctttctcccttcatttcgacaaacacgactttccggtaaaaatgtaaaatatttctaagccttaaaaa

SEQ ID NO: 435166 - DNA, 112 bp, Oryza sativa
accatcttataaaatcggaggcgaggccaaggagacgggtgcattataataaggacgccgatagagcgctaacactccaaatactgcagagcgaagacgaatgagagggcag

SEQ ID NO: 435167 - DNA, 363 bp, Oryza sativa
tttataaaaaaaaaaaggaacgctcccttttgtgcgccagaccgacgccggatcctcccgccggagccgctcagatcctcctagcgcgcgccagcccgctgtcgccgcctcccgacggagctggtcgccttcttcacagtgctcgcccgacggagacggctgaccctacccaccgctggctgatagcctgctcgcgccacgccgtgatggagaggaaagagaggcggggtctgctcgccctaccccgccgtctgctcgcgtgcgcaggccggacattcgggcgtggacgcccgaaaggggatatgaggcggcggaaattctcgctaggaggaggagagggggccaacggaggagggctagagg

SEQ ID NO: 435168 - DNA, 92 bp, Oryza sativa
aaaccaacgcgaaaaaggtttataagggggttggaaagccgagtacgcctttaacaaaacaaattggagggagaggtatgccatttatatca

SEQ ID NO: 435169 - DNA, 140 bp, Oryza sativa
ttttttttgggggggtattaacaggtttgtacataaccagattactctgaacgtgaaagattcaaggactaggtggaaaaccgagtcgcatatcagggtacaagttagacatgacagtacttgcttgcgagtacaaggat

SEQ ID NO: 435170 - DNA, 218 bp, Oryza sativa
tataatcactgtgtgcgcacctcaaagcttcggtggtagttttcagaattatcccccaagggtcatgagaaggcggacatcaagaccatagtctttgtcctcgtaggcacggtgacgtgcagctccacgggcctgttgacctacaagctcggaggtatctgcaagcgtgagagctagaggtcaaagaaggaagcccctgatatgaacaagttgtggat

SEQ ID NO: 435171 - DNA, 135 bp, Oryza sativa
gggggggaattacgatgttttcacataaccagatccctctgaaagtgaaagacgcacggactaggtgaaaacccaacagtcataatcgagaacaagatagacacgccctgaacttgctaggtagtacaaggaaaa

SEQ ID NO: 435172 - DNA, 60 bp, Oryza sativa
gatacggacagtgtgtgcacttcatatctccggtggtagctttcagaatcagctctcacc

SEQ ID NO: 435173 - DNA, 125 bp, Oryza sativa
gattgcatacaattttatttgtttgaatgtgaaagaagcaggggaaaggataaaaacaaacaagccaaatagacaacgagctagacacaactgaagttgaaaggtactaccaggaataagtccaa

SEQ ID NO: 435174 - DNA, 62 bp, Oryza sativa
tataaacaccctggccgcactgcaaatctgcggtcctattcagcaaaggtggtccccaacgc

SEQ ID NO: 435175 - DNA, 74 bp, Oryza sativa
gctcataaggaaaagagcggaatttcaaaactgggggcgttgtgacacgaggaggctgaggaggaggaaaccca

SEQ ID NO: 435176 - DNA, 69 bp, Oryza sativa
ttgtataaccatagcggcctgaccacacaaatcttgtcctggggaaaggtagaacctcacaccactgat

SEQ ID NO: 435177 - DNA, 74 bp, Oryza sativa
gaggaggatacttttattaagagcaatgtttataagaagcagtcccaaacagaagaaaagatggaatggttgta

SEQ ID NO: 435178 - DNA, 72 bp, Oryza sativa
tttcttttcatggtggggtttttatccggaatgcttcttatttttcacgactttttattggcttataacacc

SEQ ID NO: 435179 - DNA, 232 bp, Oryza sativa
gggtgggaattattttgtttttatatatccagattagtctgaaagtgaaagagtcaaggacttggtggaaaaaatagacttctattagagtacaagatagataagcctgaacttttttagtagtgcaaggataaagtcgttaaaagactttgggattcttgaagagaatgacattcagggcatgaccgatctggcatattaccaggataacgacgcgagttcgaaaaatact

SEQ ID NO: 435180 - DNA, 198 bp, Oryza sativa
tgttatcacagtgtgcggatttcaaatctacggttgtaagcttaagaatgagctcccatgggtcccacgaaagcggcctgtccgagcctaaaatgagctggagcacgccacggtgaccagcttatatgcagtcgtgtaccccggggccgactcgtccggctgctgaagctactggtcgacacaacagaccggatcacc

SEQ ID NO: 435181 - DNA, 131 bp, Oryza sativa
gggggggaattacgatgtttttacataactagatttgtctgaatgtgaaagagtcaaggaataggtgaaaaacaaaaacttatattagagaacaagatagataagccagaacttggttgagtagtagaagg

SEQ ID NO: 435182 - DNA, 270 bp, Oryza sativa
gataagcacagtgtgtggacttcaaatcttcggttgtattttgaggaatcagccctcaacggtcatacgaacgcgggctgtacgaccacaacatgacctggagcatgcacggtgaccagcttatacgtgcacatgttccccgcggacgaatcgtgcggcagctgcagtgacagatcggcgacaacgtccgcctcaccagctacgagtaagtggcggatgccaaaggcgcacggctatgggatgccattggagggctcttaatggaccggt

SEQ ID NO: 435183 - DNA, 79 bp, Oryza sativa
gctatggatagggtgggcaccccaaagattgggggtttcttcgacgacgcagccccgatggcccacgcgaccgggtgcg

SEQ ID NO: 435184 - DNA, 121 bp, Oryza sativa
atataactagatcactctgaatgtgaaagacactagggatagcagaaaaccaaacaatccaaatagactacgagctagacacacccgaacttgctagcgactaccaggatcaagccgctac

SEQ ID NO: 435185 - DNA, 72 bp, Oryza sativa
tcaatgcgttttgtggagactacatatctggggtcctatttctgacaagaggtcctcacggcggatgcacct

SEQ ID NO: 435186 - DNA, 160 bp, Oryza sativa
acataattagatttgtttgaatgggaaagaagcaaggaactggagaaaaacaaagaatccaaatagggaacgggctagacaaaacacaagttgctgggtagctagaaggaacaagcccatactagcgctgcgaagaccccaaaggagagaaaaccaaagc

SEQ ID NO: 435187 - DNA, 225 bp, Oryza sativa
tctgtaactcctggcggctagcccgcacagcagcggggcccataagcaaaagaagctcagatcactcaagaacctgtgaggcgacggcccggcggatgacatccaccaggaaaagcggcaacaggagcagcgcgccactacgctggctgagacagctcgcggctcgccggaggaggaggagacgaccgcgacggaccagccggcagcggcaagtgccggtcgccg

SEQ ID NO: 435188 - DNA, 383 bp, Oryza sativa
agcctttggtccggcgggtggtgtggcggtggcgcgactagtggaggtagggcttcctgccttagaccagcctgttctccctctgggccttggcgcgggcacggtgacggcggaggatgccttcgtactgcttcgcgttgacatagattcggcgcatcggtatggcgcgtttagcggcatgtatgcattcgccctgccacctcatttgatttccatccgcgttaggtggtcaataagaaccatagcatttggctccataccaaggaataacttggtgagaggacctgaaaccacatggcctagtaatgttaacccaaattaggcaacgcataacacaccttgatggttactattcagaaaataaaatctttttagtaagtaca

SEQ ID NO: 435189 - DNA, 342 bp, Oryza sativa
tcttgatagatcgcgagcggccgacctttatgggtttctctttatctaaactgggcaagggagacgacaaccacggtggcggaggtgatgctgagcttcaagcaaaaccactaggggtttggccatgtttgcgccgctggagctggaccgctagaggagcagtcaccgtggtgggcggggtcgcagatgctgtacggggaggcgtcgcctgaggaggctgccctgcgcgacagcggtcagatccaggtcgggcccggaggccgcgaccagctggatccggcggcgcccgagccggtgaagacaggggtgcccgcgatgcccaaaaaagggggaggatgaggg

SEQ ID NO: 435190 - DNA, 237 bp, Oryza sativa
aaaaaaaaaaacggtttataggtgcataagctaacccaagttcaaatccctggaagggggggggcttttcttctcccggggggcccggggggggactttggaatttccttttctttttatacaaaaattggacttaaaaaacaggtggggtggccccacacaaatttgaaattaaccccacccgaaaagggtcgctttttttggccgctccggggggggccccccggggtttttggc

SEQ ID NO: 435191 - DNA, 209 bp, Oryza sativa
atctgaatgataaataaactcggactaggtgaaaaacacacaatactttcaaaaaacaagttagataagaccgaacatacttggggcttcaaggaactggagttcaagggctcccgaagtctagaggccaaatacaattccaggctagacccccctggcattttcgaggttgacggcacattgctaaaaaatggtaactcggagccaat

SEQ ID NO: 435192 - DNA, 325 bp, Oryza sativa
ggtgatgctggtgacctgaagcccctaacgggggtcgactcatgctacaatggcgtcacggaagagagccacagcacgaaggatcacctgttcagagctgctctcccgagatcaagtggctcggttgcgcccccggacagtgagaagatggccatgaacagcctctggtacagctactactactacccggcatatccacatccgtgtcatcagtattatcaatatgcgcaggagcacagatacgccggttggtattatactgcaatgcatggctactatccacataatgtgccacaggacttcagggacgctaccccaaatgtat

SEQ ID NO: 435193 - DNA, 53 bp, Oryza sativa
tgtcatgctcccggggtgggtcacaacccccgggtggttatatccaaatgagc

SEQ ID NO: 435194 - DNA, 198 bp, Oryza sativa
ttttattttgggggtacaatgaacagatcctcttatgctttgtcttaatagttttacatgcttctacaatacattgaacaggttcttttatactttgaattacatgctacaaaacatttaaccttactttacatacaattaaaagttctcgagagaaggttcaaggcactcaaagctttattgagttcacacatttaa

SEQ ID NO: 435195 - DNA, 281 bp, Oryza sativa
tgtcaacaagaacaggaggagtaaagcctcggggtttacgttcccatgctacgcgacctccgacgaagagactaggcggtgaactcgcgcacgccaacccggtccacccaggcccagggccacctcggcggggatcgccagagaagggggtcgacgggcggagcgggcgctaccaccacatggacgggggagggggcgagtagggcgacggctggggagaggacaacgagccgctgacagatctgccgcgcgggctgccggagggggcgggggcccccatg

SEQ ID NO: 435196 - DNA, 285 bp, Oryza sativa
aaattcaggccaccaaagaaggccaaccgaaatttaaagggggggcacaattttgtacatggggccactaaacaaactttaccacttggtaaagggaggggacaaagaacagccttataaccctataaaccccaccctagaggcagggagacggctacaaaaaatttggtgcaacaaaaaacggtaaatactttaaaccaccgggagaggacaaaacactccgtggccaggaacttgggggaagaggccccaaacaaatttcctgaaaaaccaggggggattaaa

SEQ ID NO: 435197 - DNA, 268 bp, Oryza sativa
gtcggggtacatggtggggctacaacatgccgtgtacgtgtatcaccacggcgctggcgctggtggtgctccacatctgagacgacccctcgagaggcagctccaaaggctcccaaggcagagaataagccagcagataagaagaccgcagccggagaggagaagtatgcagaaaaggcgcccgttgcgaagaaggccaaggcggaaaatcagatgccggagacaaaagcggtctccaaagagggcggggccgacgacaagaagggga

SEQ ID NO: 435198 - DNA, 239 bp, Oryza sativa
ttgtaaaggtctccctcctcctcacgaatcccggggctctctctatctctgtcgctctctggctctgtctctctccatttgagccgagccctcgagaggcagcaccgatggcacccagggcagagaataagccggcagggaagaagcccgcacccggccaggagaagcacgtagtgaaggcgccggtggcgaagaaaggcaaagcggacaaaccgaatcgggagatcaaagccgcccaa

SEQ ID NO: 435199 - DNA, 338 bp, Oryza sativa
ggttcggccttaattcggtgttatttttgatggcttgcgtggctagcttcatccatcatctttctagaacgagaagaagctacactgcatgcatgcatgactgatcagtcattgacaattaacatgcattatcaccagttgatccacctaaattaaataatcaaaacaccacattaatccaccattaacttgatcatctcatcgatcgatcgattgattagctagttccatgcttgcatgatgcatcgatgaaccctaataatctgggggttaattaatataataattaattaattacttcattttttggcccagtgagccggccatgcccatcccgg

SEQ ID NO: 435200 - DNA, 383 bp, Oryza sativa
tctagcacggcaacagcggtaacaacgccgactcggggagcatcttctccgggaacatgatgggcggcggcggcggcttctcgtccttgtacagctcgtccgaccagaccgtcccgccgccgcagatgtcggcgacggcgcttctccagaaggccgcacagatgggcgcgacgacgagcagcggcggcgccggcagcgtgaactcgctactcagaggtctcggaagcggcggcggcggcggcgctctgaacggtaagcccgccggagcagccgggttcatcatgtccggggagagctcgtctaggagcactgcttctcagacggcggagaacgagagccagctccgggagctgatgatgaacacgctctcggcgacccggggc

SEQ ID NO: 435201 - DNA, 435 bp, Oryza sativa
gacttagtctatggtattacaacatcagggcagcatttcagacaccacccgtcaacttctcagctcaatgagtttgtagatggaggccagagcaatgctgtgcacgaacagcatacggtactgcgcacagcggccgtacactctgcacatgctgtcacgcatgacggtatatcctggggcggcgactgaggcagcccccctcttggcaagactagcccccagcctattgttcctcatccactcctttgcccaaacatgcaatagtggcggctctaacaatatttgccagataatatcggccgcgggtcaaacaagcacaccacttctgcccaactccagtgaaccatggttgagttgctcggcaatgacaggcaacacaaccacccactgcgggcacagtaacagccccaggacacagttgagtggcggaagact

SEQ ID NO: 435202 - DNA, 395 bp, Oryza sativa
tgttcttttccttcttttcgttgcagggatgaagctggtgtggtgcccggagatggcgtccaaggcgtacatcgacggcgtcagggcgctggccggccacgacctggccggcgccgcggcggacgtggcggagctcgtgtccgccatggccggcaggtggaacgcgcggttcatcgccgaggcgccggactccgcggactacggcggcagccgccacgagcctcgtgctggccgcagccgcgcggggcacgggcggtcgctacgccctcgtgctgacggaccgggatgctgcggcggcctctgcggcggaaacggccgcagacgctgccggggaggcggaccaggcgatggcggggctacacggcgtgggcctgctggtggtcgacgcgcggagg

SEQ ID NO: 435203 - DNA, 418 bp, Oryza sativa
ctcctcctccctaccattaactaccaccatcctcttcttggcacttggcatcaagagacacatccagacgcctcgagttgtagctagcaccagtggctcagcttgcccagtgctgctgcatcgatcagaggcagtagctagctcagctctagccttttggcaccgaccgctccgatcgaatcctgtgctaggctagccagcctcctcgctctttataaccccagccgccattggagagggagggagggagctagagctttgttcttgatcttgcatgctgttcttgttgatcgagtgagagagggggaaggaagaaaggagggaggcacatgcttatacggttcgtgctggaggatctgagcgccagaatcttacaacagtgagaggcttcgctgggagtctatgatcaacttcacac

SEQ ID NO: 435204 - DNA, 307 bp, Oryza sativa
ttcgttcttcgctcgctcgcgggtcgcggcaccactccgcctcgccctttctcttattaagtcgcctccaactccgcggttcaaaacctcctcggcttcttcctccaccaccaccaccaccaccaccaccaccactccgcgccgccgacgccgccgccgtcgccgtagacgcggtataccggtgattccttgcctgcatttctgatttgctgcttttgggttgggggaggagggctttgtttgtccgcacgcctgcttgctagtttgtcttgctgagcggcgcggggggatcggtggcagggggctg

SEQ ID NO: 435205 - DNA, 102 bp, Oryza sativa
gttgggggttcctcgtgtgcctgcaggctaggtgtctgtggaattgcctccctggaagcagctgtcgggaaaggctgcagaggagaggaaattgagggagaa

SEQ ID NO: 435206 - DNA, 475 bp, Oryza sativa
cgaaccccgccgccgctgccttatcggaggcgagagctccgatcccaaaacccccccgcccctcggcgatggcgccgccgcgccatctcctcctcctcctcctcctcggcttcctcgccgccgcctccctcgcgttcacgctcaccgccgccgtgtacgaggaccaggtcggcctcgcggactggcatcagaagtacatcggcaaagtaaagcaggcagtctaccacagtcagaaaagtggaaggagacgtgttgtggtgttgacagaggaaaatgttattgcttctcttgatcttcgttcaggagatatattttggaggcacgtcattgagaagaatgatcctgtggatgagcttagtttatcacttggaaaatatgttgtaactctttcttcgggaggcagtatattgagggcatggaatcttcctgatggccagatgatctgggaaactaatcttcaagtttccaaatcatc

SEQ ID NO: 435207 - DNA, 460 bp, Oryza sativa
gtcctcttcctcctcgtatcgttatcgcatcgcatcgcccagatctcccgccgagttagatcctaatccgaggagagactcgagtcatggaggattctgcgcggccgacgcccgctgactccggggagctccccaacggcgcggggatggcggaggatgcggtggtggcgcccgacgcgggggaggctccggaggagggggaggaatcgggaattgcgaacgattcggagacgaacgcggctctgggcgcagagggcgagccctcgcgggcgctcaccatgcgggagctgcttggggagctcaaggacagcggggagccctcgtcggggagatccacgctttcggagggcaatgggatcggatctgccggtgcggagcgcgccagccaggacagcctacagttctcatcccatcatgatgttgccatggacttgataaatagtgtcactggagttgacga

SEQ ID NO: 435208 - DNA, 402 bp, Oryza sativa
aaaaaaaaaaacataatttgattaattgcagggaaggtcgacgcagtatgtccatttcacttcatggacaatgcaacagagaatgcccatatgatgcaaaacactacaaaaatgctatgttgctgctgcagcaccagcggcaaatttacatttcgccaagactgataaaacgttttatttcctttcccctccgcggacatgtagtttaaagtaaaagattcacccatgtcttcagaatcttttcattgataaaaactacagcatatgaagctgcgcttcgacagccagattgggacaccattgttcgcactctttcgtgagggtgcttgttagtacttttttttccttgttcaacttgatggcttggtctgcattttcttcttcttgcaactcttatccttt

SEQ ID NO: 435209 - DNA, 460 bp, Oryza sativa
tcgtacgccggagtcgctgctccgcttaggttcgggcagaggatgctccttggtggcgcggagaggaggtggtcgccgccgccgccgccgcggccgaagccgaagcacaagctcgtgctgcgggagatcgaacctggggaaagctccgaggttccttcagaaacaaaacattcagaagcaaaacctttggaaacaaaacctttacaaacaaaggtttcaggagtgaagaggaaagtagatgcaattcctgcaaccactcgaccagggaaattacagaaaccagcccaggactggagctgtgcactatgtcaagtgagtgcaactagtgagggagctctaaatgaacatcttgaagggaaaaggcataaggcaaagctggctcattgtggagccagcaatgcgattaaggatggcaaaagcagcccgaaagaaaaaactgcaaataaggatgacgcaggcc

SEQ ID NO: 435210 - DNA, 420 bp, Oryza sativa
gataaatgaagcaggcaaatggcgctagaaatattatcattcgatcatgaattctgattgcgagagttacatcaaaccagcatacctgtggaaactgaacgacaaacttacagaatttattctctaaacttgctatgatcaacatcattgagccgttgacaacagaaagttgtgccctataacgtcacaggtaagtagtgctttgagacacactggcagaaggttagactaaagatgaagtttcagtggttctggcaaatcttcaattttgtcctttggacgatagcagcaacaactaaactgagaacacttcttgaaggtctgacaccatgtgcagttcttcataagcaaattaaggttcgcctcagaaattttttttaggaggatttattcatccttcaggagttttctagcttatct

SEQ ID NO: 435211 - DNA, 333 bp, Oryza sativa
tgtcgtgcgcaccactcgcccggtcgccccatccccactctggcactccagcgcccaaaaaccttcgcctccgcctccgccatgggagaccaccgcgccacggccaaggtccgcgtgaacggcgcgccggcagaagcgacgctcttctgcaccgacccgccgggtgcagctaatggcggcggcggagatggaggggagctccggtggcggtgcgctggtggcgccgcggcggagcgcgtgctgccgctggacgcggacgtgcttggggacgaggccagggggccaggcggaagggttgatggccctcgccgtgtagggggacacaccctgtag

SEQ ID NO: 435212 - DNA, 385 bp, Oryza sativa
ttcgtttccgccagcgccgaggtcgcctacgcccggcggagagaccgggtcgtgcccgcgcgacacgctgaagctgcacgtgtgcaccaacgtgctcgggctcctgaaggacaagatcaggggcggtggctgccgacgagccctgctgcttggtgatcgacggcactaggggacctcgacaccgtcgcctggctgtggaccgtcatcaaggccaacgtgcttgggctcaagcttaacatccccagcgatctaaggcttattctcaacaactggggcaagatctgaccatccgactgccagtgaagcttaatgcacatggggacactgaagagcgatcgaacgactgatcgacagacagtgaggtacacggtgtctacatgttttt

SEQ ID NO: 435213 - DNA, 415 bp, Oryza sativa
ccgtgttgctgggctccgggcgcgctcctagcgggggttgtccacgccgcggtgcggcggtgccaacttcctccggactaccggagcgggaccaacgtgtgctgtgggaggacctactcgacgcacgtggctgctcgtcctccgcctcgccgcgctgatccgtctctgggccctcggtgcccgcctacccggaccgaccggcttccccgccgaccctggcctcgccgccggtgacatcaccggctacctatagaagtaacatggcagttatggcccaggtgcacgactgtggctcggaccctctcaactgcttgactcaggaaaagattctagggagattaaagagatgctaacaaaggctgaagataagtaaccgttgactgggaagacatataatcaggcttgcggaaaaact

SEQ ID NO: 435214 - DNA, 293 bp, Oryza sativa
tcgtgtcgacatccactcccacactccgtcggccacctgccctactcctccctcctcttcctctccttctccctaccctatgattgctctcctcctccccgagctctccccctagccgcccaggcagccgcactccgggagccagcaagcccagccccgtggtccggcgcgggggggagatggcggcggccgagttcttgtcgccggaggcggcggcggcggcgggggtggggccggtgcggcagcagcagcatccggtggaggcggcgtggcgggcggcggtggggtgactc

SEQ ID NO: 435215 - DNA, 461 bp, Oryza sativa
tgctgccaagggcagggtcctgccgctggtggcggtggcggcagcgctcgcggcggcgctcctctaccgcgcgcccttttccaagagcctgggcggtgaggggtgcagccttctcccccacgaccacttctggatcgccagcgagcgcgtcgacacgctcggacgggtcggccccgccgcaatggaggtgaagggagggctgatcaacgcgatcgccgtcggggattaccggagctcactgctccggcgaccggtggtggactacggtgacgcggctatcatgcccggactgatcgatgtgcacgcgcatcttgatgagccaggacgtgctgagtggcaggggttctccactggcacaagagcagcagctgcaggtggcattacaacattagtggacatgccttttaatagctaccacgcaactgtgtctgaagaaactctcaagccgcagctggatgcac

SEQ ID NO: 435216 - DNA, 479 bp, Oryza sativa
agttgtcctacttgctgtacttgatctcacctgctttttgcagccacccgcacagacagcaaaatggcactctgcgtcaaggccaacaaggcagtctcctgcactgctgcccgcaagcaggtggcccgcgctggtgtggcccgcccagtcttggcacgccgtatggccgtgcaggctagcgcccagaaggagagcagcccagtggccgcacagctcactgcaggcctgaccgctgctgccgccaccaacatgctgatgcccctggcagctgctgctgaggtcaccccatccctgaggaacttcatctacagcctggttgctggtggtgccgtgctgggtgccattgccctggccatcacagccgtgttcaactttgacccagtgaagcgcggttaagccactcaacccagcagatgatggcagcagtgacaaggacagtcctgcagcgccgctgctgcctgccaggtggctctcacagg

SEQ ID NO: 435217 - DNA, 174 bp, Oryza sativa
ctacttctccccctctttaccttttcctcctcggttcggttccgtggctcgcctagggcttagcgggttgagatggccgccccggatgcatccatccagtcgcttcgtcggcggagctcgcctgggccacacgagagccgctccctcgaggcctccttctacacccaccgccag

SEQ ID NO: 435218 - DNA, 451 bp, Oryza sativa
ttgtggggggcccggcaatggccgacgccggtgagctggagggcttccggcgcctgtccggcctcgccttcgacgagctctcccggcgggacctctcctccgcctccggcccgccacccgccgacctccccacgctcctccgcctctgcctcctgtcgctgcctctctccgccgacgcggagctggcgttacgccgctgcacccgcctgctcgcctccctccgcggcatcctctgccgcgacctcgacccctcactgctccccgccctcgaggtgttcctggacaatcttgtatctagcaaccaactgatgacttgctttactgcggccaatgctgctatgccgagacgctcaagaatcacctctctgggttcggtgtgcagtggtggcaaccttttcgtcatggagctcatgtcgcatcacttcatttcatctgtgcaagacgaggaggg

SEQ ID NO: 435219 - DNA, 59 bp, Oryza sativa
tcttttggtggtttttattttttttatccggcactcccagccaagaatcatttcgaatt

SEQ ID NO: 435220 - DNA, 445 bp, Oryza sativa
atcgtaagtttgttgcctcaggaggcccattggtacttcttcaaggtgcttgcctttggaagcacaaaccctgtggagcacccatttctagaaccagcagctatggaaatggcagcagagtacagatgttttgtagctgctaatttcgttgcttcattattcagagctaatttttgcacccagttttggcatttgctccttagatgtcacagaaacatcgttgagaaacatgtcattctatttggtgaacattcatacactcttgttcaaaaaaatcacggtatatatcttgttgaaaattttagggatccaaaattcattctagtcaatggctataaaacaagtctcagggatgatgatcctaaggtaatgctacatgaaggccatactggaacttttaaagctcatggaaaatttgaggtcctagtatggagatcacgcatac

SEQ ID NO: 435221 - DNA, 452 bp, Oryza sativa
tctttttgttcttgcatccttgacattggaaaaaatagattcggttttcacaagctctttgtttctctctctctttttttcttgtgttaatttcgatttgtaagcttgtaatgataagtagtacttgtttgcataaacttattggagttgggttattgtactttccccaaagagaggagtacatctaagatttggttaattgttgcactcccttaaggggcatgaacttgtatgcctgaaatgtgcttcctttcttttgctagtacttgtccaagattcaacctcaagtgtactctccttcttgaggaataaagttaatgatgtactacaataccatgtttagtttcaaacctgaagtgtatgattcatctggtcaaactcctgctttgaccagtttttgccctttagtgttcattcatgccaaagccccaaatcttttttattgggtattt

SEQ ID NO: 435222 - DNA, 436 bp, Oryza sativa
gttactatcctgttatctggaaaccccatctgcacatctccaaatcaactgaacattactcagtactgtcaatcagtgccagttattgtgcctgacggttctgcaagtaatgccacagtttgtccgccatgctctactgaccttccgtttgaaaacatactgatgtcaccaatacgatgtatatgtgctattccactttatgttgattaccggctaaagagtcctggattttgggattttgttccatatgaaggacagtttcaacagtacttgtcatctggactttcattgtcttcttaccaattagaagtttctcaatttatgtgggaagaaggcccacgggtgaagatgaatctgaaactgtttccaaataacactgcttattttaataagagcgaggtgttcagactgagaggaatgttcacaggctggctga

SEQ ID NO: 435223 - DNA, 343 bp, Oryza sativa
atcatggaggcagacatttaatatgagaataggctagaagaaattccccaagtggttcttgaggaagggagaaatgttgatcaggaggcaagcaagccgacagacacggccctcagaagacttgcacaaaacagataggctgcacggaaaagccgcctgcggaaaaaggcttatatccaacagctggagacaagccggttgaaactagcgcagttagagctagagcttcaactggccatgcagcaagctgtgcatgcaaatgggagccttatagaaccaaatcttggatttacaggatcgtacgactcatactccttaagttttgagtcattctctaaatgtt

SEQ ID NO: 435224 - DNA, 178 bp, Oryza sativa
acccggtcgtattcaccccccccacttcaccaaaacctgcgaggtttggtgccgagggacgcctagggatcactggacagagatggccgctcccgatgtcgagtgccgccgcttcagcaaacgggctagcctgggccaccgacgaccgctcgcttgaggccgacttcctccacctacc

SEQ ID NO: 435225 - DNA, 289 bp, Oryza sativa
gtgatcggccgaccttaatcttttgaggttatgggtgttttatttagtggttgtgtcgcgagacaataaccatttgcgatatcggacaaacccaagtgcctatcaacctatgggccattgggatcttcgggacaaaaaatatgacgggccgcatttgcgttaagggggggatttgttcaaccaaacagggtgggagaatactgggccagaatagaaggcagaaaggctcggcgtttttataaaggtcagggactgatttgggggagttggaactgctagcctctttggg

SEQ ID NO: 435226 - DNA, 274 bp, Oryza sativa
gtcgtcgtactttttgatcactcaaccgtttagtaggacttacaagatcggtaaacccaagggcggcggggacgggcagggagctgagggaaaacaaggatccgacggtgcaggccggccgcgcgtgcggataatcacacacaacaacgaccacgaaccacgagtcgtgcagcacgaacaagctccagcttcatctccggctccggcccccgtctcctactgaatcaactagcaatcaaccaacgcatccatcgtatagatccgtccatcccgt

SEQ ID NO: 435227 - DNA, 178 bp, Oryza sativa
tcgtagaatacccctcatccccaaaagccccaaacccgaggaggcgagaggaggaggaggaggagctcgtcggcggcgagcgatggcggcggcggcggcggagctgtgggagacgctgaagcaggcgatcgtggcgtacacggggctgtcgccggcggcgttcttcaccgccgtggcg

SEQ ID NO: 435228 - DNA, 493 bp, Oryza sativa
tcgatagaaacacagttcaagataatccattgaatgtctcaaagcaaaatggatatggtggtggtgcttcacagggtatccagccaaatggcttgcactcaatgacagggcatcgcaaggcagacatctcggaaggggaccgatctttctttgctgctaaacaggctagccttgaaaatgagatcaagcaattgaaaaagcaacttagtgataattctgagaaagaaactgaaacaaaaaggaggttagaggatgaacacaagcggaatgaattgcttcagcaacagctaaatgaactaaatgtcagcaaagagaggatttcaactaacatggaagagctacacaatgagttgagtgagaaggaggcaaagttgagacgcttgcaagaggatttgagtagaagggaaaaagagcatgtttcagatgctttccttagagcctaagaagtttggtgattgctttacagaaggagaactcagatcttaagatagag

SEQ ID NO: 435229 - DNA, 331 bp, Oryza sativa
gacaaaaaaaaggtttttttttggtgggacacaaatcccggtcttaattcacgagttccggttgagttcattccagctacaacagggttgaaacaccgacacttcactgtttaattgaattgggccccaccttaaattcccctcctgacatcacaggtttatgtcacactcctacgggggcccaccaaccccacccatgggagcagcaggggcatttgggacgccctttttccggggggttccctcccacgacgaaaaatttgcccgcggggaacacgccccaaaagggtccgcacggcattcaaatgggcctgtgtacctaacaaatttt

SEQ ID NO: 435230 - DNA, 278 bp, Oryza sativa
gggggagcccccctcccgccgatttgtttcggagcttttcttcttcttcggattcttccttccccaatcctttggttcttgttctttggtctctccttcgaaattcgatccctcgccggcagcttagccggcgcggcgcggcgcggcggcgatccatctcccgcggtttcgatttgggtttatttgggcggtggggagaaatccgtggttcggtgcgtttggtatgagctgaaaaggtcgtcctttttttttttgggttttttccccctgatctgcgc

SEQ ID NO: 435231 - DNA, 231 bp, Oryza sativa
actttttctttcctttttttttttttcttccttttacttcttaccaacattccattccccacccttcaaaaagaggattatttccaccctctaacggaattcccaaccacccccatgttcttcttcacccccaaatgcttttaaccaaaccccccctcaatttcaaacaaacacccccccacatcccccactaatgcgcggacccccaaaaattcccaccgggcaccacac

SEQ ID NO: 435232 - DNA, 538 bp, Oryza sativa
  unsure (1)..(538): unsure at all n locations
cggtccggaccggccgggtcggcccacgcgtccgtttcacgcgtacgatcaaacttaaccaaagagtcaaaccccagacatgctagtagtcagttagttaaccaaccttctccctcctctcttccacttcgtgcaagcatgaagcttagcaagctcaagctggatcggatcatctgatgtgaattctctctcacaccaattcaccatggatggatgcccatgaccatccttagctccaggaagaagaagaagaagtgaacagtagctatagccatgggaagcagaggaggagctttacctgttgctgtactggtgctgttgctactgctggtgctcaagaacggcgccgcccagtcgcggtgcagctccggcgacctcgccgcgctgcgtggcttctcggccggtctcgacggcggcgtcgactggtggccggcgggggtcggcaacgcgtcgtcgtcgtcgacatcggacggtggccactgctgcccgtggcgcggcgtggcgtgcgactagcngtggaggtcgctgcgtggtcctg

SEQ ID NO: 435233 - DNA, 358 bp, Oryza sativa
tttccttctactccttctggtagaatgcaacgggcattttaggctatcgccacacctggcactctccctacgtgtgctgccctgggacacatgagtggtcccaaaccactctatattacctgctgaatattgacgctccatgtcagatttatctgctcaaatagaggagagtggatacgagactgccactgcggcagaccattggatgtctaaggggaagagcgctgacagaccctgggtctggagcactactgatgactatggctacgatgctgtcaaagctatgactcaacacaatggtggagctccggcgggcggtaaacctggaccggattaaccaaccgctggcggtgttact

SEQ ID NO: 435234 - DNA, 175 bp, Oryza sativa
tcttcggtccttacatagaatcgaattctctctggttctggtgcccaccactaccaccgtagcaatggctggcaactgatctgtcaacagggtggactcgttcaactggggtgcgggggcagcaccgattaccggctagcagggccaggaggagaacagcatggttgggaatttc

SEQ ID NO: 435235 - DNA, 224 bp, Oryza sativa
aaaacgagaacgccttgatttaccatcgaaggcagacaatgtcaaaaaaaggtgatttttttttcctacaggccaccctacaggcgattagaccaacctgactggacaaaaccaaatacttatcccagccagcaagaagcgtttaacgcccccgccaaaccgaaaaaagcaaaccaaagcaattcacccgtgacccatttcaaaccccaacttaatttttcctt

SEQ ID NO: 435236 - DNA, 334 bp, Oryza sativa
aggcaacacacaaacggttttattatttgttagcagaacaaagccgcagttctcaatgtatggacagacggcaacgccacgggatctcccgtaacagaaacgagtgcacccaccggggaagatgagcaattcgagcacgtgacaagaaattgactgaccgtacgaaacgtgcggggcactacaagtgcaaggctgggagagtatagacctacattgacccacatgagcgggaacacaaactccatgccggacccgggcaacaggaaaccaaagggggagatcaagctgctggttgaaccaattctaggggctatactacacaggaaaacacgga

SEQ ID NO: 435237 - DNA, 343 bp, Oryza sativa
gtgacacttcatctcatatagtccaaaagagcctacagcgagaaatggtggggagagggagcgtccgcctcctgcgaggaagtctccacacctcgacagaagacctaatctgttggacgtaatacctgcatcagcacgacagactctacttactgtagcccactcctgacatggtcagtggctacagataacataggctccctggaagagtgtgctccgtggaccctccccggatgaggcctcggcaagccttaacaagaggaaaccttgctctgcactgaagcggaaggagatgaccgggttaagaatcttctcagacgattcccagggagacatgcaggaa

SEQ ID NO: 435238 - DNA, 105 bp, Oryza sativa
ttttttttttggtttttttatattttttctcttttttttccgaatgggaatgtgctgactttttttttgttgcggatctggccaagggttttacatttcccactc

SEQ ID NO: 435239 - DNA, 503 bp, Oryza sativa
tcgatagaacgacagcgcaggataacgcagggcatgccacaaagccctacggtcatgctggtggtgctcaacagcgtctccagacacagagctcggacgcaaggaccagcgctggcacggcggacatctctgaaggtgaccgacccttctttgctgttaaacaggcttgccttgaaaatgagatcaagcaattgaaaaagcaacttagcgataattctgagaaagaaactgaaacaaaaaggaggttagaggatgaacacaagcggaatgaattgcttcagcaacagctaaatgaactaaatgtcagcaaagagaggatttcaactaacatggaagagctacacaatgagttgagtgagaaggaggcaaaattgaaactcttgcaagaggattcgagtagaaggggaaaaagagcatgtatcaaaatgcttccccttcagagccctaaaaaggtatggtgaacggctttacagaagggagaacttagaatctaaagattgaga

SEQ ID NO: 435240 - DNA, 201 bp, Oryza sativa
gggatgatcaaaagtccatatttgacaagggtaacagctgccttatggcaaacataattcgtggggaaaggggagggacaccttacaaaaaccagggaccaagtttacccctcaagagacacaaaaaaattcaggtaaaaaaggggggaaaaaaaactccaaacacctaccccaggggtcccaccccaccaaaggggggaa

SEQ ID NO: 435241 - DNA, 73 bp, Oryza sativa
ataaaaccaacaaaaaagcaaaaagcaaaaaaaaaaaagaacgaaaaaggaaaaagaaaaaaagagaataagg

SEQ ID NO: 435242 - DNA, 171 bp, Oryza sativa
tccccactcttccttccctcccacctcatcagcgctggcggcggcggcgtcccctggatccctcggcggcggcagcggcagcggcggcggcggcggtagatcaatcgcatttgtctcgctaaatccggcccgcgccgcccgtcgcgtcgcggtaggtgggtagggggaggt

SEQ ID NO: 435243 - DNA, 112 bp, Oryza sativa
gggggtacaacaacatttttctcgatatattccatacatatatattcacacagcactgaagccgtttgaacgtatcaaaaaacaaatgatgatccaacattttgatgaaaac

SEQ ID NO: 435244 - DNA, 66 bp, Oryza sativa
gggggaaatatacatatatatgaatatactttcgtttgtacaaatttacacgaaaaatacattttg

SEQ ID NO: 435245 - DNA, 234 bp, Oryza sativa
ggtaggacaggaaaagattgacttaactaataggcttataaaaatgacccatggagtaggatggcattgcgtttttgccagggggacacctacatacgccattagcaaaagttcctcctttgagcaacacgtattttaggattaacaaaaatagggcctttaattccagttagttatctcttgaagacaaaggcgcccccaatggcccacaaaaggggcgtcctcggactcgaa

SEQ ID NO: 435246 - DNA, 197 bp, Oryza sativa
ggcccggaatttccgggcggggctacccacgctttttttttagatctcaacccttcagaacggcgggggacgttcctaaagttcagcctgcttccatacaacttaaacgtgttgctggtcaagacaccctcgtgaaaccaggactggcacctaaaattagcatggacagtaaatgcaccagttgtgggaacaatggg

SEQ ID NO: 435247 - DNA, 452 bp, Oryza sativa
cggcgagaggaggaggctgcggtggggcgttcgtcgggagagagaccagggccggggggctagggttcggccgttcagagaggcggctatcggttcaggaggatatgaagaatgcagcattcagagttatttcgctgtctggttcttatcttatcatccctataatagtactaccacaagatggactgtattcaaatttatcaggttgattccagcagctaagtaaaagcaaacttcataaggcaattgcgcctttgcatttgcatcacatattcacatggcaacccttaaaatgtatgtatgtctgtactcatatgttgcggtgggtgaaccttacgaagtagtcagctgctctatactttcatattgcatatgtgaatgacaagatctgtcatggtcataagaatcggcttttgttggtctacggttatattaacatcacggggtgtgca

SEQ ID NO: 435248 - DNA, 497 bp, Oryza sativa
ccagattggaatcagatatatattgctcggggggtaagatggcccgcttacagtgacaaaccttccaaaacgattcatatggtaaacaggtaacccccttgtgacttcccccaatcaagcccctttattattttccccgtgaataaacttccggttgtagcttgttattttccccgttttttccaccccttaggggaggatttttttttttcccccaaaaaaaaaattttgacttgccttaacaaatctttttaattttgcccccacaatggcccaaggggcttttttggttgccccggggattaattttccccaccccctttttaattggaaaccaaaaacttgtaatgttccccccaagcctcttaaaaggggtctttttgaaaatttaataacccccttttgttttttaaaggcccccgccctttttttttgcccaaaatttttcggttaaaaaccccactgttttttttgggcaaagctttttttttttgaaa

SEQ ID NO: 435249 - DNA, 255 bp, Oryza sativa
gcggtgactttatgatctcatctacttagaaatcccactgattttataattgtacatcttgcttgcctgcaaattatactacatgctggtcatgctgccttcgtgggtacttggtctgccatgggcagatagcatggacaggaaatgattcagttgtgggaacaatgtgcacatgtccaggacttgcacctgacaaaggagcctgcacagagagtggctgaagatatggcggccagtggcgcctgtgactggagg

SEQ ID NO: 435250 - DNA, 341 bp, Oryza sativa
ccacaaaaaaaatgataagtcttccacaggttgagcttttatatcttaacaaacatactgtttgagacaccagaatccaacagattaaattgtggagctatgtcttcctattaaccatgtgcagggaagtcttattctaccaggcgtcacaaaagttgatacaagctcgaatgtctggatcaatcaaaaaaaaaccatccgatccgtagattcgctacataagtaactatagttgccatgaaagtaaaagaaacacatcagttgatgacatttgcactttgagatcggtaatatgaacatgatgaccttcttcaaccaagccccatctatcaacctggtga

SEQ ID NO: 435251 - DNA, 466 bp, Oryza sativa
atacgggggaagttgcatagaagatgaccaggactcctaattaattcggatactggtattatagaggtattgtttcagtaggatatgaagaatgcagcattcagagttattttgctgtctggttcttatcttatcatccatataatagtactaccacaagatggactgtattcaaatttatcaggttgattccagcagctaagtaaaagcaaacttcataaggcaattgcgcctttgcatttgcatcacatattcacatggcaacccttaaaatgtatgtatgtctgtactcatatgttgcggtgggtaaacttacgaagtagtcagctgctctatacttgcatattgcatatgtgaattaaaagatctgtcatgtcataagctatcggctttgttagttctctggttatactagcatcacgggtgtgcatccaaattatattgattactgacttcaactgtaaca

SEQ ID NO: 435252 - DNA, 459 bp, Oryza sativa
gtggttgcaaccaagttgtgtgtatagcataataatgtttaccagatccaacatacaatctcactggaccgtttgaatgccaaggcttatttcaccagtcgcagtcccaggatacagagacatgcttaagcattgttaacaaatggaggaccaaaatttctaccgaaaaaaacgatgagaaggtacacattttttgactgtttgtattgataatccaccaacaattgcccaataatagacactctacatttggagacactttctaaaagatgtagctgttaccttggggtttggggaggtttgacaacaagcattcatcaaccaaaaaggagatgggactttggatcaaaacagtatgacaagttttaatatatttcccaacatgacccactggagaaatgaactgtgtttgttttttttccaagaacatttgagcctcaaaattgtcggccaaaaaca

SEQ ID NO: 435253 - DNA, 343 bp, Oryza sativa
ctaaaccggaaaaagattctgcttttgaagatcgggatggaggcgcaggggcggaacaagatgatgatattgagcgctgataaggacatggaacacgaccgtgaggacggggacgacggctctaacgactacaaccagatccgctcagaggcgaaacactccgactccgaccatgattacaccgataatgactccctcgatcacacccgcgacgacgtgcagttggaccggtctatcgacaaggatggcaagaggcacctgcgacgctgataccatgcaatggatgctagcgatcttttcagacaggctccagagcgtgctgtccaccaaccgaaggggcctc

SEQ ID NO: 435254 - DNA, 63 bp, Oryza sativa
ctccctcttccttcgctttcgtctcaccgcccccaccgtctctcctgggggaggggaggggag

SEQ ID NO: 435255 - DNA, 165 bp, Oryza sativa
tttgctcttgctgcttctcttctcctcgcttcgtcttcttcctcctctcgcctcttcgttgcgagtagagagattcctgttgcgatttttgagggaatatttttggattttcggtttattcttgcgtgggtttttttggaggcgcatttattacgctcttctggt

SEQ ID NO: 435256 - DNA, 225 bp, Oryza sativa
ctacttattccttttctgaactaacccaaagatcaggtctgatgcggaggcaaacacgagaagaagatgccgcgtcggcctatcggcggcggtgtttccttttctctccttctactcctttttcttcttattgtctctcttctttatctctttagttccgtcttcatttcagtcattttatttgtatcttttctgactgctttcaattatgattttcatcttctt

SEQ ID NO: 435257 - DNA, 108 bp, Oryza sativa
tttccgtgctcattcttgcaatagacgatgggagccaagctggttttactggctcatcctcaacgatcaagccggttgatgatgaggaggaggaggaagagggggtgt

SEQ ID NO: 435258 - DNA, 335 bp, Oryza sativa
cggacgcgaggttttcttagaggagaagcgaggagaaggcgcggcggcgctccgacgtcaacggcgacggcgaccgcttcccatccgacgtccacgctctccgccgccttctcgccgcggataatcagttgatattcccaaatgtcgatggattgctaccagagggaccggaggaaggcgaagctagattgattagtgatgaagtcctgaaaagaatgtgcttaatcctgaaatatattactgttcatgcttaactagatagaaatatgcatgatgttctgaattctgatgaatgatgacagcaactgaatatggtgaagaattgtcatgatgct

SEQ ID NO: 435259 - DNA, 421 bp, Oryza sativa
gagccagtgttgtgtatttatactttatttggttaaaaaccagagaaggataaacaggtagtgtgcatgcatgtagaaacccctctacagaaacagaaagagtttgaccaacatttataagagagacaggttgaaagaccatctgaaagctttgaacagatagggcctcgcaacggactgattcctgctcctgacgctgccattatcaaaatccaaagaaggaacgaacacggcatgaagttgcatataaagggacgagagaaccattgcatttttggagaggggccatgctcttgaagaagttccccagagtgttgctgacagaaaagagagggaaatccttacaacaggtagggcgttgaacagaaaagattgtggaggggccaaaagcggctatacaggttctatggggggcaataat

SEQ ID NO: 435260 - DNA, 157 bp, Oryza sativa
tttactctaccgcccacgcgtccggatacccatcctttgagtctcttctgcgacaacactggtctgtatccttttctgctgccttgctaaacaacacgaaccaccaccggatccccacgtcgtcgtcaccaaaccacctgcagacgtcgtcactagt

SEQ ID NO: 435261 - DNA, 304 bp, Oryza sativa
gttgggtgtccgactgacctatccatcttgtcgttgcgctcgtttgttagatctccttctcctatcgatcgttggctaggcgaactgtgagatcggtaatcaacagaatggggaccttctgtgatctacgacacagcttgcggttctggacgcgcatcctgccttaccagatcgacgacgcgcaagtcgagagaggcaacggtaatagcatatgggacgattcgacagatatcaaaagacggacttttgattgttgtatggtgaaggcacggggtgatcattactatagctacagagcaaacat

SEQ ID NO: 435262 - DNA, 442 bp, Oryza sativa
aaaaagtaactagcatgcatggtatgccgaataatttgctaggcaatcaacactataacaccgaacatcgcaatcttattaaagaaaaaaaaaacacacacacacatactcgatcgatgaacttaacaacctgcatgcgcgtagtacatatactagcaaatgcataaatataattaattaatttccagctgaaaccacctactaattgtaattaacagtaacggctgctctcgatgatttgccaattgtcgtcgtaccgagccgccggggcggcggcgacggcgacggcggggcagccacctcgtggttcttgtgtggcacgtagtgacgagcaggcaccgctcttgccgccaccgccacgggatgcttctccccgtagccgccgccgttcgggacgcccgccgcgaactgatcatgagctggtggctgccgcggcggcggc

SEQ ID NO: 435263 - DNA, 489 bp, Oryza sativa
aaagccgctgcccctgccggtaccgaatcgccggtccgggccgaccggccggtccacggtttagcaaagcatgtctggatgcccatcccttaacctctcctgcgacaacacttcctgcaacctcttctgctgccaccccaaacaacacgaaccaccaccggcaccccacgccgccgccaccaaaccaccgccgtcgccgccacacgatgacccacccctcaagccgccgccgcagcagcagttcataaccgcacagccaccgccgccagatgaaccaccgctcaagccgccgccctcgttctacccagccgtgctgccgcctgagccgccgccgccacgtcgtcctgcagcgacgccgtacagcaacagagaaggcgtcgacgacgacgacagccatcacgtggcgccgccgtcacgccggtcgcccgcagctcgtcctccttctgcgccggagacgccgctgccgttgccttgctgtgagaagccccc

SEQ ID NO: 435264 - DNA, 108 bp, Oryza sativa
ggaaataagatggcagaccaaacatataccaaaaatcagcgatctcatacgcataaaaacagtttctgatggacaacttaggcccacacacagccctaaaggcacata

SEQ ID NO: 435265 - DNA, 246 bp, Oryza sativa
agttcactagtatttattacttcatggcaagaaccctgcatcaacaagagtagcaagaatactcgaatcctagaacctatttacactaatccatgatcgtttgaaccacatccccatgagccataaattggatcctatgaacccttgccttctagaacccgtaaattttgattgaaaaaaggattctaaatcctttgctttttgtttttagttaagcccttggctttttttttaagccttttacct

SEQ ID NO: 435266 - DNA, 535 bp, Oryza sativa
gttccctcaaatccctctcaaattagccccaaatcaaagggttttctgtggacttcacatggagatcgtgttggaagctctccgctcatctaccttccaatcagtaatagcgggcctggtaggccaagcctcccaagcgattcactgttgctgcctttgctccattgcgtcttctgctgccaacaagtcgattcgtgcgtcatactccctgactccctgacgactagtcacaagacttgattacagggatgtctggctggaactgagaactgatgcttgcatcgaagtggcaagattgttgaagatttgtgggtgccttgtcagtggcagtatctttttagctgttggcctgttgcgatattcagttactcatttctttcttctcaatagatttcttgaactctgacagatagctgtttgatgtttttttctcaacgacttcaggatgtatgtttgatttttttaaaaaaaattattattgctcttcaattactttcctctcaggttacttagccgatatcaaatgagcaatggt

SEQ ID NO: 435267 - DNA, 306 bp, Oryza sativa
gcgtttcgtttgtctttagtgcatgacgcactcgggcaagagggagtcttcctgctcctgctgctagaagtcgtggtgcttgtgtgacaagctccagagaggttttgacagacggccggtgatccagactttgcgacgactcggtgtgcgccacaggcaggaccactactgtggtggcaggacaccttgaaggacaccagaaaagcagtctgcgaccactacgactcacggatcaagcccaccgaagccgatgctgccacccgcagaaggccaagctccgagaacggacatgcttgcgaccggggt

SEQ ID NO: 435268 - DNA, 541 bp, Oryza sativa
ggaagccatttggcgtgttttattgatatgggtggccatcaacccaattacaagaactctttaaattagacgcatgtttagctagaacttgtgccacaacattggcttccctattacagggcttaacagaaacttctacaaaatcacaaatcaaaatattgcatcagtaaaaaatcactaccaaagttgccgaaagcctccatcttgcatcgtttccagttttccaccacttgcaagcaatctgtttgggtaataatattttgacaaccaatctgctgggcaagaacgagtccttacttgagggcgtaggcttctgccatcgttgcatcagcaacatgaggcaagtgccttgagaattcctttaggcggtttatgccaccctttccgtggttttgcatccggtttttccttgccattttataatttagtgtaagagcaacaatagatatagctgatctagcagccatttgaatcatttcaccattcaccatttgtctccttttcaaacataaagtgtgttgatttacaagtgaaaactttt

SEQ ID NO: 435269 - DNA, 104 bp, Oryza sativa
catattttttcttggggggaaaacattttttttccatgtaatttgaggaacaagcccaatttaacctaacatggaatacccaaggtgaattaagcaaggcaatt

SEQ ID NO: 435270 - DNA, 431 bp, Oryza sativa
ctcgctcacgcgaacgaggacgcgggggccagggggcaattttcacagaggcgcgccgccgccaccagccagggcaccacaccggcctagtctaccccgcgaagaccgaccacccgaagctctgggaaccctcgcatagccgccatgagcgacagcaaggactgcgtgcacctatccggcctaagcgccgccagccccaacggcaaagagcccaccgcggaggacaaggccaacctcgaggagtcgattaagaacacgccacagggaagggcggagcggcacacggacgtgctcgagagcctcgagcccaaagtcaaggaagcgcgcggaggcgctaagggagatccagagccaacacgaagatctagaggcgaagtcctttgaggagagagccgcaccttgaagctacatatcaaacgaaggttgaacca

SEQ ID NO: 435271 - DNA, 142 bp, Oryza sativa
aacgacgcatacccgacgttttttttgtttcacaaacgacgggaaaaaataacaagtacggtgcccccttgcttttaaataaaagaaggggggtttcctttgcgggggggggcccctttggtctacccgcgggggaaaattt

SEQ ID NO: 435272 - DNA, 397 bp, Oryza sativa
atgaagcaacagaagcaaattcatgtgcgaggccagttcatcgaattatttggatacaaaaaatagggtgccccttcagggcttcaggagttaggatagggcaaaagagaatcacttaacaattgaccaatcatcatggtatgattgataaaaaaaccacgcatacttttttttttgaaaaatcataatcacacgttgcgtttactaaagtatcccctacctgcagaatttgaagacttttttacaagatagctgatggccggcaaaacatgcaccatgcaatttttacagcccctttgtccttcagactacagagggaccccttttttgaaggtcacatgggcggagcttgttcattacacgcccccataattgccattggtgggatgcttggaaa

SEQ ID NO: 435273 - DNA, 539 bp, Oryza sativa
tgttaatttaatttgttgaaggttctttgttggaacataaatcagaagtgtatggagcatgcaaaaagaaacagcatttagagggagttgctttccatgagtctgcactgcatagagaatatcaaatcaagtcagttaaaactactgccattaccaacgagggtgatatggacactaatggccatcatgtggactttggtaatttgttacaaagtgatcagcagtatctgaataaacacacagaagattctgcagtgaatttgacagaatcctgcaagacacctgatgcaattgatagtgcaatgatactgaagagcaaggacgaatccctggcccaagaaaagagaacaaacaacaaattgatagataacaaacggaagggtccctgcttatttgaaatgtttacacagcctacgaaatcaaatgtcaaatgttccatagatcgaacatcttcagggaaatcttgtggaacatgaccagtggttattgggagcacagaaacagttttcaactaaaactgataccttttacagtgaagc

SEQ ID NO: 435274 - DNA, 147 bp, Oryza sativa
ggcggtggcggtggtggtgtcggaggaggaggaggaggtggtggtggtggatcctactacatcttatgtttaaaaacaaaaatttctttattttaatcatatgcaagttaatttacatgttcttttttatttataatttaagctttt

SEQ ID NO: 435275 - DNA, 266 bp, Oryza sativa
atactcaagagagaactacatacatccaccggatgataaagattcaaaccacatacccaaacaagcacaggtgacttaacaaccagacatttgaacagctttttactaacaaattaaacctagaaataacctttacgctttccataggaggtttacttggctggaccggacatacattttttaaacctagtttcaagtttccagtctattttgccaccaaatgcaaaaaacctattatgagaaatgcccttattgaaattccccgg

SEQ ID NO: 435276 - DNA, 391 bp, Oryza sativa
ttcattttttgggatatggaaatattgcatacaggttatgggaagctagcaaaggaagtaaaaagattagcaagatctggtgtgcttgggtaggacaggatggctcccatggcttcgatgagtgtgacacctatgagcaatctgactttgccattgtcaacttctcttatacaattgagttgggcaggaagtggtcttctgatgatcaggaccttcctatctctgctggatctttcttcgtgattgatgatgctggacaccgtggaaagagaagaaagaagtcattttcagatcaagaagcatcttcagaggagtcgaatgagcaaagcagcttcgcccatgacaatagccaagctatcataacaggtttcccgacaggtacttcacacaa

SEQ ID NO: 435277 - DNA, 101 bp, Oryza sativa
aatccccaaacatggccagaggctttgcttatgttcagaggttgacttgagaaaacacccaggattcccaaactacaggggcaaattcatctaatttaaac

SEQ ID NO: 435278 - DNA, 437 bp, Oryza sativa
taccggcccggactgcctggctgggctcttccgctctctccctcttctctagcctggcctatgctttccaggccgtgggttgcccgtacctgccgagggatgatcgccgccttgcatcccctcctcctcctcgagtggttcgtctactactatacgcttggtgctgcaggtacaagcgattggcagtggcattgttcatcaaaggttttgtgcaaaattatgcgatcttcatgggctgagatagttgcgaacgccgaggaatcggcgcccgcgactggtgctgctcccacccctgacgctaatcaccagaactcacgccccactcgcagcgcatacgtgcctcctcacctgcgtggccaggcaccaaccacaactgcagatacagctacagctccaggaccagctgctgtccagccctcagcttctgtacagccttc

SEQ ID NO: 435279 - DNA, 456 bp, Oryza sativa
gaaacatgcacttattatttgcaacagggaggagtagccaactattatcagaagcacttgcctcaagcatagatattggaagccataatatctaatactctacaactggccaagaagtgctgttggcttcctgggcaaccactacatgacatgaatgacgacacactaaacaccctacattgaaatgaaaaaaaaaaagacatagccagctccaaacttatgagaactcgactgaaaactcttatggttagataatgacggcaaacaattgaagactatatgctaacagacgcttgttaataagatgccaaatgacccgatgactcccgactcgctgtcctgttttgcttcactggtgaaagcgtccaaattctttgggatatgatgaaaaggccccagaaattgccccaaaaatggacccacttgccacattttaacggaatcgtttttagaaaa

SEQ ID NO: 435280 - DNA, 499 bp, Oryza sativa
aacttattttttattaaaaaaccattttaaaataacaaaagaggtgtataaaaaaaaaatattttgacaaaaaaaaatccaatatttttatttttttaaaaaaacacaaaaaatttttatttacaaatatttaaaattaaatattaatattgtaattaaaaaaaaaaaaaaaaattctcttttaattaaaaaaaggggggttaaaacaaaaaatctattttaagatccattttaaaaaaaatttttaaaaaaggggttcttctatatatttggtaacaaaaataaaaaaaataaaaattcaaaaaaaaatttaccctcttttataatacttttttataaaaaataattatatatagagggtattttaaaaaaatttttgtaaaataattgttttaaaaacacacaaaataattttgtttaaattaaacattatggtgaaaaacatttcttaaaaaaaataaaaataattaatactatttttttttttttatgaataaaa

SEQ ID NO: 435281 - DNA, 230 bp, Oryza sativa
cgacgtttccgagagcaaggatcacagggacttgggggaaatgtggaaccggacgacgagggtcacgcagacagacgccatgatggcgcatcacaccaggccaacggcggaggcaagccaccgcactgggaggaccaacagcggacaactgtcaagaacccaatcaactccaccattccctctattgaagagaacaacgcacgggacgtcgccgctgccctcagggacaa

SEQ ID NO: 435282 - DNA, 197 bp, Oryza sativa
tctagtacaagcgaacttggtgaagaagagcaagacgccggtgggtgcgcgtgtgttttagtggctgagcactcgcggccgcgaactggcatgttaacgtctgtgcaaactaggatacttctcatttgcaaaactattatatgtgatgctgctactgatgataaactgttacaaaatactactactataagtgacat

SEQ ID NO: 435283 - DNA, 228 bp, Oryza sativa
ccctgtttgtgagagagagagagagagagagggggctgagccttgctcaggctagaggtgtatacccaaaccccagctagggctcgcgcgcggtcgctgtggtgatgagaaacccagcgaggtagcggttgatgcgggacttcaagcttgaatgtagtatgtacaccccgtggcgaatcagtggctcgcctataactacatcaacatttcgctatggaacgccgttat

SEQ ID NO: 435284 - DNA, 278 bp, Oryza sativa
tcctatcaccaactccttgccgccatcgccgaggtggatgatgagggagcgagctcgacgccgaccccatgtcgggcaggggacgtggggaactgctcatcacggggaggctgctagtcggtgagctgttactgacgctgggggtgtgcacgcactgcctgcagagcacgcaccaccacgggctgtagcggcggcggacgaagcacgagatccactcccacgaccaagactgttggaagaggtggtgatggagaatcggtgcttagggcacatcctcg

SEQ ID NO: 435285 - DNA, 175 bp, Oryza sativa
tcctgacgccgcggatggagtcgccgccggagctgcagttttggatggtgctcagcttcaggcgcggcgtcaagctcactgtcgtcgagaggcgccacgccgccgccgtctagacaagcgcagatcacctgcaaaaaatactctgtgcaacatttggaatcgcttttttcactgg

SEQ ID NO: 435286 - DNA, 472 bp, Oryza sativa
ttcacgcgtccgggcgttcttttaacgtaccctgtccggcctgacacgctttttggctacagtacaccgcgggtttttcctgatgggtttaataagcttaagggtgcatacggggtcaggtttaccttggtcgccacattgcaaagcgcacacacaccctttcagcagggtatatatactcttgcgtttcagcctagtgggttcattggctttaacaggtcaatcgtcccttacacaacgacaaaccttccccatgtgcgactggatatggcttccgacacgatggtacaattgcgcgtaccttatgttaacactatagactttcttgagtacactaagtctactaagtatggggatttatttgtttctttcatctgtcccacttgagccataactggctcagcattaccgaccatgaagatgttaatccaacttgaggatgtcgaactcattggtgtcggtccgcatgcag

SEQ ID NO: 435287 - DNA, 280 bp, Oryza sativa
tcgtggtcgcgtgggctcgctcgctcgctgcgtgggcgcactttatccacagatttttctgctgctgttgcttcgttgcttagcccgaggattccgtactactaccggagggcttggttggttgatttggtttggattagccatggcacgggagagggaaggcgatcggataggacgccggcaagaaggccatgtctcgaagctccaaaggcagcctacaacatcccgtgggcaggatcgcccggttcttgaaggccggcaagtaccccgagagggtagg

SEQ ID NO: 435288 - DNA, 202 bp, Oryza sativa
tcttttgcagcggcgagacggtgatcgcatacaagcaattgaaggccaatactttgccaacatgggtgtgatcgtgtgccacagcaaggcggcatgggaagagcggcgtctagacgagcgcagatcacctgcaaaaaatacttgttgcaacatttggatcttttgtacaaggaaaagataaacatttgtacagttgtgactg

SEQ ID NO: 435289 - DNA, 244 bp, Oryza sativa
cggacaaacacgccatagtactggcagctcttcagactatctcaaggtctgaccatctaggcgatcgacgcagatgcagagctacagtataggcgagcgtactccggcgactggatcaggtgatctagcggcgtacgactagaatccacgggtaaaatggggtggatggtgatctcggagaaggagacggtggcgtcttcgtggtcgtatcacgaggtggtgaaactgttgtggaggcaccacg

SEQ ID NO: 435290 - DNA, 277 bp, Oryza sativa
  unsure (1)..(277): unsure at all n locations
ctggaatgaacgaactcatgnttttgtacatgaacaacaatagcttcagttcatcattatttgaataatcactagccgacgcattataggctgaggcgctatcagattcataatttacatacctaaaataattatttgaataatcaccagccgacgcggtatatatatccattaaaaataggtctaacaacatatgtatgagaattaatggtacttgtaaaattattttgagaaacatatatatttgtaaattttacctcaaaaaaaaaaaaataaa

SEQ ID NO: 435291 - DNA, 239 bp, Oryza sativa
ggtggtcgtaggtaaaatagttgctacaaagggggggttttttgcagatctgatcgggcacgctcctcctcatccgaagacgacaccgacgtcggagagaggagaagacggacgcacttgatagctggcattttaccaagcaggctgtaaacgagggtcaccatgacaaagctctgggactacttctaagatgcagcgcttgatgacagccaggacgaggacccagacagaaaggtaaa

SEQ ID NO: 435292 - DNA, 190 bp, Oryza sativa
tcgtgcaaacaaaggtagaaagcctcaaaagcaggaggtgtacaaagcgagatacctagatccaccaacgacgaagagctatagcaagatcgtcttatctacgttcgttaatcgatcacgatgccgctgagaaagaaaaagaaaaaaaaaataacgcgccttaaagaaggcttattgatgtgagtattaa

SEQ ID NO: 435293 - DNA, 399 bp, Oryza sativa
tacgtcggtctttaccttatggcccccacctctggcgcggctgcggtcggtgagatggccaagcggctgccgccgaggtgggagacgcgtctgctgactctgcgggctctagatcgctcagatccgttgtacgacgagaaggaggcgagcgaactggacaggcaggacgccgcgctcgaggcgcccgggctgccggtccgcgtgtctgcggcgacgcccaaggattcctgcgggtccagcgccatctgcagcttggagtcggacatggacgttgagaaggcggatgtatgacatggcaagtccaagtacttattggagacggttggtaacatctgcacgaacaaggtgcagcttgacttgaagagcagggaagatgaaacaaaagcttggaaaaagggg

SEQ ID NO: 435294 - DNA, 418 bp, Oryza sativa
ctcgtttctagatcgcgagcggacggcctgcggtggtggttttacaaggcaccatcaagtgttgcttcccaagaagcaaagagtgcaggggcatcgagctatataatagtagcaaagcccgtgagagacaggcccaaaaaaaagaagggagaaaaaagaaaggaagaagaaagaaaaagtaatgaaaaaaacatgcacaagttgctgatgaaccaaaagtagcctgggggagcaagatccatgcatagaactaagcaattttccaacttaatttccgttcgctaaggctgagatcgatgtacggggatccagacggcaatgtcggctggtcggttatagtgaaggcttctcgcccttgccggggctgtcggtggccggacggttgccgaggctggagcggcggatcttgtcgatcctc

SEQ ID NO: 435295 - DNA, 424 bp, Oryza sativa
ggtccccctcccggcgccgccaccgccaccgcggccgtcaccggcgaggaaagcgaggagacgaagggcggacatgactgtggagaaggtggacgcaaccgtcgccgacttcgtctcccactttgacaagctcttcgtcgccggggacgacgccgagggcaaggtgaagctgcttcttttccttgtcgaccgcgacgtctcctccaaccaaacctggagccccgactgtaacgtgttggtgccggcgatctacgacagggtggaggcgactgctaaagggaaggagaaggacgtggtgctgctgcgcagcgttcgtatgttacatgaccacttggagggacccggtgcaccccgttggaggggttaccccgtgttcaagctcaccggcgttcccacgtttataagtgggagaacggtgccacgg

SEQ ID NO: 435296 - DNA, 62 bp, Oryza sativa
ctgagacactcgccttgtttcactctacaccggcagaggaggcggcgggggtggttgcgcat

SEQ ID NO: 435297 - DNA, 155 bp, Oryza sativa
gcgcgtcttgacgcggaacacgccggagaccgggggcgatcgctagtgtcggccgtcccaccggccctactgtcgccaacgaagcggaggcggagcgcgccagtggaaactgcgcggatcgacaggatggcggaggtggggctaaaacccggcgg

SEQ ID NO: 435298 - DNA, 276 bp, Oryza sativa
tctctcgtcgccgcggcgcgtacgccacgcgtgcggagtaaatctcccgtcgcctccttccctgcgccaagaaagacgagccgcgggtcaacagcggagtggaggggcgctgatttccatcgccgaggagagcagagcaggggaggggaggggatccttgttagcgctttcggcgcgggactgatttctaaacgaattttgggtcgtgaagggaaggtcaaacatggcaggggctcttgccctcccagcattcttttgaggaccaggctcattttc

SEQ ID NO: 435299 - DNA, 148 bp, Oryza sativa
ggtgcgcgacgaccgaaacgagcgcagagaggagggccaataataccaagtacgcgcaggccctccacaacgagagtgacccccacactgaacagcgaaaccagctggaagagagagacaggaccaggaaaagagacaaaaatctgcg

SEQ ID NO: 435300 - DNA, 227 bp, Oryza sativa
ttctcacgtaggcacaaacgttgcaagctaggggttgtttaaaccacgaaacctcgggaaccaaacggatataggatagatcaagagaagcaacaggtggcccaaagcgttaaagcagcgcgccgaggaagacctacaacacaaattcctacagccgctaggtgggccgctacaccaccgtgctacagtgacctaagaaggctcaacagacggtcaccaggatgaaa

SEQ ID NO: 435301 - DNA, 340 bp, Oryza sativa
tcggtacccgagccgagccgtgccctgccctgcccttctttcgcccagggttcgcagccaggccgttcgacgtcgtcggagggggaagagagccgcggcggcgttaggaggaggaggaggggcgagatggaggcggagaagaagccgacggcggtgtccgacgaccgggcgtgggcgatgaacgtcgccagcctccgtcggcatcatcatggcaaacaagcagctcatgtactccttcggctacagccttctccttcgccacgaccctgaccggatttcattttacggtcacggcgctcggcggatggatcttcaacgccaccggtttcttcgtatccaa

SEQ ID NO: 435302 - DNA, 446 bp, Oryza sativa
ggtactcgtggggcaaaacttagcaaaaattgtcagatcctgttattgaaacatctggctttaagctcggttgtcatttgtagacctataaaacaccaggaacagatgagcttcaacaaggattttttgcaaaaaacagcgattgcttgaacatgaaacaccgtggtcaccacagtgagatgtcagcggcgtacattaggagtggcagacaatggctgagtgggttgagagaaggtgttgaaggtggccccgtcatgccagtggtggaactgaagtcgttcagaacagatgcctggacgcaatccaagtcggtgccagccttttacgacaggcaccacgctgatgacgtcaccttaactgactactcaatgacgttacgaggtggaggtcacctgaccggcgacggagtggtggcctatcggtcagaagagttttatgatgttgag

SEQ ID NO: 435303 - DNA, 56 bp, Oryza sativa
gttctcgcgggaaaagcgaagcagcaagggggggtattataggcgaatccacggga

SEQ ID NO: 435304 - DNA, 241 bp, Oryza sativa
tcctcacacacccaaaagcgccgcaaaaaaggggccccaagagcggagaagggaacccaacggcggggaagggcgaaggcacaagcgaagaaacggaaggccagggagcgagaacagcccgcgcaagcaggaaaggggcaccaagtacagaaaggcgaaggggcaggactacaggaggagaccaacagaagacaagaagaaggaaacggaaagagggccgcacagaccaagccagaaccgc

SEQ ID NO: 435305 - DNA, 339 bp, Oryza sativa
tcgtggacaccccaaggaaaacgatcctgagtgggggatcttaaacgccgttacccttctcaccatcaaaccttcatcgaaagaaaccgccgagatacctgatactgagaattacacgatcggatgggagcttccggtgctcggatgggaggtgagctactgagcagagttcactcttgatgtccaggggggacacacagccatcgagccgaaaacgaggaaggtgcctgcaaatggggaaccaatcatgataggcagtcttaaaggttgacgagccaggaaagattgggctaacgatcaaacaactcctctatcaaacaaggaagaagctcctctgct

SEQ ID NO: 435306 - DNA, 221 bp, Oryza sativa
tcttcgcatgcagctccaatagccgatcgcagggggaatttcaacgcctgtcaccgctcgaacgatcccgacgaatcgtatagcgtacgaaacgccggtatccgactcgcgaccgtatatttcatgcagcctaagccctagtgcggatcgatccgttactatgtagcccatgtaaggaatggtgctccaaggctcccattttgttgatcagcactaagaca

SEQ ID NO: 435307 - DNA, 471 bp, Oryza sativa
tcacgcacccaatccggttctatcctccgcgcatctatcacccggcgccggaatttccgcccgcattccgcgtcgcaagcggaggaccctatgcgccgattccccaccatcatcgatctcctccgccctctcatccacacggcgccagggaagcgacgccccaaccgaaccggactgccgggacaccgacgcccatcccgttcactcgactgcccctctgcgccgagcatgcggatcaacgtcagacgcctgtcgctccactagtcctacactgcgccgtcacggatctcagccgccggatccgctccccttgccctccttcgcgccgtcactgaccttcaccttgacggacgcctgcccgtaacacatcgaggtcaccgcagatcccttgcgaaggcaaactgcttaatcctggcggtctgctttgagcctccacaaaccgtcgtgggcataatagtaaaaggttatccc

SEQ ID NO: 435308 - DNA, 293 bp, Oryza sativa
ccttttatctaactcgcggcagaaacactgggcctttttagtccgatccacaggaatcacggggaggtatactccggggggcagagctcttaaacttggtacatctgtctaggatggctgaaggactatttcctagacctgcgctttacatggtcgactaaagtatctgatgtatccgatgtcattttttcttcctaacatatgaatcgggccactggaactgatacaatacaaaaggtatgtgacagaacagatcactcatgatgactggccaccggaaattattcgagtga

SEQ ID NO: 435309 - DNA, 78 bp, Oryza sativa
gtgggagaccgatcaaccggtccagcaatgggggggctctttagggtgtgatccccgccaccaaacggtagtcggttg

SEQ ID NO: 435310 - DNA, 51 bp, Oryza sativa
gctacacgcccgcccacgcgtacgcacaagggggggcgtattgacaggaaa

SEQ ID NO: 435311 - DNA, 329 bp, Oryza sativa
acgtgaaaggaaaagcaagaaaaaggcacgggggggggatttaaaaaaccgagaccgcgacccacaaacaaaaagaggagcaggcgaagccggcgcaacgcggacgaggacgatcaaggcgaaagccccaagggaagagggagagacaccagagggaccagaggaaggcgaaacacagagagaatagggatgaagaacccgaaaagaatgggcaaaaccactgaaagagacaacaggagcaggggaaaccagcaggaaataagcaggaagcacagaaagaagaggaaggacgacagaaacagaatatggggaaaaaaaggcatgaggcg

SEQ ID NO: 435312 - DNA, 234 bp, Oryza sativa
tcgttcacgcgcgcgcccaagggtccaaagaggggggcgggtgaacacggcggaccagcgcaccacccgcgcggagaggaggcaaaagaccgggcaccggattccaacgacaggacagcgaaaacacaggcgagacgagacagaaaagacgtgcggaccaggagaccaacgacagctgacgcaacgacgaggaagcaagcccacacaggacaccaaaagcggggcgaaagaaaa

SEQ ID NO: 435313 - DNA, 342 bp, Oryza sativa
tcgttctcgctacctttcccttcccacctcctcctcctccttttcaccaccaccacgcgcctccgctcgcaagaagcaccttcgaccgccatggcgcgcgcgggagctggcggcagtctctccctggaggcatgacgcggcggcgcccgtggccgtggctcctgttgctactactgcgaccaactactgcgctcggtcggcggtggtggtggccctggtcgtcgtcgtagcgcgttcgcggaggcgggagaagaaggagaagggtctacggggatggcggtggcgatggtggcggcggtgcctggagtggggaggctagacaagtcgtcgcctggcggctga

SEQ ID NO: 435314 - DNA, 382 bp, Oryza sativa
  unsure (1)..(382): unsure at all n locations
ctctctcacccctcttnctcattcgcccctcgcgccaccgcgccaggagctcgtgccgagcctcgcctccccgacgaagacgacgaggaggtctgtggtagtggtggtatggatcggtgtccatccatggcggggcagcagccgccgaccggaggagcctaggacgacttcttcaaccacttcttcagcatcccctccgccgccgcagacggcgccggcggcgttggaggatttggctcgggtgaccaccaccccttcccgctcgtgcttagcctagacgccgagggcgcctgtgccgtcaggcgccttctcgacgggggccacgacggcggtaggacggaccgggaccccgtgcagctcgcccgcctctttggcccagtgt

SEQ ID NO: 435315 - DNA, 279 bp, Oryza sativa
ggtccttgcccccctaatagtctatccattgcggcgtcatttccggcgtcgtcgacggcttcaccacctgcgactgccgcctacgacgtcgattggaggcaccaaagccggccgcctgcgctgggtggccgacttactgttcccacgcgggcacccagtatgtcttgcgcggccgagtgtgacacccgtacattcaaacatccttcaacacgccgacgacggcgaccgagatgtctacaactccgccgtgggcccggacaggctgccgccataggggct

SEQ ID NO: 435316 - DNA, 220 bp, Oryza sativa
gtaatgcccaggttcctcgtcaactaagggtgggcctttaagggccagaccgctgctaacccgctagaccaacttctagaaaaggaccctgctcttatggagcgaaggcagaaatgcctcaacaggcgtgagtcctacaaggctgccagggccgagaagaatgcctgcgcacggcagcgctaaagggaacatcctgccttcatcgcaacttgacctgcat

SEQ ID NO: 435317 - DNA, 84 bp, Oryza sativa
tcgtcaagacgctggctgcatcgtagcgagagagagagtttttaatggcgtttctctcgtttacaaaagaggtgtttgggtcag

SEQ ID NO: 435318 - DNA, 260 bp, Oryza sativa
tcgtggacgcgtgggcacaagcgtggggaagaaggtggtggttagaggaggaggccctgggggagccacagcagcggagctggggccaagatgccactctgagacgaggagagtcgaaccacgagtcggtggatatctctccatacacgtccagaaacgaggactgaacgatgcgagaccaagaccagggacaaacgactaaaggaccgttcgacagactacggacacggaccgagcaccatcaagggacagggccctac

SEQ ID NO: 435319 - DNA, 302 bp, Oryza sativa
caggaccggaccggaaatcccgggcttcgccacccgcgcctccggccacacgcagccgccggaggagacgggtgcagttcaagaccgaacgcaccaacacccagaaacaaggcaacacgaacaaacgcaacgagaaaacaaaggcgaacacccagcagaacaacacaaagagtcagccaaagaacaaccgctacgaggcaacaccacagagaccggcgacacagagccaacgacccacacagccggccacaacaccaggcgccccaacgcacaggcagagacacaagacggcaagaaggagg

SEQ ID NO: 435320 - DNA, 367 bp, Oryza sativa
ggtaaatctcccgactaccgatttcttcgccgtgtatacgtgtcacgggttaacaggggagggccgccgcaacctacatgtggcaagcagagcaggagaggggaggccagtcttagttgagtcttttgtaaaaaaaaataatggaaccaatgaatgcaatcgcactggatgaacatgtgctggattctactatccgccagaggaagcttgtgggtgctactaaatgtgctgaggtcaatgacacccccaacctttttcagaatggtcccaaacagaaactcgcttttattccttgattcgactggacataataaagtcccacgatgattccgcttctgcctattgaccatttcttgtagaggtacaa

SEQ ID NO: 435321 - DNA, 387 bp, Oryza sativa
tggttatcgcgccgcctcgctgccttccggccggggctttgttacgcttctcggcctactacgggaggaagacagtgagataagcagagagattgaggcgcagaatcattcggcatagagcttgaatggtgtagagagctacagggatggatcgccggatctggctatggcggcggagatcgactgacaagagcccggccgtgaccgatagctcggtttcttcttccatcccagaggctgtcttgatgaacaggatactcccaaagagttcttcaagctcactttaatcaccggagatcttgttgaaggaagcgcaggatgacaatgtaaaggtgatggtgttgagcaagagactgtaatatgcagttttggacatacatgcaaaag

SEQ ID NO: 435322 - DNA, 348 bp, Oryza sativa
acgttcaacacacgcagcgaattccacgaagagagaatcagtcttacatggcgcccaaggctgacaaaaagccgacggctgattaatcccgcggaggaggagcccgtgggggagaatgccccgtctgcatgcgaagaagcccaaggcggtgaaacggctcggcggggagaagggcaagaagggcggagccagataggggaagaaggacgggaggaagaaggggaagaagagcgtggatacctacaagagctacataaggaaggagatgaaggaggatccccccatcatatggatctgctccaaggccatgtacataatgaaatccttgattaacgacatgttggagaa

SEQ ID NO: 435323 - DNA, 192 bp, Oryza sativa
gcgtgatcacagcgatgactataactgaaagggggggattttataaaaatatggccccgtgaccaccaaaaaaactagagaactaaagcatagacacctagacataacgataaacaacgggaggagcggaggccgataggagcacaagcggggctagcgccaggagcagggtaaccacaggaagggaacgga

SEQ ID NO: 435324 - DNA, 392 bp, Oryza sativa
ttttggttttttttttttttttttttttttttttttcaagaaaagctacagacaaggttatatgtggccgagtgcatgcttcctgttagtgcatacagattggggcgctacgcaagagccttggcaggcagtggccaatcttaacgtgggggtcttgaatttacaagcttatttcaacactttcagaactttaccacaggtattgaaagcgcccacagttcccactctttcgtaagcaattggaacctgttttcgaaccaagaaccaccaaaacccttgttttcacctttgaaaccattaaaccgggcgctctggtatcaacaaggggccactgggttcctgaatgaaaatcaatgcggaaggccaggaagtttgagccttgaacctgaaaa

SEQ ID NO: 435325 - DNA, 429 bp, Oryza sativa
ggctaatccgggatctcaggtctgagaacgccatcctgtttttcaggcatcaaagctgcatctaccaaggtcataattgttcaagagaatgcactcatcaacttactgaaagactgtctgcaaaacatagcaacatagttgaaacaaattgaatctcgaccgattccttcgatcaatcccagccaattgcttatcactcaccatggcggaaggagaatttgatgctgaggagggcctatcatcagatcataatctattggtcgaacggcccatcgttggtggctacgcttttggtcccaagaagatgagcacgatgaatgtcctcatggcagaagcatccaagacaagaattgcagcatgcatgaggcgttataaaacagagtagcccttcctgaaagaaacaacactttattcaacattggaacgtgt

SEQ ID NO: 435326 - DNA, 443 bp, Oryza sativa
gtgaaatgctagcatatactgtaatttcttggagtcattttacacattacagtacatctccataggaaggtgacaacagaaatatataatagatccgaggagtaccaactccccgtgaggaaaaagtttccaggataacaaccattccttctatctgaatctttgcatcgaccaaaaaacattaattgacaacatttaaagaaaatacaatctatgaaaatgccattcgatgaattcatttgaacaatgcatagtttactctacatcttcctccttatgaacaagaagcttcccttcggtgaattcacatggcttgatgggtacagctaattgcttgcgcattttccttacaacaaatgtttcggtttcttcacatattgtgaccacagttcctttccgccctagacggccagttcggccagctttgtgggcatagtgtgttg

SEQ ID NO: 435327 - DNA, 469 bp, Oryza sativa
ttcagttgccgctttcttgtactggatgaagttgaccagcttttgtctttcaattatcgtgaagatatgcatagaatacttgaacatgtaggaaggaaatcgggtacttcatctagagatattcttggccctcttgcaaggcggtctgagcgccagactatcttggtttccgcaacgataccattttcagttatacgagcagccaggagttggggtcacgatccagtccttgttagagctatgagtgttgttccacttgagtcaattactgttccaagacctgtgctgtcccagccagatgccaactccaactctccatcaaattcagtgaatcaagctgcagttgacagcttaccaccatctttggaacattactattgtacatccaaggctcaacacaaagtggacactttagggagatgtatccatgctctggaggctcaaacagtaattgcatttatgaacaaca

SEQ ID NO: 435328 - DNA, 106 bp, Oryza sativa
aaaaaaaaaaaacctgttgtacaaaaaaaactaatggaaaaaaatgtacaaaataaacaaaccaatttaaaaaaacatgaaaaatttaaaattataccaataaaaa

SEQ ID NO: 435329 - DNA, 244 bp, Oryza sativa
  unsure (1)..(244): unsure at all n locations
cggccggaatttccgggctcttcacccacccaatacctaccccagcgccngcgaaccgcgaagcggagcttattaacggangccggggagcgcgccgcnggcgcagggccaggacacggcgggggcgcaagggcccagggacaaccggagccccaaccaccaggagcngaagcgcgacccggagacggcggccaccggccagacctacgaccgcgccagcaacgagacgaggggggccccaagg

SEQ ID NO: 435330 - DNA, 127 bp, Oryza sativa
atttgttttttaaataatttttttttatattattttttttttttttttttaatttttttttttgtttattaacggaaaaaaaagaatagggaccccggaagagcgacacaaaaaccacaaacgaaaa

SEQ ID NO: 435331 - DNA, 228 bp, Oryza sativa
ggtacgcgaccgcccacgcgccccgactccagcggctctttaccacaacctccccggatcgatcccacggaaagaacagggaacagagggatgagagggctgcgcccgaagcatagtaccgcagatgcgaaggcggccttcacagggccaccgacgaccgctcccacgaggccgactgatccacctacgcgagagaacctcgactacaagaaacaccaaacgacaagg

SEQ ID NO: 435332 - DNA, 349 bp, Oryza sativa
ccttgcaattcgttggatctttaaagccatccacatgttgtggcatttacaaagtcaaaggtgccctatgaggctttagactgtagagtcatatttctctattaactataaaaactataaaggactaaaacgtatctccattctacttttccatttaaaaactttgacaacccttatcaaaccgtgctttgattcccaagccttaattttttgtcaaggtgccaatcattttcaaatcttttacaactaataattaccacacctatcctttgacctcacatttttggaactttccagtcattaattctgggtaactgcttaagttatccttgactaacattttggactt

SEQ ID NO: 435333 - DNA, 378 bp, Oryza sativa
tatagattgtgagttgtgaggaggtgtttattatttttgtcggtatttcattctcataatttgatctttttttttccccagccgagaaaaaagggacagaaaaggggaaaaaaaaaaaacagaaagaaccctggggaaaattgcaaaaagaaaaaagagggggggggggtgggaaaaatggggaaaaagggaccggggcccgggggggggggaagggggggaaaaggggggggctggggaaaaaagggggggaaggggccccccccttgggggggggaaaaaaaaggaaaaagggccacaaggggttaaaaagaaaattacgaggcctcgggagccggggggggaaaaaaaccgggaaagtaatccttcggggggggg

SEQ ID NO: 435334 - DNA, 441 bp, Oryza sativa
agcattcactttcgaattgtatatatatgcaaatgtatgtataactctctgtacaagtttgaggtcttcagacataaaccatagcgtgtatttgtgtcatataaggctgtgttagggaactaatccctccaaccataataatcttccaatgcaaaacaacctagagaccagaaagtctgtcggcaagaattaaatttgggcacttctcaaaaccatggtaggtagctggtacaggatagaatacgaaatcacagccagttttctgaatgtgctcctctatcgtggatgtgcccacagcagtccgtacctactcggcatttgaacgcctcgttgtaaggtactaaccaccaaagcatcataaaggtatggaacaccaagctttcagacatgtgtgtcaacaggaatagcatggttctgatcgagtgagaacaaagcaacaca

SEQ ID NO: 435335 - DNA, 493 bp, Oryza sativa
  unsure (1)..(493): unsure at all n locations
ctcgtctttgagctgnatanggggtgtcatcctccccttccgaccgttgccgccgccgccgccgccgggatgccacctcgccgccgccgccgagtccggccgccgctcccaccctcccctcccctcctctcttccaccaccgcaacaccaccgccaaccccgcccgtgggcacccccaaatccgaggccgccgaccgccgccctcctcccgcccgccgccgactccccctcgtctccgccgccgccgtcgaggaggaggacggagagtggcaccccctgccgctctccgccgccgacctgtccctcccgctcaccctccccacggggcagaccttcctgtggcgccgcacgtctctctccccgctccgcttcaccggcgccgtggggccttacctcgtcttcctctcccacctcccgtcctccgacggccgcctcgcctttcttctccacaacaacggcgggtacttcttcttcttcgtccccgcggcggtcc

SEQ ID NO: 435336 - DNA, 363 bp, Oryza sativa
aataactggacgtctattgcacagctcaaatcattggacatcatacatctggaaacccatctgaaacacactaaaaagaatttacatcacatgccttttttagccacaatagcaagacctttacgttctttgcccaatcagacagcacaagggaattacacagggtttgaaaaggaattttgggaacactttttttggaggccatgtagtacccaaccagcaatgctgtcagtactaagggggacctttaaaaatatttaactctacgatttcggaaggaaaccgtaaaatttacatggaacatttttggggcatatgggaagggagggcacaggcgaaattgtcccatcacaatttttgccc

SEQ ID NO: 435337 - DNA, 299 bp, Oryza sativa
aatagaaaccctgattgcatacttgttttcatcatcataaatacaccaagttgaaaacattacattacacagtaactctacacacatggtactcagctagcattctcttgttcaaatttacacatgatgatataaacgaaccgatcatgcatacacataaatttttttccttttttttcctttttcacacaagaagactcgtggcctcatcggttttggttcgtcacgtcacatgacgctgcagccggccggctcctcgtcgtagtacggcggctggtacgggctccggccgccgtacc

SEQ ID NO: 435338 - DNA, 249 bp, Oryza sativa
tagtcgttggtcgaggcgaggaggaggaggaggaagaaggagtttgcgagttggggccactaggacgcgcatgatcgaacaggaagcccgaacgcaatgagcgtgcgcgaggcgccatccgagccaccacagcgacccccccctagactcgtggctggacttgcgacgaccggcaagcgtggcgacggcttctacccacatctaccaaggtttccagcacgtcggagaaacctgaccacgcgacgggtc

SEQ ID NO: 435339 - DNA, 448 bp, Oryza sativa
cgctgatatggtttactaatccattcgataataacaggacccatattacaagtgcagtaagataaggaatccagactagcacatatacacaccaaaatagaagaacacccaaaataaaagggttggaactttattgctaattgctcataggaccattcatagctaagtccaccaagtcagtctgatttctgattcttttactcttttgaagggagtcagagaccaacagcagcatctcatttcagacatgtttacagatacttctgccatctgaaggttgcaaagtacttgttgctatcttttggaactggagataaatcgacaaggctaacagctactatgcattcttatgccaaagggatctgaaaggcagctgagaaagccatgaggattcagagcgtggtgatctagcggcttgagaagcgtttgtgccagtggaagcgttctg

SEQ ID NO: 435340 - DNA, 160 bp, Oryza sativa
ggaccccatacaaaaaccaatgactttggggaattaatgaatgggaataaatttgtaacaagtccagttggaacaaaatggttattttaagctaccaaaacactctatttatggttacaacataaggcccacacaatattatgaatggtactcgaaagtt

SEQ ID NO: 435341 - DNA, 360 bp, Oryza sativa
ttcgtatctctcctctctcccgccgaccaggagaaagaaggttaaagaagaagaaaaatcctctgcgatggcgaagaagaaggagagggcggcgaacgtgtaggggaagccgggccacatgctcgacgtcaaccgcgccaatgacaagaagggcgcgggcggcggcgccgggggcggtggtggaggccgttcggcggacacggtgcggaggctcaagatgtacaagatgaggcccctcatggaccgaggcgggaagatcctgaagcacgacctccagatcaaggagctttccaacacccgcatcttgcccgatcgccgctggttcggaaatacaccagtcgttaatttaaaaagagcttg

SEQ ID NO: 435342 - DNA, 441 bp, Oryza sativa
aaatcttaaactttaattttaattttttaagaccttttattgtagtttctttttcaagattaacgtctaaatcattaataacacatatttaaaatttctaactataaattactaccggaggaccgttcgtcggcagcagccagagtctctgacgttgcatcgattgtctttgtctaagccaattcactccagttctagtgttgaactgttgataattgggttgcacctctcgttttgctgtcggccatggacgcgcacgcaccgccccggagccctgcgtccgacggcggccatggcgacggcgacggcgacacgaagaagccgcacgtcctcgtcgtgccgtacccggcgcagggccacatgctcccgctcctcgacctcgtcgcgctgctggccgcgcgcggcctcgcgctcgccgtcgccgtgacgcccgggaacgtc

SEQ ID NO: 435343 - DNA, 350 bp, Oryza sativa
caaatgccatagccattgattttcacggggaatcgagtagtaacacagggggatggatggatggatgatggtgaagtagaatgcgccagctactgtaccagtacaacaccattgcgacatggcactctgcatctgcacaagcatgaagcagaagcagagccaagctgcaaggtgacacgacaatcttaggacacttagctcactgatcagctcagctgagatcattacagcaacacaaagaagaagaagaaaaaaggagtaaaaaaaagttacacaaaaagggtaaaaaaacacttgactttcacttggagaggaagaagttgcaggatcattagtccctaacttaaaaa

SEQ ID NO: 435344 - DNA, 380 bp, Oryza sativa
  unsure (1)..(380): unsure at all n locations
caagaagaagaagnngttgntggtcgaggcgaggaggaggaggaggaagaaggagtttgtgtgttggtgttatgaggtgctggattagacgagaggaatgcccttcggtgggagcgcgcgagaggggcacgcggtgacactgctgcaacaccacctcatacacggcgttggcctcgccgcggccggcaagctcgtctcctccttctccgccgccgccgccgcccccggagcaggtgggctctgggagccaaggtcggtgctcgaccaccgccacatcccgagccccaacccccctacctcggctctcacgctgtccgtccctctcgccgacttggcggccctcgcccgccccaaccccaagaacctctccctcttccccc

SEQ ID NO: 435345 - DNA, 491 bp, Oryza sativa
cttggatctcattttttttttcgtcagagagcaaaccaaccattgtcagtccaactttccatgatagtaattctggctggaagatgccatttgcaaatgcccgtcctgatgaagcaaagatgactgctgttccacagttctttaggcaacccgttcagatggttagagaaagtccagggcaaaacaagggtttggtaatattcccccagttggtccagacagacttctcaagatcacagggccaaccacaatggcaaggcctggttcccccgatgcaacagaaaccaaacaaggatatgcttcgcccagacttgaacatcgggttcccttctcctggttcaccaccagctcgacagtcttcgggcatcaatttggaagcacaacagccagaccttgctttgcagttgtaagcttgaacggatgtgacccagattgaatggcagacttgaacttgaacaattaaagacaatggaagttaggcgcaagcgcaa

SEQ ID NO: 435346 - DNA, 104 bp, Oryza sativa
atatattcaaaattcattgtttacatttataattatttttttcatatataattagaccagactggcaatatataaaatatatgcaatcatcaataatggtagac

SEQ ID NO: 435347 - DNA, 331 bp, Oryza sativa
  unsure (1)..(331): unsure at all n locations
gagatacacaaacgaactnctaggttagaataaacacatttttaaaaaaaccaagaaaagattttcctcttctgttacattccttcttccttctccggccaccggagccgtagccgaattgtgcctcttctccggcgaggggagagggagagagggggtgtgagtttctttccttccatacagagggggcacttcgctggcggaggatgcgatgtttcttgatatcgcactaggggtgatgaacaagaaggggtttgccggttctgcctacagagatttaagacgggcacgtgtagaccacggagaacattctccagccgagctatggtaa

SEQ ID NO: 435348 - DNA, 105 bp, Oryza sativa
aaagttaaactagaattattggagatcgataaaagaaccattaccacaagggagggcaccaaagagacaatacatagaatacgtgcagaaaccatggtaaggagg

SEQ ID NO: 435349 - DNA, 213 bp, Oryza sativa
tgttctttcaagtcgaccaacgccgaggaaaaatggctaaagagacccatgtgcggtctcttccacttccatgattaaagacacaggacaaaactcggcatggtgaccggcctgacagccgtaattacacatcgaggcgtctggcaagtcttgcctactacacattagagcacgtactcggaaaaggatgcggggcataaccactaacgtact

SEQ ID NO: 435350 - DNA, 61 bp, Oryza sativa
gaagataaacgagattgattggagagcaataaaagaaccaatatcacgagtgagggcacca

SEQ ID NO: 435351 - DNA, 246 bp, Oryza sativa
catactctcaggtcgacaaacgcccaggaaacatggctatttagagccatgtgctgtcccttccacattcatgaataataacacctggaccaaatttatacatggtagccctccttgaaaactagaatatacacacttaggtcgcctgccactgtcttccctaccagacataagagcacgtacctggaaaaggatgcctggcactactgataacgtactagtcttacaagaaaaagaagccgtttg

SEQ ID NO: 435352 - DNA, 65 bp, Oryza sativa
ttgttttttataataaatagcgagattctttgcaaggcgataaaagaacccagtaaaagaaggga

SEQ ID NO: 435353 - DNA, 69 bp, Oryza sativa
tagtttctcaagtggagaaacccccaggagcgataattttttagacgcctgtacggtctcttccaaagc

SEQ ID NO: 435354 - DNA, 149 bp, Oryza sativa
ccgcaacaaaggggaacccggtctaaataattaattcgaaggtaattgcccaaattgcttcgcattacacggccgcgaatacatatattatttatcggtatcttttaaattctgatataatttataatttttcttacttctagatctac

SEQ ID NO: 435355 - DNA, 331 bp, Oryza sativa
agtctgcgaagcccaccaccaccaccacccagatgcccacctcgccgccaccaccaccatgcggggctccgcggcggcggcggcggcggcggcggcggcgactgtgacgcgggtggcgcagcgggtggtggccccgtcggcggcgacgcctgggggcgcgctcccgctgtcctggctcgaccgctacccgacgcagtgcgcgctcatcgagtccctccatgtcttcaagggcctgtgccgacgccgccgtggtgcccgtcgcggagatcgagcgcgcgctcgcggcggcgctcgtgagctactaccccatcgccggccggctggcggagcg

SEQ ID NO: 435356 - DNA, 354 bp, Oryza sativa
ggggcaaaagcaacttaaactttgttactggcccactaggttcagaaccttgattggataaccttcaaatgatagtaggggactagcaatacaggggcgccctgaattatccaaagcttagcatgaatgcatgatcatggtttcacagctaaaaaaccgttgaaaaaacgtatgctagcccttgggggtataaatgggactagtatactttggtggtggtttttgggattgaattccaccaaaacaggaaagggcaatacacaacccctaatgggtactgggacaaaatccactgacaggtttttttcccaattgagatcccacctgattttgagcccttccaaactgggtttt

SEQ ID NO: 435357 - DNA, 65 bp, Oryza sativa
gatagtcacaggatggcagacgaccacgagacatgagaatagtgagccatgtccggacaacttcc

SEQ ID NO: 435358 - DNA, 62 bp, Oryza sativa
cgcagagagccgagtttatttggagaacgataaaagaccccatatcacaagggagggcacca

SEQ ID NO: 435359 - DNA, 224 bp, Oryza sativa
ctctttctcaagtcgacgaacgctcaggacacatgggttattagacacatgtccggcttcttctacttccactgagttatgacactgcacccatttcgtcattgtaaacggcctgaaagtcgtacattacacaccgaggcgcctgcccagtcttccctaccagacagaagagcacgtccatggatcaggatgcgtggcattacagctgttgtactacatgtaca

SEQ ID NO: 435360 - DNA, 71 bp, Oryza sativa
tgtgtttttttacaatgcggtggttactcttagaactgtacacataaacttcggacagtcaatttgaataa

SEQ ID NO: 435361 - DNA, 109 bp, Oryza sativa
caattctgggcgaaactcatgataaggctataacagattccaggggcattatgggagggaactaaaaggctaatcaactaagacttatcgttgaagatagaataactaa

SEQ ID NO: 435362 - DNA, 96 bp, Oryza sativa
gtctagatgtattgaacacctataaaagaacccttaacacaagggaaggaaccaaagggacaaaatctagaataagggcggtaaacaacgtaaggg

SEQ ID NO: 435363 - DNA, 194 bp, Oryza sativa
tcgtacactctcaggacgacaaacgcccaggagagataattatagagcagcatgtgcggtctcttccaccgccacgaggaatgacaccgggacccaaattcggcaatgaggacggcttgaagaccgaacagacacagcgaggcgcctgccacagtcttgcctacaagacagaagggcacgtacatggcgaagga

SEQ ID NO: 435364 - DNA, 441 bp, Oryza sativa
aattggaggacaaatcacaacatcaaaaccgaccgataatcccagaaaatcagtttcccattcgctggtacaagatcgacactacaaagaaatacacaaacaaatcccaaatccctaaaaactaaagcagaagcaccttcttccgcttcatctgtcaacgagcgtccgctctgaacattccacaaccaatcccaaatcatcacaaatctaacccaaaaactaaatcccaatccaatcggaatcattacaaaatcatcccaaaataaatcaagcacaggagacaatccaataatcacatcacaaaataaatcacacataagatgagagaagaggtggaaatcacaaaataaatcacatcacatatgatatgagaggagagagaagggtgagagggaggccgtcgtcgttctttgccgccatggagatcctgagccgttgccg

SEQ ID NO: 435365 - DNA, 109 bp, Oryza sativa
ttttgtttttttttttttttttttttttttttttttttttttttttttttttttttttggacatatattaaagattaattctttgagcaagcttgcatattcccataca

SEQ ID NO: 435366 - DNA, 253 bp, Oryza sativa
ggtggaaaagatccaggaattcacaatttttgttgagactgatgggaccattgtttcacacataacccctggcgtggtagattgcacaggaaatttggtatgaagatgaatcaacctgtgcctaagggcaaacgaatctcaatttcatcatgttgttttgttaagcatacgtacaggggtatggagggaatcggagactcaacttcccatattgcacaaacggggaaaaaaatatattccacgatcttctttt

SEQ ID NO: 435367 - DNA, 412 bp, Oryza sativa
aacacaaaataatcgattttatagatggtatgtataacaccctcctcatgatcgatggccctccctccctcatgtgtaaatgtatgctctacaatcatcaccatccaatccacactctatctgaccacctacctacacactcatcagttcatcagaactgtctgtacagcaggtaaaacacatcagaatcctcgtcattcagacagaggcagagatgggagtgaagatgaagatgaagaatcagcctagcttagatctacaccagtgtggagttcggaggggtgaatgcccattatcttgtagtacgccttctccgccttcgccattctcgtttgaaacattccccaattcctttcctgcaccgtgcccttaccccttcccatgcgggcttccatttctcttgacttgccct

SEQ ID NO: 435368 - DNA, 472 bp, Oryza sativa
gttttattgccccctcctgcccgccgccgccgccgcacagccggcgatcgagcggaattcccattcctttccgcccggtttccggcgctgccgcccccctcttaccatcccgggggggcccagaggccaggagctgtcgccggaggatttcaatttttcggagccatttgatgctaatgccacaccaccactcctgctaaagctgccctcattatgaactcgctggacaatgagtagcaattgcacattgctgatttccatctcctgcggttacattcgtacacgacagcatgggaaaacttgcagctgttgttcgcagtgtacttagattaacaaatgaaagcatgaggattgttatggtaacaattattggagggctcttgggcttcttattggaatttcattcccatcagtcagcataacaaagcttcactttccttttaactttgtatcatacatagaagacagaaac

SEQ ID NO: 435369 - DNA, 103 bp, Oryza sativa
ttgttttgtataaagagcacctttattcagagaactgcatatacaaccagaggctgttcagttctattaaacctatttgttcatattatatttcactcgacat

SEQ ID NO: 435370 - DNA, 175 bp, Oryza sativa
tggttttttttttttttgtgtttttttttttttttttttttttttttttttttttttgttttagacgcaaacaaaggtaaagggaacagaaaagaaaagcaaaaaggaaaaaagggaaaataaaccacaaccaacacaaaaaggaaaataaaatacaaaaaaaacaaaacacaaa

SEQ ID NO: 435371 - DNA, 419 bp, Oryza sativa
tcggtggtcagctggggcgcgatgatccccgccggcgtggcgatggcgcggttcatgaagcggttcgagccgctctggttctacgcgcacgccggcgttcaggggctcgggttcgtggtcggcgcggtggccatcgtcgccgggttcaggctcgacggcgaggacgacgtcggcgcacacaaggcggtcggcgtcgccgtcctcgtctgcgcgtgcctgcaggtgatggccgtgctggcgaggccgatcaaggaggcgaaggcgcgcaagtacctggaactggtaccaccactacgtcggccgcgccgccgtcgtccttggcgtcggcaacgtcttctacgggatgtcgctggccaaggaaggggacgagtggagctacgtgtacggcttcttcgtcggcgtctgcgccgtcgcgttac

SEQ ID NO: 435372 - DNA, 116 bp, Oryza sativa
agtcagtgtgctgttgagacactgggcgtcggtgggcgcgcttccagataagcagcctggtactgcgcgcgagcatgtagcctggcggtcgccgaacacacgagtcaccgctcgga

SEQ ID NO: 435373 - DNA, 150 bp, Oryza sativa
tttgttttacaaaagaaaatactaattgcaactttgattgacatctgaaccataacagatcataagcacaaaaaatacatatatatttgacctaggacactgatcacccggggttcacaacccaacacgttacatcatgtaaaaattaca

SEQ ID NO: 435374 - DNA, 458 bp, Oryza sativa
acttaagtaatttaacattacttaatttcacattacaaaattacatagtccaacacactctatattgtggatatatccttcgcagaaaattctagtattattttgcaagaattgatcttcccacgagcaaaatgaatcatgtagcatatgaatcaaattttgatgaaattttggccaggttttcagatatccatgcttcaggtttctctgtcagctgtggagttcaccttccccgttgcggcggcggcggcggcggcggccttctcccgccggaatctctggaagtcggcgacgatgccgacgtccacgtcctgctttatcttctcggccagtctctgcaagacctgcaccgccacaatctttaagatcgccaagaaaccaaaatttgtggccccgccggcgttggcgaagaaccgaagacttactgtaagatgaaccattggcatctgggattatta

SEQ ID NO: 435375 - DNA, 386 bp, Oryza sativa
tgtttgcgtgggcgccatgtgtttgtttgtttgtctgtttgggccggagggcgcggcgcagacggagtgggagctgcgtgggctggagcgcgactacgcgccggcgagcttcgacctcggcgtccgcgggtcgctctacgccgacaggagccgcggccgccgcgcctgccggctgaggggccacctcgagatctccatcggctgcgtcctgccaccgccgatgcgcctcgtgccggacgctgtcatgcgcggcgtcgccgagtcggtaagtgtagggatcgatcataagaactaagcccaccagagggggtgaatgggttgaatatccaaaaaccaaaaacttttaatgaaataaaaggtaccatcgaaatcgatggatcgcggtc

SEQ ID NO: 435376 - DNA, 449 bp, Oryza sativa
attatcgtatttgcgttgaaacattcagttatgctgtatatatcacagttaaatactaactcaaattttatcgatttcctttcggaattaattaccaagaacagaatcctgtacatgacaaacaattggctctctcctctagtcctaccacatctcttgctcccaagtcccaatttgtcctcttcctcaaaaattcagagaagaagcaagagaataagacttcatcacttgggtagcctttaaaagactgcttccagcctttttcggaagcaatgcaggtaaattcagcttatatagttgccaaataatatgattgggatgtatggcaatgaattcttcatgaagaggcttatggaaaccgaaataaatgcaacaacagatggaatcaactttgctttaatatttacagggaaagagtaattcttgatcactaaaaaattgcttgatgc

SEQ ID NO: 435377 - DNA, 173 bp, Oryza sativa
ttttggtttttttttttttttttttttttttttttttttttttttttttttttttttttttttttttttttttttttttttttttttaaaaaccaaaatcagatgggcctagcatttctttatttacctcgccctatttggcaactttctccctttggaaaaaaaaccctgaa

SEQ ID NO: 435378 - DNA, 397 bp, Oryza sativa
gctctcaattaattattgagcttagatagttaagacacattctatacagattgagcggatgctagaccgtgagttgaaagaggagtagtttggttacagacttgcaggcaaaagaagcatggagaaacaaaaaaaaatctgcttggagaggtctccttccatccttagctccgtagcacatcgtattctcacatgaatatgccaaattgccaacctgttctctagattgccatggttttgctgcctgtttgcacatcgtatcctgggcggcaaaggctgggagtgacggcgagtcaaggatgtcggtcgctggcagagggggtgatggaggcgacgtccagcgatcaccagcggcggcacgcgtgtgtggggattaggggcagctcaagagtgatgt

SEQ ID NO: 435379 - DNA, 465 bp, Oryza sativa
gttttgagagctgttgcacttgcacaccactctctcgttctctctctctctccccgtcttcctgtgtctcttgccccatcctcatctgaggaatacactctcctgctctccactaacctttgctctagtagttgttgccaaccagatccaccatgccaccacctgctgctccaagccgtcgttgctgctgctgttgatgccttctcttccccctagctgctgctggatttagcttcttagatgacgcatttccggattgggacggcttcactcctcctcgcctggatcctgtcgtctctccgccccactgttgcgcggatccgccgtcgccggcgacgggaggggcggatccaacgacctcttcctctcacggatcctgtggccggcttcactcctcctcatttggatcccatcgtttctccgcccctctgtcggcggatccgtcggcggcggcgacgggagggc

SEQ ID NO: 435380 - DNA, 343 bp, Oryza sativa
caaatgcaacccaatttgaattgaatggaggaaccacaaacacccccaaatttcaggagtggagctcattaaccacgggattacattacccagacgcacacacggcttcaccccaaaggttacgtattgaaaactaagaccaaaccaaactggttgaccaagctgcaactaataacacaacgtcccacccatttaaccatcatccggtggccaccgccacctaatacacgggcaccctaatacacccatgcttccggcctccggtaagtcacaggtatcgcgctccggtggaggatagctcaggttgaggaggccctactggaacgaggccacaaggtccatg

SEQ ID NO: 435381 - DNA, 266 bp, Oryza sativa
ctgtcccacacaccatttatatcacaatggccgccgccaagtccgacgagcggatcgggcagtggcgggaggtgccagccgagccgacgccggacggccccatccgcctgtagtgcctcgaccgggaccctacccagatggcgctgatcgaggcgctcaacgtgttcaagccgactctcgatagggtgattggcagcgattacgtggcggatgggccggaccgtacgatcgagcgcgccttggcgagggccaaggtgcattactac

SEQ ID NO: 435382 - DNA, 165 bp, Oryza sativa
atccttgtcgtagattttattaatgcattcagagacagtcccacaagtaacatgagagaccaagaacaaacaaatcccaaactaaaggcatcgcaggtcacctaccaagggataaccttcgtaagaggcacacacgcccacgtcacacaaggggagcaagacgat

SEQ ID NO: 435383 - DNA, 164 bp, Oryza sativa
ttttgaacctagcgcactccaccagccgcggccggccgattgagcagtggacgaatgagtgggaaccgacgactggggagaaccaactcatcttctagcgcctactctgggccgacgaccagagatggatgcaggacgcagttcaacagctgcggctagattct

SEQ ID NO: 435384 - DNA, 113 bp, Oryza sativa
caacctcgtcgtagatcttattaagccattaagagacagccacataagtgacataacgagggcaagagcacgacaaatcccataactaattagcacgcagggtcactctgcca

SEQ ID NO: 435385 - DNA, 163 bp, Oryza sativa
ttttgaccttagcccactccaccagcccctgccggccgattgtgcagtggacatatgagacggcaccgacgaatgggcagaactaactcatcatctagcacactcactgggccgatcgagagagtttgatgcaggacgcattcaacacctgcggctagattct

SEQ ID NO: 435386 - DNA, 81 bp, Oryza sativa
tgttttttttatccgcgtcgtatctcttattaatgcattcagacggcagtcacagtagtaaagttagagggaaagagcaac

SEQ ID NO: 435387 - DNA, 335 bp, Oryza sativa
tatggaacttagcgcactccaccagcccctgccggccgatcgtgcactggacatatgaatggggaccgacgaatgggcagaaccaattcatcagcaagcacctactatgggccgataacgagagatggatgcaggacgcattcaacagcagcggctagattctcgagtgaatcatcacaagactttgatacgtgtgatggctcctaacatcggaactacaataccgtcgcaagcaccaagattgacagataccccttcaggcagcgatcactgggagaccctacatggtcaacttagatcgaattgaagaatgcaattaactacaacaggaagaa

SEQ ID NO: 435388 - DNA, 123 bp, Oryza sativa
tttgtttttttaccaagttgtggctttaatattcgggttgaaaagagattacacatttggagcttgaaaaaagggggtccaccgccaaaagatgtaggggtggtgcactatgctagagatata

SEQ ID NO: 435389 - DNA, 242 bp, Oryza sativa
ttgtgatcaccaaggacacaccactagctacagcggagcgacctagtactcacagcatgtcataccgtcaaccactaggccagcctgttccatccgtcaggtactacgcacagaggcttagcagtagattgactactctaactagttaaccagtcaacgcgtggtcacggcgattgagatgaccaacaaggcttcaacacctccagatgaggtccaatgcatggagacatatgggagccgct

SEQ ID NO: 435390 - DNA, 289 bp, Oryza sativa
gactagaatactagatatagccaacaaaatcgcacaaaacgtatgtgaattcctaccaaccatgctagcattattatcattatcaagacatgcatgatgcatgcgtgattacaaaattagtacattgacatccattgtacatttatgccccagctgaagaatccttgaaaactggtaagacacatcatctggtcttctggttttggaaggatgactagctaggtagaaagctagcttgaggaagtccaagcgcatgaagagcctgacagacttgttcctggtgccccag

SEQ ID NO: 435391 - DNA, 437 bp, Oryza sativa
aaacataaccaagatctttattttaattagaaggtgaaacgatcctgagattacaactgtttcatcacaccatactgatattaattacccattgctaataccacagagcaacttggacgggtgatcaaggaggtgacacatttgaagttacaacgctgaagcgatctcagttcaatcagcactaacaaaaccaaaagtatttcggtatttcagtataagcaggtcacatgaacaaacgaagtttttatactaccgccctttaacttgctcttggcagtgccgtttgcggtggcaacagcttccctttggtggggtcagctgatcccaggccttaatccatgtgaccatggagttggcgagcttgttgaagtagccatcgacctttccgagcttcgccctacttgcttggccgctcaaggtaacacttttggacagtg

SEQ ID NO: 435392 - DNA, 398 bp, Oryza sativa
tttggtttttttttttttttttgtttttttttttttttttttttttttttttgggggggggcaaaatagacttattgcaaggacgagcacgttaaactggttgggccttaaaaccagcatggcacagcctgggtcatattgggtcgtaggggcaaccagggaggcgagcccggcctgactgactgatctcaaaccatgctttggttgggctaggccaggccgtgtctagcgactcatttggccatctatagggaaaacaagaaaacccttcatgctttatttttgggaccaaagcaagagcccctttagcaattaagttgacgatgattactccctgggggtcacttgcatcgggaggccttcttccttttccagagtttaccaaaacacaaaccctg

SEQ ID NO: 435393 - DNA, 356 bp, Oryza sativa
ttggggttttttttttttttttttttttttttttttttttttttttttttttttttttttttttggaaaagggatcaatgcccttaagttaaaaaagatctaaatccatcaggttacaaggccaatttttccaaaacacttattttacaaacatgttatgccaaaagggccaataaagcaaaagggtgcttttaaagaaagccccactttagttttgcttttcacttttgggaatttttaaggacgacataattggggccataaggcttttgaattttcgaaattttcttcaaaatttcagcaaaagcatttttggcccctggacctcgtagtctaaacttaaatttaaaaaccaa

SEQ ID NO: 435394 - DNA, 203 bp, Oryza sativa
tcggtagtagaatttccaaccccggatgggtcagatgtaccttcaacaaaaaacgcattggcccgggtcgcatagtaacaacactatcccaagggccgtccccgcattactcctgagaccaaagcatttgaaacggacgagctggagccttcattgaaactgcttggcttgatgctgcttactatacccctatggtctatgct

SEQ ID NO: 435395 - DNA, 346 bp, Oryza sativa
  unsure (1)..(346): unsure at all n locations
cccaagaaaanttaanagacacaattttggcggcattttattccctgngnangagtgcgagtgacaattgnnnatacaacacactggaaaaaaagcaaggccnaaaccaaaagggaaaaaggaagcaagcaagcaccgccacaaaaaggggacgcaacccggacagacnttgaaaaaggggcaaccacagggggaaacaaaaccaannncccccaaaagcaccacgcggagggctacaaccaaggggaaaaagnnggcacggggcgccgaagcggatacacagacccgcggggcaagcacgccccaaaatgggggggaggcccaccacgacgacgaccagcctagc

SEQ ID NO: 435396 - DNA, 386 bp, Oryza sativa
  unsure (1)..(386): unsure at all n locations
anannnnggggttttttaaacaaacactnnggatttgaaattcatagganacaccgagcaggttactgaatatcnnngggnactaacatcatactctaagataatagtctatttanctaggagactaggagagtggttgatgagggatctacaggagcagaagaagaacacccacatcttgtgttcttgcctgcctacccaatttcatcatcatcatcatccattggctgatttgattctacaagaagaaatggaaccgaactagtactacaaagagatgatcaagctgctgctaaacaagtaataacaaaaatcaagattaaaccacaggaaggatgcaaagaagaagagtaatttttaagctaaagctgtttttgcctactttt

SEQ ID NO: 435397 - DNA, 367 bp, Oryza sativa
  unsure (1)..(367): unsure at all n locations
actattgtagagctgtgacgacgcatgctcccctccgtcggctggtagccttttgtgcggccgccctccttttttttttttttttgcgttgcatgaaaacatgacgaatgactttggaaaatttatgcagtttgtgcgaatacagccggtcgaagctccacagggctgataactaataaactagtagtatatataaacccccaaaaaggcaggatctttaacagtagtagcgaacattctgaaatctgaactctgaatcacttatagctcagctaaggtgagcaacatcaacctcatcagggaacttgaacgtatcagctgcaccaaacttcttcctcccctgcttccactcatnttcggacttcaa

SEQ ID NO: 435398 - DNA, 259 bp, Oryza sativa
gggaaaatgaacctaagtaggacaatattttccagctgatcatgttccaaccaaaatggaagaaaaggaaggctagacaaaacgaaattcaagctggggtttagcacctataaaaaccgagcttctctttttacatagaccatatatgaatttgtacaaaaaaattttgcaagcctactcaactttcgggatgtgtggataaataactccactatttaactgcaagtttaatataattggaaggaataattagccatct

SEQ ID NO: 435399 - DNA, 312 bp, Oryza sativa
gaaacaaaaggcaaacttgggaaccccaaaaaaaatttattattacagcaacagggggaaattcaaaaaaagcattattcctcccttgcaaaaaaaaacccaaaccttaattaaaacggaaaaaaaaaacgggaaaaaaaaggctggatcggccgaagatacagaaaaaactgtgggcaattgtttttagagaagggaaaaaacctagggtatacgggaatccccccggctgggcaaaagacccttaaacgaggacaagaaacaagcctgggtcttgagggcctttttggaaatggggaagcaaaccttttt

SEQ ID NO: 435400 - DNA, 322 bp, Oryza sativa
gggcaatagtaaaaaagaaactgtataacccatgcatagaaggggtttatgattttaaaacccaaattgtcaaaggggctgaactatgtaacttttatgcccagaaggaaaaattttaatctccggaaggaaacccttaattttggggggaggacaccaaatttggacaattacaaaagggaccacctaaagcaatcaaagggaaacgatttcgggggcccctaaaaagggcaactttttgatgaaaaaatggtggaatttggcggggaaacttggaaaaatgggccctttttgacagcaccagcaccagttcaagcttaat

SEQ ID NO: 435401 - DNA, 430 bp, Oryza sativa
attatagaggtgctacgacgtatgctcccctccttcggcatggtagcctcctatagagcgccccttcttttttttttttttttttttagcttggttgctttatgtaactaactaacaaccaagttagctaattacaaggaggaatcagtgaatgttaatcatgcaggcatacactccacgagtggctaatagaattgaggtatggcgagtgccatatcttgccataccggaagctcctccactagatttgtctgtacaaaaaccattttgaggcaagaactcgagctctgaatccttgcatcaaacaatcgaagcatccaaataattttgggcatccatacattatcactatgtccaattggagacatcaagatcctttccatgatggtgtcggcactgctgttgaagcccagacacccaaaatgtagag

SEQ ID NO: 435402 - DNA, 349 bp, Oryza sativa
ttttttttttttttttagctttgttttgttttatgtaacttatataacaactctaatttttgttactacagaaaacaatgggggaaaaaagggcaaaggggaaagcactccacaagggaggctgggctaaatgtaaaaaatgggaacgatgctattacaaaaatcggaactccacaagctacaaaagggcattaacgggttacaggttaagcactttaaactctaaaccaaaaatggggttacaacaatcaaataactgggggggggttaggtaaagccaaaagttggaattggggggaaaatgaaaaatatgggaccgaaaaagtggggggggaaaaaaaggtggagg

SEQ ID NO: 435403 - DNA, 80 bp, Oryza sativa
tttcctttggtggttttgaaccacgactctcaatgtaaaatgcaccacctaaatgcctaagtcctgtttaatttctccga

SEQ ID NO: 435404 - DNA, 344 bp, Oryza sativa
gcaccacgacatacattgtaaaatgtagtccggaaaagtcaaatggcttatggcagatgagccctccaagcgccacagtcaaacacccggtacgtggacagatcgcccaacatgccccactgcacggcttcatctcaagcgagagtctggaccagcagaacgaagtgaattgcaatgagcacttacacgagacacttaacaacgttacaggcactaggagaaagggtgctggctacgagcccctttatttccataaaaaaaacaacggcaggggctaccagacccagatcaactacgccaaagctaaagagagctcccaaggacccaacgcctacaggagggtg

SEQ ID NO: 435405 - DNA, 320 bp, Oryza sativa
gctgctgatgatgatgatgatgatggatcttggggagaaatttgttggctaatttcgacgagatttctcttcggtttggggggcttcaagctgttcgtcctgggcggggccatcttcttcttgctcttgggagaagaagggggagtcgatttctcgccggctttgagctccggcgatggaggcgggttgccgggtagcttcgacccgacggatttgaccagctttttcttcgatgatgggccatcgatgacgcctttggttgattcaacgaccaacttgcttttaccatggggagatgatttgaatggtttcttcccctt

SEQ ID NO: 435406 - DNA, 212 bp, Oryza sativa
caataaaagctggttgggtgaccgtctttcctataaaatgtgagaaatacaacaatgatgcaaacttgtctgaaagattgggtttgggagacaacaaacaaaacccaaattcgatggtggagaatgatcagtgatacatttgagtcggacatagagtagaagccttgtgtcagtaatgggtttccgagttacgaagcaacttgaattttcca

SEQ ID NO: 435407 - DNA, 404 bp, Oryza sativa
aaaaagtaaagcatgtttaaaggaagaaatattatataaaaaaattaattttctgcttcaacaaaaatgtatcaaaattgatactccattacacatcaacagagtatctcttatccttggtggagagtgaaacaggttgcatattatatcctccaacttgcggttgtggagtcaataaaaagctttgttgggctggagcagctgctggtgtcatcattggtgctgcatatgatcctattggcatttgaggcattgcagaggagacagcaccggtcatattagccattggtgctgcaaatggttcaagtgctcttctaacgatgaatccgtatagacctgtcatttggcctggagatattggaatctttcttttcattgctcgttcacgatcaactaacgcagct

SEQ ID NO: 435408 - DNA, 272 bp, Oryza sativa
aaaataataaaaaaaaaaaaaaaaaaaaaaaaaaaaaaaaaaaaaaaaaaaaaaaaaaaaaaaaaaaaaaaaaaaaaaaaaaaaaaaaaaaaaaaaaaattaaaaaaaaaaaaaaggttaagaaccttaataaaaattcaaattcaaaaacaaagcattactattaaattaagggaataaagccaaggttgcaaaaaaatataactggtagaatagaaaaaaactttatgtataaaaaaaaacaaaaaaataaaaaaaaaaggttgaatgaa

SEQ ID NO: 435409 - DNA, 390 bp, Oryza sativa
gaaaagatgagccaattggcggcaatttcactcaatgggggtatcttttacatggtcaacgttcaattacccaggagctgagtagctgacatttttatttacagacaagaataggagaaaaatatgacactgtgagcttgggcactcacttctttcttcacagagctcaacttgttacagccgcttagaatttctcacaatttgagagctcagaactcatgttcgttggcttaattaccaacaagaataatagctggtgtcatcacaacaatggtggtaacatctaacaacaatgaggtgccgagatcactacatacaattaacactcggcaatgcaacatactagagaaattgcagcaagaatgcaaagaagatggccatcattggttt

SEQ ID NO: 435410 - DNA, 334 bp, Oryza sativa
ggaagcagggtaatggatacatatacgggacttcctccgtttcacaagggaaggcattctagaattttctatattcaaatgggggttaaggaatctagataaatatatatgtctagattcaatacccccaatttaaatggggaaaaggctaaaaggacttacattgggaaacggggggggtccatcacagggaatggcaacccaatataatatcgggaaaaacaaacgaggcccaggacccccatttggggggaatatcagggaccagttatgcccaaggaagggtcataacaaagggagctgggcccctaaacgcccagaatcccccgaagat

SEQ ID NO: 435411 - DNA, 381 bp, Oryza sativa
gttctcatctgaacatataaaatgatctgttcatcctgggtcaagtcatttcgtcacgcgctaacatatgaaatgaatccacgatgcagacagcaaggacagaaaaaattgcaacaccaattttgctgcagattacggtattccgttcgtgttcagcaaaatttctgaagacgtatcgttgctgcgacgtgcatgggttttggattcagagaatagatcagcataaaaaaaaagagaggaaaaattatggttacaaacttctctatctgagtctgaccgactgtcggttcactgaccagctgattgatcaacggccatcgccgctgctgagctgcgagaaggccttgctgttggcgatccccgagtcggtcacgctgtcat

SEQ ID NO: 435412 - DNA, 217 bp, Oryza sativa
aatcactcagaatgtcacataggcaagacaaaccagtcacgaaccatggcgcttgtagtagcagtagtagtgacctacacgtacatccaagatgcatcacgcgtactctatacagtgatgtactatacggaccaacaactctacatacgttatacgtatcacagtaaccctacgcaaaaccgtacacaaaatacatgatgcctccatggtatatata

SEQ ID NO: 435413 - DNA, 300 bp, Oryza sativa
gcaagaactgaaagctcaactctgcatgattgattcgcatttgcatctatggctttactgctgactactacatggctagacgtacagcggaggcccagaaaggagctggaccgcccatgttcggatgcatcactactttcagtatcaggcacaagcccggcaggacatttcgacatacggagaatgcggcggggcccgccctgtacccggatttctggcgctatcctcagccattcccgcggaaatggttcttcccgttaggccactgaagagggcgattggcccttttctttcgtcgac

SEQ ID NO: 435414 - DNA, 305 bp, Oryza sativa
gaggagaaaaaccggacatccattttccctcatcagattaaaaatcaccaaccacattaacaaacccccggtggtggcaccgggcgggactcgggagacgaccaggggggggaattaacaggtaatcacccgcatcagcagccactagtcacacccgattctttcactccaactgggggtgggagcgctgacaagggctggccactgggcaccacgggggacgggggacaacgccacaccaccatttaattacttcttccccacttcaattccaaaaaaaggcggaaaaaaaaaggaaggaaaaa

SEQ ID NO: 435415 - DNA, 387 bp, Oryza sativa
ggacatgaatttttctactcgtataaaagaagggaaaggaatggatataggactaattaaaagaagagaaactagaagtggctagattcgactcctagtttgtgaggcataatataggggaagtaattacctttactacaaaaagcaacatgggaatgaattaataagatgaaccaacgttggtctatcaatgtgcatgcatgatcagttcctacctcttggtagggtgagagcacagcttgttcgtcttgccatttggtttgaacagttgggtgtttgggatggaccgcagctgagttcatcaatgcagcagccacttcctccacctctgacagacgggcatctccacatttcagtactatggtgactttctggagcgaacttctt

SEQ ID NO: 435416 - DNA, 385 bp, Oryza sativa
ggcggcggccttcacaatccgagaccaaacggcagggagcaacaacacagcaagaccagtgacaggtcatcacggggcgggcgcatcgccagtacaaagagaacaccccctccccatcccaaaaccctcaggcaaagtctctgcttggagagcacacgaaacctctctcttgggaacgcttttgaggcgaaaagatgggggaagaacatggtcattctccgggacacggaaaagcccccagggaaaggcaggaggagatgatgtaaccgtctgtctgcgtacgtctgtgagtatggggtgagggatgtatggtcaccacaggaatgccgcctctctcgagtggtatatacggtggatgtagaattctgccatcccccccagcctg

SEQ ID NO: 435417 - DNA, 111 bp, Oryza sativa
aactattaactttatttccgcgcgggcccaccttggggcaggcctgctaccgccaaaagacgagacaaaacgtccagtcccttctccttattgagcatccccatgcccttc

SEQ ID NO: 435418 - DNA, 395 bp, Oryza sativa
tttttgttttttttttacgacttaagccaatgaatatgaaaaaataaacttgtttttgaactgagggagtcctactgatttctctgttttgcttgaatggtccaagctctgtatatgctggtctctctctagggataaaaagagtgacagaaaaaaaaaaaggagtgacagaaaactgaactgaataataatgaccaaacctgggggtagcagtgcccaatactgctcctacaaagacactgccacattccttctccttcctcctgcatactggctctctgtctctctctatctgatcagctgttccgcttcctcctcttcttctgtcccccaaccccgtagccctcccacccatcgagccaggcggcggcccgacggccggtggctaaggcggc

SEQ ID NO: 435419 - DNA, 320 bp, Oryza sativa
cagttggaatgtatgcaacttcctttccaggctttcagcaattcactggagtagtggtttcttgatgacactttgacaattgacagagttaattcaggacagaaatgggctgtatatatatatatatatatgtgtgtgtgtgtgtgtgtgtgtgtgactcagcattgtgttcaggctcagtgaatggggatgatgcaaatcctacatatagagcatgcacgcccaaaaaatgaagatgcccctcgtttacgctacggataagggttacacaactttacacttgcagcaagagacccatgagtcgcggggccatatggagg

SEQ ID NO: 435420 - DNA, 130 bp, Oryza sativa
tttggggtttttcaattcagtgggttgtacctcttttctatcttcctagttcatctacttttagagaaaacaaaactagaggttcaattgtcttgatccgctattaattctataacaacatgaacattgc

SEQ ID NO: 435421 - DNA, 344 bp, Oryza sativa
acgcatatttacaccagtcagttggcacactagctggaggcgatctagcgaagctcacctagcttatataacaagctgtcgatctgcttgctgcctttgtgaattgcggcggaagcatgtctcgcgcgttgaccatggaagcgctccacgccgcggctgctaaggtggagcagctccagcacaaggtggaggaggcgactggcgtgacgagtagcagtcccacgagcggggaggagggcggacacctgccgcatgggtggtcgaagcggacgccgtcgcgccttcagtgatcggtggaggataaccttaggttccgtcttctaatgctcgcccgtagtggtcac

SEQ ID NO: 435422 - DNA, 322 bp, Oryza sativa
ctcctccatatcttcctttagataaggctatagtgtaaagcctggatgcaattccacacctttcactgacccatttcttcacagatgcagatgtaggcccaaaaaaacacaagggatgccagggagagcagctgtcaaaaaaagggcagccaaggaaaagataactagtaaaggtagagatagagagggagggaggcaaaatagaacacatgagcagttgtaagctacttcacttcggcactaattgctcttgtgcacactagaggttccggttccctcaaagggccatatgcttgacttcttcgccacccttgggggcacc

SEQ ID NO: 435423 - DNA, 578 bp, Oryza sativa
ggtggctgccgtgctgtcgtcggcggactggcacgggcggaggcttatggagggggaaggagaataggattgtgagggtattactttttttttttttttatcttctatttttttcttttttatttttttttttttttttttttttatttttacctttctttattttttctttcctttttatatctcttttttccttcttttttgttttttttttttttttatcttatcttttttttttattctttcttactaccatttttatttttttttgtttttcctttttattctttttctttcttgtgtttttttttttttttttccttttttttttttttgtttctttcttctttttttttttctttttttttatttatttctttttttttttctttttttttttttttgtttttttttttcttttttttttattttttttcttttttcttttttttctttctttttttcctttttttttttctttctctcttttttttttcttttttttatttttttttttcttttttttttttttattttttttttttttttttttttttttctttttttttctttttttt

SEQ ID NO: 435424 - DNA, 168 bp, Oryza sativa
aatctataaagacatacataataggaggggtttattttaaaattaggtggtcgttttaccaattaggagaattaacccctgaagaaataaccctttacaacaatttccaagagaactccttaagacagagagctctctgatgccaaatttgccctggctttgtgtaaa

SEQ ID NO: 435425 - DNA, 268 bp, Oryza sativa
ttggttttttatattcataggggtttttacttctttcacaaaaataagttattttcaagagagaaaacaaaactagaggtacaatcattaagacccgaaaatcggatagattaaaattctaaacaaaaaagcgtaaaactggacggacaaacatcccttgaggcccggagaaacccaacacaggcaaggcatcgcacacatctaggaatgccctgaagcaaagccatttgtctgaaaaagactgaccgatgtcatgacgacctacact

SEQ ID NO: 435426 - DNA, 502 bp, Oryza sativa
tttgttttttttttttttttggtgaactccgtgcattcaccatgataaacgacttaaatttcgcgtgcttttctgatgtctactggcctgagcctaaactttagcacagccaactcgcttttatatgcgctcatctttatcaagagcaagagtttctttccgccaaaatccaaagtaattgttctcacttaacacctatttggccaaacaaggacaattgctataagcctaaataacccacaaagagagtcgctgacaacataatgaaatgttcaaaattataagcaccatttcaccaccattttatccatgtagcgagaacccttctaagatccatagcacgctgatttataagccgccgttgcctcggttttccctttgaataatccttgatggtctgggctctggcttggaattagctctggagcctttgttggcccctcagcttcgaaaaaaaacctgttcacatttcggttgcttttcttcccattaaaaaacttga

SEQ ID NO: 435427 - DNA, 260 bp, Oryza sativa
aaccctatcgtacaagacacaactgggggcctgttcttagcatgcacgccaggctcaaccagctcccaaggattgtcacatccccgtggtcgcctacgatgacgctcgttccctaagcacaagcaggtacaaaaaactgggcgggaaaacagacaactagtattaaacgcttcggctacaggggcagccgagtaccaccaggtctgccaccatttactgactgtgcaaagacacgttggctaatggtcaatggcccaaag

SEQ ID NO: 435428 - DNA, 62 bp, Oryza sativa
ggcggcggccgtgcggtcgttggaggactggcacgaaatgaggctaatgataaatcaattta

SEQ ID NO: 435429 - DNA, 468 bp, Oryza sativa
gcaactctgcatcgattgatgcaagcaggaagcattcctcgttacaaatttctgtatacatctagaaaaagcaaacacatgtacacccggggtacatattatcatgataagactcgaagttattcatacataaaaacattgtatttctgcaaaaccatgatcaacaagcaaactctgttcctacttgctactctctcatgtgctgctaaccgtcctcaacatcagggcactgagctccagtctgcaccttgacccctagcaggctagcacatacatctcagaaaagcaaggacataatctgcctcctttcctttgtcccacagcgaagaacaggtgctacgatctcggaacagacacagctctgagccctgttgaagattcaagtccatcatctaccttgtatatacaagtcagcctgcgaaaatgttcaggagcaagtaacatgaggcatgcaggaatccatgagca

SEQ ID NO: 435430 - DNA, 377 bp, Oryza sativa
ttttttttttttttttttttttttttttttttttttttttttttttttttttttttttttttttttggggggaacaaaactagctaatggttccagcatggcactatttttgccgcaagggctttaaaaaaactttacccattatttttccaacaaacatcacaggggggcgagcttaattgccccgcccaaaagccatattgtaagaggggaaaccagaaaagaaggcaaaagacctggcccgggaaaacgccaatctcctttttttccaggaaaaagcccccgctgttttgacactggcccgagcgggtcaaccttatccaaactggcgcgaaccccagggacttggatcggggtaggggggcacaattccttgg

SEQ ID NO: 435431 - DNA, 220 bp, Oryza sativa
tctcttcactccccacctgaccttgcctttttagagagagaaagagaagagaacgcgctctaccaggagagagagagagaggagtcacctcacctgcacctgagctcaagagcgagagagagagagagagaacaggcggaggctagatgggtgttaccctttgaaccagtgcccatacttttgcctaaagcaaacacccgaacctattacccttacctgt

SEQ ID NO: 435432 - DNA, 424 bp, Oryza sativa
gtaggctaagctagccatgccgtgtaggtaacccttaatataagcccttgagcaataggaattaaccattgatcatacatggcaaatttatgttatctataagcctttaaatgccttaatctccacggtaagacaatcacattggcatggccgtgatgtcatcgaaattccacatgagcggagccgccacctcttggctctgtccgtacgtcatcgccggcgccaccgccgacaccggcacgacgacggcgccaccgccgacggcgctgaactcgtaagcaaccgccggcggcggcggctggaagtaaacgctggccacgtcgacggcgtcattaacgctgtactccaccgccgtcgtcgtcatcagctgctgctccctcagtccggcggcggcgggcgtcatggccatcgggtagaggtagga

SEQ ID NO: 435433 - DNA, 314 bp, Oryza sativa
tctcgtcaccgcgatcgatcgatcgccgccggtttagatttccttcctacgcggaccgcacccacgcgctaggtttagctagctagtttgcttgcgcgcaagcgtcgatcgagctagctagtgaagatagatatgtgcggcggcgccatcccgctgatcagcagccgcggccccggcggcaagaggagcctctccgccgccgatgagctctggccgccgccgccgcagcacgccagcgacgacccggccgagcaagcggcggcggatgttgaggagcaggagcagcagcccgcgtcgaggaggcagcggcgagg

SEQ ID NO: 435434 - DNA, 89 bp, Oryza sativa
gtaaaccggtcacaaatcccttttcaacgattcacttagacggaccggtagagcactgtccatttagttcgagacgataagagggggag

SEQ ID NO: 435435 - DNA, 267 bp, Oryza sativa
tttctttgtttggttttttttaatatttccggtgcttctcctcctctgcacaaaggggggctttggattattcttccagagcaaaaaacccattaaattatctggccaagcctggccacaatcaagcaatccctactttgaactaatccctttacatttccaaaatgtatgtcatcataccttggatatgtataaaactttgtatgtaccaaacatggcctttcgaaaactttggtattgattcccgataaccagaaattctccctt

SEQ ID NO: 435436 - DNA, 486 bp, Oryza sativa
attcacagattggaatactagatgtgatacatcactgtcaatccgtaggcagaattgatactacaaaaagcatcctactcagactatactatgatttctaagaatgcatagctataacgtccacttattcgagcagtaatcgccagcaaaatggaacagcatcccttgatctccagaaggcatccctcttctattgctagaccttggaacttcagaggggaaataagcgtcgcctactctgaaatctgacactgggttgctacatccaccaaaagttggtgtcgacagcaacatagaattacgagcactgaaacaaggatccggtgagaactcggagccatatcgtgaaagtgacagatttgccctgaaatgatttgagaggttttcccgacttgttgctgtcaaactgaaccttgaatgatagccatcagctgaacacaactcattttgagcaaaagagtctgtttgcaaccggaacaaaccagc

SEQ ID NO: 435437 - DNA, 373 bp, Oryza sativa
gtcgtttcgttcctttttctctccccggtggaggaagcgaggtgtgcgccggcaccgagcggagcggtagccgcgcggcgccggcgacgagcggggctccacccatcctcctcctccgaccggcggctagcgggagcccgacagggcggatctggcgtgacgcggccctccccccccccccttccccgggggggcgccggcgtggcctcccgggacctccgccgatcctctcccctccttcggccgccatgcctctcctccttgtcctccgaccgccgtggtgaggtcggtgtggtctcgtcctgcgtctaagcgttgtatttgtcttttctgtctcctttggtgcgtcttttagcggatactttagctatta

SEQ ID NO: 435438 - DNA, 516 bp, Oryza sativa
ataaagtagcatggattcagagttccagacacgctagggtaccagtataaaacattatcaaggtctctacatccagaatgccacaggattctcaagcatttcactactaactccttgaggaatgtttttgtactctcgaaattggcggctattgccagtcgtaagttctccattcttaccatacatcatagaaaatgtcaccaattgaataaacggcaccgagactgagtgatccaggcagcactccacgacgcagaatttgcttccaccacccatgctaacgagggtgacacccgtgaccaactcatgatcagacacagtagtagctagttcctccctggtgtatttcaccgcctggccattctcgcaatcgtcagatatcacatccattgagcatatgcgccaactggtggggtgccaggttttctgctgagcccaacccaggcgtccaactcagcgatgaagtacgcacgaccggagaacggagctgccactggccatggtctttcacataca

SEQ ID NO: 435439 - DNA, 297 bp, Oryza sativa
atctgttccaccatccatgggtgagggtgaggtggccggtgctcaccgcactaccctggggctcgcgcccactcgccggggcgccgatcctctgcggtcgcaggcgtgaggacccaaaccatggcgccgctgctcctcgctcgcccgcggcacatctggctcgatggaccaaaacacgccacctgccgccgccgccgtccgcggacggcgcttcctcagatctccgagcgcaccggatgccgtcgtcgctcccccgagcgctccgactcgtcgtctgcttgctgggttggagcatta

SEQ ID NO: 435440 - DNA, 150 bp, Oryza sativa
cccgtacgttctccagttcgaagacggtgagggcggggattgactgctggctccccccgcgtcccaccccaaaagaggagaggtcttgggaggaaccatccatgggggaggacctacacccagccaaagtggaattccgatcataccccg

SEQ ID NO: 435441 - DNA, 488 bp, Oryza sativa
tttttttttttttttttttttttttttttttttttttttttttttttttttttttttttttttttttttttttttttttaaaaaaccaaaaggaaaggggggtaaagtcaacggaattagggggggcttcgaaaaaaaaaaaaaaaaaaaaaaaaaacgggcttggggaaaagggggggaaaaaaagcaggggggaaaaaaaaaaaaactgtttggggcggggttccaaggggggaaactatgttgggggacaaaaaagggggaacaggcttttcaaagggtttttaaaaattgggccgcccaaaattgggtatggtaaatttcgagggggggagttaatccttttttggcaccgctttggtgaacttgaaagccgggaaattccggacgggacccggggggggaaccatttttcctaaagggggggggaataaaaggtgggggaaaaaagggaaaaaggtggtcccgggggaaaagggtattccgct

SEQ ID NO: 435442 - DNA, 396 bp, Oryza sativa
aaaaaaccaaaaggaaaggggggtaaagtaaaaggaaatgggggggggttggaaaaacaaaaaaaaaaaaaaaaaaaacggggttggggaaaaggggggggaaaaaagggggggggataaaaaaaaaaatgggatgggggggggtcccaagggggggaacaaggggggaggaaaaaaaagggggaaaaggcttttaaaaggggttttaaaaattgggggggccaaaattgggaatggaaaaactcgaaggggggggctaatctcctttttgccccgggtgggggccctggaaagcccggaaatccgggaccggacccggagggggaacacactgtcccaatggggggagggataaaagtggggcgaaaaaagggcaaaacattgttccgggggaaa

SEQ ID NO: 435443 - DNA, 134 bp, Oryza sativa
tgggttttttttttttatccatttaatccttttatctttcttctcctcccatctaaatcattatcaaggtcttaactcttccaaccaaaaatatttctcgaagcaacatcactacgtaacttccttgacgcacc

SEQ ID NO: 435444 - DNA, 292 bp, Oryza sativa
cgtactgtaggttaatctatccatgcctcgaacacttcccaaataataccaccgactcacataggtatacaccactggccatacccgtcaagccactcagacatcattgcattcaaattacataatttcaaccgggatacatccatattaggaaggtccgtaacgctacataaggcccaaacaatgctgacccgcaccaaaatgggctttctccatgcctgaaaggcggtgaaacctgtgataccttaacgaggacaatgcctccgtccttactgcaaaacacaggagcaac

SEQ ID NO: 435445 - DNA, 295 bp, Oryza sativa
tctcacgcgtccggttctagatcgcgagcggtcggaaatcaatctactactctgactcgtacgcagccgctgggagaagctagctagtttgctagcgctcaagcataccagcgaactatctagtgaagatagatatgtgccgcgtcgccatactgcaggatcagcatacatagtcccggcagccagatgagccatttcaccgtcattgaggtcttgccgccggcggccgagtacgccagcgacgacccgaccgaccaagctgggatggatgacgaggagcatgagcaaaattcgc

SEQ ID NO: 435446 - DNA, 342 bp, Oryza sativa
agaaaattaacccgtaacaaagcacgcgtattttttcgggtgaaaaaaaaataaaaaactgaaaaatttagtctcagggaaatttatttgagcatggggtcccaaaactcatggggggaaaaaccaaaaaaaagaagcttagccaagggaaattttcaacaaaattgccccatttttggggggggtttgcttaggggcacttcagggaacgtggccatggggatgcgattatgagaagcagaaggtctttccacacgtaaatcgttccggggaagcaccaaggcaggcaggccatcttgaatcccggggggttcccgccgccatgcccgaaccggtccgggg

SEQ ID NO: 435447 - DNA, 117 bp, Oryza sativa
acgccggtccgcctcctcggtccgttcaggggacctagatcgaggggggacctcccactacttacacggcgacatggcgacgccaccggcgaggccctcgtcggtaaccgtcatgaa

SEQ ID NO: 435448 - DNA, 259 bp, Oryza sativa
gctcgttgcgggccgtgatcgacgcggcggaggcgagcgggctgagcctgacggcggcgccgtactgggaaggggtgagcgtcggggggctcgtcagcacgggctcccacgggagctcctggtggggccgcggcggcgccgtgcacgaccacgtggtggcgctcaggctcgtcgtgcccgccggcgcggcggacggttgggccaaggtggtggcgctccggagaggcgactcgctctttaacgccgatttagtcttcct

SEQ ID NO: 435449 - DNA, 426 bp, Oryza sativa
ggcaacatggatctctctagttctctataccctttcaattaagttaaaattcagtatgtttcaggatacaaaaaatgagagagatttttcttgcaacacacaaaagttacaatcacctcgatggttgctaaggtgagcaatagatgaactgaagaactccattgggagctaggtaggcatacctggttcagagtcacagcttgctgctagcttgatccttctttggcctggtggtcgacatccactgccggccgatcgccaccagctcgccggaatccttcttccggatctccaccgtcaccgccgtcatcttccctttctgctccaccaccctgccgtccagctcaacttcctcatggagcttggccggcgagaagtaggagatgtcgtagtggacggagaccttgatgatgccctccaccgaca

SEQ ID NO: 435450 - DNA, 366 bp, Oryza sativa
tctcctctccgccgcacgccggcgaaaaccagtcgcgcgcccgcatgggcggcagcgctgcggcggcgccgccggccccggcgtggatggccgccggtgcccggaggtggctggaggaagccggcgtcgccttcgacggctccgaccgccgcgccttcaacgcgctgcccctcgccggcgcgcgcgtctccctcgccgaggccggccgcgccgtctgctcgctccgcgtgaccgccgagctcacggacgcggaggggaactggcacccgggggcgatcgcggcggcggcggacgacgtgtgcgcagcggcgatcatggtgtgggagggcatcattaaggtctacgttcactacgacatctactact

SEQ ID NO: 435451 - DNA, 289 bp, Oryza sativa
acaagggaaaagaaatacttttatccctagggaccaaaaaacccataccattcgttcatttgaccaaccccactaggttaaaaaacaaaacactgccttacaaagggggggcccctgctgtccgtaccaaaagggggcccaaaaaacccggccccgggcggaaatttcctcccccccccaaaagggaaacggggggggggcccccccctcccccgggcaaaccccccccgcgggataaatccttttccttttccttaacaggccccccatggccgtttccccttttaac

SEQ ID NO: 435452 - DNA, 415 bp, Oryza sativa
agggggaactataatatctacaggaaaaaatttatttatttccattggaatggaaaagtcaatattttacatatagccttccaaaagtttaagggctttaagtaggaaccgcaaaaaaaaaaaaaataacaaagatgacaaaacaatggaatgggtggcattacacactttaaatgagcccgaatggacaattttcccaaggggcaggcggcaccaaaatcactatttcccggacattagggtgaccaaaccttggttttcaaacagggtgttcatgtcccaaaacttacttggggatgaaagggtaattagggcgaccaccacggattttattgaaggcctcaacttggggtctttttgggggcacacctttgcaagttgtgtcagcttgagaatggaatcaaaaggaaaatct

SEQ ID NO: 435453 - DNA, 316 bp, Oryza sativa
tgtcggcgccttccccttccagatgtcccgcggccagatctacacctccgtcgccgccaactacaacaacctcaccaccgtcgagtggctgcaggccaccaacagctacccggccaacaacatcccggacaccgccgtcatcaacgccaccgtcaactgctcctgcggcgacgccagcatctcgccggactacgggctgttcctcacctacccgctccgcgccgaggatacgctcgcctccgtcgcggcgacctacgggctcttgccgcagctggacgtggtcaggaggtacaacccggggatggagagcgcctcg

SEQ ID NO: 435454 - DNA, 176 bp, Oryza sativa
ttttttttttttttttttttttttatttatttttttatttttttttatttttttttttttttttatttttttttatttattaataaattaatttttattttaataaaaaaaaaaaaaaaaaaaaaaaaaaagaggggaaaaaaaaaaaaaagaaaaaaaaaaaaaaaacaaggacg

SEQ ID NO: 435455 - DNA, 295 bp, Oryza sativa
  unsure (1)..(295): unsure at all n locations
aaanaaaaaaaaaaaaaaacaattttttttttttttaacaaaaatgggttaaaaaataaaatcaactgcttaaaaataaaaataaacattttttttttaaaaaaggggaaattaaaaaaacggggggaaaaaaaagcaaaacccccatttataaaatttggaaggtttcggaatttttttccaggcccaaaaaaaaattttaaaaccatttatggttttttttttgcaaaaattaaaaaatggtttaattttaatgaaaaaaaaaaacccgtaggaaaaaaaaccatttcttttt

SEQ ID NO: 435456 - DNA, 335 bp, Oryza sativa
acagattagctggcttgtttcagtccttcttgtccatatgaatttacatcaagagcttttttggctacaaacccgataacacgtggcgatgaaaaacattacatcattgactgccctttgctcacttttgagaagagtgcacagctatgaaaaggtacgatctgtgaacactccgcggggttagaacaaagagagacctgatgcttgcagttttcaggagcctgcaaagttgctctaagtttatatttggatccccgccaatgtcagacttcttcaggaggggatcaacaaaacctttcagtcctgtatgcattaggagggaatcagatgtgata

SEQ ID NO: 435457 - DNA, 351 bp, Oryza sativa
ctgtcacaacacattttgtctgtcctagacgaggacgagatgcctggtgataaattaatcatcgcaattgccggacggcaagatgcttagaagcatttgactgatcctgcgcccaacgtgacgccatcacacatagcggagacgctgggaaccatgctagagacagctctatttgagagcactactgctgttatcccaacactgtacccatagctcgactacttggaatttcaggatgggtatcgacgcctaccatagctgagcgaactctaacgccagctacatctgggtcatgaaagaccgacgctgcagcgagctctttcgccttaagcgcattgacaagaacaaggt

SEQ ID NO: 435458 - DNA, 271 bp, Oryza sativa
ctgacgcgtgggcggacgcgtgggccaccctcgcgagccaagctaccattctcctcctcggcggcggcggcaccaaggcttgccagcatagagaccgcgacaaccacgaccactaccgaccgaggcgagggcatgatcatgccgcacgaatgcgaatctgaaacccacgcaatgcccaggaattgtaatgaagtacagtatatcacggatcaactatttgtatatatatgacttgatccatatatttacccgacacaagaaatcagcagct

SEQ ID NO: 435459 - DNA, 170 bp, Oryza sativa
tctctctcgtcgggaggtttttgttgggaagagggtggcaggaggaggaggaggtcttttttttcctttctccctttcctttcctgatcttctatatcttccttttttccctgcttccttctttatttttctccttttcttctttcttcttttcccttctttcacttttc

SEQ ID NO: 435460 - DNA, 177 bp, Oryza sativa
ctggtcttactctcttgtttttcgtgtagctctcttctctatctacctcccttctctacggcgcactaccgacggttggccggcggaggcggcagtggtgaccgcgccctcccctccgccagatccgggccatccggtgggaggggaggcggcaggtgggagctagaggagagccct

SEQ ID NO: 435461 - DNA, 174 bp, Oryza sativa
tttttggttatatcggaccacactaagattcatttattcatacatttgatcaaattatacgagacgagattcttctttgcgtataaccacacagatgggcaagcccccattttacacatactatatagttcaacacaataacttgcgatcacaacgatctggttgtatgatgac

SEQ ID NO: 435462 - DNA, 587 bp, Oryza sativa
ccccgcttgttcctttccgtcattcccgggctctctctgtttgccgcctcttctcccacgcttggctgctttcttgcccgccccccctgcggggcgctgcccccgacgctcgcccccgctgcggggggcggtggttcttctttcttcttgctctcttcttgttctctttcctcctctgtttcttcttttctttcccctccttctccctcccttccctttttttcttgccccttctttcccctcctccttcttccctcctttcttcttttctctcccccctcccttccctctccctccttcctcttctcctccctccttcctcttcctcttcttctttccccctttcttcttctttctgtcctccttctctccttttcccctcttcttttcctctctttctcccctcttcttctttctcttttcttttcttcctcccccctccctcctcttctttttcttttcctctttcttctctctcccctcttctctttttccccttttcttttccccccccttcttctttctttctttctctccccccttcttcctccttctctttttccttaatgccctccccttctcccttt

SEQ ID NO: 435463 - DNA, 288 bp, Oryza sativa
aaacaagaagatctactttgagaagtagatcaaaagagaaaaataaataaggttttggaagcatacatgcatataaggaaattaataaaggcctgaaatcacgaaagattacaagatgccacctaataaacctcgtgcaagagacaaaagtgtcttagatgccactaattatttcttgacgtccgattggataaaacagacaaaagcttgatagattggggatttgtgggaggcggtcgtcctgaagatgggtttttacacgaaatgcctgaccaaaaagaaattttg

SEQ ID NO: 435464 - DNA, 306 bp, Oryza sativa
tcgttattatggaaggacctgtgagcgcgtcgatgggtgtcatggtccctttgctgtccaagctcatcgagagcatggaacagccgaggttcaaggacctgaagaatgacttgaagtccctcagggccgagctcgcatccatggaagctgtaatgctcaagttcgccacgcaggacgacactgacctgctggtgaaggagtggatgaggcaggtgcgggaagtgggctacgacaccgatgactggatcgacagccaccctctggtggcctgcggagacgaagggttcacgcatcttcagcctgaac

SEQ ID NO: 435465 - DNA, 425 bp, Oryza sativa
  unsure (1)..(425): unsure at all n locations
ctctcgctctcttcgttctcggcggcttctccgcctccgcctccgccgccctcttctcctctcgcctcgccgccggcgccgccagccaccgcgcgggtcgggcgggccgtatcttcctttctgttccgatggcttctgcgaaggtggagaaccgcggcggcggtgggttcggttcgaagaggtcacgcaacgacgtgtctgtaagggagggggactggacttgtcctcagtgtggtaatgtcaacttcagttttagaaatgtttgcaaccgcggagcctgtggtgcaccccgtccatcaccgagtctaagcccaagagtgccacctcctcctgctgctggatatgatcggccacatcttggatatgatcggccacatcttgtttatggtagtgctggcaccccacctnctattcctcttggatct

SEQ ID NO: 435466 - DNA, 342 bp, Oryza sativa
tttttttttttttttttttttttttttttttttttttttttttttttttttttttttttttttttttttttttttttttttttttttttttttttttttttttttttaaaaaggaaaagggggagaaataataaaggggaaaaaaatgaaaaaaggcaaaaaaattttcaaaaaaaaaaaaacctgtgggaaaaagggaaaaagaaaaaaaaatatttaccaaaaaaaagggggataaaactttaggaaattaaaaaaaagaaaaaaccatagagtaaaaaaattggaaaaaaaaaaaaagataattaaaaaaagggggttaaaaaaaaaatgaccccacat

SEQ ID NO: 435467 - DNA, 401 bp, Oryza sativa
tcgctcctcttccttcccctcgccgccgccgccttctcgtcgacgcagccatgtcggcggcgcagcagcagaagcacgaggtggaccgggcgacggtggccggagccgtggccgcgctgttcaagtggatgcgcgcgcgcgcggcggaggctccaccgaacctcctcgccgacgagcgcgacgacctcctgctcctccagctctccctccgccgcatcccgccctcaccgacgaccaagccgcgcctccttccgctcccccaccccgtcatcgtccccggcgagtcggcctccatctgcgtcatcttcgacgaccgtcccaagttccgcttcccgggtcgcctccgacctgctcgacgcgttcaggtcccaccacctccccgttttcgaggttaattccgt

SEQ ID NO: 435468 - DNA, 416 bp, Oryza sativa
ggggggggggggccccataagggaaattttttggaaaaaaaaaaaaaaagggggaaattggtttttttttgggtaaaaaaaaaaaaaaaaaaaaaccccccctttggggggttggaaaaaaaaagccccaaagtgggaaaaaaaaacgggggggaagaaaaaaaaaaacccggtttgggggggatttttgggggggaaaaaaaacttttaaaaaacaagggggggaaagggtttttaaaaaaaataacttcaaagggggaaaaggcctattggtgggcccccttttataaaagccaaaccgggggaaaggggccccaaaggggggccaaccccttttttccaaaaaaataaaaaccggaagggaaaaaggcaccccccgtatatttggggggaagatttttaaaaagggggggggg

SEQ ID NO: 435469 - DNA, 187 bp, Oryza sativa
tcttcatcccaaccagagagcttgcggaagcgggggtttggtgcggtcgcgcgcgtgtgaggggggagagaaggccaggaggaggcgactccgtctcctgagggaggtataaatccgatacctcctcctgccctgctcgatcgcttgctcgcctgcactgttctcactttgtcctgttcctttcttt

SEQ ID NO: 435470 - DNA, 235 bp, Oryza sativa
aatacatgaaattgacagttgattatataactaaaaaaagcggactagtaaacaaaaagcgcgcggaaatgctaactaggagtatcgaacaggaaataagaaatctgtaaaagagcctgaactaaaagaaagacccggtcaacgggccgatggtcccgagacagaacaaggacgcggcgaagtccgacgagaaggaggcggcgctggagctgtacagctgcaccaccgagtccac

SEQ ID NO: 435471 - DNA, 70 bp, Oryza sativa
tttttggttttttattttatttgttttttattttattctttatttatcctctttttatatttttcctaac

SEQ ID NO: 435472 - DNA, 340 bp, Oryza sativa
tttatctcgtgggcttctccccctgctttctgctcctgacgcgagagcaagaagaagaaaaggccatggcggagaagagggcttcttcttgaggcagctgcttcgctttcctcaccccccaaatcgcgccagaattcgatcttttccggcggcggctggtggagcgcaagatcgcgctgcgcgtttgatgggcaaggcgtgttcttggcggagtttcttgggagccgcctctcgtcctggatccgtggcggccggcgacatcctgggccggggaagggtttctcggatccggttcttgctaatccgatcggaatccgagcggatggggtcagcgatggat

SEQ ID NO: 435473 - DNA, 200 bp, Oryza sativa
ttctttctcctctttgtgttcacgcaagaagaagaacaagtctccgtgttcgtgttcgttgtatgttttccccggaaagaagctttgattgcagccgagtcaaaatctttcgagagagagtgctttgcgtgtgatcgagagaggtgttgttggaagcttggttggttgggggagttcttggtttggtttgtggggggtgg

SEQ ID NO: 435474 - DNA, 67 bp, Oryza sativa
ctaaccctagccgccgtttcagccgcagccgcagccgcgcgtcgtctcctccgcccgcgagctcctc

SEQ ID NO: 435475 - DNA, 395 bp, Oryza sativa
ggtttatattaagctagtcgtaatttttatacttttggcataatggttgtcggaaaaatttaagtatttaaatttcccgaagtctgttgatctaacttggtaggttggatactgtttcattagtatctttttatgctaagtttgaggagaaattttatccgtaacagatgatatctggttccgtcagaatagtttagcacagcgactgctggtaatggtcggcacccggataaactggtgccgatttgaattatcctaatattaatttttaaagtatggctttaaagcagcctaatttagttttttcgttatagataaagtgttaaaatttaacttgggatatttttttctgccgttttgggcttattatggtccaattatttaattgttgaatt

SEQ ID NO: 435476 - DNA, 477 bp, Oryza sativa
gcagtaagcttccttacggaaaatatgcagtaacttacagcaatttccgttgacaagagattcactcaccatgaatggatgagtcttaagtaaaatctaatataggatggtgctggccacatcttccaacccaccatagttcaactaaaactaaaataaactaaatctcacttttaagggtacccgcagatcagcctgcacccatctgtactcggtgctcatgaattgctaacaccgactacagccttcacaaagaattttgcactatattttctatgaatggttgctatactggattcaacaaccaaatgaaaaaagcttacatgttgcagcagccaaaattgatctacagaaaaatggaaacaggggctccctcggttaggcaacaaaacttgcagaggtggtgaggcgagcaaccaacaggtcaatcggtaaagggaggaagaacacaaaaaagagttacacgttttgcgatca

SEQ ID NO: 435477 - DNA, 93 bp, Oryza sativa
tttggttttttattatttttggtttttttttttttttttttttttttttttttttattttattattttataaacaaaaaatttataatttaat

SEQ ID NO: 435478 - DNA, 361 bp, Oryza sativa
agggaatagtaatacaaacaatttatattttgaacaataaacacagtacaaattctagaaaaagcagtctagccttatcatacaatggaaaagagcatgagggctaaaaagacacccattataacatactacaagcaaactgagtagccttcagcagactttattaaataggcctagtgcagtacgacaaatactcatgaaagcaaaacttccaacacagcatttgctgaaaattttttaaccatgtttgggccattgagctggtggtcagaaacaagactatatggttgaccgaccttccactggttatgccaggagtagatcggtagctgcaaggtgaagggggcccatagagactctt

SEQ ID NO: 435479 - DNA, 302 bp, Oryza sativa
agcagggcaatcaaaatgagctaaaaggtcatctagcacttgtttgtttaaatccagccgcgatgaggcttggcggaactctattttttccaagtactcgacgcaccactgaaatatacaacattacccaaccccaatccacacttctcgaaaacatcgctgtcacatttgaccggcacatgaaccatgaaaatatacggtagtagctacatgctctgtaaccgagccatttaccacaaaagggtagtagcaatcatagcggccattgtcatgaaggtaccaaccatggcagcagacgaagc

SEQ ID NO: 435480 - DNA, 368 bp, Oryza sativa
gataaaatcaagcctttacaaccacttattacattgtctttgatacaaagtcaaaagtagcatcgagaagaaaacaatttaattaagcacgccatgggccatggaagaaacaaaactagatgtatatggctgcctgtcgcagcctcacaaacttagcttggatacgcatggcgtgccacatacatgtctttagtgtcacagagtgatttttttggaggcgcccaaggcgagtgccgtctgcctgaactcgagcatcttgtcggcgtcatccggcaagacgcccctggccgcatcggtggcgcggaagaaatccttccacgcggccagcgccggcgttctcgccgggtcgatcatcctgggcccgatca

SEQ ID NO: 435481 - DNA, 60 bp, Oryza sativa
cttactcttgggggcggaggagccgggccgggcgcggcggaagtcgtcggtgctgcaggc

SEQ ID NO: 435482 - DNA, 528 bp, Oryza sativa
aaaaattgtacatgattatcattgggtttattttttgtttctttctagaagtccagccaaccgctataaccataccgcataacgatctatccatcgttccccctcttaatcctcattgggattctatttgggttttttttcaaatttgtagatgtcccatcaaccgtcaccactcaatttctttacaggcatgaccatgatccaactgcttatattttttaatccgagaatttgtaagtcttgagagcaaacgtagagacttctttttacattactttattaaaataatagatagaatattttatttatataaaactacatcgatcaatatacaccattaaaatttagatcctttaaatacttcactttttattattaatatggtgatttccgccgcttctcagcattgccccattctcggagtatgagctataacatatggaccctaaatacagagaaagctattaggggatcttgttactaagaaatttattttaaaaaacatattgcttctaaagattatgcgat

SEQ ID NO: 435483 - DNA, 432 bp, Oryza sativa
cttcactgttctatatgcatatgtgtgggtaaaggttcatgacagtctggggtcagattcttaaactacatcatggaaatggaaacctatgtatcgattagactgactgtgtttttctattaatggggataaactgggcagctcatgttctcaatgtaagagtatatgccctcataaaattttggggaagatatgcttcagcttatttatcagagctttcttgtcggtaattgacctggtaagtttattctacttgcgtcaagtggttcaatggttgtagtgccctttcgtataattttcctccgtttaattgcctgtaaaatttccggctttggtcttacttaacctggacgtgcacaaattttcggtttttttcgggtccgggattaccttggaactttgcgcaactttttttttcaggcttgcaatttt

SEQ ID NO: 435484 - DNA, 93 bp, Oryza sativa
aaaccaaaacaacatgagtttactaaaatgtgagctccataacataggttgagcaaatgatagacacgagagaataaatcgacctgatggaca

SEQ ID NO: 435485 - DNA, 114 bp, Oryza sativa
ctctaattaattaatatttacttgggggaaaaaaaaaaaaaatttaaaaaaaaaaaaaaaaaaaaagaggggtccacaaaaaatgaaaaatacatgacaaaccccttctaaaaa

SEQ ID NO: 435486 - DNA, 432 bp, Oryza sativa
aaagctgctaattcctttaatttctcctagctaataaatccttcacaactttaacttgatcaaatcaacaatggcgacatgatgatcagaagaaccagctgccactggccgcctccacctcctcctgctgcctcgctccggcggcgagcctgatccggttgccgccgccgcgagcgaaggagaaagacgacgacgccgaccgccgcagcccaccgcccggctcgccgtccgacctgaagctgccggaggagctcgagccgccggagccggacgaatacccgccgccgccgcgtttcttgctgctgcctttcctccggagcaacgggagcgggaagcacccgtacgccggcgccgccgcgggctcgtcgtgatcagcttcgtgggcggcgccgaacaagtccggcgccgtggttggcttggggagcgaggtct

SEQ ID NO: 435487 - DNA, 303 bp, Oryza sativa
ttgaattgaaagatcatgatgagaaatcaagaagagatcgagaggatcgaagctgtaatctccgtagagatggcggcggcggcaatggatgactcgttcaggagggcgggggcgataccgttcaagtgggagatctgcccggggacgcccaagcacgccaggagcgcgagcgcctccgcggcgtttgtgtcttgtttttttcaccttttttctcctcttccttttcttttttcttttttctttacttcatttttttttttctatcttgtacttcttctctctcatcttttttcatctttcttt

SEQ ID NO: 435488 - DNA, 90 bp, Oryza sativa
ttgggttttttgacaatcaggggttcttattttttttctaatctaatattatttaattgcaaaaagcctcaatttgagcctacactttcc

SEQ ID NO: 435489 - DNA, 74 bp, Oryza sativa
caatgacaagagtttctttgtgcgcaacgccctcgacctaatttcaaacgtgaaatatgtaggacggcacccta

SEQ ID NO: 435490 - DNA, 499 bp, Oryza sativa
tgtacgcgtgggattttttatgtaggaaagcaccgcccttttacagttgatgattttcccaggcttagtagtgaccattctgtgcagactgatgcactctttgatattccacatcttcgccttggaggcccgtcaccgctcagtcttttccgtgcattcaatgatcctctcactgataaacgcaggcattggtttggttcttattaccgactcgatgatgaatctgaaatcagtgtcgacagcgctggggccgttgattgcttaaatgggtgtaggtgcctttcgaagaatttgctccagttcattgacctgaaaatctccggctatcgccatactcagcctggacgtgccaaaatcttcggcttttttgcggtgcgggatgacttggaacctctgcgcaactatgtctttaggcatgcaatttacaattatgaagctgtatctgtgaagccaaagacgggtatggcgtgtttaccattgactagccctgcttgaggta

SEQ ID NO: 435491 - DNA, 85 bp, Oryza sativa
agaatgaatgagcgcgccgcgccatgtgcggcggtgcgatcctcgccgatttcaccccggcgagggtgccccggcggttgaccgc

SEQ ID NO: 435492 - DNA, 315 bp, Oryza sativa
ctgtgatcatcagatcagagcaagaggaggtagctcgatgcgcggggcggcggcggcggggaggagatgatgaagccgcagcacggcggcatggcggggcatggaggaggaaggacgaggagccccttcctgacgtcgtacgcgctcacgctcgccttcatcaccttcgtctccgtcctctacttcaaggacttctcctccacgctccaccaacccttcctcacccgccctcctccccaccgtcgtcagatcgcccgcccccgcgccccgagccaccaccatggccggcggcagcagctccggtggcggcgatgt

SEQ ID NO: 435493 - DNA, 205 bp, Oryza sativa
gttatagcttctaatcactagccggcgagcgacaccgacgggcgcgcgaggcggcggctcacgagcagcgccaccgtgggcgcgagcggtcggccggccggacgccaaggagagtggccacgtgtttttatcaagatggagaccatgagggtctttcgtggaaagaagtggaggattatcatgctgtcctttgaccttaattttc

SEQ ID NO: 435494 - DNA, 288 bp, Oryza sativa
tggggttttttaattttgggggttaatttttttcaaaacccccttattcgaacatagtcccctgtattatccaaagaatccacaccttgcagcgcatgggaaataaaaacttttacacattgacaaaagcaatggtatattttacccggtttataactttggaccataggcacaaagaatgttttggacggggtctattgagccatggtggatccaatacaaattccggatgctttgggaccattttcgattgttttactaaagaccgaggtgttttatttgggtccc

SEQ ID NO: 435495 - DNA, 399 bp, Oryza sativa
tttgttttttttatctggggggattatgttactcgtgcgatgccacattcagataaatttggagtacaaatttactaaaaataacaaatccccaaattgtacttgcactaacaccaagatattacaaaaagtaaaaaaatcaagcctcacactccaaagaagactcctccctcgcatcacttgtcggcgtggtcgcttcttccctccccccagccaaatttcgtcaaattcaaacagaaaccatttttttacagcatccgacggttgattttggtctgaatttctactacactccaacgtgaaaaaaaaaaaaaaaaaaaaaaaaaaaaagggaaaaaaaaaaccacatttggaaccaattgtgtaaacttataacccagggaattccgggccttaacc

SEQ ID NO: 435496 - DNA, 239 bp, Oryza sativa
gttttagatcgcgagcgacgccctgacgcttgggaaattattgatagcatacgtcggacggcaagacgctaagaagcccttggaagagcttgtcttcaatttgacgctctcaaacatcgtttagtacgctggaaccatgcccgatactgatgtaatctagatcactactgctgtgatcccaacactgtacccagagctcgattatttctaattcattcatgtttatcgaaacctaccat

SEQ ID NO: 435497 - DNA, 505 bp, Oryza sativa
tgcctcagccaaactgcccacctgacaatgtctttggtctgtatcgtagggaaaggcaggagaacgcaagccataagtctttgccatgtgctttctaaggtacaatggtgttagttggtgtgtggctgaatcttcttaataatcatctgatttttttttattttttttttatttttttgttttgttttaattgatcatttattttatgttctttcttttattttatatttatttttcttgattaattgtttttttttttttttcttttttttttatattttttttttattttttattttaattttatttttttattattatttttttttttatcatattattaatatttattaattatatttatttatattgatttattttttttatttagtttatcttttttactagttctttttggccaccatttttttaataatttgatattaatatctcatttatttttttaataaaatattctatttttatgtaatattatttatataaa

SEQ ID NO: 435498 - DNA, 455 bp, Oryza sativa
gctttttatagaggtagctgagcaattggcatggccatgcgttagagagagagagagagagagagtgcatgagcatgatgagctctccttctccctctccttaatttagacataaacttaattagctatgccgctcctctctctaatctcccctccaaagattatggttggtaggagatggatgagttcctgatcatcttcttgctctaaaatggaaggtttccaatggattccagcttctgaatcttgcagctagctaggtaggtaggtagctggtagcttagctaggcagtcaggcagatggtgtgttgttgcttctgctgtgatcgctcgcatacgtagataaggttagaggttgatcgctcggtagatggtactgatggccgggatgcttcccggagtggagtgcgcgcggcggcgacgtctccggcagggcggcggagaggcgccgtgcg

SEQ ID NO: 435499 - DNA, 60 bp, Oryza sativa
cgcaggacccgcccggaatttcctgggaggccaccaagtattctatgaacgccagaaggg

SEQ ID NO: 435500 - DNA, 286 bp, Oryza sativa
  unsure (1)..(286): unsure at all n locations
atcaaaaaaaaaaaaggatgataaaaaaaatttacttatataaaaaagaaaaagaaaaaaaataaaaaggctatggggggcgtgagaacaaaaaaagaaaagaaaaataccttataaaaaacctgccggtagtaatttttaaaaaaaagagagagaataaaagaaaaattttaataaaaaaagaaaaaaacaacaattttttgtgaaaaaaagttgggggaaaaaaaaaaatttacaggaaaaaaacnggggggaaaaccaaaaaaaagaaaaaaacccccctttt

SEQ ID NO: 435501 - DNA, 142 bp, Oryza sativa
ttgtttttttttcttttttttcttttcctttctcctacactctttttgttgaacaaaaataccccttctcgacttattcccaataggtacaccctccaccccctctctgcccacctaatgtaccttgcccccatcccaatct

SEQ ID NO: 435502 - DNA, 212 bp, Oryza sativa
gtcgtcgtcgtcgtcgattgcgaactcgatggatgggggccatgtctgatttcgttgtgggtggtgcaggggagctgaagaagatggtggcggcgcgaacggggctgcatccggacgaccagaaggtgatgtacatggacagggagagtgactccaacgcgttgctgtacatggccggcgacaaggacagttacacgctggtggtattctag

SEQ ID NO: 435503 - DNA, 80 bp, Oryza sativa
ttttgttttttttttagaacaccaactcacttcgtcacttttccttagatagaaagcataccacatgattcagccctgca

SEQ ID NO: 435504 - DNA, 389 bp, Oryza sativa
cagaaaatccactgccactatatgatgttacagatatcggctacctgtgtcaatatttacaggatgttacacatctctcatcaaatcgatttcacactacaaaaaacccataaaacgaaacaatcaaaactctttaccattcccatcccaatcttgaatgcatttgctctccaaattatagcaaagaatcaagaacatagccaacccttcatgggatgacgagcatcccacgtttcaacaagcagtcagatcgtttcctttcatggtctcacgaatctatctagctccactatcatcgaacgatgactcggatgcagaatcatctgatgttgagatggagcttgtttcgcatgaactgccgttttcggggtccaatgaaaatgatgttg

SEQ ID NO: 435505 - DNA, 159 bp, Oryza sativa
  unsure (1)..(159): unsure at all n locations
agatgtgtgtcgctgcggtacgaaaaaggatgggtgtgagaggagagagaaagctttgtggatgtctcgcacgaaataccccnacagctctaggccaatcctgacttgatcatcaccaacttcagagacggaatactggcttcttgcttgcttgcacac

SEQ ID NO: 435506 - DNA, 356 bp, Oryza sativa
acaaaatccaaccaaacatagaacgtagaggaagagaaatcgaacgagaagaataataaaaaccgcacaaattccgtctttagtccgtgcattgcgcactctcctccctctgattcataccgctctgaacattcccacaaaccatatcccaatatcattcacaaattctaatcccaataaacttaatatcccaattcccaaatccaattcgaatatcagcgcaaaaaaaaaatattccaggaaagggaagataattccaaccatttacattatgtaggagggtagggggtgagccgggaaggtctttctgcttgatccttggtcccaacttttcttgctttgccacccttgtccgt

SEQ ID NO: 435507 - DNA, 551 bp, Oryza sativa
tggcttttgagcgctacacctagtgcgagcgaaggcgacgcggctgggggtggcggctgtctggcgcagctcggcggctgcctggcgcgacggtgcgcgcgggaggaggtggagaggtcatctttttttttttttaactattttttatattttcttatttttcttaatttttgttttgttttgttgtttttctttttttcatttattaatatttttttttttttatttttattttttccaatattgtacttttctttattcttctttttatttttttttttatctttttttgatttattttttttatttttttattctttttatttttatatttttcttactttttcttttttttatatttttattatttttattttttttaatcttctttttttccttttttttttttcttatttttatttttttttttttttattatttttactctatatatttttattttatttttattttctttatttattttttttctttttatctttttaatttttatatataactttcttttttttattattattttaattttt

SEQ ID NO: 435508 - DNA, 407 bp, Oryza sativa
agatgcgtgtcgctgttgtttgaaaaaggttgggtgcgagaggagagagacagtggcgtggaggggagagagcgagcgccaccgccgccgccgccgcctcatcctcctctctacccgcgccgccgcgcctagctatctctaggaagggaggagaaggggccgggtgcgcgcgcgctcgctcgctcgctcgtctcgccggatctacagccgccgccgccgcctccggtcgttctctgcttgggatctatctcgtgagccaaagccatggccgtcgtcgcgccgcctcatgtcccggtcgacgcgccgtctcccgctgctgctgctgctcctactgccccggctcctgccgacgccgccaccgctgcccccgtctcggatcaaaccacggatctgctgccaaagttgcc

SEQ ID NO: 435509 - DNA, 397 bp, Oryza sativa
gtaccgaaaaagcgtttgctcaaaaaaatcacccacgggcttttaatgggtataaagcgacgccgtttccttaacttaatatatatcccgttcctttcatacctttcaaacattatttgccattccaaaactacattttctatcatccaggttggggtgcaaccaaaaggggctggagttgcttgacaactgggtatgaacaaaaggcaatatattcattataaacaacaggtttctgccatctgaaccatgccccaccttgatgagagaatcgtgccaatttacacattggtgcttgacgcttacattataccatttcggatttgctcggtgatatccttgacatggcctgggccttgagggctgaacacccgttttttttgggagccatccccaa

SEQ ID NO: 435510 - DNA, 457 bp, Oryza sativa
gattctaaatctagtcaaacacatttttgtgttagctgaagtattatcctctctttttttttctgttgtgcacctatttgcatgttgaaagagttggaatctttgtctggtatacattttaagcatgttatttcgatacccacaattcatactattcttccaagattggtttacatgcttatgtggaattctagtcccagaatactgtctgatggaacttggctgtatcaaacggaaatctggcattgggctgtctgcatcggttatctatcgacggaaacttacgtgcttaccaaattttaaactctgtgattgcttcttcctcaggcgctggatattccattcatgataaccaatgctctctctgctcggtctaagacccattcctaatgtgagtttttgtcctcaaacatttttttatcttagtacttgttagtgataagcagttcattttttg

SEQ ID NO: 435511 - DNA, 415 bp, Oryza sativa
ggaatcaaaaaaccggaagaaaagcaaaactttgctctgggaataaaaaagtcaagggcccaaaaccaaaaccagggggggccccctaaaaaaccccaaacggatctttaaaaggggaaaagtctaaaactggccccaagtccccaaaaacaacaacgggacaaagccccacaaaaacccaagggggcctgcaaagcaaagcagggtttttccggccaaccggccgggaacgggaacggtcaaaaaacgggccaagggggggggttcccgcccataaaaaaacccccgggggggggcggaacaaaatccccggggggggggcccccctttaccccgggggggggggaatcaaaatatcccgggaagtggtaattgacaagcccccccccttgcctttttaccccccccccccccc

SEQ ID NO: 435512 - DNA, 383 bp, Oryza sativa
tttttacaacgtgaggaaggcactccagaggctccaaggggtggattacgtggacgtggacagggtgagggggaaggtgacggtgacgtgttctccttgtcacatcatggttcttcgtgctttttggtgcttctgttgtatcttctttctttgttctttttttttcatctccttttttttttctattttatttttctttcctttttttttctctattacttatctttctaactacattttatttttctttttgactcttttttcttcatcttattatattttttaccctttctttatttcttcttatttcatttcttttttcgttctactctcttattttttttatttttattttaacttttcttctcatatctttcttcttt

SEQ ID NO: 435513 - DNA, 194 bp, Oryza sativa
ttcttctcttctctctccttttgttgcttccatttctcgttcttgcacggggaagaggagagaaagatgtgtgtcgctgtggtttgaaaaaggttgggtgtgagaggagagagaaagtggagtggaggggagagagagagagagagagagtgagagagagagatgggttcttgtgcttcggttcactaggtcct

SEQ ID NO: 435514 - DNA, 288 bp, Oryza sativa
gggcctaaaaacccccttaaaaaaaagggggccttttttatttacaggttccaaaaagttttacagatactctaacaaaaacaggaaaaactttttttcccacggggtgggaaaaaagcaatttgggcaaccaccccgaaaatttaaaaaccggggccccttgtttaacaattttgagttaaaaaaggcctcgcccgccaaagattcaaaaaaaagcgcttcccatataaattaggggccgtgcaaaagcaagccaagaaagaacccgtttttttttgttaaaggggg

SEQ ID NO: 435515 - DNA, 65 bp, Oryza sativa
ttggttttttttaaagaaagagaaagcttgacaccttacacagctatgaggtaccagtcaagaga

SEQ ID NO: 435516 - DNA, 76 bp, Oryza sativa
tcttaactccggacccacggccggccaagagtggggttattttaacatcttctacggcgactcacctggcggagga

SEQ ID NO: 435517 - DNA, 450 bp, Oryza sativa
caaacagaaaccattttttttacagcatccgacggttgattttggtctgaatttctactacactccaacgtgaagaagaagaaaaaaaagaagtaaagcaacttttctttttgccccccgaaaattttgcaatgcggcccctaggatttgggcgacgtcactagaaggtccacttccagatcttgactcggatcctgacctggcacacgcgcgcgacggtggtcgccggcggcggcgagggggtggtgtcgtcgacggacgcggcgggagacggcgcgtcggcgacggagagcttgacgccgcccttcttcttcttcgccggcggcggcggcggcgccggggcggccaccttgatgccctcgcagtggacgagcacgccgattttcttggtcttgaggccggcgaccttgacgccggccttgggctccaggtcgagggtgatggtgaact

SEQ ID NO: 435518 - DNA, 390 bp, Oryza sativa
gctgctgctgcggtggtggcggctggcaacggcgccggtggcccgcccaagatgtaccagcgacccatctaccgcccccaggcgcccgccgccaagcgccgccgcggcgggaggtcgtcctgccgcttcagctgctgctgctgcttcttctacgcggtactcgtcgtgctcctcctcgccttcgtcgccgccgtcgccggcggcgcgttctacctcctttaccggccgcaccgtccggtgttcaccctctgcgttgcccgcgtcgacaagctcagcctttgctactgcgacaccgcgccctctatcaccgacttcatggacgttacgcttaccgtcatgatccccaacaagatggcttgtttacctttacgactacttttgtcgttaccg

SEQ ID NO: 435519 - DNA, 334 bp, Oryza sativa
ccattaagatttatccatatttgctcaaaatgatcaccacgggccccaaatgtcctcaccgtacagtggcgttaacatggaagcagcacaccaaatcaaaagagagacccacccccagaagaggaccgggaatccaacgccccccagaactaatccaagaacacagggctaatcaagcccagcccagggcgattcattgttgacacagccgatagaagggaagaaaaggtgtaaaaccgcccaaagcccatgggtaattagggagccgactactaaagaggactgggtctggacaaaggccagggggaaccggccacccgtaggacaggcggcc

SEQ ID NO: 435520 - DNA, 167 bp, Oryza sativa
atcgccaagccattcgtaggagaagcgctgaaccgcctacgaaggggtaaacactacaacaaatattgcaatgccagcggctgacggaactactgattagtacacgaagctggtgggcaatgaattgtgaagtcttcgatctgaaggacctcgatgactagcactac

SEQ ID NO: 435521 - DNA, 369 bp, Oryza sativa
agcgggggatcaaacacaaacacaaacacatgcagtattcatacataggagtacagtatacagtagcatatatgtatagtactagtagaaaggcagaaaaagcgcgagggacgacgccatcacgcacactctgctagctacacacaaacacacacaaggagcccgaactaacctcgggcgcggccccgccatctcatttttcaacctttgggggtcaaaaagccatcgactttgcatggacttcattcattcattcctccttccttcctttgctttggatcacaccacaatggaggggagaaaaaagatctttatagcttagcctccctgttttacttattgggccatcaacgccatgagagccttttt

SEQ ID NO: 435522 - DNA, 229 bp, Oryza sativa
tcgttgacgcgtgggtcggtctcgccgtgcgggtgtctcttgtgagcaacagcacgcgccgcggtcggcctccccttaaatttcttcggctcatggcccgggcgggtgtgtgatgtttaatattcatattatcgaatttccgttaagctttacaccagtacctgtagaaagcacaagatttttgttgtttatgttttttattactattagtctatatcatattttaaca

SEQ ID NO: 435523 - DNA, 373 bp, Oryza sativa
gtgcaaaacacatatcatcctttaacatgacacatgcatgctgcaagtgctccttgccaggggtgggatgcacggccctagggtggacataacatagatacactggaatgaccaatcaatgaccggttgtatagcttgatgattacaaggaacataaatgctccaaatactaatcagataaccacagacctaaagggcggatattgtacgatatacaaatagcaaacctagggtaggtgacggcccagctagacagcacacggcccaggggcaatctgttgactgcgttataatgaacagaggcaataaacaacaatcgacaggtcaaaaggcccggcagtccgcgcaggcctgatggcaaaggtgctttatt

SEQ ID NO: 435524 - DNA, 320 bp, Oryza sativa
attaaaataataaataaattatatttaaaaaaataaatttttttatttaaaaataaaaataaaacaaaatttcaaccacaaataaataaaaaaaaaaaaataaagaagtgaaaaaaaaaataagagaaaaaaaaaaaaattaatttctgggcataggttttaaaattttaaacttaaaaaaatgttaacccaaaaaaaaaatcccttaaaaaaaaaaaaaggaccttggaaaagaaaaaatctttataaaaaaaaaaattatctacgtgcaaattaaaaaggttcataaaaaaaaaaaaaaaataatgggatggaatttt

SEQ ID NO: 435525 - DNA, 463 bp, Oryza sativa
  unsure (1)..(463): unsure at all n locations
gaaagtaaaaacaaatacataaaccgtacgtacacgtacacgtaaaacacaatggcacgtacctcaacacatgcgttgagaccgtgcgtacccaaaatataatgtacactaattaaccagcaacagagtcatcacatgcataanaattcaaactcaagtatgaaattaaatcaacacactcacacaaacattgagaaatttcacatgaaaaatctctcagtttacctactggcgccggcaaccgccgccgccgccgccgtggacgtacacggcgagttcgccgcgctgcctacgccgatggaggcggcgcctggaacggcatgggcacgttcacggtcgggatggacggcatcggcggcagcgtcaccgccggcacggcggggatgccggcgggcatcggcggcagcgtcaccgccggcacggcgggcatcggtggcaacgacaccttcggtaccgtcgggat

SEQ ID NO: 435526 - DNA, 383 bp, Oryza sativa
tataaaaaaacacacacacacacacacaagctagtcttgctgcaatggcttctagtgtgagcttcatggccacggccatggcgatggcgtgcgttctgctcgccgccagcagcagcagaacgtgctacgccgcccgcatgttggccgacacgccggcgacggcggcggcggcggccgcgcctcccgccgccctccctgtcctccccgccgtgccggcgctgcccaccactctgccgcccatgccggccatcccggccgtgccacaggcggcgctgccgccgatgcccgccgtgcccaccgtgcccgcggtcgtccctaacgcggcggcgctgccgccgatgcccgctgtcccggccattccggcggtgccgaaggtgtcgttg

SEQ ID NO: 435527 - DNA, 329 bp, Oryza sativa
ggaacggagaatcacacaccagagcatgttagtggagaattcttacaaaatggggacattaagaataaaaaaactaagaaaaaaaacatatcctccggattagtcgttatctcacatatgaggctccccaactggtcatacttgcatttgggttcatgagctcgtccatttacaaattgcaaaggctaaaggcatatagttgccaaatgagaaataattgattcattaggggggggttgaagtattactatttattttactggtttttacatatataaaaagggtggggtttattttctttaggtccaaaaatttttggccaaattttt

SEQ ID NO: 435528 - DNA, 538 bp, Oryza sativa
ctcctctctcatgcgcgtcgcctcctcgccctcctctcgccgccgctgcaccgcccccgactctctccccagtcaggtcacttcatctaccagcgaggagaccaggggcatcgaatccggtgaccacctcctctccgcaggcgattccggctgcccggacaaaagggtcgtgagccaccaccaccatcttctccaccctgcttggtgtagtgccaaatccactggcaggccgtcgatccggcgtttggtctccccccggtggatccgaccgctcagagcctcgccggcgccgaggacagcgagctcgcgcggcggctcaggggccccgccgtggccatggggaagcgcctcagcttcatgaacgcgtacctcgccgaggactgcaaccccgtcaggtgctgggtcatcaccggcggcgtcgcgttcgtcacgctcatcgtattaagtgtagggaggtgtggatgataccccagtagagctgcccaagaaactctacataggtcccccaagggccaaacaattcaacttcctgatggag

SEQ ID NO: 435529 - DNA, 299 bp, Oryza sativa
ggaccggtccagaatttctgggattaacaaacctactccaaataaagtgacgacccagccaccagagtgatgaatttgagcgctcgacgcggaaccagatgctagatcgagaagtagaaattcttaaaggaaatgcttacattagaaaaattcgatcttttctattaaagatgggcttggaaagcagcgatcttgaaacagtatgtgttaaggatcgactactaacaaacgaatgtattgatcaaatagctggtcttgctttgagtcataaacataagcattgtacaatttcagaccct

SEQ ID NO: 435530 - DNA, 389 bp, Oryza sativa
ctctgaaatctaactagtagctggccttattcagttctctgtggtatgtcttccaacctaatagaactgggacctatttttaggtgccaaaaatactccagaatgtccaaggtaccacagcaagcggtacattgaacaaaccaaataaataaaacaacaaaaatcgattacaattgcgacaaacatcatacctagcgacgtgggtacagatcccaacctaagtctggctcttttcgcttcaatactggcaccccagagctgccaccctgtgacatgttacccatgcgctcgtccacaaacatggtctgaccttggaaagacacaggccaatagcttgcaccttccctacgtgcaccttcatatgaccttccatagttgaagaccatgct

SEQ ID NO: 435531 - DNA, 350 bp, Oryza sativa
ttgtcctcaagaacctcatctgtattcccagctcgattgcactttgaaggtgaactgggatggaaaggttctgcagccaccagtgcttttcgaccggcttctcctcggtgtactcccgatggagagaaatcagtatctgcctcttcacagagaacaggcaatgctctgtttgacttgaatgtttctgaaagtgacaatgctactgctggtgaaccactttcagcagccatccttccgctttcttctgacatagtgcgaaaggatgcctctgcaactgttggcctgaatagccttgaacttgaccttaattgtccatgtgacgatgaggaagctgcaatcaccacatgtta

SEQ ID NO: 435532 - DNA, 251 bp, Oryza sativa
cccaccgcgctcgagacgctcgagggggggtttttatacatgttcggccgcatgcccccgacatatggcaagctccagaagctcaagttcttgggcctcttgggcaacaaccttaatggcgctctctcggatgagctgttcgagctctcgacattggagcagctcatcatcggttacaacgagttcagcggctctatccctgacgtcattggcaatgtagccttgttccagttcctttacatggcgatcgg

SEQ ID NO: 435533 - DNA, 77 bp, Oryza sativa
tttggtttttttaaagaaaaaaattttttttttttttttttttttttaccttgtgtttgtataattttttttttggg

SEQ ID NO: 435534 - DNA, 407 bp, Oryza sativa
gttatcatcaaccacatgctgatctacgtataactgggaaccaaatgaatagactattaaacttactgttttttttacagcattaatagaagcaaacaaaacactatcacatctctatcagcaagggatgtgaatcaccacagtctacagaacaagtcactgccactctgtgttttccaatttaactcttggcttgaatctgattccttggggaaaacgatttcctgtgtaggagtgcctatgatatgcatgaccctttctcctgtgctctatgattacaatctttaaaatccaaactatagatgaaaaatggacccttgttatccttgaggttagaacaatggatctgcttttctgtgctatgcaaccaaccacaaattgaactatattgggcaaaaaacaatccc

SEQ ID NO: 435535 - DNA, 250 bp, Oryza sativa
gtaactgttctcccgcatgacctcaagagagctcagcctaaggcgggcagcagctaagccagaggccgggatggagctctgcgccgtcttcttctcctcggtcttctccctcctcctcctcctcctcctctcagcagccaatgacgtcgtcgtgtcggcgtcgacctcatgcaccttaaggacctgaaccaactttggccagttttgcctagaccactacaacacccgtcacggaattctgctctgcgcc

SEQ ID NO: 435536 - DNA, 220 bp, Oryza sativa
acagcaaccaatttattttcatattgggggcccgggcccaaacaaaaataagaaacaaaggggccatataattttttaaaaaaaggggaaaaaccaacccaaatttttttccggggggaacatcacgggatacatttataacagcaagctaaaggacgccactcctttttttttttttccgttaacggaatttgagccattgaaggggggaacgtggggt

SEQ ID NO: 435537 - DNA, 452 bp, Oryza sativa
aaagaaaaaaaaatctgaatattgttctcctaattacctgtgttttggagaactaaactaacaagaaaacgtaacatggatgggggacataaattacagatcgtcgggtggtggcagagtgtaagaatactttattccccacacttcttagacaaacgaggaacaaatttcgccaggcaaatgaggaacaaattgaaaggaacaaaactggaagagacttggaaaatacagtacctgcatgtcttgttggtcgtgagtcttgtcaatccatacagatctttataccaatcagtccatacacataatgtttaggtgttataacggcatcaatggatcttcttaatctttagcgagtgatgcttgccattttctgtaggattcctcttaatatatacagtgtttatagtcgtcttgacatgttcacagccatcacactccacttttccaggctt

SEQ ID NO: 435538 - DNA, 505 bp, Oryza sativa
  unsure (1)..(505): unsure at all n locations
ccccaattcccaaattttttaacctaaccctagctttgcaaggagacgggcggcggggggcgctgcgtgcggcgtgcggtgcggcggcgggcgcggtgtacggcggcggcgagccggcgaccgcggggcagccagccaggcaggggcggctgccggctggacgcactggcgcagcatctcctagggtggcggcggagcgggcgcacggccgtggaggcgtcgacgcaggaagaggaccactcggcttggcgccagggcgcggggcagcggctgactcgtgaggcagcggcgcggcgcggcctgcggcgacagcggcattgcggcgcgacgcgcggcctgctgcgacagcggcagtgcggccatggacgacaagctctacccgcctcgaggcccagcgcgaagaaatcaagtcccgagccccgagcgagcaagattaatccccaggtgcgggtgcagattatcttccatacatgtttggngctctactgggactccatggcacatg

SEQ ID NO: 435539 - DNA, 427 bp, Oryza sativa
agccaacgtatgacttgatgcattggccatccagatggcactgagcaattgtgcaccgctacaattcaatgatcaaacatggtaaaactcaatatctcccaaggaaaacccctccattttccacaaatctaagtaaagaatcaacacgagaaaacaagtggaagctatgatgtgcaagggagaagaatttcaggggctctgctcgattcgtggccggcgaggccgtgccaccaccgtgcgctgctgggactggcacacctgcgccgggaacttgcacccgaaccggttggtcaccattgatccccaccgtccttccatcgccggtgttgctcctttctcccctggcgtgctgccgccgccacgccggtccattttttcaatggctttcctcatgcttgtgcactcacgcttcaagttctggacccgg

SEQ ID NO: 435540 - DNA, 396 bp, Oryza sativa
ttcattattgagagctccctcgtctctcgtctctccctggtgtccttccccttctctgattcccatagcgacagcaaatgagcaaacacatcacaccccttcctttctcccgagaaatgccttagctcatagcagagttttttttttcttcttcttcttttttcgccattgctgttgtctgcttcgttcttccaaaggatcacgagatgcaggggaggaagatgaagagcgcgagggagatggccagggaggagaagaatcatcatcatcatcatcagcagcagcagcagcagcagcaatcgagctccaaaggccaagcatggttctgcaccaccggactccccagcgacgtcgtgatcgaggtcggcgacatgacattccatctccacaagttcc

SEQ ID NO: 435541 - DNA, 528 bp, Oryza sativa
tttttcgagcacattacacaggagtggccacggtcgtctactacgctttctacttagctcacatggttgaagtaacgacactgatgaacttgctcatgcactctcttgagagcaaaaatctacattaagagaaccaacctgccgttagatatgatggagtcgaggtacgtcaaggtggattcgcgcttcttcctcgtcgacgacaactcctcctcctcctcctcctcctgcgccgccgccggcggcggtggcggcgacggcgattaccactacctcgacgcctgcttcctctgcaagcgggacatcaccttcaaccgccacatcttcatgtacaagtacgtaccacgaccaccatcttgattttttttttctctcgttcaatctcatgcatatttgattgattgattggttcttcgattattcagtgattcatttattgattgattgcgtatatatgtgttgcttgtgcagggggaacgcggcgttctgcagcgacgactgcaggcaggaccagatggacatggactc

SEQ ID NO: 435542 - DNA, 363 bp, Oryza sativa
tttttggtttttttttttttttggtttttttttaaaaagaagcttctgacatttattatttcatcgatgattccaaagcgcgcaaaagaaaatcgaatccaaacaaacaggttgggcttctctctctctctctctctctctctctctctctctctcctccaaatctttggaaagaagaaaaaacaggggaattaaaggcttttaaaacaagaggagaagagagaaactttgaaggaccctcatatgtatgaccctcatgtggtgattcaattgggttatttagtagcaggggttttgttgcccttgggggggcaagaggcccccttgttgttgcccctagacctttacccttgccagggcccc

SEQ ID NO: 435543 - DNA, 90 bp, Oryza sativa
actatttaagagctatgacggcgcagtgcaccgcgtatcgtcaagcatctggagtcctcctttttagtcggccgctcctctttatctttt

SEQ ID NO: 435544 - DNA, 405 bp, Oryza sativa
ctctctctctctcctcactcattctctcgcccctcgcgccaccgcgcctggagctctcgccgcgcctcgcctcgccgacgaagacgacgaggaggtcggtggtcgtggtggtctggtttggtgtccatccatggcggggcagcagccgccgacgggaggagccgaggacgacttcttcgaccacttcttcagcatcccctccgccgccgcggccggcgccggcggcgtcggcggattcggctcgggtgaccaccaccccttcccgctcgcgctcagcctcgacgccgagggcgccggtgccgccaggcgcctcctcgacggcggccacgacggcggcaggacggaccgggaccccgtgcagctcgccggcctcttcgccccggtgttcggcgccgtcgtcggagt

SEQ ID NO: 435545 - DNA, 228 bp, Oryza sativa
gtcagtttgcttgctaggtcctggtgtcactttttgtttgtagaatctcaatctatccccttctatatggttgatttctacatatacgtatgtagaggagatgtgaatgatctgtggttgattgatggctcatttattgaatgatgccgccttttatcaattctcagcgcatatcttaccatgactctgtttattttaccctgcccattcgccaaatttattgattga

SEQ ID NO: 435546 - DNA, 74 bp, Oryza sativa
attgtagaggagctatgacgtcggatggacgcggtcggcagggtgggtcctgtggggcgggcggcccttttttt

SEQ ID NO: 435547 - DNA, 376 bp, Oryza sativa
agcagagaaagcaacacattgccctgaactatatacagagtctttgtagtttgtacacaatagatcaggccatcacgagccattgagcaatttggcacagtatcttgcagaggcagtcaggcagaggaagagatgcccctctctccgttttacatggcgaagttgcaatcggcagtaggattcggttcacgctgctgcatgcctcggccgcgcggcgaccagacgggggcgggccagaccggcagccggagccgtcacaacgcacgctttcgcgggggcggtggctccgccttctttttcgagctgtgcatggttcacattacctgcacgtcctttgtaccccctggtctgcacgtcctggtggaggtcaaggatt

SEQ ID NO: 435548 - DNA, 238 bp, Oryza sativa
tgtgtgtttgcctcttgtgggagggagaggcgaagccgcgaagcaggcagagccggcggctgcgcgtgccagccacggcgaggctcggcggcggcaagccccggcggccggccgagccgtgcggcggcggcggcgaggcgcggctgcccggggggaggcggcgggcggcgcggcagcagatcgggacgcgcgtcatggcgtggtggcgcgccagggtcgtcgtgcccgtgcgccgtgc

SEQ ID NO: 435549 - DNA, 188 bp, Oryza sativa
ttaccgtccgcgtggagcgcttaagtgttcaccttgagtatcagtggggaaccggctggaccggaatcgcccgcacactctgaagccgaaccaccggcctgagcatgaacttctgggggaactcacattggcaagatccgcccacaacagcctagagccagaaaccaatctcacgcatgcgcgcgggg

SEQ ID NO: 435550 - DNA, 455 bp, Oryza sativa
ggaccatgggcaaatcacacaacaaatagtgtcatccctccattatgtgtgatctccacaccagcatacagcaattaccaaacagaaagaaggagacgagctagtacagtttttaactagacgaaaagaacaactaaaactacttgatcccatgatcttcccattctttgttcttccagccacaaaaacctgtctcttcctctgcttcagttcctccagtcgattccctgtttccttcctttgctgatttgtctcacacctccagccgtcttctatcaaagttccagccatacttggaattatataatctcttttgcaacctgctttagcaagtcgaagtgtcgaacccacattgtagacttctttggccttccaccgacctcacttgtaatgttttactcaagcccactccataccacttgtacaatgcttcgatctctctatgatatttggct

SEQ ID NO: 435551 - DNA, 67 bp, Oryza sativa
tttgggggtttttataacgtatagggttttcccttttttttatttttttttgtcaaaaattaatttt

SEQ ID NO: 435552 - DNA, 355 bp, Oryza sativa
atgttataaattctgaatcaagtattttacattcatgtacaacaacgctagctacaaagtgaaaacatggatcgggagaataatgtctctctctaaccactagggcaatctcaatctacatcccggcctaatgaagctattagttacaactactgtaaatcatcaacctttatccctccagcaagatctaggggatgaggtctggtctattttacaacattcatgaacttgtaattttcatttaacaggctaattttcattcatgaatttgtgatggccataaggagcaagcaaatttttcatttaacaagcagcggcaattagaatctcgccttttagaaacacattcgaacaa

SEQ ID NO: 435553 - DNA, 108 bp, Oryza sativa
ccttttcttacatggacaacgaaagaactccaaaagagttttactgtatcgtgagcttgcccagacagcacagcaccgagttgttgaccgcgagagatgtttcaccct

SEQ ID NO: 435554 - DNA, 187 bp, Oryza sativa
  unsure (1)..(187): unsure at all n locations
gtggagagagtgagcaaaagctagagagagagagtgagtgagagaaagagagatcaagtgagtgctaccttgttgcttggttgctagtatagctagcttgcttgggtggaagatcatatcagcatatcaagggagagggaatatggataggggagccctccacanaccatcagctctagcgggggag

SEQ ID NO: 435555 - DNA, 386 bp, Oryza sativa
agcgcagaaatagccatggtatatttatagttacagaaataatcctcaaacgcacggatacaccattgtaacatttcactcaaaagtattccaaggtatcgtatttattcaatccaagggatgatttataaaagagagaactctgctaatatcttaatacatacatatccttgcggtgatttttcgtccgacacccccttccccccctaaaatcccagtcggaattccatatcacacaaatagaatcccacattgagcacaccttcttttcaaatgccacattatcacaatcgtcacaggaccggcttcgtccgtcgggggtgcgcaccagcagcccccggcctggaatcccaattgcgagccaaaaaaaagaaagttcgattcaa

SEQ ID NO: 435556 - DNA, 477 bp, Oryza sativa
actcgccgaaagccagctaagatccctgatcattgtttgctgagcgtacaacacaaaagaacagtaaaaagggggaaactgtttgcaagttgaaaagggtaaagagaattgtttacctgttgtatgcaaaaggaaaaatggcctggcggatgaaactacaacacctcaaagacatcacagaccagttctctccagggcgggaacttggtaaaggtgggtttggagtggtctacaagataaccattgcgactgtcgaactccaatctatatgttgctgtagtcgaattggaatatagctgttgtttatctacaaaacttatgggaattcttgcaaatgggaaacccatagcggtcaagaggcttcaggtcatgccaggaatacaggacagacaatttaataatgaggttcatcatctcatgggacttaagcaccagaacatagtacaattaattggctactgtgatgaaagacaagag

SEQ ID NO: 435557 - DNA, 370 bp, Oryza sativa
ttttgttatcaggaagtactatgcaattcataataggcggttcaaccaaaattacgagttacaacaaggtcccataaattagaactgatactacatagacatttattcagtgcatccaaggagagtctcatatcccttcgtaagtctataaagaaggaagctcttatagttccatcctgtcaaagggagaaaggggtcgaaacaacggcattagccggctgtgggcaagaaaagacggattctcgttatctctagctcaggtccatgccgtcttcaacttggcttgggattggagacacagcggtgtaggaccttttgaatgaggatggatgcagttgtgcaccaagcctgcgcttaaaggagcaccctt

SEQ ID NO: 435558 - DNA, 482 bp, Triticum aestivum
agaatgggcttgctttgcgtgggctgccattagttcttcgaggcgggagggttggggcggtttaaaagtgtcggggttttttcagcagttctcggacaaaaattgctgagtggccgagaagaatgggcgtgtcatgcgtgggctgacccggattcttcgaggcctaggggtggcggtagataacttgctcgcatgagattaccgagatgtccccacgggcatctgttcacctcgtcgcccaagagaatgggcgtgtcatggcatgggctgacatggattctcctaggccgtgtgggtggcgggatagtcgtcttgcgcacgaaataccgcgatgtccccatggacatcgattccacccgcataggttggatgggcgtgcttcgttggaaagcatggatccgcctaggctgtcccgagtgtgagcgaggtgtgagtgtcgcccatgggcatcgacaccttgcggttatgtaactggatacgag

SEQ ID NO: 435559 - DNA, 336 bp, Triticum aestivum
tttcacgcgtccggcggactaccacttcgtgtacaaggacggggggggggcgaccacgcagggggacgacatccagcgcaaactcgggaacctgcccgagaagccggagcccttcaagccgccgcccttcgcccccagggtcgacgccgacgagcagcccaagtccaaggagtggctcgacgcgcgcgaccccgacgagctcgaggagctcgaggacgacctcgacgatgaccgcttcctcgagcagtacaggaggatgaggcttgcagagctcaaggaggcagcaaagactgccagattcggcacagtacagcccatcacaggctctgattttgt

SEQ ID NO: 435560 - DNA, 309 bp, Triticum aestivum
cctgacatggagggcattcccccggaccagcagggccggatcttttttggtaagcagcttgaggatggccgcaccttggcggactacaacattcagtaaggagtcaacccttcacttggtgctccgtctccgtggtggccagtaagctcctggccatggagctgcttctgtcatctgggttcacatgtctcggtgtcttcggtgtcctccaatggagtctggtctgtgtctgtcgttgcctgaactgtctttgtttctatatatatataccatactgtgatgcagtgttattgtttgtaagtgcaaact

SEQ ID NO: 435561 - DNA, 403 bp, Triticum aestivum
atcagatcaatccggtttacgtcggatgggcagttcctgtcgatggcggaaccagcggactttgtccatatctttgacgtgaagagcgactacaacagaaggcaagagctggacttcttcggcgagatatctgggatgtctttcagccccgacacagacgccctcttcgtcggcgtgtgggatagaacatatggtagcctcctccagtttgggcgtctgtataacaattggtaccatgacacgctgctttgaggctaaagcggagcggatgtcgggcctgcatgtctgtccccccacagctgcactgaatctcgcagcataagttaggtgtctccctgaaatcggaatttctcgagttgacctgcataattcaaattaataaatgttgtatccttgtatgtgt

SEQ ID NO: 435562 - DNA, 428 bp, Triticum aestivum
tacatgatctcatctggtcagcccgttaacgagtacattgatgctgcagttaggcacgttcttctcagacccggcgttcttgggatcaaggtgaagattatgcttgactgggaccccaagggcaagcttggccctaccaccccgctgcctgacctcgtcaccatccaccccccgaaggaggaggacgagctgcgccccccggctttggttgaggtctaaagtcccagtagagcaagcagaccatgaaacggcacatcattttggtcctagctacttttctatccctgtgataagcgagggctatgcaacgcttggttacctaccttaccttttaatggacaaaagtttctgtgtaatgctgctatgttaatttcgtttaaactaagttttgccgagacaagttacttatgtatgccacaaacctttgt

SEQ ID NO: 435563 - DNA, 637 bp, Triticum aestivum
  unsure (1)..(637): unsure at all n locations
ctcacgcgtccgcggacgcgtgggctcgcgccgccgccgccgccgcctccgtccccgccgccacgatgccgtcgcacaagaccttccggatcaagcagaagctggccaagaagcagcgccagaaccgccccatcccctactggatccgcatgaggaccgacaacaccatcaggtacaacgccaagcgcaggcactggcgccgcaccaagctcggattctaagccggggatgacgacgatgacacccgttgccgccgacgggagaagggtctagggtacctagggtttatgacgtctcgttgtttttgcaagctagcatgtgactccgggatgcctgttttaagatttcgcttgtgttgaaagatattattatttactgcttgtagcctacctgggataccatcatattttgctgattatggaactacttttatcctgcttaagctctgtattttgcccgagttgaaatggcctgaccagttgaaatcaaagtacaaatggacaaaaccagtaaaggaacaaatcaatcgacccacctacctaaggtaacaactcacaacacaacaacaaaannnnnnnnnnnnnnnnnnnnnnnnnnnnnnnnnnnnnnnnnnnnnnnnnnnnnnnnnnnnnnnnnn

SEQ ID NO: 435564 - DNA, 468 bp, Triticum aestivum
atctggttattgctcccgccgccgccgccgccggcggggtcacctttgagtcttcgtcggggccgcgacgatgccgtcccacaagaccttccgcatcaagcagaagctggccaagaagcagcgccagaaccgccccatcccctactggatccgcatgcggaccgacaacaccatcaggtacaacgcgaagcgcaggcactggcgccgcaccaagctcgggttctagatccggcccggccgaccgccgcgtgggggagccatggctcaagagttatctgcattttgttttatggacgtttcagtgtttgttatgcaagctaggaagtgatcccaggatgtctctgttatcaatttcttcgtgttatgaggattgcttgtaccctggtgtactgatgttaccgtgctgtgccaagtaaagaacctttgctataatgtcacccttgtttaaaaaaaaaaaaaaaaataaaa

SEQ ID NO: 435565 - DNA, 292 bp, Triticum aestivum
agaagggtactagggtacctagggtttatggcgtctcgttgtttttgcaagctagcatgtgactccgggatgcctgtttcaggattaagatttcgcttgtgttgagagatattagtatttactgcttgttgcctagctgggataccatcatattttgctgactatggtacaacttttatcctgcctaaacgctgtactttgcccgagttgcaatggcctgaccagttgcaatccacaaactatttcctgtattgcagcaaattaaagcggcctgccgaaaggatccattcca

SEQ ID NO: 435566 - DNA, 993 bp, Triticum aestivum
tgtggtttttaggtgctctgaatgttgatgtgaacgagttccagaccaacctggtgccctacccgaggatccacttcatgctttcctcctatgccccagtgatctcagctgagaaggcttaccatgagcagctgtctgttgctgagatcaccaacagcgcctttgagccttcctccatgatggccaagtgcgacccccgccacggcaagtacatggcctgctgtctcatgtaccgtggtgatgttgtgcccaaggatgtcaacgctgctgtggccaccatcaagaccaagcgcactatccagtttgttgactggtgccccactggcttcaagtgtggtatcaactaccagccacctggtgtcgtcccaggcggtgaccttgccaaggtccagagggctgtgtgcatgatctccaactccaccagtgttgtcgaggtcttttcccgcatcgaccacaagtttgacctgatgtacgccaagcgtgccttcgtccactggtacgtcggtgagggcatggaggagggagagttctctgaggcccgtgaggatcttgctgccctggagaaggactatgaagaagttggtgctgagttcgacgagggtgaggacggtgacgagggcgatgagtactagagcctgcctcctggtgctttcccaaggcatgctgctgcaatcctatgatctgcccgagtggctttatctgttatctgtctgtttgaacatttgctttgtggtgtttgttttacaacctgttgtgttgtaagaaccttgtatgtttgaacctgttatgcaccttggttaatatgcatgctatctggttatctacaccatagcctctggaaactaataaaaaaagaaaaaagttcacaagaaatgaaaaaaataagtaatgaaaaaataaaaatgaaaaatccggccacaaaaaagtaaagtaacgcataaaaaaatgcggcccctcaaagggtttagccttcaattccccgtaaaagcaaat

SEQ ID NO: 435567 - DNA, 317 bp, Triticum aestivum
tcccgggccgacgggggcgaggacggtgatgagggtgatgagtactagagcagatgagtttgcgacctgatgtacgtcaagcgtcccttcgtctactactatcctgtgatctgcccaagcggctttatctgttgtctgtctgtttgaatgtttgctgtgtggtgtttggtttacaacctgttgtgttgtatgaacctgtggtatgtttgaacctgcttcgcaccttggtcaatatgcatgttatctggtttgcctaaaacaaaaaagaaacccaaaaaacacatcaaggaaaatctagaactcagtccggcatcatc

SEQ ID NO: 435568 - DNA, 518 bp, Triticum aestivum
cctcacgcgttcgcccacgcgtccgcccacgcgtccgccgtcccgcgcggtcattcagggccccaagcccggcaagcccaccgacctctcccggatgcgccaggtcctagtgaagctcaagcatgctccgccgccgcacatgatgcaacctccaccagcccctgctgccaaggaaggcgccaaggaaggcgccaaggaaggtgcagaagacggcgcaccagcaccagcaaacggagccaagcagcccgcggagagcaaagaagcacccgccaacggccccgccgcagagacggagaaggagcagcctgcagcatcagagtagcttcttttctttttacagaaacaccagaaccttgactatgcttagacggaaacttcttatgttctcaaatacccggagtgtcgcctgccctgtagcggtcttttttgtagagatccgcaccaaggatggctatgtatcgatcagccctgaacattcagcttagtatcacagcaaacaactgcactcttcactggtt

SEQ ID NO: 435569 - DNA, 652 bp, Triticum aestivum
ccctcgcgtccgcccacgcgtccgcccacgcgtccgagctgtcctactgtcacatacacacacacacagttgctagctagctaatcgatcagccagccatggcggaggagaagcaccaccaccacctgttccaccacaaggagggcgaggacttccagcccgccgctgacggcggcgtcgacacgtacgggtactcgaccgagacggtggtgaccgccaccggcaacgagggcgagtacgagcggatcaccaaggaggagaagcaccacaagcacaaggagcacctcggcgagatgggcgccgccgccgccggagccttcgccctctacgagaagcacgaggcgaagaaggacccggagcacgcgcacaagcacaagatcgaggaggaggtggccgccgccgcagccgtcggcgccggcggcttcgtcttccacgagcaccacgagaagaagcaggaccacaaggaggccaaggaggccagcggcgagaagaagcaccaccacttcggctagatcgccgttgacgtgcggtggccggcctcgccgccggccgtgcgtgtgcttacgttacgtgcgttccataaagtgagagaggctgggacgcgggcccggtctcgtgctcgcccgtgcgtgattttctctgcgtgctaagc

SEQ ID NO: 435570 - DNA, 538 bp, Triticum aestivum
  unsure (1)..(538): unsure at all n locations
cgggtcgacgctagcttcgacacagatctggatgactctaagtcacaaaccggatacgtgtatattttgaatggtggggcagtaagctggtgcagttgcaagcagaccgtccgtggcgggaatctacatgtgaagcggaatacatggcagcctcggaggcagcacatgaagcaatttgggtgaaggagttcatcaccgacctaggagtcatacccaatgcgtcggggccgatcaaactcttctgtgacaacactggagctattgcccttgccaaggagcccaggtttcacaagaagaccaggcacatcaagcgtcgtttcaactccatccgtgaaaatgttcaagatggagacatagagatttgcaaagtacatacggatctgaatgtcgcagatccgttgactaaacctctctcgcgagcaaaacatgatcaacaccagaactctatgggtgttcgattcatcacaatgtaactagattggtgactctagtgcaagtgggagactattggaaatatgtcctagangcaataataaaa

SEQ ID NO: 435571 - DNA, 505 bp, Triticum aestivum
attcgccggtcgacggggggcaagaagagcagcacatgatagcttttccccacggatccttctcgtcttccacgtgattcgagtcgtctcgcctctctccgtcagcccaaacatggactcaagcaggcgcccgagtggaatccagcaattgcttgctgcagagcaagaagctcagcaaattgtaaatgctgctagggctgctaaaacggcgaggcttaggcaagccaaagaagaggctgagagagaaatagctgagtaccgtgcacaaatggaggctgatttccagaggaagctcaccgagaccagcggtgactctggcgcaaacgtcaaacgccttgagcaagagacaaacgtaaagattgagcagctcaagcagcaggcagcaaacatctctccagaggtgattcagatgcttctgaggcacgtcaccactgtgaagaactaaaggttgatgagtcagccctgcatatgatggcaactttgtactatctgttcatttctttgg

SEQ ID NO: 435572 - DNA, 700 bp, Triticum aestivum
tgcaggtcgcactctatccatcccgtacctgtccgacgagggaggagaaaaaaaaaatgctgcgccacgccgcccgccgcctcgcctcccgcgccgccgctgccggcagcggctccatgagccgcagggccctcgcgacggcgcaggcgcccgcggaggcgggcgaggaccccgccttcctggaggcgtggaagaaggtgaccacaatcatcgagcccccccagacgcccatgtcggccatgaagccccgcccgcccacgccggcctccattccctccaagctcaccgtcaacttcgtcctcccctacaagtccgagatcaccaacaaggaggttgacatggtaatggtaccggctacaactggcctgatgggtattttgccaggccatgtttccacaattgcagagctcaagcctggtgttatgtctgtacacgagggaaatgatgttacaaagtactttgtgagcagtggctttgcattcatccatgcaaactccattactgatgttgtggctgttgaggctgtcccccttgatcagattgaccaaagcttggtccagaaaggtcttgctgaattcactgccaagcttggatcagcctcgactgacctagagaaggcggaagctcatatcggagtggatgttcacagtgcgctcaatgctgcattgactggttgatgatgacatcttacatttttatg

SEQ ID NO: 435573 - DNA, 457 bp, Triticum aestivum
ttgcttgttcttcttcttgttgttgtctcaccgcagcatggagcagccagcatcgagggagcaacaatggcgatggcgtcgtcgagcgggctgaggagctgcagcgccgtgggcgtgccgagcctgctggcgccttcgtcccggtccggccgctccgggctgccgttctgcgcctacgccaccacctccggccgcgtcaccatgtccgccgagtggttccccggccagccccgccccgcccacctcgacggctcctcgccaggggacttcgggttcgaccccctgggcctcgccaccgtgccggagaacttcgagcggttcaaggagtccgagatctaccactgccgctgggccatgctctgcgtgcctggggtactggtgccggaggcgctggggctgggcaactgggtgaaagcgcatgagtgggcggcgctccccgacgggcaggcgacgtacc

SEQ ID NO: 435574 - DNA, 486 bp, Triticum aestivum
tgttagaagcacacaggaagctcctagccaacaccaatcaaagcctccatccaatcccaagcaacctcgaagatgtcttgctgcggaggaagctgcggctgcggcagcgcctgcaagtgcggcaacggctgcggcggctgcaacatgtacccggaggtcgaggccgccggcgccaccctcctcgtctccgccaccgccacccacaaggcgagctccggcgggatggagatggcggcggagaacggcggctgcggctgcacccagtgcaagtgcggcaccagctgcggctgctcctgctgcagctgctagatcattgatcatgcatgcgccgcgtgcatcatatctatgatctatctaccatctactaccatgtaacgctgcctgatcgagggtctttgtatgtatgtacgcacctgcctgcatgagcagagcgggtgccatgccatgcatgtaaacccctaaataaaatctcccgtggttttgctt

SEQ ID NO: 435575 - DNA, 620 bp, Triticum aestivum
  unsure (1)..(620): unsure at all n locations
tttcggacgcgtccggaagcacacaagaagctcatagccattcaaagcctctccatctccgaagctccaacccaacctcgaggatgtcttgctgcggaggaaactgcggcggcggcaccgcctgcaagtgcggcaacggctgcggcggctgcaacatgtacccggaggccgaggccgccggtgccaccctccttgtctccgccaccgccacccacaaggcgagctccggcgggatggagatggcggccgagaacggcggctgcggctgcaaccagtgcaagtgcggcaccagctgcggctgctcctgctgcagctgctagatcatcgatcatcgaccatgcatgcaccgtgccgtgcgtgcatcatcgatcatatcgatctactactaccataccatgtaaccgctacctgatcgagggcctttatgtacgcacctgacctgcatcagcagtcaggtgccatgccatgattgtaaacaggcccccctaaataaaacctcccttgattaactatacatgtgtcgtctgtggtatgcatatatcatcaccttctttttcttcttcnnnnnnnnnnnnnnnnnnnnnnnnnnnnnnnnnnnnnnnnnnnnnnnnnnnnnnnnn

SEQ ID NO: 435576 - DNA, 331 bp, Triticum aestivum
  unsure (1)..(331): unsure at all n locations
gtcctaccgtcctaccgaccgatgtgaatccaatgccatggagtgcgtactcgttattttccagtactggatgccgggatggcccgatgtgaattcgccataagctatagaaccctttttcttttaccattttctgacgaggaattgtactacccgtgtgatgcataatttgatcgtcctgtgatcaaaagacatcatatataagtttaataatattttcatgaacagtttacccttttattnnnnnnnnnnnnnnnnnnnnnnnnnnnnnnnnnnnnnnnnnnnnnnnnnnnnnnnnnnnnnnnnnnnnnnnnnnnnnnnnnnnnnnnnn

SEQ ID NO: 435577 - DNA, 980 bp, Triticum aestivum
  unsure (1)..(980): unsure at all n locations
cccgaaaggagntcttttatatggaccacctgggacgggaaagacgttgatggctcgtgcatgtgctgcacaaaccaatgcaacctttctgaaacttgctggtccgcagctagtccagatgttcatcggtgatggggcaaagcttgtccgagatgcctttgagttggcaaaggagaaggccccctgcatcatttttattgatgagattgatgcaattggnnntnncnnnnnttnntcaagtacgaggggtctggactccgaacggacaacggagagaaccgggagaacccgaacggatgcaagttttgaaaaacatgcggatgaaaagcagatgatgacatggcaaaatgcaacacgcaagaaaatgacatggcaacaacgacgaataaccggcagacacccggcgcatcggatccggggcgttacaacactcctccactaacaagagatctcgtcccgagatcttaggaccgagacggaaggggaaaaggaagaggtgaaacaagaaatcaagagaagaagcaaagaatcgagagcactcaagaagaagagaggaacgacgagaatcttaaagtcacggaaacagatagactatgaaacaactccggtttgaacgagataagaaacgaataagactgaaaggatttaggcagcactccggctgaagatggaaggaatagaacacgagcttcacccaatgagatggcacttgacgagatgaataatgcaatgcctccggaagaattgaaagaattgaataaaaagaacttagaaggaaggattgaatggagttgttgagaaaatcaacaacgaaagaataagcttgttgtggtcttataggtaacatctcaagatcataaggtgataaccggccacaaacggaaatgattggatagctgagaggaacgaagaaatgcaaaactccacttcaaaacaatactaagaattaattacacttcgagacgccagaagaaaagata

SEQ ID NO: 435578 - DNA, 263 bp, Triticum aestivum
agaatcatagacttctagctcattggatcatagacttctagcttattggagctagttatacgtcgatagcttgttatttttttattctatatttgtgttacctgatgcgaactatttctgattgtaaacctgatgtgaaccatgtttgatcgcaatgtgccaggtttggctctttttgattgtattcatgatttgaaccatgttttcatgatatttagttatgctttgtttgaagcattgtataaatattggttatttattta

SEQ ID NO: 435579 - DNA, 568 bp, Triticum aestivum
actggacgcgtgggcggacgcgtgggcgagctcctccgattccgcccgcctccgttcctccgcatcttcccggccgccgccaagatgaagctcgtcaggttcttgatgaagctgaacaacgagacggtcaccatcgagctcaagaacggcactaccgtccacggcaccatcaccggtgttgacataagcatgaatactcatctgaggaccgtaaagctcacaatgaaagggaagaatcctgtaacccttgatcacatcagcgtgagaggaaacaacattcggtactacatcctccctgatagcttaaacctggaaacgttgctggttgaggatacccccagggtcaagtctaagaagccaactacagggaagcctatgggtcggggtcgtggacgcggccgtgggcgtggtcgcggccgggggcgctgagctttattgttccctgctttggaagctcgtgcagtgcaagtccctacagcgtaacctgcttcctctgcgagctatgtcgaagattgtctctgttctgttagaagatgtcaatctaagtacgtgttgatgcggaatcatc

SEQ ID NO: 435580 - DNA, 529 bp, Triticum aestivum
cctcacgtttccgcccacgcgtccgcccacgcgtggcggccacgccagcctcctcagtcctcacagcatcctctcagtccttagcttccttccctcgccgccacccaccaaggaaaggaggatgtcttgctgcggcggcaactgcgggtgcggcgccggctgcaagtgcggcaacggctgcggcgggtgcaagatgttccccgacgtggaggccaccgccggcgccgccgccatggtcatgcccaccgcctcccacaaggggagctccggcgggttcgagacggccggggagaccggcggctgcgactgcaccacctgcaagtgcggcaccgcgtgcggctgctcctgctgcagctgcaactgagccggcgcccaggaggccggccggcagaggcgagcacgaggatgaggaggacaagcaagcaagcaccatcaccaccagttcaccaccacccagcgtatcatcaccagccgtcgcatgcgctcgcgcgcgcgcgcgctgaataaaataaaaccaccgttcgtgttc

SEQ ID NO: 435581 - DNA, 409 bp, Triticum aestivum
ctccttacagcatcctcctctcggttcttagtttcttttccaccacccacaggccaaggaggatgtcttgctgcggcggcaagtgcgggtgcggcgccggctgccagtgcggcaacggctgcggcgggtgcaagatgttccccgacgtggaggccaccgccggcgccgccgccatggtcatgcccaccgcctcccacaaggggagctccggcgggttcgagacggccggggagaccggcggctgcgactgcaccacctgcaagtgcggcaccgcgtgcggctgctcctgctgcagctgcaactgagccggcgcccaggaggccggcagaggcgagcacgaggatgaggaggaggacaagcaagcaagcaccatcgtcaccagttcacagcatgcgcccgcgcgcgcgct

SEQ ID NO: 435582 - DNA, 532 bp, Triticum aestivum
cggtgtccttctcgtcggctacggggcgtccggcttcgcgccgtcccgcttcaaggagaagccctactggatcatcaagaactcgtggggcgagaactggggggacaaggggtactacaagatctgcaggggctccaacgtgcgcaacaagtgcggcgtcgactccatggtctccacggtgtccgccacgcacgcctcgaaggaggagtaggctctgttctgatctgatcggcagccctcctggagtcgatcttggtttcggtgtatcgctagaaagaaactttaatatccgtagtagtcggctaggctccatcgtcgttgtggtatcagcagcgaagatgcgaagccgcaacagaatgcttgctgtataacttgtgcatttgctaaatttgctacgccatgcatgtctgccacacgctatttggatgtggctaaaaaactcctgaataattctgtacataatatgtattgtttccatcagaatggtgttccgtctttgtaaaaaaaaaaaaaaaaagcggacgcgtgggaa

SEQ ID NO: 435583 - DNA, 464 bp, Triticum aestivum
gtccacggggacacgcaaaaaccctagcagatcgctcgagccctccgccgccgccgcgccttcagctctctccttccttctccgatccaagatgaagttcattgctgcctatctgcttgcttacctctctggcaacgccagcccctctgcagaggacctgacatccattcttgagtcagttggttgtgaaatcgacaatgagaagatggaactcatgctgtcccaagtgaagggcaaggacatcaccgagctcttggctgctggtagggagaagtttgctgcggttccatctggtggtggtggtgtggctgtttcagctgctgcccctgctgctggaggtgctgctgcccctgcagctgagtcaaagaaagaagagaaggtcgtggagaaggaagagagtgatgatgacatgggcttcagtctgttcgactaagttgtggggcatcttgtgtctgaagtatcta

SEQ ID NO: 435584 - DNA, 574 bp, Triticum aestivum
  unsure (1)..(574): unsure at all n locations
gttcttttccttcatccccccgcgcccccggcgcccgcccgccagccccgatggcccgcacgaagcagacggcgaggaagtccaccggcggcaaggcgccgcggaagcagctggccaccaaggcggcgcgcaagtccgccccggccaccggcggcgtgaagaagccgcaccgcttccgccccggcaccgtcgcgctccgggagatccgcaagtaccagaagagcaccgagctgctcatccgcaagctgcccttccagcgcctggtgcgggagatcgcgcaggacttcaagaccgacctccgcttccagagctccgccgtctccgcgctccaggaggccgccgaggcctacctcgtcgggctcttcgaggacaccaacctctgcgccatccacgccaagcgcgtcaccatcatgcccaaggacatccagctcgcccgccgcatccgtggcgagagggcctaagccgtcctccccgtcaacgccgttagtggatcngaagtggaatgtgttgcttccggttgtaatttgttcctaattgccgtgctangtctatcttcctttgtgtaaaagaaata

SEQ ID NO: 435585 - DNA, 348 bp, Triticum aestivum
tgcaccgcgccattctcgaaccttccaagcgccggccggcctcccctcgcttccaccgagtccctccgatggcccgcaccaagcagacggcgcgcaagtccaccggcgggaaggcgccgcggaagcagctggcgacgaaggcagcgcgcaagtcggcgccggccaccggcggcgtgaagaagccgcacaggttccgtcccgggaaccgtcgccctgcgcgagatccgcatgttccagaagagcacggagctgctgatcaggaagctgccgttccagcggctggtgcgggagatcgcgcaggacttcaagacggacctccggttccagtcgtctgctgtgtccgcgctg

SEQ ID NO: 435586 - DNA, 630 bp, Triticum aestivum
ttcagtttggtcgccttccgattcgaacctccccgaaatccgcagcagtcgacaggaggccaaaggcgccgccatggcccgtacgaagcagaccgcccgcaagtccaccggcggcaaggcgccccgcaagcagctcgccaccaaggcggcgaggaagtctgcgccgacgaccggcggagtgaagaagccccaccgctacaggcccgggaccgtggcgctccgggagatccgcaagtaccagaagagcacggagctgctgatccgcaagctgcctttccagcgcctggtccgcgagatcgcgcaggacttcaagacggacctcaggttccagagccacgccgtgctggcgctccaggaggccgccgaggcgtacctcgtcgggctcttcgaggacaccaacctctgcgccatccacgccaagcgcgtcaccatcatgcccaaggacatccagctcgcccgccgcatccgcggggagcgcgcatagattgcccaaggaaaagcaatgtagagctgtccgttcgtcgcctctggtttcagatcgtgttagcaataggcaagaggcgacttttattttgttgtagaaaaaactctggttggctacattgttacaatgactcgtttcttatttcg

SEQ ID NO: 435587 - DNA, 716 bp, Triticum aestivum
tctacgcgtccgcccacgcgtccggggccgcaagctttaacatcattcccagcagcactggtgctgccaaggctgttggcaaggttcttcctgagctgaatggcaagcttaccggtatgtctttccgggttcccactgtggatgtgtcagttgttgatctcactgttagaaccgagaaggctgcatcatacgatgacatcaagaaggctatcaaggctgcatctgagggaaaactcaaggggatcatgggttatgtcgaggaagatttggtctccactgactttgtcggtgacagcaggtcgagcatctttgatgccaaggctggaattgctctgaacgaccatttcgtcaagctcgtctcgtggtacgacaacgagtggggttacagcaaccgcgttgtcgatctgatccgccacatggccaagactcagtagagcgttctgatttcctttggtcagaggtgtccctgctttgtctatgcgaagaataaatgtggatggtgtcgccagacgacgcctggttcatgttagttggacatgagttaccttctgttttccgcatcaacctctactatctgtaatggagttgctaatcaagtactcttttttggttgtggtttgtgaagattatataaatcgttcagtccagtactcaactccctttctgtctggcttttcgcctcgtccgtggcttggatttctgcttttgccttgttt

SEQ ID NO: 435588 - DNA, 392 bp, Triticum aestivum
tctccctctcgtccgcccacgcgtccgcacacgcaaggagcacgaggaggaggcaagggaagccgccgccgccgccgccccgtccctcctcgccggccggccgccacaggtagtttcaagatgtcaacctgcacgtttgcagcttcctgtgccctcttgggcaatgctcgaacaaccgatgccccccagaaagcggtcaagagccgcctgagcttcctcggccgaggcgcgccgcagctgcggagcctgaggtcctccttcccctccaagaagctggtgacatctgcatacaaggggacgagcacgtacaaggtgaagctggtgaccccggaaggggacgagcacgagtttgaggcgccggacgacgcctacatcctggactcggcggagac

SEQ ID NO: 435589 - DNA, 512 bp, Triticum aestivum
gcaaaggatggaaagggatctgcaaccttgtccatggcgtatgctggtgcagtttttggagatgcatgcttgaagggtctgaacggagttcctgacattgttgaatgctcgtacgtgcaatcaactgtgaccgagctgccattctttgcttccaaggtgaggcttgggaagaatggagtcgaggaagtgctcgggttgggtcagctgacgcagtttgagaaggatgggttggaagctctcaagggcgagctcaaatcttcaattgagaagggtgtcgcgttcgcaaatgcaagttagttaggtcattttgcagattatagcaaacccaggtctcgttgaggggtctgttggtttggtccagtgctttttctgcccatcatgtgggcatggaagatttgagctttgcaataaaatttccggcggcgcaatgccacacataacataacttgtacgagaggaagctagttttgtgtcgagctgtgaactgataatgaacaattgctgatgcgtgg

SEQ ID NO: 435590 - DNA, 434 bp, Triticum aestivum
ggggacacacaatcttcacaacattctttgccttctctcagaaaaatcaccgacattctgccattataccatggaggcctggaggaagacaaccatgtgttgcgtgattcttttctgccttatggctacatgtagtgaggtttcatctaccgaaaacatgtgctatcacaaccattggaataaatgccatcctgatcaaaatggaatgtgtcgagatagttgtgtgaaagacggatgggatgatggacaatgccggaacaggtttaaaagactaatgggtgccaagtgcgaatgttaccctaagacttgtgatcattagggaggcaacatgcgactttcttctaccaagttactactatttataaatttacatcggttttaatgattgacgtcaaacatgttgtaacaccaatcatggtgaatactatatcacc

SEQ ID NO: 435591 - DNA, 1007 bp, Triticum aestivum
tttacgcgtccggtccgattcgaaatactgcttgcccagctagggttttgctgcctccctccccccccgccgccgccgccgtcgccgcccgcgtccaccatggcgctgccgaaccagaacaccgtcgattaccccagcttcaagctcgtcatcgtcggcgatggcgggactggcaaaaccacatttgtgaagaggcatctcactggagagtttgagaagaaatacgaacccaccattggtgttgaagttcacccgttggatttcaccactaactgtggaaagatccgtttctactgctgggacactgctgggcaagagaagtttggtggccttagggatggatactatatccatggtcagtgtgcgattatcatgtttgatgtcacttcaaggctgacctacaagaatgttcctacgtggcacagggacttgtgcagggtttgtgagaacatccccattgtgctgtgtggcaacaaggttgatgtgaagaacaggcaggttaaggccaagcaggtgacattccacaggaagaagaacctccagtactatgaaatctctgccaagagcaactacaactttgagaagcccttcctttaccttgctaggaagctggctggtgatcccaacatccacttcgtcgaagcagtggcccttaagcctccggaagtgaccttcgacttggccatgcagcaacagcacgaggctgagcttgcggctgcagcggcacagccactgcctgatgacgatgacgatctgatcgagtagagagaggatcatgagtctgtctgtcttatcaatcaatactttgagagccagagactgtgcgagtcggttttaggctgaaggcttgattcggagtagtcaagccggatgtttttcctgtctgccttgccttgtctggtgggctgcaaactgtttgtgtgacattgatctacatgatgttgcttgccatggatttgttgttggccaccttgatggttcatcagtattattatgcctgttggctc

SEQ ID NO: 435592 - DNA, 534 bp, Triticum aestivum
taacacagagcaagaagagaagagagaagcaaagcttgagatggcgcaaaccatggcgtccatgaccggcctgtcgcagggcgtgcgtctcccaggcccggccggcaggcgcgccagcaggttcatcgtgagggcgtcgtcggcggaggcggaggccgccggccgccgcgcggtccttggcctcatggccagcggagtcgtcgggagcgcgttcgctcaggtggtgcacgccggcaccgtcgcggccatcaaggttggccccccgccgccgctctccggtggactccccggaacggacaactcggacgaggcaagggacttcgacctgcccctgaagaaccggttctacctgcagccgctgccaccggcggaggcggtggtgcgggccaaggagtcggtccaggacatgctcaacctcaagccgctcatggacaagaagcaatggccgtacgttatgaacgacctccgtctcagggcctcctacctgcgctacgacctcaagaccgtcatctcctgcaagaccaccaaggagga

SEQ ID NO: 435593 - DNA, 663 bp, Triticum aestivum
ttttgcagcttcccattcctcgccgccgccgccgcttcgtacccgctcgaagccgacccgaccatggcggacgtcgacgttgacacggaggtggccgccggcgcgcagccgaagaagaggacgttccgcaagttcagctatcgcggcgtggatctcgatgccctcctcgacatgtccaccgacgaccttgtccagatgttccccgctcgcgcccgcagaaggttcaagaggggtctcaagaggaagcccatggcgctcgtcaagaagctgcgcaaggcgaaaaaggacgctcctgctggtgagaagcctgagccagtgaggacacatcttcgtaacatgatcattgtccctgagatgattggcagccttatcggtgtctacaatggcaagaccttcaaccaggttgagattaagcctgagatgattggccattaccttgcagagttctctatctcctacaagccagtgaagcacggcaggcccggtatcggtgccacacactcttcccggttcatccctcttaaatgagttgtgccgctttctactttgaaagaaatcagtacggaccatctgatggcatgtccatcgagctgtctcccttgttttgaaccagttatatatctagtatttggttctggttagctatataatttcgttatgcac

SEQ ID NO: 435594 - DNA, 584 bp, Triticum aestivum
tccctcgcgtccgcccacgcgtatcatcatccccgataccaaagctcatcttcttctccttgaaatctttttgggttcacagatttggaggatgtcttgcaactgtggatccggttgcagctgcggctcagactgcaagtgcgggaagatgtaccctgatctgacggagcagggcagcgccgccgcccaggtcgccgccgtggtcgtcctcggcgtggcgcctgagaacaaggcggggcagttcgaggtggccgccgggcagtccggcgagggctgcagctgcggcgacaactgcaagtgcaacccctgcaactgttaagctgcatgcactcgtaccgtcgtacgtacgtgtgatggtgtgagagtatacgtgaataacgagcgtctgatctgatggagtcgagcaagggtgcgtgtgcgtgtgcgtgtggtttgcttgctcgctctccgcctatgctctgcccatggtgtccttgtgtgtatgtgtgtgcgcatgtgtccctgtaattgcttcatctatctccactatggatggagtgatgaatatgtaagaatgaaagatttacctaattaactactcctaa

SEQ ID NO: 435595 - DNA, 164 bp, Triticum aestivum
ttttgttccacacgagatttctgttctcgttgagctcatgtggatgccttgcaactgcggatcacgctgcagctgcggttacagactgtaagtgcgggaagatgtaccctgatctgacggagcagggcagcgccgtcgccgaggtcgacaccgtggtcgtcctc

SEQ ID NO: 435596 - DNA, 860 bp, Triticum aestivum
  unsure (1)..(860): unsure at all n locations
tctttggcccgccctancggtaaaggaantcccgggccgacccganaccggtnaaatcaaggggcattacntgaatgcgactgcgggtacatgtgaagaaatgattaagagagctgtatttgcaagagaattangggttcctattgtaatgcatgactacttaactgggggattcaccgcaaatactactttggctcattattgccgcgacaatggcctacttcttcacattcaccgtgcaatgcatgcagttattgatacacagaaaaatcatggtatgcatttccgtgtattagctaaagcattgcgtatgtctgggggagatcatatccactccggtacagtagtaggtaagttagaaggggaacgcgaaatgactttaggttttgttgatttattgcgcgatgattttattgaaaaagatcgtgctcgcggtatctttttcactcaggactgggtatccatgccaggtgttataccggtagcttcaggtggtattcatgtttggcatatgccagctctgaccgaaatctttggggacgattctgtattacaatttggtggaggaactttaggacatccttggggaaatgcacctggtgcagcagctaatcgagtggctttagaagcctgtgtacaagctcgtaacgaagggcgcgatcttgctcgcgaaggtaatgaaattatccgagcagcttgcaaatggagtcctgaactagccgcagcttgtgaagtatggaaggcgatcaaattcgagttcgagccggtagatactattgataagtagataaaactaaagataaagaagagaaggtataaataaaaaaagaattaagaaataaagcaaaaaaacaaaaggg

SEQ ID NO: 435597 - DNA, 923 bp, Triticum aestivum
gggtcgaccgggaagaagcacaaggcggagaagccggcccccggcgtccaaggaggccggcggccaaggggaagacgaggggcaggaagaagggcaccatggccaagaagaccgtggagacgtacatgatctacatcttcaaggtgctcagtcaggtgcacccggacgtgggcatctcctccaacgccatgtccatcatgaactccttcatcaacgacaccacaagcatccacatctccatcccagccaaacttttctctcgccctcgaagcagcagccgccgcagcatccatggcacccaaggccgccgagaagaagccggtggagaagacccccgcgggcaaaagcccaaggcggagaagcgggcgccggcgtccaaggaggccggcggcgaggggaagacgaggggcaggaagaagggcagcaaggccaagaagagcgtggagacgtacaagatctacatcttcaaggtgctgaagcaggtgcacccggacatcggcatctcctccaaggccatgtccatcatgaactccttcatcaacgacatcttcgagaagctcgccggggagtcggccaagctggcccgctacaacaagaagcccaccatcacgtcccgggagatccagacctccgtccgcctcgtcctccccggcgagctcgccaagcacgccgtctccgagggcaccaaggccgtcaccaagttcacctcccctagactctggcggttgttgtgccttgctgtcttgtctgcgtagttagctgttggttgtggttgtgtctgcgttgttatcttgtaagagattcgctctgttggtttgtggctgtgagtcggtctgcttttggcaacttgaaatctatctagaaaatgttgcggttgtggtacttaaaaaaaaagaaaaagaaaaaaaaaaaaaaagcggccg

SEQ ID NO: 435598 - DNA, 862 bp, Triticum aestivum
  unsure (1)..(862): unsure at all n locations
gaggctgacaagctcgcccgctacaacaagaagcccaccatcacctccagggagatccagatctcctcccgctccaagtacccaccatctcctccatatccgccggcgaagcaacacaccccccttccacccctcccgaagcagcgatggcccccaaggcggagaagaagccggcggcgaagaagcccgcggaggaggagcccgcggcggagaaggccgagaaggcccctgctgggaagaagcccaaggccgagaagcggctgccggcgggcaagaccgccgccaaggagggcggcgagaagaaggggcagaagaagaagggcaagaagagcgtcgagacctacaagatctacatcttcaaggtgctgaagcaggtgcacccgacatcggcatctcctccaaggccatgtccatcatgaactccttcatcaacgacatcttcgagaagctcgccggcgagagccggccaagctcgcccgctacaacaagaagcccaccatcacctcccgggagatccagacctccgtccgcctcgtcctccccggggagctcgccaagcacgccgtctccgagggcaccaaggccgtcaccaagttcacctccctagactggcgtcgccgtgcagtctggtagttctgcatctgcatctggttctcttgactctgctggtctatctatctgcaagcttagtccggtggtggctactggttctctgcacgtgctgggtagtcctgccatcgctttgttggcccgttggttgtaagagctgaagttgctgctttggcaaactgaaatctatctagaactgaagttgtggtcctaaaaaaaaaaannaannaaaaaaaaaaaaagcggccgctct

SEQ ID NO: 435599 - DNA, 691 bp, Triticum aestivum
gaagaagaccaaggcggagaagcgggcgccggcgtccaaggaggccggcggcgaggggaagacgaggggcacgacgaagggcagcatgcccaagaagagcgtggggacgtacaggatcgacatcttcaaggtgctgaggcaggtgcacccggacgtgggcatctcctccaacgccatgtccatcatgagctccctcatcaacgacaccacaagcatccgcatccgcatcccacctcacatcccatctccccacacgctcgaaccaccagcagcagcagcacccatggcacccaaggcggcggagaagaaccccgcggagaagacgacggcggggaagaagcccaaggcggagaagcgggcgggcgcggccgggtcgtcccaaggaggccggcggcgatgggaagcagcggggcacgaagaagggcatcaatgccaagtagggcgtggagacgtacaagatctacatcttcaatgtgctcaagcaggtgcaccacgacgttggcatctcctccaaggccatgtccatcatgaactccttcatcatcgatatcgtctataagctcgctcgctaatctttcaattcgtcaaagtacactttcacacccattatcacttcacgggagatccaaatcatcatcggcctcttcaacgtcggagagctcacaatgtatccattcttccaaggtctctc

SEQ ID NO: 435600 - DNA, 726 bp, Triticum aestivum
tcattttccctgcctccagcaaactccagcatactcatgccccccaccaccggagctcccaaccccacccgaagcggcagccatggcccccaaggcagacaagaagcccgtcgccgagaacaaggtggagaaggcggcggagaagacccccgcgggcaagaagcccaaggccgagaagcggctgccggcgggcaagacggcgtccaaggaggccggcggcgagggcaagacccggggccgcaagaagggcagcaaggccaagaagggcgtggagacgtacaagatctacatcttcaaggtgctgaagcaggtgcaccccgacatcggcatctcctccaaggccatgtccatcatgaactccttcatcaacgacatcttcgagaagctcgccggcgaggccggccaagctggcgcggtacaacatgaagcccaccatcacgtcccgggagatccagacctccgtccgcctcgtcctccccggcgagctcgccaagcacgccgtctccgagggcaccaaggctgtcaccaagttcacctcctcctagagctaggatgcgtcttcctgtgtctcctgtagatagtcagctgttcgcgtgaccatgtctgtcctgttgcttgctgttggttctgtgggaacaccctgtttcattacctcatgaaatattaatggtgtttctttgggcaaaaaaaaaaaaaaaaaaaaaaaaaaaagcggccgctcgaatt

SEQ ID NO: 435601 - DNA, 490 bp, Triticum aestivum
gtaccgtatcgacaattcgcgcggtccacggggaagcaggtagcacccggacatcggcatctcctccaaggccatgtccatcatgaactccttcatcaacgacatctttgagaagctcgccggcgagtcggccaagctcgcccgctacaacaagaagcccaccatcacgtcccgggagatccagacctccgtccgcctcgtcctccccggcgagctcgccaagcacgccgtctccgagggcaccaaggccgtcaccaagttcacctcctcctaggctagtctgccgctgcgtccgtgaactgatggggtgctgttaccctgaatctagcttatagctagctgcacctagtggtaggacgtggccgtctgtaagaattgtgctgctgcctacggttctgaagaaacagtgatgtcgtttgaatcagaccggatcaaacaatttctccgccacttcaactaagaaaggcacaaggctattgatgaaagaggt

SEQ ID NO: 435602 - DNA, 641 bp, Triticum aestivum
tccacagaagtccgccgccaagggaagaacaagggcaagaagaaaggcaacaaaggcaacaagaaccttgaacacttcaagattcacaacctccaagggcctaaacatgtgcaaccagacgtgggcatctcctccaaggccatgtccatcatgaactccttcatcaacgacatcttcgagaagctcgccggggagtcggccaagctcgcccgccacaacaagaagcccaccatcacgtcccgggagatccagacctccgtccgcctcgtcctccccggcgagctcgccaagcacgccgtctccgagggcaccaaggccgtcaccaagttcacctccgcctaggttcgctggtctgattctctcgttgtccccttcacatcgtccttgtctgatgaattctgtatgtagttagctgcaggttctgtcagtgtcatgcgacatgtgtcatcttgtaacagagtttctgcttgtgggtctgtggcaatgttcatgcggtctgcttaaatgagtctacttcacctcatcctaggaataaatcttcaggtggtgaactgtagttagatgtgttctgaaagtgtcatcatgtaactttgtgctgatggtggctgttttcagtctaaataaatagtcatgttgctgcc

SEQ ID NO: 435603 - DNA, 618 bp, Triticum aestivum
  unsure (1)..(618): unsure at all n locations
gggtcgaggcgtacggctaagagaagaccaccagaattcaaggggcaggaagaagggcagcanggccaanaagggcgtggaaacttacagattcaaaacctcaaggggctgaagcaggtgcacccggacatcggcatctcctccaaggccatgtccatcatgaactccttcatcaacgacattttcgagaagctcgccggcgagtcggccaagcttgcccgctacaacaagaagcccaccatcacgtcccgggagatccagacctccgtccgcctcgtcctccccggcgagctcgccaagcacgccgtctccgagggcaccaaggccgtcaccaggttcacctcctcttaggctgcttcgtcttcctgttgtctcgctagtccagctcgctcgggtgtagttggtctctgtatctgcacctgtactgtcgactctgcttgtctctctgcaagtagtgctggtagtctgctgggtgatcgccaatgctttgttggctaattaattggttgtaagaactgaagttgttgtgtttggcagactgatatatctatctagaactgaacttgtggtggtactgaaaaaaaaaaaaaaaaaaaaaaaaaaaaaagcggccgctct

SEQ ID NO: 435604 - DNA, 755 bp, Triticum aestivum
gggtcgacggcgaccaaaaagcactccagttcttcaccagccccctcgcaccttccggtgaatcaccgcacctctcaccggcgaagcagcagcgtctgatggcccccaatgcggataagaagccggctgccgcggtagaatactccggcggtcgataagacaccgcgggcaagaagcccaaggccgagatgcggccgtccaagtctaacgagggcggcgccgacaagatgaataagaaggccaagaagatcgtggagacgtacaagatctacatcttcaaggtgctgatgcaagtgcacccggacatcggtatctcctccatggccatgtccatcatgaactccttcatcaacgacatcttcgagaagctcgccggcgagtccgccaagctcgcgaggtacaacaagaagcccaccatcacgtccagggagatccagacctccgtccgcctcgtcctccccggcgagctcgccaagcacgccgtctccgagggcaccaaggccgtcaccaagttcacctcctcctagactgatgaactgatgatgcgtccgtcgcctctagttggtctctgtatctgcatctctgttaactctgcttatccctctgcaagtagtgctggtagtctgtgctgggtgattgccaacgcttcgttggctcgttcctcgttgcttgggaggaccgaagcttctgcttttgacaagctgatatctatctagaactgaagttgtggtggtaaaaaaaaaaaggataagatg

SEQ ID NO: 435605 - DNA, 715 bp, Triticum aestivum
tcgcacgcgtgcgccacgcgtccgcggacgcgtgggctcccccgcccgccgccgccgtcgccgcacagccgcagggagagaaggcaaggaggaaggaaggggaagatgccggcggggcacgggctgcggtcgcggacgcgcgacctgttcgcgcggcccttccgcaagaaggggtacatcccgctcaccacctacctgcgcacctacaaggtcggcgagcacgtcgacgtcaaggtgaacggcgccgtccacaagggcatgccgcacaagttctaccacggccgcaccggccgcgtctggaacgtcaccaagcgcgccatcggcgtcgagatcaacaagcaggtcggcaacaggatcatcaagaagaggatccatgtccgtgtggagcacgtgcagccatccaggtgcaacgaggagttcctccagaggaaactcaacaacgacaagctgaaggcggaggccaaggcgcgcggtgaggtcatcagcaccaagaggcagccacccggccccaagccggggttcatggtcgagggtaccacaattgagaccgtcactcccattccctacgatgtggtcaatgatctcaagggtggttactagggtgtttgggttatctgcctgcacaaccagttcaaatctatggtgctcttatgagtaggatttgctctctgagcaagagtctgggttgggtctttattcatgtcaagaagatatt

SEQ ID NO: 435606 - DNA, 647 bp, Triticum aestivum
cggacgtttgggcggacgcgtgggcggacgcgtggggcctcacactctcggctcagctcagccacagagtcacagtagcactagcttcagctagccagcctcagccactccgggcattttcttgcatccacgacggcaatggccaccgctgatgtccagaacccgacggccgcgctgacggaggaggcgcccgcggtggagacgcccgtggccgccgaggaggccccgaagacggaggaggtccccgcgccggcggaggccgaggtcgaggcgcctgctgcccccgtcgaggttgaggagaccaaggaggaggcgccgggcgccgctgagacggaggaggccaaggagaccgagccagcagctgcggccgagccggaggccgaggcgcccaaagagccagaggcgccagccgtggtcgagacagagaccaaggaggccgtggcagaggccgagccggcggtggtcgaggaggtgaaggaggaggcggcgcctgctgccgagccagaggcgccggccgtcgccgaggaagcaccggctgcagcggaggaggcccccgcggccgtggcagaggagccggccgccgcggtggccagcgtcagcgtgtgaggcgcgcacagagacagaggaggggctggctgggtcagcgt

SEQ ID NO: 435607 - DNA, 431 bp, Triticum aestivum
  unsure (1)..(431): unsure at all n locations
ctcatcagatcagtttgtgngtacacaagcactatcttgagctagtttttccaccctctgccactccgggcattttcttgcatccacgacggcaatggccaccgctgatgtccagaacccggcggccgcgctgacggaggaggcgcccgcggtggagacgcccctggccgccgaggaggccccgaagacggaggaggcccccgcgccggcggtggccgaggtcgaagcgcctgctgcccccgtcgaggttgaggagactaaggaggaggcgccggccgccgctgagacggaggagaccaaggagcccgagcccgcagctgcggccgagccggaggccgaggcgccagccgtggtcgagacagagaccaaggaggccgtggctgaggcagagccggcggtggtcgaggaggtgaaggaggaggcggcgcctg

SEQ ID NO: 435608 - DNA, 461 bp, Triticum aestivum
cccacgcgtccggcctaaccacataaaatctccgccgatccaccacaccctgcaatggcgtccgcgctcaccaacgtgagcctgtctaccttcgcgcccacggccaggggcgacgtcctcgcgaggccgcaggtggccgccgcccgcgtcaccttcccgacggcgtaccgcggcagcggcgccctctcctgcagggcgggcgggccggccacgccgccgggcatctccgacaagatgtcggacagcatcaaggaggcccaggagacgtgctcggaggacgccgccagcggggagtgcgccgcggcgtgggacgaggtggaggagctcagcgccgccgccagccacgcccgggacaagctcaaggactccgacccgctcgagaactactgcaaggagaaccccgagaccgacgagtgccgcacctacgacagctgagcgtacgtgctaatttgttctggacg

SEQ ID NO: 435609 - DNA, 586 bp, Triticum aestivum
cccaaaccccatactcagcgacagagagcagccagcagcctcctccgccgccgcccatgtcaggaggagggatcgcgcggggccgcctcgcggaggagcgcatggcctggcgcaagaaccacccccatggattcgtcgcgaagccggagacggtggccgacgggtcggtgaatctcatgatctggaactgcaccatccccggaaagcaggggactgattgggaaagtggatactacccacttactctccacttcagtgaggactaccctagcaaacctcccaagtgcaagttcccgcagggttttttccacccaaatgtctatccttcagggacggtctgcctctcgattcttaatgaggatagtggttggagacctgccatcactgttaagcagattctagttggaatacaggatttgcttgatcaacctaatccagctgatcctgcccagactgatggttatcacctctttatccaggatccagcagagtacaagagacgcattcggctgcaggccaagcagtaccctgctctggtttggggatccatcgtaacagtctaaaatcatgaattaccgcacctgaa

SEQ ID NO: 435610 - DNA, 386 bp, Triticum aestivum
tcgatgatcggcgacggccagatcaactacgaggagttcgtcaaggtcatgatggccaagtgaggtggcgggacagggggtgtcctcccacgaaataagcttaaaatttgctctcaagtggattggaatggaatgccagacagactcgcaaggttgtattttgtgctatgttctttaagtactgttgcctgttgggtagctggtcgggttatcttgtaccggcgtagtcgtggggagcagcatcggatttacctggtttctagtcttatcatggaatttaggggctttgtgcaaatctcggttttgccctgcggtttgcttgtatgcttgggttgtgttcagctccaaaatgctggccggaagtacattttgtggattccatttgg

SEQ ID NO: 435611 - DNA, 1043 bp, Triticum aestivum
  unsure (1)..(1043): unsure at all n locations
ccctcgcttccggccgctactcccctgcctcccccagagctcgttagggttttctcttttttcgggggagaaatctcaagaggcggcaccatgctcgtgtaccaggacaagctttccggcgacgagcttctgtcggattcgttcccttacagggagctggagaacggcgtgctctgggaagtcgatggccattgggtcgttcaaggagcagttgatgtggacattggagccaatccctctgctgagggtggtggtgatgatgagggtgtcgatgaccaggccgtgaaggtggttgacattgttgacaccttccgtcttcaggagcaacctgcttttgacaagaagcagtttatctctcacatgaagcgctacatcaagaacctctctgccaagcttgaaggggatgacctagatgttttcaagaagaatgttgagtctgccacaaagtatcttcttagcaagctcaaggaccttcagttctttgttggcgagagcatgcatgatgatggcggcgtggtgttcgcctactacaaggagggagctgctgatccaactttcctgtactttgcacatgggctgaaagaggtcaagtgctaatcgcactgtatgctaaaatctatgcggtcgtcagtatttttgctctgctctatggttgtcagtcgactctccaatgttgtgtcggtaactatcagatgttgagtgtcttgaaaactttctgataattgtgggatttgctttgtaatggtaatcgtgaaattggtgtggttatgttttggtcaatgcctcagcttttactcgctaaaatcaattgtaaatgattcaagagatgtaaacatgaagtgccaaaatacaattaaannnnnnnnnnnnnnnnnnnnnnnnnnnnnnnnnnnnnnnnnnnnnnnnnnnnnnnnnnnnnnnnnnnnnnnnnnnnnnnnnnnnnnnnnnnnnnnnnnnnnnnnnnnnnnnnnnnnnnnnnnnnnnnnnnnnnnnnnnnnnnnnnnnnnnnnnnnnnnnnnnnnnnnnnnnnnnnnnnnnnnnnn

SEQ ID NO: 435612 - DNA, 1342 bp, Triticum aestivum
  unsure (1)..(1342): unsure at all n locations
tcgttttgcccgcccccgccgccgccgccggctccttccgcaggagctccctcctcgcaggcgcgatggtgtacatcaagaaccagaagacaagggcgtactccaagcgtttccaagtcaagttcaagagaaggcgccagggcaagactgactacagggccaggctgaggctcacaaaccaggacaagaacaagtacaacactcctaagtaccgttttgttgtgcgatttaccaacaaggatgtcactgcacaaattgtttatgctaccattgctggtgatattgtgatggccgctgcctactcccatgagttgcctcgctatggtcttgaagttggcctcaccaactatgctgcagcttactgcactggtctgcttttggctcgtcgtgtgctcaagaaccgtgatcttgatgaggagtatgaaggcaatgttgaggccactggtgaggacttctctgttgagccttctgatgagaggaggcctttccgtgcgctcttggatgttggtcgtactaggaccaccactggaaaccgtgtgtttggtgcccttaagggagctttggatggtggtcttgacattccccacagtgacaagagatttgctggtttcaagaaggatgagaagtcgctggatgctgagattcaccgcaagtacatctttggagggcatgttgctgactacatgaggtcactagcagatgaggaaccagagaagttccaaactcacttcagtgagtacatcaagaggggaatctcagctgatgacatggaagcagtttacaagaaggttcatgctgccatccgtgctgatcccaccatggccaaatcaaccaaggcgcctcccaagactcacaagaggtacaaccccaagaagctgacctatgagcagaggaaggccagcctcgttgaaaggctcaacgccctcaacaactctgccggtgccgccgatgatgacgaggacgacgacgagtgaagagcgctcttgtccaccccagtgtagtcttgcaacgtgcgtttttgttaaagtccggcaccctgcacaatgacctgttcctttgagttttgtttgtcttgctggagttatagattgtgttatctggattatgtgccgtgctggcatttggatcttaatcttaatccgttcgtctggcacccttcctttattttttgtggctgttccatgctggtcctggccttaggttgacatgaccttcgttgaggtcttttcagcttattactaaccatactannnnnnnnnnnnnnnnnnnnnnnnnnnnnnnnnnnnnnnnnnnnnnnnnnnnnnnnnnnnnnnnnnnnnnnnnnnnnnnnnnnnnnnnnnnn

SEQ ID NO: 435613 - DNA, 231 bp, Triticum aestivum
cccgcgggtagctatggctatagccggccgcgttatgagtacgttctacgaccttagcaacgcacggcctttgcttgctggctgccgagctagtactggactgcctgccgtattttggaaggattaacgacaacatatacgattcactctcgagcgtcttgtactatacattgtgtaaatgaacgaaacaatcttagtagtccgtttcacaagatcggcttatgtgtatca

SEQ ID NO: 435614 - DNA, 637 bp, Triticum aestivum
ttgacgcgtgggcgacccacgcgtccgccacgcgtccggattcattcaaggcactcagcgacgaggggatgccgatgtaccagaggccgttcatgaagggcaagctctacattcatttcacggtggagtttcccgactcgctggcaccggatcagtgcaaggctctcgaggctgtgcttccaccaaagcctgcatccaagctgaccgacatggagctcgatgaatgcgaggagacgacaatgcatgacgtcaacatggaggaggagatgcgtcggaaagcccatgctgctgctcaggaggcgtacgacgaggacgacgagatgcctggaggcggtgcccaaagagtgcagtgcgcacaacagtaagctagggttgggcaagctttttggggaccctagatcaagatgcctgcctgctctctggggttttggtggtgttatcgatgaagctgatttttgcccgtttggcgccggggctgtatccatccatgtcttttgaaaaatgctacgtggctactcttaatgtagtgtgatactcgtataaaagcaatctgtttgtgaaaactaaagaacgctgtctgaatacgttgtctaagcagaaccgtggacaattttgcaaagcatgtttgtggtttttg

SEQ ID NO: 435615 - DNA, 542 bp, Triticum aestivum
ggcatacttggctgggccattgatgaggattttggttctattgagaaacttataaagaagatgaatgcagagggtgctgctttacaaggatctggatgggtgtggctagctttggataaagaggccaaaaggctttcagttgaaactactcctaatcaggaccctcttgtgaccaaagggtcaaacctgcatcctttgttgggaattgatgtctgggagcatgcgtactacctgcagtacaagaacgtgaggccggactacctgaccaacatctggaaggtggtgaactggaaatatgccggagaagagtatgagaaagtgcttgcatgatttgtccgagtagacagacagtacttcgctcgctcttgagttccccgctgttggatctttgtatatgcagtaataaaagtgggcactattccactgtcgggaccttctgtacatcgcatagaggcggggtaatgtccaacgcatagaacagtgcctgtccattttggtactttttactgtgcctgcgtgactaataaactcattcgctagtg

SEQ ID NO: 435616 - DNA, 511 bp, Triticum aestivum
  unsure (1)..(511): unsure at all n locations
ttannggngaccttttacgccggccggttccggtcgaaaaattcccgggtctaacgggtgtatttgatgcggcaataaaggtggtacttgcgccaccaaaggcgaagaagaagaaaaaggcgcagaggggggcttgctccatcttgtgatctaatcatcggtagacaaagaacaagggcgaagttgccgccatgctatattattgttacgtcttgcttcagcggagctgcactctcatggtcgtcgtccctcccccctaccccaccctaggttacccaccggcagctgcagcaaggtctctttgtcgaggcatcgggcgatccatttgtttgatttctcttcttcctgccttgtgattatctcgtgtgactgacaagtcgtggcaatttaggtaacttgcttagtagacggtatttcccgtgtttgagaccccgtaaaaaaaaagtatctcgttgttatctcggttccataagtagagacatgatgtaatcgcactcagtttattttattt

SEQ ID NO: 435617 - DNA, 324 bp, Triticum aestivum
taacaacctgccactgcccccattggctttctaagcaggaagcaccagggaggaggggttagatagttggcatttgcaagcggtaaccaaatgcgcattccattgagtttgtatggtgggctgctctttgcacaagctgtgtgcttatgaggtgttggtacttgtcgaggacagcaggggggtagcgtactcgtggtgttgcactatgttttgtttctttgttttatttttgagtgtttgatctgtttgagcctttgtgatccgagaaaataaaaataatatgagttacctttgttaatttaaaaaataaaaaaaataaataaa

SEQ ID NO: 435618 - DNA, 753 bp, Triticum aestivum
ttgcttcgcgtccgcccacgcgtccgctcacacacacacatcatctcccccacctctctcccaagccaaggccaagagctcagtagaagcaccgcggccatggagggcaaggaggaggacgtgcggctgggcgcgaaccgctactcggagcaccagcccatcggcacggcggcgcagggcggcggcgcggacgagaaggactacaaggagccgcccccggcccccttcttcgaggccggggagctcacctcctggtccttctaccgggccggcatcgccgagttcctggccaccttcctcttcctctacatctcggtgctcaccgtgatgggcgtggtgggcaacccgtcggggtccaagtgcggcacggtcggcatccagggcatcgcctggagcttcggcggcatgatcttcgtgctcgtctactgcaccgccggcatctccggcggccacatcaaccccgcggtcaccttcgggctgttcctggccaggaagctgtcgctcaccagggcgggtgttctacatggtcatgcagtgcctgggcgccatatgcggcgccggcgtggtcaaggggttccagaccacgctgtaccagggcaacggcggcggcgccaactccgtcgcgcccgggtacaccaagggggacgggctcggcgccgagatcgtcggcacgttcgtgctggtttacaccgtcttctccgccaccgacgccaagcgcagcgccagagactcccacgtccccattttggcgcc

SEQ ID NO: 435619 - DNA, 399 bp, Triticum aestivum
tttttcgacccatccatcatcatctcatctcctctgcctaacaggctaagcagctgagctcaagcagcggcaatggagggcaaggaggaggacgtgcgtctgggcgccaaccggtactcggagcggcagccgatcggaacggcagcgcagggcgcggacgacaaggactacaaggagccgccgccggcgccgctgttcgaggcggaggagctgacgtcgtggtccttctaccgcgcggggatcgccgagttcctggccaccttcctgttcctgtacatcagcgtgctcacggtgatgggcgtggtgggcaacccctccggctccaagtgcggcaccgtgggcatccagggcatcgcctggagcttcggcggcatgatcttcgtgctcgtctactgcacc

SEQ ID NO: 435620 - DNA, 358 bp, Triticum aestivum
gcacgcacccatctacatcttgtcctccgttcagcaaccaagccaagctcgagcggcggcaatggagggcaaggaggaggacgtgcgcctgggcgcgaaccgctactcggagcgccagcccatcggcacggcggcgcagggcggcggcgcggacgagaaggactacaaggagccgcccccggcgcccctcttcgaggcggaggagctcacctcctggtccttctaccgggccggcatcgccgagttcctggccaccttcctcttcctctacatctcggtgctcaccgtgatgggcgtggtgggcaacccgtcggggtccaagtgcggcacggtgggcatccagggcatcgcctggagc

SEQ ID NO: 435621 - DNA, 339 bp, Triticum aestivum
tgggtacccgccgctcttcctgtacatcaccggggccaccgtcatcgggtgcaagcaccaggcagaccccgccggtcccaacgccgccgacgcggcctgcagcgccgtgggaatcctcggcatcgcctgggccgttcggcggcatgatcttcgtgctcgcctactgcaccgccggtgtgtccgggggacacatcaacccggcggtgaccttcgggctgttcctggcgcgcaaggggtccctggtgcgcgcgcatgctctacatcatcgcgcagtgcctgggcgccatctgcggcgtggggctcgtcaaggggttccagagcgccttctacgtgcgctac

SEQ ID NO: 435622 - DNA, 483 bp, Triticum aestivum
ccttcgctatcgcccacgcgtccgcccacgcgtgggcttctcctccccactcagtcctcggttcccggtccggtcggttccgttcggttcgttagggtttagtagtggcggggaagaggaaggaatggcggacgtcgagtaccgctgcttcgtcggcggcctcgcctgggccaccgacgaccagtccctccagaacgccttctccaagtacggcgacgtcatcgactccaagatcatcactgacagggagacgggccgttcccgcgggttcgggttcgtcaccttcgcgtcggacgaggcgatgcgccaggcgatcgaggccatgaacggccaggacctggacggccgcaacatcaccgtcaacgaggcccagtcccgccgctccggcggaggcggcggcggcttctgcggcggcggcggtggcggctacggcggccagcgccgcgagggcggcggcggcggctacggcggcggcggcggtgg

SEQ ID NO: 435623 - DNA, 483 bp, Triticum aestivum
tttcttacgcgtccggtcgaccaccagcagcagcacacctccacaccgaggccaagcgaagatgtcgggccgcggcaagggaggcaaggggctgggcaagggcggcgccaagcgccaccggaaggtgctccgggacaacatccagggcatcaccaagccggcgatccggcgcctggcccgccggggcggcgtgaagcgcatctcggggctcatctacgaggagacccgcggcgtgctcaagatcttcctcgagaacgtcatccgcgacgccgtcacctacaccgagcacgcccgccgcaagaccgtcaccgccatggacgtcgtctacgccctcaagcgccagggacgcaccctctacggattcgggggctaggctccggcgaggcgaatccagctcgcaccacttgatcagatgttcagattagcagtagctaggcgttgttcagtgttcacggtgatcgatgtaatttatgatgtatggtg

SEQ ID NO: 435624 - DNA, 497 bp, Triticum aestivum
ccctctcttccgcaaaacaatccaatccaatcccccaagagagagaagaggaggaagatgtcgggccgcggcaagggaggcaaggggctcggcaagggcggcgccaagcgccaccggaaggtcctccgcgacaacatccagggcatcaccaagccggcgatccgtcgtctggcgcgcaggggcggcgtgaagcgcatctcggggctcatctacgaggagacccgcggcgtgctcaagatcttcctcgagaacgtcatccgcgacgccgtcacctacaccgagcacgcccgccgcaagaccgtcaccgccatggacgtcgtctacgcactcaagcgccagggacgcaccctctacggattcggaggctaggccaccaccatcgccagattagagtgtctggggttcgtggtcgttgatgtaattgcagcatctcgctgttgtttgctatcttctgtagaatggaatggaatggaaattgaactagtttatccttcaag

SEQ ID NO: 435625 - DNA, 719 bp, Triticum aestivum
  unsure (1)..(719): unsure at all n locations
cactaccaaacacaatccaagccaatcccaccggagagaagagaagatgtcgggccgcggcaagggaggcaaggggctgggcaagggcggcgccaagcgccaccggaaggtgctccgcgacaacatccagggcatcaccaagccggcgatccgccggctggcgcgccggggcggcgtgaagcgcatctcggggctcatctacgaggagacccgcggcgtgctcaagatcttcctcgagaacgtcatccgcgacgccgtcacctacaccgagcacgcccgccgcaagaccgtcaccgccatggacgtcgtctacgcgctcaagcgccagggccgcaccctctacggcttcggcggctaggccgagggttcatcgatccagctcgcgacgccgccgtccgaccgagagtagtagtgctatctatctagttgctgtctagggttcgtggttctccgtgcaagagcagtggtatctccttggtgtttgctcccgtcttgtgagctgatgttgctgttgtagagatgtactggaagaagtttggaatggaaattgcagcagtttatccctgaaaaaaaaaaatcgagaaattaaaacacatcaataagggataaaaaataagaaacagatacctgagtcaagatgcagggggatatcagaagacgggacacaaaaaaaaaaagggggccctcaagggnnnnnnnnnnnnnnnnnnnnnnnnnnn

SEQ ID NO: 435626 - DNA, 373 bp, Triticum aestivum
cccacgcgtccgcattaccactcctcccccaatcccactcgcgctcatcagcagctccaagcggatcgtcggcgaccatgtccgggcgcggcaagggcggcaaggggctcggcaagggcggcgccaagcgccaccggaaggtgctgcgcgacaacatccagggcatcaccaagccggccatccggaggctcgctcggaggggcggcgtgaagcgcatctcgggcctcatctacgaggagacccgcggcgtgctcaagatcttcctcgagaacgtcatccgcgacgccgtcacctacaccgagcacgcccgccgcaagaccgtcaccgccatggacgtcgtctacgccctcaagcgccagggccgcaccctcta

SEQ ID NO: 435627 - DNA, 385 bp, Triticum aestivum
cggacgcgtgggcggacgcgtgggcggacgcgtgggcggacgcgtgggcaatcccctccaatcccaccttcggaacagcagccagcaagcgtcgccagccatgtcgggccgcggcaagggaggcaagggcctgggaaagggcggggcgaagcggcacaggaaggtgctgcgcgacaacatccaggggatcacgaagccggcgatccggcggctggcgcggcggggcggcgtgaagcgcatctccgggctcatctacgaggagacccgcggcgtgctcaagatcttcctcgagaacgtcatccgcgacgccgtcacctacacggagcacgcccgccgcatgaccgtcaccgtcatggacgtcgtctacgcgctcaagcgccagggc

SEQ ID NO: 435628 - DNA, 535 bp, Triticum aestivum
cccacttttccggccgacgccgccgaccctcgcgacgccgccacttctcctcggggcgcaaccatggtgacctccaccaagaagacgaagaagccacgggacaacatcaacaacaagctgcagcttgtcatgaagagcggcaagtacacgctcggctacaagaccgtcctcaggaccctcaggaactccaaggcaaagcttgtgatccttgctaacaactgccctccgctccgcaagtctgagattgagtactatgctatgttggcgaagatcactgtccaccactaccatggaaacaatgttgatttgggaactgcgtgtggtaaatacttccgagtctgctgcctgagtatcatcgaccctggcgattccgacatcatcaacgcaacaccagctggccagtaaacctgtgtatgccattttcagtgtctcgtctgatgcgtcatctaaggtggttctagagtgtagttcttgctggacttgatttggtcttgtgtacatcatttatcagtcaatcaagtttgatgggactatg

SEQ ID NO: 435629 - DNA, 463 bp, Triticum aestivum
agattccaccagcctcctcatcctcctcctccctcccccgccgcccgccgcccgccgaggttggtcgccggacgccatggcccccaccaagaagtcgaagaagagcacggagaacatcaacaacaagctgcagctggtgatgaagagcggcaagtacacgctcggctacaagaccgtcctcaagacgctccggagctccaaggggaagttgattatcctcgcaaacaactgccctccgctcaggaagtctgagatcgagtactatgctatgctgtccaagatcagcgttcatcatttccatggaaacaatgtggatcttggaactgcgtgtggcaagtactaccgggtgtgctgtttgagcatccttgaccctggtgactcggacatcatcaccaccgttcctcagtgaagacaagcttacctatcctagcctaagatgatgtagtgtggagagtcgtgctta

SEQ ID NO: 435630 - DNA, 425 bp, Triticum aestivum
gggacaacatcaacaacaagctgcagcttgtcatgaagagcggcaagtacacgctcggctacaagaccgtcctcaggaccctcaggaactccaaggcaaagcttgtgatccttgctaacaactgccctccactccgcaagtctgagattgagtactatgctatgttggcgaagatcactgtccaccactaccatggaaacaatgttgatttgggaactgcgtgtggtaaatacttccgagtctgctgcctgagtatcatcgaccctggcgattccgacatcatcaacgcaacaccagctggccagtaaacctgtgcatgccattttcagtgtctcgtctgatgccattttcttgctggacttgatttggtcttgtgtacatcatttatcagtcaatcaagtttgatgggactatggtttttcact

SEQ ID NO: 435631 - DNA, 554 bp, Triticum aestivum
cgggtcgaccggcgcgagcccagaggcgttccagcggtcatccgccccgcggtggagcccgcaggtgggcgactcatccgacacgaggggccggtcgtcctcgggcaggcaccagtcgtcgagcgccaagaactacgagtccacggtgcggggcatccagggcctcaactttgacggcgacgacaccaggaaccactactaggccccgaggcggcggcggaggaggccgggcaaaataagaggtgtggcctggcgggggcgtctcagccaggcagcggctaccacgggcgggcgtgccgtggtcttctttatgacgaatgaatgaatggatggaagtggaatggaatgaacgaatggtgtttgatgacggcggtgggtttgcttggccgttttaatttgtacagtttgttttctccccctttgttgtggccgcttgcggcggcgttaattttagttccttgaagaagatggatgatgttgtatttcggagagatgtatgcaggccggcgcggcgtaacgccgctcgtttggaatcccgttggtttttaaattaa

SEQ ID NO: 435632 - DNA, 352 bp, Triticum aestivum
  unsure (1)..(352): unsure at all n locations
ctcggtcgtctcagaggccaggctgccgcctctgctgccaaggccgacaaggccacttagagctatcgttgctgtttatctatgtttgctgcctctagattacccgtcagggacatgtattgcagtatggatgtcgtttttgctcggtactttggtaacctggtgatatttgttatcagttttcgctgtcgtggtctggattcgtcggtccacataaagaagattgtgcttggtggatannnnnnnnnnnnnnnnnnnnnnnnnnnnnnnnnnnnnnnnnnnnnnnnnnnnnnnnnnnnnnnnnnnnnnnnnnnnnnnnnnnnnnnnnnnnnnnnnnnnnnnnnnnnnnnnn

SEQ ID NO: 435633 - DNA, 342 bp, Triticum aestivum
taactaacacaaaccggataggataccgatcgatcataggtggaactgacactgtgacacacaccactacaaagctgcagctaagcagacgcagccagccacgggggccggcgagagtggcaccgcactgcgtcgctcgctcgctcgctgccgctgacccgcactactgggcgtcgactggccccgacaacacttttatttagcccgcgtcacgcgcgaccccgcgcatagcgctcccactccacacctagtaaaaagcagtagcactccactccactggctgactcagcatcacgccgtgccacgtaggagcacacggccgccgccgtcgacgctgaccca

SEQ ID NO: 435634 - DNA, 310 bp, Triticum aestivum
agaaataatgaagcatgtcttgtcgagaaaagaagcatacattatctagagtggcacactggcactgcgtctctcgctctctgctgaccgacacttgggactgggcgtcgacccgacaacacttttatttagcccacgtcacgcggaccccgcgcaaagcaccccacacctagtagtaaaaagtagcactccactccagtccactccactggctgactgagcatcacgccgtgccacgtaggagcacacggctgccgccgtggacgctgacacagccagctcctcgtccgcgcgcgcccacgcgtaagca

SEQ ID NO: 435635 - DNA, 317 bp, Triticum aestivum
attttgatcggtgccctttttttttttttttaacgcaaaccggttaggataccgatcgatcataggtggaactgacactgtgacacacaccgtaacaaggctccagctaagcagacgcagacgcaggccggcgagagtggcactgcgtccctcgctgctgaccgacactgggcgtcgacccgacccgacaacacttttatttagcccacgtcacgcgaccccgcgcatagcactcccactccacacctagtaaaaagtatcattccactccactccactggctgactcagcatcacgccgtgccacgtaggagcaca

SEQ ID NO: 435636 - DNA, 294 bp, Triticum aestivum
ggtaagttagctggagatcatcctccagagacgtgcacaaaccggataggataccgatcgatcataggtggaactgacactgtgacacacaccgcaacaaagctccagctgagccgacgccggcacacgggtgccggcgagtggcattgcgctgcgtcgctcgctcgctcgctgctgacccgacactgggcgtcgactggccccgacaacacttttatttagcccacgtcacgcgaccccgcgcatagcacacccactccacacctaataaaaagtagcaccactccacaaaca

SEQ ID NO: 435637 - DNA, 386 bp, Triticum aestivum
cccacgcgtccgcccacgcgtccgcccacgcgtccggccgcaccgcacccgcacccgcacagcccatcggcggcctcgccggagaagagagaagatggtgagagatggaggcggcggcggcggcggccggcgtgcagctgggcacctcgaagccgcagatcgcgacccaggcggagatggcggaggcgcgcctgccgatcccctaccgcgaccagtgcgcgcacctcctcatcccgctcaacaagtgccgcgtcgccgagttctacctcccctggaagggcgagcccgagcgccactcctacgagaagtgccagtacgagctcgtcatggagcggatgctccagatgcagaagatccgcgaggcgcatgcgggcgccaaggtcaag

SEQ ID NO: 435638 - DNA, 950 bp, Triticum aestivum
  unsure (1)..(950): unsure at all n locations
atctgtccactcgtgcgcccacgcgtccggcctcctcctagcaagctatatacctacatagtacagccatggcccccaccgtgatggcctcgtcggccacctccgtcgctcctttccaggggctcaagtccaccgccggcctccccgtcagccgccgctccaacggcgctagcctcggcagcgtcagcaacggtggaaggatcaggtgcatgcaggtgtggcccatcgagggcatcaagaagttcgagaccctgtcctacctgccaccgctcagcacggaggccctcctcaagcaggtcgactacctgatccgctccaagtgggtgccttgcctcgagttcagcaaggttgggttcatcttccgtgagcacaacgcatcccctgggtactacgatggccggtactggacaatgtggaagctgcctatgttcgggtgcaccgacgccacacaggtgatcaacgaggtggaggaggtcaagaaggagtaccctgacgcgtatgtccgcatcatcggattcgacaacatgcgtcaggtgcagtgcgtcagcttcatcgccttcaagccaccgggctgcgaggagtccggcaaggcctaaacagctcactcacgacaggccatatataaagtgccattgcagttttgtcaactctgacattgctttgggttttccttctccatttatctttcttatttgttcctaagaatatgtgtatgtccatgttcatgtaccaacatggctcgagaaagcatgctcgtatgtgaatgctatcggtggctatgtatatgcacggacgcataatattatacaatatgtcgactatatacgttttaatggttaccaatgggggtactccttattgacctccttcacctcgttgatcnnnnnnnnnnnnnnnnnnnnnnnnnnnnnnnnnnnnnnnnnnnnnnnnnnnnnnnnnnnnnnnnnnnn

SEQ ID NO: 435639 - DNA, 770 bp, Triticum aestivum
gctagttatcgcctccccacctagcaatttacgtactccgccatggccccagccgtgatggcttcttccgccaccaccgtcgcgcccttccaggggctcaagtcgaccgccggcctccccgtcagctgccgctccggcagcaccggcctcagcagcgtcagcaatggcggaaggatcagatgcatgcaggtgtggccaattgagggcatcaagaagttcgagaccctgtcttacttgccacccctctccacggaggccctcctaaagcaggtcgactacttgatccgctccaagtgggtgccctgcctcgagttcagcaaggttggcttcgtcttccgtgagcacaacagctcccccgggtactacgacggtcgatactggacaatgtggaagctgcctatgttcgggtgcaccgacgccacacaggtgctcaacgaggtggaggaggtcaagaaggagtaccctgacgcctatgtccgcgtcatcggcttcgacaacatgcgccaggtgcaatgcgtcagcttcattgccttcaggccaccaggctgcgaggaatccggcaaggcctaaagtgcaagttgaagtaaccgatatacatgtcatgttagtcacatttgtcggcggctctgctttctcagttttacttctcgttctactcatatatatgtgaatatatgagcatatgtatgtaagcacctaccaatgtaggtcgaggaggatgcatatgagaattatagcaccggctatacatatacatatatattatatgc

SEQ ID NO: 435640 - DNA, 714 bp, Triticum aestivum
tggacgtatgtacggccgcctgggcccacacctggatggagtcctgaactagctcgcagcgttgtgtatgtcatgggacgcagagcaaaccgccgttctagccggaggatactatttgatcagtgctagccttggcagcgtcagcaacggtggaaggatcaggtgcatgcaggtgtggcccatcgagggcattaagaagttcgagaccctgtcctacctgccaccgctcagcacggaggccctcctcaagcgggctcgactacctgatccgctccaagtgggtgccctgcctcgagttcagcaaggttggcttcgtctttcgtgagcacaacagctcccccgggtactacgacggccgatactggacaatgtggaagctgcctatgttcgggtgcaccgacgccacgcaggtgctcaacgaggtggaggaggtcaagaaggagtaccctgacgcctatgtccgcgtcatcggcttcgacaacctgcgccaggtgcagtgcgtcagcttcatcgcattcaggccaccgggttgcgaggagtctggcaaggcctaaactacgagttgaagcaatggcctatgtatgattgtcttttgtgaacttcacttttgtccaggactctgctttccgaccagagcatatttttcgttcggtatggtctgtgtgtgtatgtacgaacataggttctcgagcatgcatatgtaaattctagaac

SEQ ID NO: 435641 - DNA, 773 bp, Triticum aestivum
cccacgcgtccgcccacgcgtccgcccacgcgtccgcccacgcgtccgcccacgcgtccgcggacgcgtggggtacagccatggcccccaccgtgatggcctcgtcggccacctccgtcgctcctttccaggggctcaagtccaccgccggcctccccgtcagccgccgctccaacggcgctagcctcggcagcgtcagcaacggtggaaggatcaggtgcatgcaggtgtggcccatcgagggcatcaagaagttcgagaccctgtcctacttgccaccgctcagcacggaggccctccttaagcaggtcgactacctgatccgctccaagtgggtgccctgcctcgagttcagcaaggttggcttcgtcttccgtgagcacaacagctcccccgggtactacgacggtcgatactggacaatgtggaagctgcctatgttcgggtgcaccgacgccacacaggtgctcaacgaggtggaggaggtcaagaaggagtaccctgacgcctatgtccgtgtcatcggcttcgacaacctgcgccaggtgcagtgcgtcagcttcatcgccttcaggccaccgggttgcgaggagtccggcaaggcctaaactacgagttgaaacaatggcctatctcgtatgaaggtcttttgtgaacttcacttttgtccacaactctgctgcacgactctgctttccgaccggagcataccttttgttctatatgattttgtgtatgtatgtacgaacctatgtttctcaacatgcatacat

SEQ ID NO: 435642 - DNA, 616 bp, Triticum aestivum
gggtcgagccggaccaccaatcctaccacttcgagcgcctcctcctgtctcgtcctcgtcccccgtccccgtcccctcgtcggcgcccgatctaagtcaagatgagtcgtggcgggagtgctggtggtggtcaaagttctctgggttacctgtttggagatggtgagcctgcaaagcctgctgcagcaccagctgcgaagcccgcacctgctgagaaaccagcaccggcagctgctgatgtagccaagcagattccagctggcattccaggtagccgggcgaacaactactaccgtgcagatggccagaacacgggcaacttccttacggaccgtccttcaaccaaggttcatgctgctcctggcggtggctcgtccctgggctacttgtttggcggaaagtgatgttaatgatggtgcctgcttaatgaacgagcgatgaattggcctgtatctctgttatccatgtggtgaaaactggaagtgtttggtttgagcagtttaccacctgcgtcgatgtactctgtctgtatggttcattgtgtccaagctgacctcctgcttggaagccagcttgcctaaaacctgtcgctttcaaactaatcgtcttcatctca

SEQ ID NO: 435643 - DNA, 404 bp, Triticum aestivum
tttcgcttgtgcggacgcgagggcgcgcctctgcctcctcccgctcacccacccatggcgacggctatgatggctgcagccaccacctcctgctccccgccccgagcgctcctcaagcccgcggcctcctccagccccgcgccgccgcccaggccgcagcctcggtccttcctcaagcagctcccggggctcgccgcgacggcggcggcggcggccgtcgcctccgtgcctctcccggccctggccgtggagatggagaaggcggcgctgttcgacttcaacctgacgctcccggcgatcacgatcgagttcctgctgctgatggtggcgctggacaagctctacttctcgccgctgggcaagttcatggacgagcgggacgccaagatccgcgcggagctcgg

SEQ ID NO: 435644 - DNA, 621 bp, Triticum aestivum
gagttacaatggtctccgaccgcctcagcgccctccgggccttcgacgacaccaaggccggcgtcaagggcctcgtggacgccggcgccaccgccatcccggccattttccaccacccacccgacgccttcgccccgtccactgtcgccaccgacgtcgccgttccaatcgtcgacctctcctgcgagcgctcggccgtggtcggcgcggtgagggccgcggcggagacggtgggcttcttcctgctggcgaaccacggcgtgccggaggcggccatgtcggggatgctggcggcggtgcggcgcttcaacgaggagcccgcggaggccaaggcgccctactacacgcggggcgccggccaggcgcgtgcgctacagctgcaacgccgacctcttccggacgctgctgggcaagtggcgcgacaccatctacatggacgacgtggaccagctggcgccgggcgaggaggaggaggtcctcccgccggcgtgcaggggcgtcgcaccgaagtacacggcgcagatgcggatgctggggcgcgcgctcttcgagctgctgtcggaggccctgggcgtgcggcgcgggtacctggaggaggaggccggctgcctggagacgctc

SEQ ID NO: 435645 - DNA, 725 bp, Triticum aestivum
ttaaaaaatatttttcttgggaggagtgcatcaatctccgtgaagttaagtccctccgaaggatgaaccatccaaacattgtgaagctcaaggaggtcataagagagaatgatatgctgttctttgtttttgaatacatggaatgcaatctctatcagctgatgaagagcaagggcaagcctttttcggagactgaaatccggaactggtgctttcaaatatttcaagctcttagtcacatgcatcaacgtggatactttcatcgtgaccttaagcctgaaaatctgctagttacaaaggagctcatcaaggtagctgattttgggcttgctcgtgagattatttctgaaccaccatacacagaatatgtgtcaactcgctggtatcgtgccccagaggttctacttcaagcttctgtttacagctcagcagttgacatgtgggctatgggtgccattattgcagagctttttttcgcaccgacctcttttcccaggctcaaggtacacatgatcctttttctgctgagcctcatttggttcccctattctcttggttgttgtgcccaatttaattgaagatttttaagttggtcctaatagtttgctgggagctaaatattaggcaaagatgctgttgattatatatgaaataaccatcatcggccactttaataagtgaacccattttttgtatagtctagaaagcaccccataatgtgaaaa

SEQ ID NO: 435646 - DNA, 437 bp, Triticum aestivum
tttcgctgtactctcactctcctgccgcggtgcgccgtacctgctctctagccaagatgtcgtcggtcagtgcccgcgctcccgtggccgctctccggccggcggcgtcagcgtcgagcccccggttcctgggcgactccggccgcgtcggcctcgccaagtccacgcgccgcgacgtcgccgtccaggccaaggggtcgtggctccccggcctcccctcccctgcctacctcgacggcagcttggcgggtgacaatgggttcgacccgctggcgctggcggaggacccggaggacctgcggtggttcgtgcaggcggagctggtgaacgggcggtgggcgatgctgggggtggcggggatgctgatcccggaggtgctgaccaaggcggtgctgctgaacgcgcccgagtggtacgacgccggcaaggagacctac

SEQ ID NO: 435647 - DNA, 435 bp, Triticum aestivum
cggggcatgggtggacgtgccgcccatgcgccacgccatcgtcgtcaacatcggcgaccagctggaggtgatcaccaacgggcggtacaagagcgtgatgcaccgcgtgctcacccgccacgacggcaaccgcatgtccatcgcctccttctacaaccccggcgccgacgccgtcatattcccggccccggcgctcgtgggcgctgccgacgctgctgagaggaacgagggcgaggagggcaccgccgtatacccaaggttcgtgttcgaggactacatgaacctgtacgtgcgccacaagttcgaggccaaggagccacggttcaaggccatgaaggcagacgccgcgcccatcgccaccgcgtgataactgatacgcgcccggacccggacgagagtattgtgagacgtgttttattttcttttgggcgtgcc

SEQ ID NO: 435648 - DNA, 391 bp, Triticum aestivum
cccactcgttcgcccacgcgtccgagaaccaggacacgcccacggtatacgcacgtacagctcgatcgcaatggcgtcgctcgtcgccgtccagccggtcgccgtgcggggcctggccggcagctccatctccggccgcaagctcgccgtccggcccgcctccgccgccgtctcccgctccacccgcagggctcgcggggcggcggtggtggccaagtacggggagaagagcgtctacttcgacctggacgacatcgccaacacgacggggcagtgggacctgtacggcagcgacgcggcgtcgccctacaacggcctgcagagcaagttcttcaacaccttcgccgcgcccttcaccaagcgagggctgctgctcaaggtcctgctgctc

SEQ ID NO: 435649 - DNA, 643 bp, Triticum aestivum
catatacttgagagagcgcacgcgagatggcagcctccatgatcacctcgccgattgtggcgccgacgagcgtgccgtccctctcccgccggggctcctccttcgccgtcgtctgcagcggtggcaagaagatcaaggtcgataagcccctcggactcggaggcggcttgacagtcgacatcgacaccaacggcaggaaggtcggcatgaagggcgtgtaccagtttgttgacaagtacggcgccaacgtcgacggctacagcccaatctacacgccagaggaatggtctgaatctggtgaccgctacgccggcggaacgaccgggcttcttatctgggccgtcaccctcgccggcctcctcggcggcggcgtcctcctcgtcgacaacaccagcgctctcgccggctaagagagcatctacgtgtaacacagggccgggtctctgcttgcatgcacgtctctgtaatctacgtagctacctcctgtgaatgtatgcaatcaacgatgcaaagtaattgattcgaacagatggtttatgtatgtacgtaacgcagttaccatatactccctacatcggaaactgtaaaagggtggattcttggagcccgtatgcacgcaccctctaaaaaaaaacgattagtt

SEQ ID NO: 435650 - DNA, 392 bp, Triticum aestivum
cactcttctgcatagctcccagcccagcttattccctcttccacgcttccattccagcgccccactgaccacgcgccaccacgagcaacacccatggcgcgcaccggcgccgccgctgccctcttcgtgctcgtctgctgcctcctcgtcggctctgtcccggcgcgcctccccgtcgagcttccgacgcaggtggtacccgaagccgttgacctcctggccaccgccgagccgcttctggccaagcagttggcggctgccgaggcggccaacccgaccaaagtccactccatgataacagaggaggaggagaatggtggttcacccggcccgccagcgcccccagatcatccggtgcggcggcggagacgacgtggcggtctccgacgagt

SEQ ID NO: 435651 - DNA, 574 bp, Triticum aestivum
cccacgcgtccgcccaaatcccccacccgaaccctcggaatccctctctcgccgccgctgacccctccgccgatctccccgccgccgacgagatgtctcgccgctacgacagccgcaccacgatcttctcgccggagggccggctgtaccaggtccacctcgcctgcgccgccgccgggatcatgtccgacgccaacatcctcatcaacaccgcccgcctccacgcccagcgctacgcgctctcctaccaggagcccatccccgtcgagcagctcgtccagtccctctgcgacaccaagcagggctacacccagttcgggggcctccgccccttcggcgtctccttcctcttcgcggggtgggacaagaaccacggcttccagctctacatgagcgacccctcgggcaactacggcggctggaaggccgccgccgtcggggccaacagccaggccgcccagtccatgctcaagcaggactacaaggacggcatgacccgcgaggaggccgtcgcccttgccctcaaggtcctcagcaagaccatggattccactagtttgactgccgataagct

SEQ ID NO: 435652 - DNA, 843 bp, Triticum aestivum
cccttatagaagaagcagccgcagccgcagcgcgagcccgctaggaaaccctaccgccgccgtagcaggagcagccatgggtatcgacctcgtcgccggcgggaggaacaagaggaccaagcgcgtcgcgcccaagtccgacgatgtctacctcaagctcctcgtcaagctctaccgattcctggtgaggaggaccaagagcaagttcaacgccgtcatcctcaagaggctcttcatgagcaagactaaccgcccgccgctctccatgcgccgcctctccaacttcatgaagggaaaggaggagaagaacattgctgcggttgttggtacaatcacagatgacatgcggatccaagaggtcccagcaatgaaggttaccgctctgaggttcacagagacagcgagggcaaggattgtcaatgctggtggggagtgcctcacttttgaccagcttgcactccgtgctccaactggggagaacactatcctgttgaggggacccaagaatgcccgtgaggcggtgaggcacttcggcaaagcacctggtgtgccgcacagccataccaagccctatgtgcgctccaagggtaggaagtttgagaaggctcgtggtaggaggaacagccgtggcttcaaggtttaagtcgccctttcttgttagtcgctgtttgcgtggagcggctgttgttctgtttgagcaattgacagtaattagtaaagtactttgtactgagagtagcaaaatctatcgccccagtgtttgaatgatattttgcaagattcttatcgctgtcaactcttttgattttgtgagcttgaagaccatgtttcgttgcaaccaat

SEQ ID NO: 435653 - DNA, 563 bp, Triticum aestivum
agcaccggagccggcctcccacacactgttcaacgacaagagcagctaccgcgagctctctgagatcgctgagcaagcaaagagaagagctgagattgcaaggttgagggagctcaacacactcaagggccacgttgaatccgtggtgaagctcaagggccttgacatcgacaccatcaaccagaactacaccgtgtgaggagtatcgacattggaccaacaaacatgacatccgtattggagcgagattggaatggagctccgctttaagatttttccggtgaatgaatgaaacaaacatggctgatctgaccagcccctagttgtaaagtgctaccaaatatatggtttcggttgtccgtcttctagagaggttttaatgttctagtggagttataccgtgtttggacgcacggcgtggttgtaattgttttcgcgttttacccagtttcccctaactagtcggtgatcttgcggaagcaagacgagatataatcactgcaaattttctgccccatgcttgctatcccttcccttgggtttatacaaagacaattctcgtc

SEQ ID NO: 435654 - DNA, 519 bp, Triticum aestivum
gaccgttctgctgctgccatgaaagccattgcgggaattatctcttcgcagcaaactatgaatgtcccctgccagaaggaacttggcagaaatggcgaagacagtgaactcccggagcaatcagaccttttggtaaaagagtgaaagggtagcaatcctgcatgagaagatccctggtatttttgcccgcaaacatcttcatgagtgccagcgaagttattcactgtttgccatgaaggacacagttacgcaggggggacaatcctttgatatgtatcgctcatgttatctgtagctttctaatggattaggtagagcgtggttggcatctacatcaaaacttgtcttttgttcacctcaagttctagttggatttcacaccctgttttatacatagataaataccatttggttcaaaatgcaacttctgcaagtatgcctttctaatttttgttttccacttgatgttgacatacgtggatctgggttacccttaccttatgatactatatcatttct

SEQ ID NO: 435655 - DNA, 285 bp, Triticum aestivum
ggggactctaagcaacggatatctcggctctcgcatcgatgaagaacgtagcgaaatgcgatacctggtgtgaattgcagaatcccgcgaaccatcgagtctttgaacgcaagttgcgcccgaggccactcggccgagggcacgcctgcctgggcgtcacgccaaaacacgctcccaaccactctcaacgggaatcgggatgcggcatctggtccctcgtctctcaagggacggtggaccgaagattgggctgccggcgtaccgcgccggacacagcgcatggtt

SEQ ID NO: 435656 - DNA, 271 bp, Triticum aestivum
cccacgcttccgcggaaatgtcaagaccgaatcaggaagctctaccaagttgcctgacccaccagccatctaccagaagccatgattgtaagcattcggaccgtgcggcttcttgcatgtgtttttggcagtaaaaagacgaagtgacgagtggtagtctcgagtgtctgacccatgtatacatgtagcatggattattaagctgtaatatgtatagtcgattaaatgagccgcgaggcagaattttcttggctaaaaaaaaaaaaactaa

SEQ ID NO: 435657 - DNA, 568 bp, Triticum aestivum
gacagtcaaatacacactcatataaaaagagttatgaatttacagatggtgtttcatgtaactttgattcaaagcattacacacagtggttcatgcagcacaaactaaaacgcaaagcaggtgttgccgcacagcagcagcattctcgcctccatacacaggcggataccacagtgaccatccacacataataccactgtccaccacaagccaagcaagacactacacaacgagatactgactcctaacagctattaggtaacaatagaactccgggtagctcttattgttactgcgtcgggatgggctgcatctcaggagctgtggcaggcgcagtgtcggcggccgggttggcgaaaacccttgcaatgcgctcagttgggacgagcggcaggtaggtggcgacggagttgccacgcttcgcgccatcgagcacggcagagttgtacttggctgagagctgtgctgccgtggggaggacggcacgggtcaccgaggggacgagcgggaggcggttcagggcggcccaggcttcagcagccttgcgctccgccaccggacgcgaaaa

SEQ ID NO: 435658 - DNA, 863 bp, Triticum aestivum
tagttgctcaggcgagggaggaggagagcggcggcgaagatggtgtcgctgaagctgcagaagcgcctggcctcgagcgtcctcaagtgcggcaagggcaaggtctggctcgaccccaatgaggtcaacgagatctccatggccaactcccggcagaacatccggaagctggtgaaggatggtttcatcatcaggaagcctcagaagatccactccaggtctcgtgcaaggagggcacatgaggccaagcagaagggccgtcactctggatatggtaagcgtaggggtaccagggaggctaggctccccaccaagatcctgtggatgcggaggatgcgcgtcctcaggcgccttctgcgcaagtaccgtgaggccaagaagatcgacaagcacatgtaccatgacatgtacctgaaggtcaagggtaacatgttcaagaacaagagggtcctcatggagagtatccacaggtccaaggctgagaaggcaagagagaagaccctctctgaccagtttgaggccaagcgcgccaagagcaaggcaagcagggagaggaagattgccaggagggatgagagattggctcagggcccgagagatcatgcaccagcaccagcggctgcagctcccgctcaggcagcagctgcacctaagaaggccaagaagtgaacgtctgataagaagctttatctttctggtaatatcaagggttagcctaattttggaacatcagaagttcagaactgttttctgtgcaatatcttgtttgtgtcagcgtgtcggataccttaaatatcatatcgtgtttgttctgttggatgtatcaatcagatatgcttatgcatagtctgttaaacataaaa

SEQ ID NO: 435659 - DNA, 427 bp, Triticum aestivum
tttcctacgcgtccggcaagagcctggcacctgagtatgagaaggcggcccaactgttgagcaagcacgacccagcgattgtccttgctaaggttgatgccaacgatgagaagaacaagccgcttgcgggcaagtacgaggtccagggcttccctaccctcaagatcttcaggaacgggggaaagaacatccaggaatacaagggccccagggaggctgagggaattgtcgagtacttgaagaagcaggttggccctgcttccaaggagatcaaggcacctgaagatgccacttaccttgaagacggcaagatccacattgttggtgttttcactgaattcagcggcactgagtttacaaacttccttgaggttgctgagaagctgaggtctgattatgactctggccacaccgtgcatgccaacca

SEQ ID NO: 435660 - DNA, 473 bp, Triticum aestivum
tgatggatcataaaagcgggactgaacttgtgctcacttatgaggataaggatggcgattggatgcttgttggtgatgttccatggcgaatgttcacagacagctgtaggaggatgaggatcatgaaggggtcagatgcagtgggcctcgctccgagggccgccgagaagagtaagaaccagaagtagcaagaacgatgaacccgatctgtttcctttcctgcgatcgcatcttacaagggtgatggactttatgtgtgatgagaaagggatttacttatatatataacctacgtgtattctctttgttatttccttgtatgttcgttcggaacaagcatgttagattgtgtaagctgatgtgtgtgtatctactactactgcactactttgatttgattcgcgtgtgttgtatgcggtttccgttgtaaattggtgtgctctgtctgtaccgcaaactcttttctttcatct

SEQ ID NO: 435661 - DNA, 417 bp, Triticum aestivum
gttccgtgagtgcgagctcatccacggccgctgggccatgctcgccaccctcggcgccctcaccggcgagtggctcaccggcgtcacctggcaggacgccggcaaggtggagctggtggacgggccgtcgtacctggggcagccgctgccgttcacgctcaccacgctgatctggatcgaggtgctggtgatcgggtacatcgagttccaccgcaacgcggagctggacccggagaggaggctctaccccgggggctcctacttcgacccgctggggctcgcggcggacccggtgaagaaggagactctgcagctggcggagatcaagcacgcccgcctcgccatggtcgccttcctcggcttcgccgtgcaggccgccgccaccggcaaggggccactcaacaactgggccaccca

SEQ ID NO: 435662 - DNA, 967 bp, Triticum aestivum
  unsure (1)..(967): unsure at all n locations
ggngnngnagtgttaccctgccggtttcggtcgccaattcccgggtcgacatgggcgacatgctgatgatggacaggttccgtcaatggcaggccacgcacaaccggtcgtacctgagcgcggaggagaggctgcgtcgcttccgggtgtaccgcgacaacgtggagtacatcgacgccaccaaccggcgcggcgacctcacctacgagctcggcgagaatgagttcgccgacctcacccaggaggagttcctagccaggtacgcgtcgtcctacgatggggtcggtgatgatactggcatcacgttgcctgtgggcggtggcgacgccgagctgtggtcgtccggcggcgacaatgatagctccttggaggctccgcctcccagctgggactggagatccaagggcgccgtcacaccggtcaagtcccaaggcgcaggatgcgctagctgctgggcgttcgtgacggttgcgacgatcgagactctgaactggatcaggacggggcagttggtgcccctctcggagcagcagctggtggactgtgaccagtacgacggcgggtgcaaccgcgggtcctttcacagggcctacaattggattgtggagaatggcggcctcaccacggcagcggattacccatacacggcggtgaggggcgcctgcaaccgcgccaagtccgcccatcacaccgtcaagatccttggcggcggcgtgatcccgcccaggaacgagcccgaaatgcaggtcgccgtctccgggcagcccatcggcgtggctatcgaggtcggcagcggcatgcagttctacaagagcggcgtctactcgggcccctgcgggacaaatcttgctcacgccgtcaccatcgtcggctacggcgtcgatgcccctactggggccaagtactggctcgtcaagaactcgtgggggcagacgtggggtgagagcggctacatcggcatgcgccg

SEQ ID NO: 435663 - DNA, 800 bp, Triticum aestivum
tcccacgcgtacgcccacgcgtccgcggacgcgtgggcagcacacaactctctccacccccagcaatccaccccttacccctccccggcggatcccctcccctcccgagctcggcaatggcaaacgcatcatccggagctgggatccatgatgactgcaagctgaggtttgtggagctcaagtccaagaggatgcaccgcttcataacctacaggctggagaaccagaaggaggtcattgtggaccaaactggggagcgcgaggccacctatgaggacttcaccaagaccctccctgagaatgactgccgattcgcggtgttcgacttcgacttcaccaccccggaggatgtgccaaagagcaggatcttctatatcttctggtccccggacaccgcaaaggtgaggagcaagatgacgtacgcgagcaccaacgagaagttcaagaggaccctggacggcatccagatcgagatgcaggccactgaccccagcgaaatcagcctggacgtgatcaaggagcgcgcgcactaaggcaaatcatcccaatgcctcgcaatatggatttatgtcaaatatagatttggcggtgtgactcttgaaactttcttgatgattcgtggctttgttaccgtgtcgaaaggccctcctcccgtggtccgtgtgaccacggagggcttgctctatcatgtaatctgttctttttcttctgcccatttatatgccgggccttatgctgctgcactgcactgttcctccaagttacggttataaataattaaatgttctgtttggattaaa

SEQ ID NO: 435664 - DNA, 491 bp, Triticum aestivum
ttcgcgctactcgtccgatcagagcagattaaggcagagacacagagcagagcggataaactcgagggcgagtcgatcatcaccacaccaaccatgtcgtgctgcggaggcaactgcgggtgcggatccggctgcaagtgcggcaacggctgcggagggtgcaagatgtaccctgagatggacgagggggtgaccaccacctcccagaccctcatcatgggcgtcgccccctccaagggcaccccgtcgttcgaggccgccgccgagaccggagccgacaacggcgggtgcaagtgcggctccaactgcacctgcaacccgtgcacctgcaagtgatccatcaaatcaggacaaggagatggcatggcatggatggacctaatgaaggagcactagtagtagttatgcatggtgtgtgcgtttgtgttctctttttaattgccgccgagaataagacgagatctatcgtatcgtatcgtatcgtatcgagc

SEQ ID NO: 435665 - DNA, 574 bp, Triticum aestivum
tcctcgcttccgcgccgccgtctcctcctactcttcgccgctcccgctcccgccgccgcgccaccgccgtcagccatggcaccgaagaaggagaaggccccggcggcgtcgtccaagccggccaagtccggcggcggcaagcagaagaagaagaagtggagcaagggcaagcaaaaggagaaggtgaacaacgcggtgctgttcgaccaggccacctacgacaagctgctcaccgaggtgcccaagtacaagcagatcacgccctccgtcctctccgagcgcctcaggatcaacgggtcgctggctcgcagggccatcaaggacctgatggagagggggctcatcaggatggtgtcaatccactccagccagcagatcttcaccagggccacaaacacctgatttacctcatgtgttggctgcctgttttctagtccagtagactgagatgtcgctgttatattgacgttcattatgttcagcgaggcactttggcacttcgtgccacaagtatgttgaattgcttttgagtttttggtacaatctaagacgcaatgaaatctaccttatatta

SEQ ID NO: 435666 - DNA, 383 bp, Triticum aestivum
cctacgcgtccgctacccgctgagtttaagcatataaataagcggaggagaagaaacttacaaggattccccgggtgccggcgagcgaaccgggagcagcccagcttgagaatcgggcggctgtgccgtccgaattgtagtctggagaggcgtcctcagcgaccgaccgggcccaagtcccctggaaaggggcgcctgggagggtgagagccccgtccggcccggaccctgtcgccccacgaggcgccgtcaacgagtcgggttgtttgggaatgcagcccgtgcccaagaccgtgtgggcgcagatcttcgtctggctcgtaaaacccggagcggggatcatgatcatggacccctacggcgccgtcatcagcgccaccccc

SEQ ID NO: 435667 - DNA, 731 bp, Triticum aestivum
tttattcccacgcgtcgacccacgcgtccgcccacgcgttcggtgcgatctgcactactcacggtaagaaccacaaccaccacaagtgagtgaccgtcggagcaaggaaaggccaggagagatggcaatgaggccgctcgtcgtcctggccctggccgtggcgctggccggcgtggcgctgggagggggcgcggcggagggggccggcgagtgcgggaggtcctcccccgaccggatggccctgcgcatggccccgtgcatctcggcggcggacgagccggactcggcgccctccagcagctgctgctcggcggtgcacaccatcggcaagagccccagctgcctgtgcgccgtcatgctgtccggcaccgccaagatggccgggatcaagcccgaggtcgccatcaccatccccaagcgctgcaacatggccgaccgccccgtcggctacaagtgcggagattacacgctgccttgatggcccagctctggtgctgatcaagatgaatgctgtggaaggtgccgccgtgtgggaataagcgagtggtgcatgtaccacttaagtggggcactagtgactgcatggtgcctacatgtgatgtgtgcttgtgggaatatttctataagcatgtaatgtttcgtctgtgttaacgtgaacacacgtctccgtgtgatttctattgtcaaaaaaaaaaaaaaaaaaaaatagcatgaggaacaaaaaaaaacaa

SEQ ID NO: 435668 - DNA, 648 bp, Triticum aestivum
gtcaaccactcccacttgctagctagcagcagccatggccgccctctcctctgcagcggtgaccgtcccttccttcgccgctaaggccgccacccccatgcgcggcagcaggatggtggtgcgcgcgtccctgggcaagaaggccgccagcgcggccgtggccatggcggccagcgcgatgctgctgggagtgggcgggtcggcgatggcgcaggacgtgctcctgggcgccaacggcggcgtgctggtgttcgagcccaacgacttcagcgtcaaggccggggagaccatcaccttcaagaacaacgccgggttcccgcacaacgtggtgttcgacgaggacgcggtgccctccggcgtggacgtctccaagatctcccaggaggagtacctcaacgcccccggcgagaccttctccgtcaccctcaccgtccccggcacctacggcttctactgcgagccccacgccggggccggcatggtcggcaaggtcaccgtcaactaataagctgtcttgttgcgaattgttgcgggtgggttgatcgatcgggcgtgtcatgcatgcatgcatattgattaattgtacgaacgtacgctatatgtatatgttttctactattataagatgagatgaggctcttgctgata

SEQ ID NO: 435669 - DNA, 605 bp, Triticum aestivum
  unsure (1)..(605): unsure at all n locations
tgatcttccattgcctgggtcaggctatgaaaaggcacagaacgctcggcggttcatgatctatgttcactccaagatgatgatagttgacgacgagtacatcatcgtcggatcagccaacatcaaccagcggtcgatggacggggggagggactcggagattgccatgggcgcattccagccgcaccacctgaacaccaaaggccaggttgccagagggcaggtccatggcttccggatgtcgctgtggtatgagcacctcggcatgctgcacaacgacttcctcaacccgggaagccgggagtgcgtccagagggtgaacacgatggctgacaagtactgggacctctatgccagtgatgagctgaacgacgacctccccgggcaccttctcacctacccggttgccgtgacgaaggacggcacggtgacagagctgcccggcgcgaggtgcttccccgacacggctgctccggtgctcggaatcaaatccaaacacctgccccctattctcaccacatanggtgcatttgcagagttgcaatctatacaatgctagatgctgcttctggatataggatgcattttcagcagtgtaagcttgt

SEQ ID NO: 435670 - DNA, 416 bp, Triticum aestivum
cgcccttcccctctcttccttcctcccccgtcgtcgcggctccagcttagggtttctagcccccgccctcccgcctcaccgccggccccgtacgccatgtcgaagcaaggagggaaggccaagccgctcaagcaggccaaggtcgccgagaaggactacgacgagaatgacctggcatacctccagaagaagaaggatgagcaaaaggccctgaaggagctgaaggccaaggcaggccagaagggtgcgctgggaggatctggtctcaagaagagtgggaagaaatgagtctgcccacccttacgtaatgcccagaaaatgataatctatctatctacctatctgtgtcgcgcttcactatctgtggctgtaaaagactaccttcagctgtgttgagcattaagcattgtcgcagt

SEQ ID NO: 435671 - DNA, 459 bp, Triticum aestivum
tatccccccattctcattctgcacggcacagcacagcacagcacagcggagaagaggaaggagagcagagatgactgcgtccgtctcctacgggctgcgagcacttccgacgtggtccagctctgtgtccggtgacgaccactgctcggcgctggccatgtcggtgtcggcgcgggggccccggtggacgcggccccttcggacgccggcgaggatgggcaatgtaaacgagggcaagggcatcttcgcgcccctggtggtggtggtgcgcaacatcgtcggacgcaagcgcttcaaccagctcaggggcaaggccatcgcgctgcactcccaggtgattaccgagttctgtaagaccatcggcgctgaccccaagcagaggcagggcttgatccgcctcgccaagaagaacggagagaagctcggattccttgcttgacctgcctcacaatccccctt

SEQ ID NO: 435672 - DNA, 480 bp, Triticum aestivum
gatgacgaagaaggagctgggcgagacccacgacgtcctccgcttcggcgtcaacgacagcgtccgcggcgacctcgcgccgccgcaccccgtccgggccaccatccacaaggagaccaagttctgggacgacaagaagaggttcgggaccgaggccatctacgggtccgccttcaacatccgcagggatctcgacgcccagatcctctccaggttccaaaggcccccaggtgcattgccatcatcgatgctaggatatgaggcgatgacaggttccttggatgattttggatttgaagattaccttaacttgccccaggactctgacagcctgcgcataccggacatgcaccacgggatggaggttcggcttggcctgtcgaaggggcctgtctgccccagcttcagttgattccttccacccatgtatttgtcttgtgcttcccgtccagcatctatggcagtttcatggattggtga

SEQ ID NO: 435673 - DNA, 417 bp, Triticum aestivum
aagatgttcgggaccgaggccatctacggatccgccttcaacatccgcagggatctcgacgcccagatcctctccaggttccaaaggcccccaggtgcattgccatcatctatgctaggatatgaggcgatgacaggttccttggatgattttggatttgaagattaccttaacttgccccaagactctgacagcctccgcataccggacatgcaccacgggatggaggttcgccttggcctgtcgaaggggcccatctgccccagtttcaattgattccacccatgtattagtcttgtgatacgtcgtgctccccgtccagcatctataaccagtcactagactgtatcatggatttgtgaaacgcgagaactaaattggcattgcatcagtttgaaattccttaacttcgattgg

SEQ ID NO: 435674 - DNA, 726 bp, Triticum aestivum
tcgcccactcgtgcgcccacgcgtccgcggcccatctgagcttgcccgcaaggaagctgcctggggtcttgcccgttacgcggccatctcacaggacaatgggctggtgccgattgtggagcctgagatcatgctcgacggtgagcacggcatcgagaggaccttcgaggtcgcgcagaaggtgtgggcggagaccttctactacatggcccagaacaacgtcatgtttgagggcatcctcctgaagccaagcatggtgacccctggtgccgagtgcaaggacagggccacccccgaggaagtggccagctacaccctcaagctcctccagagaaggatccccccttccgtccccggcatcatgttcttgtctggcggtcagtcggaggtggaggcgacgctgaacctgaacgcgatgaaccaggcgccgaacccgtggcacgtgtccttctcctacgcgcgggcgctccagaacacctgcctcaagacgtggggcgggcggccggagaacgtggccgcggcgcaggaggcgctgctgctgcgcgccaaggccaactccctggcgcagctcggcaagtacaccagcgacggcgaggccgcggaagccagcgagaacatgttcgtcaagaactacagctactgatccgtcggcgagctgtctatctaattatctacctatggagggagagtgctagtagcgccttgagcagcttgagggcaccttag

SEQ ID NO: 435675 - DNA, 973 bp, Triticum aestivum
tcgtgtttttctcggtgaatacaagtggacagtttgttggtgttgctgaaatgactggtcctgttgattttgaaaaaactctagagtactggcaacaagacaagtggaatggttcattctctgtcaagtggcacattgtcaaggatgttcccaacaacattctcaagcacatcgtccttgagaacaacgagggcaagccagtcacaaacagccgtgacacacaggatatcaaccttgagcaaggtatccagatgcttaagatattcaaagagcatgtcagcaagacctctattctggaagactttgccttctatgagaaccgccagaagttgatgcaggagaagagaataaaacaacagcagatccaaaagcaggtgtgggacagcagggctccgaaccctgttgctggagagaaacaacaggaagtcgccaacgggaagccaaaagtatctgtaccgaacggtgtcagtggagagaaacagcaggatgctgtcaatgggaagccaaagtcgcctgtagcgaatggtgttaacggggatgcgaaggttccggcagagaaagccgctgccaccgctgctcctccagccgttacctacgcggcgaaggtggcccaaacagcagcggccgagaagaagcctgtggcgaccgagaagaagcctgtcgtcgccaacggtgctgtcaagaccggtgtagctgcttgatcgcatacccgatcctcccagctagccatgaagaacaaacggacggtgctggcgaaccaggcgagacatgcggggtcccaaggtactgatcaccaaaggtggctgctggaaagcgggtcggatagttaggtttccctagctctctttttctcctgtcatcgtcgtattatccgtatttcagtttgcttagctctaaagactcctcctatagtggtatcatcggaatcaccagaaaaagagaaaagagaacctgtggcaagacaaaggtagtg

SEQ ID NO: 435676 - DNA, 743 bp, Triticum aestivum
cgggtcgacgggaaaaaggagccatggatttcctgcaggggcggagcgtcgagaccatggtggccgtcgccgtcgcggtcgtcgccgtcgccgtgggcggcgcactcctcctccgccgatccaagaggcccaagggctgcttggatcctgagaacttcaagaagtttaaacttgtggaaaagacacaaataagccataatgttgccaaattccgatttgctcttccaacccctacctctgtgttaggccttccaattgggcaacatatcagttgcagaggtcaagatgctacaggtgaagaagtaatcaggccttacacacctactacattggattctgatctcggaaattttcagcttgttataaagatgtaccctcaaggaagaatgtcgcatcacttccgtgaaatgaaagttggtgattatatgtctgtgaagggacctaagggtcgtttcaagtaccaagtaggacaagtgagagctttcggaatgctggctggtggatctggcatcactccgatgttccaagttgcaagggcaattctcgagaaccctaatgacaaaacgaaggggcatctagtctatgcaaatgtcacacctgaagacattcttctgaaggaagagctggacagcctggccgaagaatatcctgaccgcttcaagatcttctacgtgttgaatcagcctcctgaagtctggaatggtggtgttggctttgtgtcccaggacatgattaagactcac

SEQ ID NO: 435677 - DNA, 509 bp, Triticum aestivum
tcgcggttccggaggagacccgaggaagaaggagaagcggcgcggcgaggcgcggcgaggagaaagatggggaagatgccggtgcggatgaaggcggtggtgtacgcgctgtcgccgttccagcagcaggtgatgccgggcctgtggaaggacatcaccaccaagatccaccacaaggtctccgagaactggatctccgccacgctcctcatcacccccgtcgtcggcacctaccagtatgcgatgtggtacaaggagcaggagaagctgtcccacagatactaaaggtggagctttctccaatatcgcagcagttggaatttccatgttctataatccaccaagagtgatttaacattttcggaatcacttctagttgtacccttttgctctttccgttgcatatgcaatgatgcagcaagtgtgacttgcaaacctattttgaggcctcaaatgttgagttgctcatcactggagtgattttgtgcaataaagcaaattaaccagtc

SEQ ID NO: 435678 - DNA, 293 bp, Triticum aestivum
tcccactcgtccgacccactcggcggcggcggagcacgcgaagatggtgaagttcctgaagcccggcaaggcggtgatccttctccagggtcggttcgccggccggaaggcggtcattgtgcgcgttttcgaggagggcacacgcgaccgcccctacggccactgcctcgtcgccggcctagccaagtaccccaagaaggtgatccgcaaggactcgtccaagaagacggccaagaagtcgcgcgtgaagtgcttcctgaagctggtcaacttcacccacatgatgcccaccc

SEQ ID NO: 435679 - DNA, 442 bp, Triticum aestivum
ttcgcggggtcacgggagcatcttatgggatggaagcggttgcggagggcaaggcccagtaaccctgaaagaagaaagacggccctgcccctgatgtttggcaggaaaggggcgtgtgttagctgatgtaatgttacaccgtagaatcatcgttcgtgacgataataatgatccgaccagaactcctctagtatcattgttctgttgtcattgtgtagtttactctgtatctgaactttgttttactcagcgaaaccgtactgctatgatgaatgtgtcgatgtaaatcgtggctgtcgtgcctgtctgactgatacattgttcatcgtagtcgatgaatgatagcacctgtgtcgtctcagtttcaaaaaaaataagaaactaaaacaataaagaaaagaaaaaaaaaaaaaaaaaactcaaaaacaattacataacactt

SEQ ID NO: 435680 - DNA, 742 bp, Triticum aestivum
cccacgcgtcctcgcctccaccccacccgtcccgacccctctcctccaaggtaagcccgcggcggcggcgagcgagcgagcggcggcgatgacgacccgcttcaagaagaaccggaagaagcgcggccacgtgtccgccgggcacgggcgtgtgggcaagcaccgcaagcatcccggaggccgcggtaacgccggaggcatgcaccaccaccgcatcctcttcgacaagtaccatcccggctacttcggcaaggtcggtatgcgctacttccacaagctcagcaacaggttctacacaccgacggtcaacgtcgagaggctctggtccatggttccgtccgacaaggcggcggaggccggcggcgacaaggcccccgtggtcgacgtctcgcagttcggctacttcaaggtgctcggcaaggggatgctgccggagaagcccatcgtcgtcaaggccaagctcatctccaagatcgccgagaagaagatcaaggccgccggcggcgctgtcgtgctcgttgcctagggttctgttcgcgactgtgccttgagatctattatatctttactattagttgtttcccgtaccagcaatttgtgttgaacaagacatcgttagtttgttatccttgttcctgtgtggtaaaccaacatcttatgagaattttgcgatatgttaaaacaaaaaaaatttctagaaacaacacaaaacttaacaaaaaatgaaaacatatagtagaac

SEQ ID NO: 435681 - DNA, 349 bp, Triticum aestivum
  unsure (1)..(349): unsure at all n locations
gggtcgacgcggccaagctcatcaacaagatcgccgagaagaagatcaaggccgccggcggcgctgtcgtgctcgttgcctagggttctgttcgcgaccgtgccttgagatctattacatctgtactattacttgtttcccgtaccagcaatttgtgttgaacaagacatcgttagtttgttatcctggttcctgtgtggtaaaccaacatcttatgagaattttgcgctatgttatgccagtttatatcagacgagttatccataatttgagtgcagcatcaacatgtttcaacatcacttttgtgcatcctgatgtcctnnnnnnnnnnnnnnnnnnnnnnnnnnnn

SEQ ID NO: 435682 - DNA, 482 bp, Triticum aestivum
  unsure (1)..(482): unsure at all n locations
aagaatagattggatctatccggctgcactttataatattttttagtatttttcggataaataagaaaagggtgcacgatctcgacgaattacttctgaataaattcagaaatcatatggaaagaaccatagcatttcgcgactcattggtaaatcaactttgattctctataaaccaagaatgtgagaccattaacacggttaaagctaaactgcttgaagtccaggcaaaaagaggtactctttctacaactatattagtattagtaccgaatttaaacgggaaatagctaatgtaaaatttatctgatatagaacactcatatcgataaaatggtttgaactatttactagaaaaaaaaagggggcaccctgcccttttttaaccaatgccgaatcgacgacctatgtataaaaaagagaaattctttggatttgaagaaaaaaaaaaaagaattctattaattntcattttccattta

SEQ ID NO: 435683 - DNA, 446 bp, Triticum aestivum
ttatatttcttgctctgtatctgtgtgccgagtgctagacgtgagagagcgagagaccgagggacatcggccgagaaggttccggaaggatgcctcgcgcggggttgtcggcggggtcgagcaaggtggacgtggccatcgacctcgggaacccgctcctcaaccgcaccgtcgacggcttcctcaagatcggcgccgtcggcgcctgcagggtggccgccgaggacgccttcgactgcctccaaagtgggagtgtctcgaagcgcaagcttgagaagacactggaaaaaatgtgcaaggagggcgcatattggggtgctgttgctggagtgtatgtaggcatggagtatggagtggaaagggtccccggagagtatgactggaaaaatgcgttgattggaggcatcgcatgcggcgccctgatctctgctgctagcaacaacaaa

SEQ ID NO: 435684 - DNA, 264 bp, Triticum aestivum
agctttcccaacaaccattcccccagcaaccacaccaacctcaacaaccatatccacaacaacaaccatatgggagtagtcttacaagcatcggtggccaatgaaatgaacacctgtagtactagaccgggggatcatcgttgtttagtcaatggagcgttcaatgtaacgatgataaataaagtgatgtgcaccatcatgtgtaaccccgacctatactagttcaaacatgggaataaaagacaaagaaagttcttgtcacat

SEQ ID NO: 435685 - DNA, 535 bp, Triticum aestivum
gccgtcggcccgccgccgcctttctggcagcttctcgggggcctgcttcctgtgccggagggagctcagtcccgacaaagacgtgtacatgtacaggggtgaccaggggttctgcagcgaggagtgccggggacagcagatcttgtcggacgaggcgagagagcacgaggccatgatcagcaaggagcgtcgaggtctggctcaccgccgtcaccaccccgggccacgcccggcgccgccgggggcgatccggggcgcgccgaggagattactggcggcagcctagcctgattatgcataataacgcatgcacgaactatgacatccatgagcagatcgatcaagaacctatgatgctggaaagttaattacaagtaatcgaggggcaaatcaaggcgcccatttgcatatatggcgaggtgagggtgagaatcttgagatggtatgaatatgttagagaagacgttgaagcagggtgcatgttttttcttcaggctggttggttcagatctgtagtcatgatgcaaacaaatgt

SEQ ID NO: 435686 - DNA, 465 bp, Triticum aestivum
tctcctcacacgtccgcggacgcgtgggcggacgcgtgggcttataatcattctctcgcccgccgccgccgccgctcccgccgctagaccagctcgccagcagcaatggcccggatcaaggtgcacgagctgagggggaagaacaaggcggagctgcagggccagctcaaggacctcaaggcggagctctccctcctccgcgtcgccaaggtcaccggcggcgcccccaacaagctctccaagatcaaggtggtgcgcacctcgattgcgagggtgctcacggtgatctcgcagaagcagaagtcggcgctgagggaggcgtacaagaacaagcgtctcccgctcgacctccgccccaagaagacccgcgccatccgcaggcgtctcaccaagcaccagctctctttgaagacggagagggagaagaagcgcgagaagtacttccccatgaggaagtatgctatc

SEQ ID NO: 435687 - DNA, 703 bp, Triticum aestivum
gagcgctcatatatcctcgagacctccagatctgtggtctgttgcagtctctgcctcctcacaacaacaagcccctgcagatggacaccgccatgcaccccgccgccggcgacgacgacgtcctcgccgacctgctcaccgtcggcaccggcaccgacaccgagggcattatttgtggtatgccagacttcaagatgggtggaaagaggggcgatgaatctgcccctactgatgctggtgatgaagatggcgaagatgacgacggggatgaggatggtgacttcgcggagggcgaagaggaaatctcggaaggagaggagtatgacaaccccaaggccagtgacgccaagaagaaacaaataggcgagggtgaggagaatggcgaggatgatgaggaagaacaagaggagcaggagggtggaggaggtgacgacgatgatgatgacgacgacaacgacgatgacaatgaggacgacgacgatgatgacgatgatgtcgctgctgaagacgatggagatggagtagaagaggaggatgatgacgatgaggaggaggaggacgatgaggacttgctccagcccccgaagaagaggaagaagtgaagcccttcgacgcggctgctttagtcaccatgcgacgagatgtgcctgtccttcactgtgttctggaaactttccttagagttaaaaatgcccccacacga

SEQ ID NO: 435688 - DNA, 421 bp, Triticum aestivum
gggtcgacggggatgaggatggtgacttcgcggagggcgaagaggaaatctcggaaggagaggagtatgacaaccccaaggccagtgacgccaagaagaaacaaataggcgagggtgaggagaatggcgaggatgatgaggaagaacaagaggagcaggacggtggaggaggtgacgacgatgatgatgatgacgacgatgatgacaatgaggacgacgacgatgatgacgacgatgtcgctgctgaagacgatgaggatggagtagaagaggaggatgacgaccaggacaacgacgatgatgaggaggagacgatgacgaggactcgctccagccccccaagaagaagaagaagtgaagcccttcgatgccggctgctttagtcaccatgcgatgagatgtgcctgttcttcactgtgtt

SEQ ID NO: 435689 - DNA, 875 bp, Triticum aestivum
tgcccgctcctcctccccgtccgtccccacacacacacgcacgcgtttgacattttccgcccaccaccgccggagggagcgagctccagccatggccgccaagtgctacccgacggtcagcgacgagtacctggccgccgtcgccaaggccaagcgcaagctccgcggcttcatcgccgagaagaactgcgcgccccttatgctccgcctcgcgtggcactcggccgggaccttcgacgtggccaccaagaccggcgggcccttcggcaccatgaagtgccccgcggagctcgcgcacggcgccaacgccggcctcgacatcgccgtcaggctgctcgagcccatcaaggagcagttccccatcctctcctacgccgacttctaccagctcgctggagtcgtcgccgtcgaggtcaccggcgggcctgaggttcccttccacccggggagacaggacaagcccgagcctcctccagaaggccgtcttcctgatgctacccaaggctctgaccacctcaggcaggtgttttccactcagatgggtttgagtgaccaggacattgttgctctttctggtggtcacaccctgggaagatgccacaaggagagatccggctttgagggagcctggaccgccaaccctttgatcttcgacaactcttacttcactgagctccttagtggggagaaggaaggccttcttcagttgccgaccgacaagaccctcctgactgacccggccttccgcccacttgtggacaaatatgctgcggatgaggatgctttctttgctgactacgctgaggcacacctcaagctatccgaattgggatttggcgaggctgttgacggctgctgctgattcaagctcggcg

SEQ ID NO: 435690 - DNA, 480 bp, Triticum aestivum
aacgcacgcaaaggccgaggaggacaagctaggaggagcgagcagccatggcttcgtcggtggccgccgcggcgagcacgttcctcgggacccggctggcggacccggcgccgcagaacgggcgcatcgtggcgcggttcggcttcggcaagaagaaggccccgccgaagaaggccaaggcgcccccgaccaccgaccggccgctgtggttccccggcgcgcaggcgcccgagtacctcgacggcacgctcgtcggcgactacggcttcgaccccttcggcctcgggaagcccgcggagtacctgcagtacgacgtggactccctggaccagaacctggcccagaacctggcgggcgagatcatcggcacccggttcgaggacgccgacgtcaagtccaccccgttccagccctacgccgaggtgttcggcctccagaggttccgcgagtgcgagctcatccacggtcgctgggccatgc

SEQ ID NO: 435691 - DNA, 371 bp, Triticum aestivum
tcgcccattcgtccgcccacgcgtccggaaaaacagttttccgaagcttcgagccagggcggttggcggcagccgcggggacgatggtcgggatcttctccaggttctcttccggcgccggccaccgccgcgccaagagtgccgtggaggttgtggagacattggcgcccaacatggagaccggggagtctgacccggcagctgatcctggagatagcccgcacggcattgaggtcggcatcgagttcaagccggtggagcaccctgtggagcctgtcaaccttgaccaaccagtgaaatgcccgcttcctgagccatctatactgcatgatgggaggatatggcaagagaggatgtctacagcgggcggg

SEQ ID NO: 435692 - DNA, 529 bp, Triticum aestivum
cttcgcgttcgctgcaagatagcctgccagccatgggaagcaagggcctcaagggtgtgatggtgtgtttactcatactggggttggttctggaacagctgcaggtagaaggcaagagctgctgcaggagcaccctgggaagaaactgctacaacctttgccgcgcccgtggtgctcagaagttatgcgcaggcgtctgcaggtgtaaactctcaagtggcctaagctgccctaagggcttccctaaattggcccttgagtccaactcagatgaaccagacaccatggagtactgcaacttgggatgtaggtcttccctatgtgactacatggtcaacgcagctgctgacgatgaagagatgaaactctatgtggaacagtgtgctgatgcttgtgtcagtttctgtaacgctgatgctggcctcccatcccttgatgcgtactgatgcgtgtccatggtctgagatttcacagggcaaggtcgtgtctcacctttgcgttcaataaaattggatcccatcgagagtat

SEQ ID NO: 435693 - DNA, 534 bp, Triticum aestivum
atgtgtaagggagtgcagtatcttaatgaaatcaaggactctgttgtggctggtttccagtgggcgtcaaaggaaggcgcgttggctgaggagaacatgcgtggcatttgctttgaggtctgtgatgttgttctccacactgatgctattcacaggggtggtggtcaggtcattcccacggccaggagggtcatttatgcttctcagctgactgccaagccaaggctgctggagcctgtgtacctggttgagatccaggccccggagaatgcgcttggtggtatctatggtgttctgaatcagaagagagggcacgtgttcgaggagatgcagaggcaaggtaccccgctctacaacatcaaggcctacctccccgtcatcgagtcctttgggttctcaagcaccctgagggccgcgacgtccggccaggccttcccccagtgtgtgttcgaccactgggacatcatgggcttctgatcctttggaggccggctcccagtctgccacacttgtcacggagatccgcaagcgcaa

SEQ ID NO: 435694 - DNA, 716 bp, Triticum aestivum
  unsure (1)..(716): unsure at all n locations
atgcacacaagtggcagaatgtcgaactccgctctttcgcccactctgaagggcagcgaggtgtgcacggtttcgccgagcgtgggcgagtggagcccggagctggtgaaccctcacgtggtccgcgcgatgaaaggtcgcatcgaatggccccagggcgcgaagaagcagagcctgaagtcaaagcctctggattcgagattcgacggccgcaaggtccagctgcgccaagcattgaagcagaagatataggatggcccgtccacacgctgtatccaatttctgaatataggaccatcttgccttggaagggtgcctggtctgtaagaagaaatgacttgtagtaacattggtccctgaaatgggtgcctatcatcggctgtacctaattgatgttctgatagccctttagctcgcatagaatatttcacgacgcccttgtaatcaaatgtagtatcagtagtgtctttcaatcaaacgcattacttaggcnnnnnnnnnnnnnnnnnnnnnnnnnnnnnnnnnnnnnnnnnnnnnnnnnnnnnnnnnnnnnnnnnnnnnnnnnnnnnnnnnnnnnnnnnnnnnnnnnnnnnnnnnnnnnnnnnnnnnnnnnnnnnnnnnnnnnnnnnnnnnnnnnnnnnnnnnnnnnnnnnnnnnnnnnnnnnnnnnnnnnnnnnnnnnnnnnnnnnnnnnnnnnnnnnnnnnnnnnnnnnnnn

SEQ ID NO: 435695 - DNA, 336 bp, Triticum aestivum
cattgcctgtttcaccacaacctcgtattctagatttccagatagacagggtcagattaaccagacgatgatgcaggccaccgttgctttgtcggccgtgctgcctgtcgccgtaaggggcaggccggcggcgaggaggaggagcgccaccgttgccgccggcggcagaaggatcgtgggtgccggcgtccgggcatcggccgcggcggcgccggaggcggactacagctccagcgtctcggtgttccccatggaggcctgcgacctggtcggcggcgaggcgtgcgacgcgcagatgtacccggagacgaagctcggcgccggtgcaggcgcccc

SEQ ID NO: 435696 - DNA, 419 bp, Triticum aestivum
cgctcactggctcgcctcctctcacccatggccggcgccgccacgctcgtcctctccctcacggccgccggcgccgttcctcttcgcgcccagcttctcacctggacggcccccgaccccgcggccggccccgccgtctggacgtcgctgtcggacgccgtcatgggcgacggcgccgaccagccaccccgccgctggatcctccttccccggccggcgccggccatggcgaccaccacgcgtacaagtacaaaagccctcatgctccaatgagatccagcgagacaggttcgtccccatctagcccggtcagcgctcgtaccctgcatcgaccagatccactcgacgtcgtcgtacagatccgcacgatgtcgacggtcagtgttgaggagcgcctctgccaccactcctctgggatc

SEQ ID NO: 435697 - DNA, 449 bp, Triticum aestivum
tcttcgcgtccgccaagctccagacgcctgctcctcctcccccgccgccgccgcacgctccagagaccgcaggcatgggcgtcttcaccttcgtgtgccgcgactccggcgccgagtggtcggccaagcagcacaagggcgagctcgaggcctccgccgccaccccctacgacctgcagcgccagctcgtctccgccgcctgcgccgaggacaagtccggcggcgtccagtcctccttcaccatggtctcccccaagtccgccatcttccaggtggtcattggtggcgcctctgctggtccgatcggtggtggtggtgctgcaggtggtgccgctgcatcaggtggagctgccgccgaggcccccaaggctgaggagaagaaggaagaggagaaggaggagagcgaggatgaccttggcttctccctcttcgattagatcttctttacc

SEQ ID NO: 435698 - DNA, 771 bp, Triticum aestivum
cggacgcgtgggcggacgcgtgggagaagaagggtgttgatgagttctctcactgtgttcaccttgtctcatgggagaaggagaatgtgtccagtgaggctcttgaggctgcccgtattgcttgcaataagtacatgaccaagcatgcaggaaaggatgccttccacctcagggtcagggttcacccgttccatgtgctccgtatcaacaagatgctttcgtgtgccggggctgataggctccagactggtatgaggggtgcttttgggaagccgcagggagtctgtgcccgtgttgccattgggcaggtcctcctttctgtgcggtgcaagcccaacaatgccatccatgccactgaggcccttcgtcgtgccaagttcaagttccctggccgccaaaagatcattgagagcaggaagtggggcttcaccaagttcaaccgcaacgactacctcaagttcaagagtgagggcaggatcttgcctgatggagtcaacgcgaagctgctcggatgccatggccgcctggcgaaccgtgcccctggacaagctttcctgtctgccgcataatctagcagaagtctatccgttctatcgcaacttattttaccgtgtggaacttagattccaagtgcctgtggtgctatgttattttgtctgaatgttgtgtcgaaccttgttatggaagatattatctattttgtgatgatggtactaatatgaatggcctgttgaatcaaaaaaaaaaaaaaaacaaaaaaaatatcccatt

SEQ ID NO: 435699 - DNA, 756 bp, Triticum aestivum
  unsure (1)..(756): unsure at all n locations
gctttttctcgaggaggacgtcgcctaccgcgccaaggacaagccctactgcagcctgctggtggggctggtgagcgcgtaccgatacgaagggcccaaggtgagcgacgacacggtcaaggcggaggccaaggcgctgggcgcggcggtgaagagcgccgccggcggcaagctggtggagaacgacgaggtggtcaggatcctcaccaccaggagcaagcctcacctcgtccagaccttcaagtactacaaggagctgcacggcaagcacatcgaggaggatctgggaagcgaggaggctctgagggagaccgtgcagtgcctggcgacgccggagaggtacttcagccaggtgatggcggcggcgctgagggagggcgcggaccaccacgggaaggaggccctgtcgcgggtggcggtgacgcggtcggacgtggacatggacggcatcagggcggcctaccaggagcagttcggggccaagctcgaggacgccgtcgccggcagcgcgcacgggcacttcaaggacgcgctcgtctcgctcatcgtcggcaagtaaaccatatccggagggggttcttcttcgtcttccagtggtgatggcgcgccggccgtgcgtgtgtttttcttcctgcttcatctcgtgtcgtgtgtgcctttgtatgttgaattgttgtcgagcggngcatgtaaacatttgcagctgaggtcgtgtacggctgatcggngatcaaataaagttgaacatttgggtct

SEQ ID NO: 435700 - DNA, 582 bp, Triticum aestivum
atctggggacttgggggtcgatcgatcggaggcggaagtgaaggaggaggggcggcgggatgacgcgggggaagcagaagatcgacgcgcagcggaagagcgcggagaagaaccagaagtccaaggggtcgcagctcgaggcccgcgccgtcgggctcaaggtcgtctgccccatctgcaaggcgcaactggccaacgagaagcagttgattgatcactatggatcaaagcatcccaaggagaaacctccaggtccatcaaatgcagagtgactgatgcgaagtggaagcatgagctatactttgcctgtttctgagggtgttcaatctgctccacacttggacgacttgagcctcagctttaccctatgtaatgcatgcatttccccttgttccaggcaagagcctttgatgaccatgtatttgccttctatgagtatctttgtccaactgtcaacataccttcaaactgtatgtggtgcaatctttggataagagaatgctaaacttttttcctaaggcaatctcctggtgcgtgaattgcggtctaaaaagctcaaaaatgaatgtgtttttcgcttac

SEQ ID NO: 435701 - DNA, 501 bp, Triticum aestivum
gggagagcttagatagtagagttgggaaatccaaaacggtggatgctcctgaaaagccacgaatgagctcagatgacgttgacaagtttaggaggagaagatgcttggtttggtgatctatgatatgacgtctgcacagttcatggagtagtttccgaacaccatggaatggggttcaagcaactgtgtcatactgtatagcgaggaacgacgccgacagttcccgcagtagagggataatagctgtgttaaatgtgggagaagaagaatgaggacgctggtgaataagctgttatttatcaaaagagggtacgtctcaacatggtaactttctcggttaattaacctgtattgcaacccccagtggcggtaggatttccatcatgtaaaagtgttgtctgtaatcaccagggacaacgatagaacatttgctgccactttgtggcgcggtctaaagtcttggagcaatcacaagaagcaacatattctagtctggatatg

SEQ ID NO: 435702 - DNA, 616 bp, Triticum aestivum
ctgtggcccagtcccgccggtccggcggtgggggcggcggcggcggctacggcggccagcgcggcggtagcggaggctacggcggcggcggcggtggctacggcggccagggcggcggcggctacggccagggaggcggtggcggctacggccagggcggcggtggctacggcggccagcgcggtggcggcggctacggcggcggcggcggcggctacggcggcggcggtggtggctacggcggccagcgtggtggcggtgactccggcggccagtggaggaactgagcggcggggccctccagttatcgatctatctaccatctcgtcgtcttcgtcagcaagttatcttcagttcctgtgtcagtcagtctgagtcgtcgtgtgtgtcgttgagtcctgtggtgtttttgatcgcgagctcgagtgtcgctctgtccggggttaattagagctggttacgcgaggaagaaacaacatgtgttatctttcagtcttggtcggtcggtcgtcggtgatgcagcaatcccttctgtcatggattgggatgtgatgttggaatatcctatgtttgaactcggtttaaatggaagaaaatgcaagtcgtcatagctgcg

SEQ ID NO: 435703 - DNA, 415 bp, Triticum aestivum
tgcatttccatccaccgccgccccccgccgcattccgaggggttcgagctcgccggagagggaggagagatggccaggaagggcggagagaggaagaaggcggtgacccggtccgccaaggccggcctccagttccccgtcggccgcatcgggcgcttcctcaagaagggccgctacgcgcagcgcgtcggctccggcgcccccgtctacctcgccgccgtcctcgagtacctcgccgccgaggtgctggagctcgccggcaacgccgccaaggacaacaagaagacccgcatcgtgccgcgccacctgctcctcgccatccgcaacgaccaggagctcggcaagctgctcgccggcgtcaccatcgcgcacggcggcgtgctgcccaacatcaaccccgtgctgctccccaaga

SEQ ID NO: 435704 - DNA, 400 bp, Triticum aestivum
cccatgcgtccgcaatcaatcaatcccacctactccacctctcgccggagccccagcagggccccagcaaggaagatggacgccggcaagccgaagaaggtggccgcgaagaagttcggcgggccgaggaagaagtcagtgacgaggtccatcaaggccggcctccagttccccgtcggccgcatcgggcgctacctcaagaagggccgctacgcccagcgcgtcggctccggcgcccccgtctacctctccgccgtactcgagtacctcgcagccgaggtgctggagctggccgggaacgccgccaaggacaacaagaagacccgtgtcgtgccgaggcacctgctgctggccatgcgcaacgaccaggagctcgtgaggctgctgtccggcgtcacca

SEQ ID NO: 435705 - DNA, 313 bp, Triticum aestivum
tcttgaggagcttagggaacttggttctggtacttttggaactgtttaccatgggaaatggagaggaactgatgtggctatcaagcgcatcaagaaaagctgttttacaggacgatcatctgagcaagaaaggctggcacaagaattctggcgagaggcggagattctgtcaaagcttcatcatccaaacgtcgtagccttctatggcgtggtgaaggacgggccgggcggtaccctggcgactctgaccgagttcatggtgaatggttctcttcggcatgtcttgcagcggaaggacaagtgtcctgatctc

SEQ ID NO: 435706 - DNA, 431 bp, Triticum aestivum
gattccaaaatcctgctcccctctcgctctctccaccaaccaagaacagcaggaactcgacctcggagcagcaacgaatccgccgccgcccggcaaaagggatccaaagctccaatggctggcaagtacatcgtcgccggcctcgtcggctcctgtgtcatctcgtatgcctgtgactacatcgtttctcagaagaagatcttcggtggcaccatcccagggactgtgtccgacaaggagtggttgaaggcgacggagcagaggttccaggcctggccccgggtcgctgggccgccggtcatcatgaaccccatcagccgccagaacttcatcgtcaaggacctcaacccctgaggctcaagatcttaaggtttgcggtcggttggaacctttaccctgatggcgatgcctgttgctaaatctacctatgt

SEQ ID NO: 435707 - DNA, 666 bp, Triticum aestivum
tttctctgatctatcaaagattcagttgagagaatgtgacaacaatcactcgagaaacttcatggcagtactaagagccctaagggagagggattcttcatgttaccagctgccccgtgtggtacggcaaggcgagcagccaagagaaggcttcctacttctgtccaacctcgtcgaggatcagatggcaggaacaagcagttacatggactggatactccaaatccaccgccaaacacagagctcgtgatgatgtacggcggatgttccagaaatttttgtttttgtgtaaactgctgcagattcggctgctgtgccagtccccgggtcgccctcataaccattggaacaaaaaatggcgagccagccgtgttctacaaatgccatcctgttagcagcagcagcgctctcgctgtcggcgagcaatacaaactttattgttaatatttcgttcttgtgattatttttcgtgacgagaaaaggatacacagctgttgtaccagaataagtaggcagcacctttggtaaattgtacaagcgtttggagtctttggtaggggtttgtacgcatttgtatcgtcgacaatttttagttgcaaagattgtgtaaactcttgtttgactgttggtactgatctgtctgcaataggaagcacctttttactc

SEQ ID NO: 435708 - DNA, 468 bp, Triticum aestivum
ccaccaccgccgtccccaccttctccgacgaaaccctagcgatggcgttccgcggcgcagcctcccgctccttcctcgccgccgtccgcggtcgcaccgcctccactgccccgcgcggacgcgcggcccccattcccgccgcccctccccgtcgcatccctgcctcggcgccctcctcccctctcgccgccgcaaggccattggcggcgttgatggggtcgccggcgctggttgccgcaaggctgacggggcactgcgcggcgagcgcgcgggcgtgctgtgagctctcccagggtacttaaaggacgagttgctgcccttcgcaaggatacaacagttcttttgggtgcatctctttggaagctcttctgagttcagttcgttttcctggattctgcaaagttacaagaaactccccactcccagtgctagcttttgtctcctagacaaacggacattctacttgat

SEQ ID NO: 435709 - DNA, 416 bp, Triticum aestivum
gcgcgtgccctttacgccctgcatccagctgctctacggcctgcgcgccggcctcgacctcctcttcgaggagggcctcgacaacgtcatcaagaggcacacacgcctcggcaccgcaacaaggctggcggtggcggcgtggggactcaagaactgcaccgcgaaggaggagaacttcagcgacacggtcaccgccgtcgtcgtgccgccgtacatcgacagctccgagatcgtcaagcacgcgtggaagcggtacaacctcagcctcgggctcgggctgaacaaaggtcgcccggcaaggtcttcaggatcggccacctcggccacctcaacgagctgcaacttctgggctgcctcggcggggtggagatggtgctcaaggacatcgggtacccggtgaagctcggcagcggcgt

SEQ ID NO: 435710 - DNA, 544 bp, Triticum aestivum
ccttcgtgtccgcagatcttggcggactcgaatccaatccaatccaatccaaggcggaggtcgagatcaaacctaccggagatgaagttcttctcggcgttcgacccgtggccggtgttcttccgccgggagtggggccgcacctggcccttcctcgccggcttcgccgtcacgggggccctcatcaccaagatgaccgccggcttcaccgaggaggacctcaagaactccaagttcgtccaggcgcacaagaagaagtagtcgccgcccgcccggtccgtccgccgccaggtcacaggggcagcagctgagtaaccggcatgtgtccttgatgcggcgagccagtcctcaccctcactattgtgattgagcttttatgttttttttttcaaatccaactgcatgcatttttgccgctctggtttgtaatgtaataagcgacatttgaatcgtcgaatccaagaaaaaaaacggcttcggataaagtagctgccatgggtcactctgtctatgcacaatgaagacgctctctgtttcgtttcac

SEQ ID NO: 435711 - DNA, 464 bp, Triticum aestivum
ccttttcgtccgatcagatcttggcggactcaaatccaatccaatccaatccaaggcggaggtcgagatcaaagccaccggagatgaagttcttctcggcgttcgacccgtggccggtgttcttccgccgggagtggggccgcaactggcccttcatcgccggcttcgccgtcacgggggccctcatcaccaagatgaccgccggcttcaccgaggaggacctcaagaactccaagttcgtccaggcgcacaagaagaagtagtcaccgccgccaggtcacaggggcagcagctgagttaccggcatgtgtccttgatgcggcgagccagtcctcaccctcactattgtgattgaactttatgttttttgttcaaatccaactgcgtgcatttttgctgctctggtttgtaatgtaataagcgacatttgaatcgtcgaatccaagaaaaaaacggcttcggat

SEQ ID NO: 435712 - DNA, 303 bp, Triticum aestivum
  unsure (1)..(303): unsure at all n locations
gcgcccacgcgtccgcgatgatgacgatgagttgaagcgggttcctgcggtccgactccagcaggcctacggatatagtagtaactggtagctaacctaacttggcgcgtgatgccatgagctatatcatgttccttgttatatgcaattagagactttcaacatgtagatttgcttccaagacttctgtcatagaagagtacctttcctgttatcccacggtaccatcttgaattaatgaatcttggctacctttttgaatttagnnnnnnnnnnnnnnnnnnnnnnnnnnnnnnnnnnnnn

SEQ ID NO: 435713 - DNA, 453 bp, Triticum aestivum
aagcgcccgatgtttactactgcctcaagcttctggaagccactggaatttccactgttccaggctcaggttttggtcagaaagaaggggtgttccatctgaggacgacgatcctgcccgcggaggaggacatgccggcgatcatgtcgagcttcaagaagttcaacgactcgttcatggagcaataccaggaccactcgaggctgtgaagagagaagaagacaaccgcatctacatataatacaatccggctcttttctaccagcaattaaagttgattaattagctgtaagctgtaactatggtgaagaaaactggttgctatgcttgatatgtataggggggaagatatatgcggaaatattcggtccatttactacataatatgatgatactgtaattgttggctccaataattgatccataataaataattaaacaacctttgagctt

SEQ ID NO: 435714 - DNA, 327 bp, Triticum aestivum
cccacgcgtccgtttttttttttttaaacatataacgaagactttatatcaaaatccaacgcacagccacatgatagattcacattaataaaggttcccaaacgtcaccatcgaacatcttacgaatgataaaggagcatatttcaggtagcatatcctaacaggactggtgatattaaaaaactaggatagcaagagcagtatggcaaccggcagatccaccgagcttaatcgatctcctggagcgaggcgccggtggccgtggcacccccagcggcggcggcgacgtcctcggccgtgaacttgcccttggccttgtcagcagcg

SEQ ID NO: 435715 - DNA, 280 bp, Triticum aestivum
gcgcccacgcgtgcgcgctagccaagcaagacccgagcaagccacactctccagcaccagcagaggccggcggcaaagcagcgcaagcacagcagcaaatggccaccatcagcgccgccgcggcgaccaccgtcggcgcccgtgccgccatcgccaggccgcaggccctaggtctgccccagctgaggacgaggagcgagagggtgaggtgcagctactccaaggacgccaaggaggcgacccctgccgccaccgtgcgcggggccagcgcgtccctgct

SEQ ID NO: 435716 - DNA, 617 bp, Triticum aestivum
ttatttcaatcccctctccgcgatctcaccgagaaaatcctcgaccgaccgaacgacaaggccctctcatcctcctcctccaagatgcagatcttcgtgaagactctcaccggcaagaccatcacccttgaggtcgagtcgtctgacacgatcaacaatgtcaaggccaagatccaggacaaggagggaatccctccggaccagcagcgcctcatctttgctggcaagcagcttgaggatggccgcaccctggctgactacaacatccagaaggagtccaccctccacctggtgctccgccttcgcggaggcatgcagatctttgtcaagaccctcaccggcaagaccatcaccttggaggtggagtcctcggacaccatcgacaatgtgaaggccaagatccaggacaaggagggcatccccccggaccagcagcgcctcatctttgccggcaagcagctcgaggatggccgcacccttgcggattacaacatccagaaggagtccaccctccacttggtgctcaggctccgtggtggcatgcagatatttgtgaagaccctcactggcaagaccatcaccctggaggtggagtcgtctgacaccattgacaacgt

SEQ ID NO: 435717 - DNA, 666 bp, Triticum aestivum
gggtcgacagacgacagaaggggaccaccgctcccagcaacggaaccaacaaatccccagccaatctcgtctccgatcgacccgaggctcgtcgaatcctccttccccaccgcctcaagatgcagatctttgtgaagacactgacgggcaagaccatcacccttgaggtggagtcgtctgacaccatcgacaacgtcaaggccaagatccaggacaaggagggcattcccccggaccagcagcgtctcatcttcgctggcaagcagctggaggatggccgcacccttgctgactacaacatccagaaggagtccaccctccacctggtcctccgtctgcgtggtggcatgcagatcttcgtgaagaccctcaccggcaagaccatcactcctggaggtggagtcctctgacaccatcgacaacgtgaaggcgaagatccaggacaaggagggcatccccccggaccagcagcgcctcatctttgccggtaagcagctcgaggatggccgcaccctggcggactacaacatccagaaggagtccacccttcacttggtgctccgcctccgtggtggccagcaaggcccctgccgtggggcctctgcttcggtctctgggttcgcaaatcccgtctttgtttctgtactgtacattgatgcagtgtta

SEQ ID NO: 435718 - DNA, 859 bp, Triticum aestivum
ctcattgaatttttttcccctccgatctcgccgagaaatctccgattgaagcgaagcgaagccaaggctctctcctcctcctcctaagatgcagatcttcgtgaagacccttaccggcaagaccatcacccttgaggtcgagtcctctgacaccatcgacaacgtcaaggcaaagatccaggacaaggagggcatccccccggaccagcagcgtctcatctttgctggcaagcagctcgaggatggccgcacccttgctgactacaacatccagaaggagtccaccctccacctggtgctcaggctccgtggtggcatgcagatctttgtcaagaccctcaccggcaagaccatcaccctggaggttgagtcctcggacaccatcgacaacgtgaaggccaagatccaggacaaggagggcattcccccggaccagcagcgcctcatctttgctggcaagcagcttgaggatggccgcacccttgctgactacaacatccagaaggagtccaccctccaccttgtcctccgccttcgtggtggcatgcagatcttcgtcaagaccctcaccggcaagaccatcaccctggaggttgagtcctctgacaccatcgacaatgtcaaggccaagatccaggacaaggagggcatcccgccggaccagcagcggctgatcttcgccggcaagcagttggaggacggccgcacccttgccgactacaacatccagaaggagtcgaccctccatctcgtcctcaggctccgcggaggcatcatcgagccatccctgcaggcgcttgcccgcaagtacaaccaggagaagatgatctgccgcaaatgctatgcgcgcctgcaccct

SEQ ID NO: 435719 - DNA, 461 bp, Triticum aestivum
tttttcccacgcgtgcgtccacgcgtccgcccacgcgtccgcccacgcgtccgcccaaaccctaccccgccgccgccgtcgccgccgcagcgcgcggaggcgacctcccaccgccgccaagatgcagatcttcgtgaagaccctgacgggcaagaccatcacgctggaggtggagtcctcggacaccatcgacaacgtcaaggccaagatccaggacaaggagggcatcccgccggaccagcagcgcctcatcttcgccggcaagcagctcgaggacggccgcaccctcgccgactacaacatccagaaggagtccaccctccacctggtgctccgcctccgcggtggcgccaagatgcgcaagaagaagacctacaccaagcccaagaagcataagcacaagcacaagaaggtgaagctcgccgtcctccagttctacaaggtcgacgacgccaccggca

SEQ ID NO: 435720 - DNA, 484 bp, Triticum aestivum
ctctgattttggcactcaaggagctgattctaacaacattctgtacctaagggaaattgacgacgcggacaatctgtatgcagctatccaagcaaagaagggtggaaaggcagtggttgttggaggaggttacattggccttgaactaagcgcagtattgaagatgaacgatcttgatgtgactatggtgttccctgaaccttggtgcatgcctcgtctcttcaccgccgagattgcagctttctacgagagttactataccaacaaaggagtcaagatcgtgaagggtacagttgctgctggttttgatgctgacgctaatggtgatgtcaccgcagttaagctaaaggacggcagtgtgctcgaagctgatattgttgtcgtcggtgttgggggcagaccgttgactactctcttcaaaggccaagttgccgaggagaaaggtggaatcaagaccgatgcttttttcgaaacaagtgtcccc

SEQ ID NO: 435721 - DNA, 683 bp, Triticum aestivum
  unsure (1)..(683): unsure at all n locations
ggnnnnnggttatttacgccggccgtaccggtccaaaaattcccgggtccactgtttcatgctcgggaaagcccccgaaggggcgattcccggtccgtcccccggccggcacgcggcgacccgctctcgccgcgtgagcagctcgagcaatccgccgacagccgacgggttcggggccgggacccccgagcccagtcctcagagccaatccttttcccgaagttacggatccgttttgccgacttcccttgcctacattgttccattggccagaggctgttcaccttggagacctgatgcggttatgagtacgaccgggcgtgaacggtactcggtcctccggattttcatgggccgccgggggcgcaccggacaccgcgcgacgtgcggtgctcttccggccactggaccctacctccggctgaaccgtttccagggttggcaggccgttaagcagaaaagataactcttcccgaggcccccgccggcgtctccggacttcctaacgtcgccgtcaaccgccacatcccggctcgggaaatcttaacccgattccctttcgggggatgcgcgtgatcgcgctatctgccggggttaccccgtcccttaggatcggcttacccatgtgcaagtgccgttcacatggaacctttctcctcttcgcggacgcgtgggcggacgcg

SEQ ID NO: 435722 - DNA, 317 bp, Triticum aestivum
  unsure (1)..(317): unsure at all n locations
cccgaagttacggatccgttttgccgacttcccttgcctacattgttccattggccagaggctgttcaccttggagacctgatgcggttatgagtacgaccgggcgtgaacggtacccggtcctccggattttcatgggccgccgggggcgcaccggacaccgcgcgacgtgcggtgctcttccggccactggaccctacctccggctgaaccgtttccagggttggcaggccgttaagcagaaaagataattctttccgaggccggcccgggccccgtgctgggccgccgactcgagctagatagcacttcaacnc

SEQ ID NO: 435723 - DNA, 421 bp, Triticum aestivum
ctgtcgcgtgggcggacgcgtgggcgggttcggccacacacttccgccgccgccgccgacgacgcgaaaaggagagcgaggccgactccgccgccgcgatgagggccaagtggaagaagaagaggatgaggaggctcaagaggaagcgccgaaagatgaggcagcgatccaagtaggcgccttggagcagcggaagcatcatcctacatccaggctgccaggcaccgagggatgacggcatggtctagtgattcctggcgtgtttgctgctatggctgtggaagctgtttaacctgtgttatgtccaatttagctgtttaattctagtctggttatgttccaagacagagttttatgtaatgtggggattatatgtgtttgtgactgaattttatgcacctattaattttgcggcgtcttg

SEQ ID NO: 435724 - DNA, 412 bp, Triticum aestivum
cccacgcgtccgcccacgcgtccggccgctagggtgttcgtccacacactcccgccgccgccatccccgcgaaccggagagcgaggccgacaccgccgccgcgatgagggccaagtggaagaagaagaggatgaggaggctcaagaggaagcgccgaaagatgaggcagcgatccaagtaggtgccttggagggaggggaagcatcatcttacatccaggcagcggaactctgagggatgatggcattgtccgagtgattcctgatttgttttgcggttgtggctgtggaagttgctttacctgtgtttagctgtttaatactagtctggctatgttccaggactgagttttatgtaatgtgaggattatatgtgtttgtgactgaattttatgcacctattatctttgagg

SEQ ID NO: 435725 - DNA, 1285 bp, Triticum aestivum
atcgtggacgcgtgggcggccgcccacggtctaatccgattcaaacgcaccgcttcctcgtgtccgaactaagccccaatcccgtcaccaccgccgctggtgctcggcgcgatggcgcagaaggacgccgccaatggcaacggcgccaccacgcgcccgccgcccactccctcccccatccgcttctccaagttcttccaggccaacatgcggatcctggtcaccggcggagctggcttcatcggctcgcacctcgtcgacaagctcatggagaacgagaagaacgaggtcattgttgctgacaactttttcactgggtcaaaagacaacctgaagaagtggatcggacacccaagatttgaactcatccgtcacgatgtcaccgaaccactgctcgtggaggttgaccaaatctaccaccttgcttgccctgcctcaccaatcttctacaagcacaaccctgtcaagaccatcaagacgaatgtcattggaaccttgaacatgcttggacttgcaaagagagttggagctagaatattgttgacttcgacctctgaagtttatggtgatccccttgagcatcctcagacggaggcgtactggggcaatgttaacccaattggagtcaggagctgctacgatgagggtaagcgtgtagctgagacactgatgttcgactaccacaggcagcatggcattgagatccgtattgccaggattttcaacacctacggacctaggatgaacattgatgatggccgtgttgttagtaacttcattgctcaggccattcgtggtgaagcactgactgtccagaagcctggaacacagactaggagcttctgctacgtcgctgatatggtcaatggtcttatgaagctgatgaatggagacaacaccggacccattaacattgggaacccaggtgaattcaccatgctggaacttgccgagaatgtgaaggagttgatcaacccagaagtgacagtgacgatgactgagaacactcctgatgaccctcgccagaggaagcctgacatcaccaaggccaaggaggttctcgactgggagcccaaggtcgtcctgcgcgacggcttggtgctcatggaggacgatttcagggagcgtttggcagtgcccaagaagaccaaggcctaattgccctccctacgtttggcgtacaacatgaccaattagccagagcatactcatagttgggtgggttcgtcaatattcgttgctgcgtttcgttacggaatttgagttccaataaaccaattacacc

SEQ ID NO: 435726 - DNA, 415 bp, Triticum aestivum
ttctctcgtccgggggttggcttctcctccccttccggttcgggttctggttcggttcgggttcggttcgagagagaggccgagtagctagcctagtctagggtttcggtagagaggaagtgagatccatggcggagacggagtaccgctgcttcgtgggcggcctcgcctgggccaccgacgacaacaacctccagcaggccttcagccagtacggcgagatcctcgacgccaagatcatcaacgaccgcgagacggggaggtcccgtgggttcggcttcgtcacgttcggcagcgaggagtcgatgcgccaggccatcgaggagatgaacggcaaggagctcgacgggcgcaacatcaccgtcaacgaggcccagtcccgccgctccggcggtgggggcggcggcggcggcta

SEQ ID NO: 435727 - DNA, 402 bp, Triticum aestivum
ttgtggggttggcttctcctccccttccggttcgggttctggttcggttcgggtccgagagtagctagcctagtctagggtttccgtagttcggagaggagagaaagggagagatccatggcggagacggagtaccgctgcttcgtgggcggcctcgcctgggccaccgacgaccacaacctccagcaggccttcagccagtacggcgagatcctcgacgccaagatcatcaacgaccgcgagacgggcaggtcccgtggcttcggcttcgtcacgttcggcagcgaggagtcgatgcgccaggccatcgaggagatgaacggcaaggagctcgacgggcgcaacatcaccgtcaacgaggcccagtcccgccggtccggcggtgggggcggcggcggcggc

SEQ ID NO: 435728 - DNA, 875 bp, Triticum aestivum
ggacagcccgaagcagagagaaatccactccaatccaatccccacagaaatccccatctcaaaaccctagcccgtccgatcccggcgagatggccaacccgagggtgttcttcgacatgaccgtcggcggcgcgccggccgggcgcatcgtgatggagctgtacaaggacgcggtgccgcggacggtggagaacttccgcgcgctctgcaccggcgagaagggcgtcggcaagagcggcaagccactgcactacaagggcagctcgttccaccgcgtgatccccgacttcatgtgccagggcggcgacttcaccaggggcaacggcaccggcggcgagtccatctacggcgagaagttcgccgacgagaagttcgtccacaagcacaccaagcccgggatcctctccatggccaacgccggccccaacaccaacggctcccagttcttcatctgcaccgtcccctgcaattggctcgacggcaagcacgtggtcttcggcgaggtcgtcgagggcatggacgtcgtcaagaacatcgagaaggtgggctcccgcagcggcacctgctccaagcaagtcgtcatcgccgactgcggccacctctagattccgtccgcccgccggtcgcctgtcgtcgtcgccccgtgtcccgtgtcgtcgatctaaataagagagtcgtgtgtcgtgtcgtgtcttccccttgtccgtccgatgagatctccgtggttggtttaggagggttttaggtggactcttttggccgctggatctgtgtccggcggccatggttatcttcctgtgtctgctgctatctcactgtttgaatgagatgaactccgctatgaattatccataatttgtgctcgttggcttcac

SEQ ID NO: 435729 - DNA, 485 bp, Triticum aestivum
tccacgcgtccgcccacgcgtccgggcatttccatgcaatcaatttggttttcaagaacctggatcaaatacacagataaagcaatttgcttgtacaaggtttaaagctgaatttcctatttttgataaggttgatgtcaatggaccatttacagcccctatttataagtttctcaagtcgagtgctggaggatttttgggtgatatagtgatagtggaactttgagaagttcctagtggacaaaaatggcaaagttgtggagagatatccaccaacaacttcaccattccaaattgagaaggacatccagaaactcactgcggcataagtgcttttgagtccggcttcagttaagcactcctgtatatattgcctttttttttcttccggaaactagagttttacttgtgattatgactcttgtgcgatataatgttttccattcctgtaaagtaattcactgatatgtatagacatttccgaa

SEQ ID NO: 435730 - DNA, 328 bp, Triticum aestivum
gcggacacacacacacaagcgaaacccactccacccaaccgtctgggagcagagcagagcctctctttgtccttcaccttcgtcttcctccctctcggcagctcgacctttgcatggcagcagtggctagctccaaggggcgggtgatcgctgggagcctcgtcgcgcgcgtcctcgccggcaaggccaacgcctccccgaggagggcggtgcacgcgtcggcctacgacaagaacgtggacgagcaggtgcgcccggccttcgtgccggacgatgtgatcggcggcgccgggagcccagacaagtactggggccctcaccccaccac

SEQ ID NO: 435731 - DNA, 351 bp, Triticum aestivum
tcgcggacgcgtgggcgtctcgtctcctccttcctcctggtcctccaagccaagaaactcctcatctccaccggccgcccgtgaaggaaggaggcgatcggccatggggaagatgtgctgcagccaggaggaggacgaggcggggttcaacctgctgccgctggtgatggccgccttcgtcatcatgctgctcttcgtcggctgctcgccgccgccccggcgcaggcgctgcgtcgtcgtcccgtgctactgacctgacctgacctcatggtggccgggtggtgggagcctcgatcggcggtgctgtaggcaggcaagtggctggtgctgtggtaggcgtttgtttggttg

SEQ ID NO: 435732 - DNA, 621 bp, Triticum aestivum
cttgtttaccggctcgccgacgtcgaccgctccgcccgcaagaagaacagcctcaggttggatgactgggtgctgtgccggatctacaacaagaaaggcgcctcggagaggccgagcgccggtgaccggaccgcgagcgcgagccccgggcacgcggtcgtcggatcgccgccggagcagaagccggccctgctgccgccatacgcgccgcagccgttctcggacctggcggcgtactacgaggtgaggccgtcggactcgatgccgcgggcgcacgccgactcgagctgctcggagcacgtgctgacggcgtcgtgcgagcggccggaggtgcagagccagcccaagatctccgagtgggagcgcacgttcgcctccgccaccccgggcgtcaacccggccggctcgatgctcgacccgtcggccgggctccccgccggcgacccgctcctccaggacatcctcatgtactggggcaagccgttctgagaatccagctccgtggctgtacgtgtggtttgggagggaatcgatcggggtgactcgggcgagccgccggaatctatcggcaggagatactcgtagccgttggatggcagatatcaatagggcacaaggagc

SEQ ID NO: 435733 - DNA, 447 bp, Triticum aestivum
cggagatcctgtccaagaacggcatcaagttcggcgaggccgtgtggttcaaggccggcgtccagatcttctccgagggcggcctcgactacctcggcaaccccagcctggtgcacgcgcagagcatcctcgccatctgggccgtgccaggtcgcgctcatgggcgccgtcgagggctaccgcgtcgccggcggccccctcggcgagggccgcgaccccctctaccccggcggcgccttcgaccccctgggcctcgccgacgaccccgacgccgccgccgagctcaaggtgaaggagctcaagaacggccgcctcgccatgttctccatgttcggcttcttcgtgcaggccatcgtcaccggcaagggccctctcgagaacctcgccgaccaccttgccgaccccgtcaacaacaacgcctgggcctttgccaccaacttcgtgccc

SEQ ID NO: 435734 - DNA, 592 bp, Triticum aestivum
cgcacccactccaccccatcctcctcctctccggcagcccgaccgacgccgcagccggcgcatcgccgcgatgggccgcaagctcgcgctcctggtgggcatcaactaccccggcaccaaggccgagctcaagggatgccacaacgacgttgaccgcatgcacaagtgcctcgtcgaccggttcggcttcgacgaggagaacatcaccgtcctcctcgaccgcggctcctccgggccgcagcccaccggcgccaacatccgccacgcgttggccaagctcgtcggggacgcgcgccgtggggacttcctcttcttccactacagcggccacggcacgcggctgccggccgagaccgggcaggacgacgacaccgggtacgacgagtgcatcgtgcccagcgacatgaatctcataacagatcaagatttcagagatctggtgcagaaggtcccggatggttgcatatttaccatcgtctccgactcatgccacagtggtggcctactggacaaggcaaaggaacagataggcaatagcaccaggcagaatcagacccagtctcgtgaacccgaagaagagcgatctcattct

SEQ ID NO: 435735 - DNA, 373 bp, Triticum aestivum
cttttccccaagtccccaaggagagaaacgagaaaggctcaccgtggaaccgatcgaatcgcagcgaagcagcggcggcggcggcgatggggatcggcgagcactttgagggcgtgaagcagcactgggcgcgcaacttcgccttcctcgactacttcaagaaggtctacggccgcgaccagcccctccccaagtggtccgacgccgacgtcgaagagttcatcgcctccgaccccgtctacggcccgcagctcaaggccctgagggagtccaggaagttcgcgctcggcggggccctggccggcgccgcgcacctcggcggcgttgccttcaagtactccaagagcccgcacggtgtcgtgctggcgaccgg

SEQ ID NO: 435736 - DNA, 488 bp, Triticum aestivum
  unsure (1)..(488): unsure at all n locations
ggnnnngnaactgtttacgccgtcggtaccgctccaccaattcccgggtcgaccgggaagttgaaaataagcatagatccggagattcccaaataggtcaaccttttaaactgcctgctgaatccatgagcaggcaagagacaacctggcgaactgaaacatcttagtagccagaggaaaagaaagcaaaagcgattcccgtagtaccggcgagcgaaatgggagcagcctaaaccgtgaaaacggggttgtggggagagcaatacaagcgttgtgctgctaggcgaagcggttgagtgccgcaccctagatggctaaagtccagtagccgaaagcatcactagcttacgctctgacccgagtagcatggggcacgtggaatcccgtgtgaatcagcaagggccaacttgcaaggctaaatactcctgggtgaccgatagccaagttagtaccgttagggaaaagtgaaaagaaccccaagtgggtat

SEQ ID NO: 435737 - DNA, 480 bp, Triticum aestivum
cggacgcgtgggctcgccgccgccgccactccgccgctgccgccgccgagatgggtcgcgtgatccgcgctcagcgtaagggtgcgggctccgtcttcaagtcccacacccaccaccgcaagggccccgcccgcttcaggtcgctcgacttcggcgagcgcaacgggtacctcaagggcgtcgtcaccgatgtcatccacgacccggggcgtggtgcgccgctggccaaggtgaccttccgccacccgttcaggtacaagcaccagaaggagctcttcgtcgccgccgagggtatgtacaccggccagttcgtctactgcggacgccgcgccaccctctccgttggtaacgtcctcccgctccgctccgtgcctgagggaggcgtcatctgcaacgtcgagcaccacgtcggcgaccgtggtgtcttcgccagggcctccggtgactacgccatcgtcatcagccacaaccctgacaacg

SEQ ID NO: 435738 - DNA, 460 bp, Triticum aestivum
tttgtccacgacgtcgccggccgcttcgccggcaagctggacatcctcgtacgtgaagcaccccatatcttctcccccgtcccggacgcgtccgccccgacgaccgaccgacgagcagcgcaaaagtaggagggagagcatgagcaccatggcgatgtcggcgctgaacccggacgcgcccatgttcatcccggcggcgttcaagaaggtggaggactactcgcccgagtggtgggagctcgtcaagaccaccgcctggttccgcgaccactggttccgccagcaccaactctacgaggacctcgccgacaacgtggacgtggacgacgtcgccgccctcctccccgacgactccgtcgacctgctcgacgccgacgacctcttttactccccgccgtcgccccagccccagcccgacttctaccactacaaaccagcagggttcggcggtgacatggac

SEQ ID NO: 435739 - DNA, 432 bp, Triticum aestivum
tcgtccacgcgtccgacaccccagaaatcccacccgtctccacccagataaccacgagagatatttcgtccgccccgacgaccgacgaacggcagagaaaagtgaggtgatcatgagcaccatggcgatgtcggcgctgaacccggacgcgcccatgttcatcccggcggcgttcaagaaggtggaggactactcgcccgagtggtgggagctggtcaagaccaccgcctggttccgcgaccactggttccgccagcaccagctctacgaggacctcgccgacgacgtcgacgtggacgacgtcgccgccctcctccccgacgactccgtcgacctgctcgacgccgacgacctcttctactccccgccgtcgccccagccccagcccgacttctaccactacaaaccagcagggttcggcggcgacatgga

SEQ ID NO: 435740 - DNA, 307 bp, Triticum aestivum
tttacgcgttcgacaccccagaaatctcacccgcctccacccggacgcgtgggcgcgagagatatttcgtcccggacgcgtccgccccgacgaccgaccgacgagcagcgcaaaagtaggagggagagcatgagcaccatggcgatgtcggcgctgaacccggacgcgcccatgttcatcccggcggcgttcaagaaggtggaggactactcgcccgagtggtgggagctcgtcaagaccaccgcctggttccgcgaccactggttccgccagcaccaactctacgaggacctcgccgacaacgtgg

SEQ ID NO: 435741 - DNA, 579 bp, Triticum aestivum
ttcgtctgcggacgcgtggacaaacccaaccaagcacccaagcacatcagtagatcggcatggcgcacttccaggaggtggactactgctcggaggaggtgagggcggcgggctacccggcccgccgcggctgcggcggcgtgcaggagcacatcgtcaaggagacgttcgtgcaggagttcgacaccgccggccgccgccatggtcaccacggtcaccacggccgtggctccggccacttcgaggtgcgcgagagcaggctggaggaggacatcaacacccgcaccggcgagttccacgagcgcaaggagaacttcgtcgtcagggccgatgactaagcttacacgttacggagcacactacgatgtgtgtatatgtcggcatgtcagcagtatatgtatgtgtgatgttgcgcacagtcgtatagcgtatgcaggcgtgcgtgcttggcggccatcagcccctatcgcgcgcccgtgcagcgcttaaataagcgctaatcgtgaaccagaataaagcttctcgcgattagtagcaaaaaaaaaaaaacaaaagaaaaaaaaaaactaaccgagaaaa

SEQ ID NO: 435742 - DNA, 642 bp, Triticum aestivum
ttctttccacgcgtccgggaaaggcgtcttcgtactcgcctctctccgcgcaaccgagccttccgcccacctcctccccatttcgccagcggcgcacccaccaaccacccccacccgccgccatgagggagtgcatctcgatccacatcggccaggccggcatccaggtcgggaacgcgtgctgggagctctactgcctcgagcatggcattcagcctgatggccagatgcccggtgacaagaccgttgggggaggtgatgatgctttcaacaccttcttcagcgagactggggctgggaagcacgtcccccgtgctgtcttcgtagatctcgagcccactgtgattgatgaggtgaggactggcgcttaccgccagctcttccaccctgagcagcttatcagtggcaaggaggatgcagccaacaacttcgcccgtggtcattacaccattggcaaggagattgttgatctctgcctagatcgtatcaggaagctttcagacaactgcactggtctgcagggattccttgtcttcaacgctgttggaggtggaactggctctggccttggttcgcttctcctggagcgtctctctgttgactatggaaagaaagtccaagcttgggttcacagtttaccca

SEQ ID NO: 435743 - DNA, 480 bp, Triticum aestivum
tgcctacgcgtccggtgaagctggtgccgttcaacccggcgttcgaggacgcgtcggtgctgtggacggagagcaaggacgtgggcaagggcttccgctgcatccgcatggtcaacaacacccgcctcaacttcgacgccctcaacggcgacaaggaccacggcggcgtgcacgacggcaccaccgtcgtgctctgggagtggtgcaagggggacaaccagtgctggaagatctggccctgggccgaggcgcacgccgccgtcgagtccggcgccaccatgggcaacaacgcccacgccatgggcggcggcccccccgtgcacgccgtgcgcatcttctgcaaggccggcgaggactacagcctcaccgcccgcaacggcaccgtctgcctcgcccccaccaaccccagggacgactaccagcactggatcaaggacatgaggcacagcaacaagatcagggacgaggaagggtaccctg

SEQ ID NO: 435744 - DNA, 591 bp, Triticum aestivum
ttaaacctttctccttctgtcccgcaaacccccgagagatcacaccatgttcggcttcggtcaccacggccaccatggccagaaccccccggcccacgctccggccgccgccggcggcaaccagcccaccttcaagatcttctgcaaggccgacgagggctactgcctctccgtccgcgacggcaacgtcgtcctcgccccctccaacccccgcgacgagcaccagcactggttcaaggacatgcgcttcagcacccagatcaaggacgaggagggtaaccccgccttcgccatcgtcaacaaggccactggcctcgccgtcaagcactccctcggccagtcccacccggtgaagctcgtgccattcaacccggagtacctcgacgagtccgtgatgtggacggagagcggcgacgtcggcaagggcttccgctgcattcgcatggtgaacaacattccgcctcaactttgacgccctcaacggcgacaaggaccacggcggcgtgcacgacggcaccaccgtcgtcctctgggagtgggccaagggcgacaaccagagctggaagatcctcccctggggcgaagaggcct

SEQ ID NO: 435745 - DNA, 503 bp, Triticum aestivum
ccgggccgacggggctctccatggcgtccaccttcgttggcaactcgacctccatccaggagatgttccggagggtgagcgagcagttcactgccatgttcaggaggaaggctttcttgcattggtacactggtgaaggcatggacgagatggagttcaccgaggcggagagcaacatgaacgacctcgtctcggagtaccagcagtaccaggatgccactgctgacgaggagggcgagtacgaggatgaggatcaggagcctgaggaggacatgtaaggtgggatgtccatgtcgtgctttgctgggtgggggttctgggggcagagtttgatctgtttggtgctttgttataaatctgtttatcatcgcaactaccgcttgtacgccaccgccattcttcctgcctttcctaagctctgtatttcctatgttatggcaccttttcggtattgtatcacttgatgccgcgcggtatgttctgagttgaggtttctggttctc

SEQ ID NO: 435746 - DNA, 970 bp, Triticum aestivum
  unsure (1)..(970): unsure at all n locations
cggtcaggtataccgggtcgaccagcaccatccaaaactgtgttcatgccgacccagtacataccgttaatgtagttgaggctgacggggatcggatcgcagtcaagggggttgatgctcgccaccctacgatcgttatgctgcgtgacatgccgtttctgaagatcaggcggcatcagcaagcaaggagctggcttaaaaagctccggcctgagggctttgagtaaacggtacagccccgacgagcacgcggcgagcggcatggtactgagattgtccacacgcgaaacaatgagcttgattacctctgtggggagcgaattccagccactctttcggcggacgctgctcggttctgccattgttagtgcttgggtttcggacgaggggggaggcgccttagcggggatggaagcttggacgagattatgtgcggacaaagatggagaagcgaatatgtgctgcgggaagtggataggtgatgatgactacagcacgccgcttgacttacgagacacataccagcagcgtagggtcatatcgatgccagacaacttgcttgagtgatcacagtactggtactccctatagtacctactacagtactatgccctagcttgctagagtagagtagtagagtaggactctgctctactactagcaccggaggagtagtatattctaatctaaaatagttacaaacttcgatgcccgatcgtggaacgactacgaaccatgctcaaagaccgtgtctacgtggtgtttggacttatatgcaaaaaatagcgcaagatgcccgtgcattgcacggcacaccatcatcaccaactcggttttttctctactcctactcctatagaagacttagttggtgatgatgggggtgaggaggcgtgttcagccgggcgtgcagcggacggcgcagcactattcgatttgttacaaaanagtacttgtagagatagataca

SEQ ID NO: 435747 - DNA, 431 bp, Triticum aestivum
gaggaggagctgtacgaggacgaggacgacgccgacctccaggagtaggggcgtgcgaggtctgggttcttctgtgatcgcgtgcgtgctcagtcgggggctatttctgatggctccatgttgctgctactagtagtgtgtgtgtgtgtgtttcgcgcttgctggcccccatcttcggggtgtcgtggacttgttgcttgtgtagtttgtctgtgtcgggttaattcggtagtcagtttgttgcgcgtgcgttacggtgaactagaggtcttagtagcaggtttgcaatatggctggctcattgtttcttcacatagtttgtgatgattgtcgttgtcaagtgctccaccacctcgagggcaatattggctttaccagtggactggatgcatccgtggatgtgttacgtgccatgatgtgcagtcggcatc

SEQ ID NO: 435748 - DNA, 446 bp, Triticum aestivum
tcgcccacgcgtccgccttcctgcactggtacacgggcgagggcatggacgagatggagttcaccgaggccgagagcaacatgaacgacctggtcgccgagtaccagcagtaccaggacgccaccgccgacgaggaggaggagctgtacgaggacgaggacgacgccgacctccaggagtaggggccagcggggtctgttccgtggatcttccttgatcgttgcccggggctatttctgatggctccatgttgctactagtagtgtgtgtgtttcgcgcttgctggcccccgtcgtcttcggggtgtcgtggactggttgcttgtgtagtttgtctgtgtcgggttaatccggtagtcagtttgttggtgaacttgagatcttagtagcaggtttgtaatatgtctggctctgaatcctaatgcaatgtttgctgtttcttcacat

SEQ ID NO: 435749 - DNA, 597 bp, Triticum aestivum
gacagccccactacccaaccgccgctctccgagtctcctgaaagttgcaacctctccctctcggcgaatttggggtttctgaggcgcgcgaggtaaaccaaggttttgctcatggctcgtactaagcagaccgctcgtaagtccactggaggaaaggctccaaggaagcagctagccaccaaggctgcccgtaagtctgctcccactactggaggagtgaagaagcctcaccgttaccgccctggaactgttgctcttcgtgagatccgcaagtaccagaagagcacggagctgctcatcaggaagcttccattccagaggcttgttagggagattgcccaggacttcaagactgacctccgcttccagagccatgcggtgctggcccttcaggaggctgcagaggcctacctggtcggtctcttcgaggacaccaacctgtgcgccatccatgccaagcgggtgaccatcatgcccaaggacattcagctggctaggaggatccgtggcgagagggcttaaggtgctgtgcttgccttgcctgtgggaatcgctctggtgggcatctgtgtctgcttttgctgctgaacacttatc

SEQ ID NO: 435750 - DNA, 398 bp, Triticum aestivum
gatcgttggccgccctgctcttgctactcgccatcgtcgtgccgtttactcagacccggacgcagagcgcacgggacaaggctgccatggcggaagacgcggggccgttggtgggaggcatcaaggactcgccgatgggccaggagaacgacctcgacgtcatcgcgctcgcccgcttcgccgtctccgagcacaacaacaaggccaatgccctgctggagttcgagaatgtggtgaagctgaagaagcaaactgttgctggcacgatgcactacattacaattcgggtcactgaaggtggggccaagaagctctatgaagctaaggtgtgggagaaaccatgggagaactttaagcagctccaggagttcaagccggtggaggacgctgcaatcgca

SEQ ID NO: 435751 - DNA, 663 bp, Triticum aestivum
tcttctgcgcgtccgcccacgcgtccgcccacgcgggcggcggattagggttgcgcttgcatccattctcaacgttagcaggagcgagtgggagtccggccatggcgccgtcgcagcccaagtcagggctcttcgtgggcatcaacaagggccacgtcgtcaccaagcgcgagctgccgcctcgcccgtccgaccgcaaggggaaaggtacaaagagggtgcattttgtcaggaacttgatcagggaggttgctggatttgctccctatgagaagcgtatcactgagcttcttaaggttggaaaggacaagcgtgcactcaaggtcgccaagagaaagcttggtactcacaagagagcaaagaagaagagagaggagatgtcaagtgtccttaggaagatgaggtctgctggtggtggtggtgctggtgacaagaagaaatagagcgtggctagtcggtgaattttatcccaaaactctgtcctgtattaccagtccgtacctttagagctatctatggccatagtgttggattttggaattaagcccgtggtttctattttgagaagaccaatctttttaagatatttatgtcagattggtgcctttgttttattgttacttgctttgtttgattacttgatacccagctgtttattcggtt

SEQ ID NO: 435752 - DNA, 645 bp, Triticum aestivum
tgacatcagcaagcgccggccagcctcggcacagctgcgggtggttatatggtgggcggagtacacgagtgggttccgatgtcaggataaccaccgtccatagctctcatgtgaatgtggcaaggccacaaaacaagttttccatcgccagatatccaacagatcaactggtgttatggatgcgtcttaaagatatttttttgtcatttcaaacatcaaacaccaactattcacaatggagacacagccgcttcacttctcccaggtaaaggaaagattcgcccatggctccgtcgcagcccaagtcgggcctcttcgtgggcatcaacaagggccacgtcgtcaccaagcgcgagctgccgccgcgcccgtccgaccgcaaggggaaaggtaccaagagggcgcatttcgtcaggaacttgatccgggaggtcgctgggtttgctccgtatgagaagcgtatcactgagcttctcaaggttggcaaggacaagcgtgccctgaaggtggcgaagcgaaagttgggtacccacaagagggcgaagaagaagagagaggagatgtccagcgtcctcaggaagatgagatctgctggaactggaacagacaagaagaaatagagcatcccaggctcatgaagttgat

SEQ ID NO: 435753 - DNA, 629 bp, Triticum aestivum
tgctctaacgctcaacactttgttacatctagcggatttggatttctttaacaactaaggttcctgtttttaacattttaaagccaagggcttttgcccatctccaatagctaacaagaactctttcttttctttacaaatcccaaaacctttactagactttttctgcttctttagcttacttcacctagagtcttctaccttttcttatcattgaatcaacccctttttttttttcttttaaacacatcccaacccaaagtataagcgcccacctagtcctatctagtccgaaaaatgcgaactagaactacatgagacactatctctgtcgttacgaacctaacactttctaccaagcttaatcggaataagacctcacaaacactcacaagttatatagggcttgaaagaaagtctaggtttgggtttgggttaactgctctaataaggagagtcagctacttggattaaaaagagtgatcaaaatgaataagaaaatccaagtattttacggtatccatgagttcaaatttgatgcagacatgataattaaagattagattcaggttcaaattgatagggaatggtatcagatcatgacagtgtggccgagtagagcaatctaa

SEQ ID NO: 435754 - DNA, 391 bp, Triticum aestivum
cactttgttacatctagcggatttggatttctttaacaactaagggtccggcccctcttattgggattctccgggcctaacgcccatctccaatagctaacaagaactctgcctttgctttacaaatcccaaaacctttactagactttttctgcttctttagcttacttcacctagagtcttctaccttttcttatcattgaatcaacccctttttttttttcttttaaacacatcccaacccaaagtataagcgcccacctagtcctatctagtccgaaaaatgcgaactagaactacatgagacactatctctgtcgttacgaacctaacactttctaccaagcttaatcggaataagacctcacaaacactcacaagttatataggg

SEQ ID NO: 435755 - DNA, 379 bp, Triticum aestivum
ggatttggatttctttaacaaccacggggcccgcccctttcttgccttctcagggcgattgcccatctccaatagctgacaagaactctgtcttttctctacaaatcccaaaacctttactagactttgtctgctcctttagcttacttcacctagagtcttgtaccttttcttatcattgagtcaacccctttttttttttcttttaaacacatcccaacccaatgtataagcgcccacctagtcctatctagtccgaaaaatgcgaactagaactacatgagacactatctctgtcgttacgaacctaacactttctaccaagcttaatcggaataagacctcacaaacactcacaagttatatagggcttgaaaga

SEQ ID NO: 435756 - DNA, 597 bp, Triticum aestivum
tgctctacagtgttctccgacctcttcccgcacctagcaaatggtaagccaagaaagccaactgacggcattgcacatgagctgacaaagaaatgctgctgctgctattcaacgagatcgattctaacctcaaagcgcccagatcccaatgacgagctcgtcgacgatgtccaccacgttgcagtcgcgccatgggccccgaatgcgaaccccgtcgacatggcctggtccgttgtgccggtactgcgatccggcgacttgtcccattcgaccatccagttctcgccctcctcgtcggcgcttcagagcttcgccgtgaccctgcaacaggtggccccttcgaagctgtccagccacagccgcagcggcattgagatcctcgtcctcgacgttgctccccttccgctagacacggtgttcgtcaacctggagagcgaattgacaaaacggctggagagcggcgagggcaccttttacaaggaccatccgacaagccccaatgccaaggacgttgccaacatgacgcccgaggagcgtctagccacggcgctcagggcagctctcagcaccctcaagattgtccattccggcgatttg

SEQ ID NO: 435757 - DNA, 514 bp, Triticum aestivum
caacaacaacaactagttctaccgcaacaacaaataccatttgttcatccatctatcttgcagcagctaaacccatgcaaggtattcctccagcagcaatgcagccctgtggcaatgccacaaagtcttgctaggtcgcaaatgttgcagcagagcagttgccatgtgatgcaacaacaatgttgccagcagttgccgcaaatcccccagcaatcccgctatgaggcaatccgtgctatcatctactccatcatcctgcaagaacaacaacaggttcagggttccatccaaactcctcagcagcaaccccaacagttgggccaatgtgtttcccaaccccaacagcagtcacaacaacaactcgggcaacaacctcaacaacaacaattggcacaaggtacctttttgcagccacaccagatagctcagcttgaggtgatgacttccattgcgctccgtaccctgcaccgatgtgccgtgtcaatgtgccgttgtatagaaccaccactagtgt

SEQ ID NO: 435758 - DNA, 354 bp, Triticum aestivum
tatcgccctctttataatgcgatgagaactgagagtgctttgaagtttgggtggtttttcctattttacatgattcacataatcttctgcgtgtggtcagctgcgtctcccccattccctttcaaaggaaattctttgactgggattttgcctgccattgatgtcataaccaagagccttattggggggatattttactttgctggatgtggattgttctgccttgaatcactgctgagcataggtgtcactcagcaagtgtacatgtacttccgtggaagtggaaaatcccaggagttgaaacaacaggcagcacgtggtgccctgagctctgcgttctgatgaagaaaacca

SEQ ID NO: 435759 - DNA, 556 bp, Triticum aestivum
  unsure (1)..(556): unsure at all n locations
cccttgttatcgtccacgcgtccgggcaaggtccgggggggtatgttccaggccaggaggggtaatatctgcgccaatcacctagtgatctcgaccacgaagatgcaggaacacgccggcagcgacaagtcctgtgtctggcacgcggcagactctgctgacggagaaccgcggccggagatgtttgccatccggtttggcaccgttgagaattgcaagaagtttaaagacttagttgatgagatcgctgagtcgcttgcaaagaatgaaggcggtgaaagcgaagaaggttcttccgcagctggactgctggagaaacttagtgtaagcgaaagcaaacctgaggaaagcgcagctaaggaggaatcaactgatgctagcaaggagacagaaaccaaagccgcgacagccccctcagagtagtgggcagagcaacgcccgtcacaatggtaccgctgagcattgctcggtggcaagagtcagtttgtcggtccttcctgttgacggaagttggtagtcgttgacgatgaaatatgctgagaactttntgagacag

SEQ ID NO: 435760 - DNA, 387 bp, Triticum aestivum
attcccggcccgacggggttgctataatcaaagacgcattgccccaaatgcctctagaaagatccgaagtaattcgagctgtaattgtacgtacatgtaaagagttcaaatgcgaagacggtataataatccgctatgatgacaatgctgcggttataattgatcaaaaaggcaatccaaaaggaactcgagtttttggcgcgattgccgtggaattgagaggattgaattttaccaatgtagtttcattagctcctgaagtattataaatactagtgggcgaaattgagatcaaagaattaatttagtagattgtgttttacgtatatgttttaaaatccaaaatgaaaaaaaaaaaaaaagaaaacatgttgattatagaaaaat

SEQ ID NO: 435761 - DNA, 459 bp, Triticum aestivum
tcaaggccgaaaagaagaaaataaaggctgctgtcaagaaaatgtatgacattcaggccaagaaggttaacaccctcatcaggcctgatggcaagaagaaggcgtacgtgaagctgacaccagactacgatgctcttgacgtggccaacaagatcggcatcatataagccagagggagggtcctgcagtaggcgcttgtgtcgtggtttcttatgttattggaattttgtagttgttacttagcaaaagggccttagtggctccattgcctaccatatcgctgcacactttcatgaatttgatgcaatcgaagtgacttgtgttgatgctaatttgagctttgcgtttggtcttaccgtattggttggtttctttaccatccttcgacttactgtatttcctgtataatttcccggttttgctggttgtgtgtttgttgaagtctttgctgctttggac

SEQ ID NO: 435762 - DNA, 462 bp, Triticum aestivum
tacataacacacacaatcatttggaacggaccaatgggtgtttttgaatttgacacgtttgcattaggaactgagtctattgcaaagaagttggccgagcttagcaaaaagggtgtgacaactatcattggaggcggagactccgttgcggctgttgagaaggtgggagtggctgatgttatgagccacatctcaactggtggtggcgccagcttggagttgttggaaggaaaggagcttcctggagtcgttgcacttgatgaaggtgtcatgacgaggtcggtgaccgtatgaggctaagcttcatttgttgcatcttaattcctttcatgtaccgttccaaacctgccatgttgtcctccctcttttgctcgtcttcgaccactcgaaatgtaagagaccaatgttttatagagaaatactgggaactgtttgaataacacccccagcaatttgtgctca

SEQ ID NO: 435763 - DNA, 400 bp, Triticum aestivum
tggcgctcgggttcagctgggcgcacctcatcggcgacgtggccacggcgacgacctgcttcaatcactgggcaaagatactgggcggcaagacgccagacgccgtcaccgtgaaccccaggaacgagccgcaagaccgcgcgcctgccgacgccgccgtgccgcgctccgtgaagtcggtcgggcccatcgaggactactggtttgtccccgccggcgtcgacatggcgggctactccttccacgtcaccgagccgatgctcacgaggctgcagcagcaggagccagcggctgccggcggcgccttcgagctcatctcggcgctcctgtggcagacggtggcgaagatcagggccgccaaggaggtgaagacggtgacggtggtgaggaacgacatgtc

SEQ ID NO: 435764 - DNA, 431 bp, Triticum aestivum
gctcatcttcctcctctcttcgtgttagggttagggccgttcgctcccgaagatcagagatggcggtgccgcttctgacgaagaagatcgtgaagaagagggtcaagcacttcaagagggcccatagcgaccgctacattggcctcaagcaaagctggcgcaggccaaagggtattgattcccgtgtcaggagaaagttcaagggatgcaccttgatgcccaacatcggctacggttctgacaagaagaccaggcactacctgcccaacaagttcaagaagttcgttgtccacaatgtctctgagctggagctgctcatgatgcacaacaggacctactgtgccgagatcgcccacaacgtctccacccagaagcgcaaggcgatcgtggagcgtgctgcgcagctcgacgtcgtggtcaccaacaagctt

SEQ ID NO: 435765 - DNA, 290 bp, Triticum aestivum
atggggctcgctaaagtgcgtcactgtaaactctgagctgttcagagagagctaagcttcagtcgattattgacggttgaaccaagtgaggctgtgaattgtcgctgttttcatctatcaataaaatcttgtacgtactctaaaaaaaaagctggtacgaattgcaaaagtgaaaaccgcaaaaggtgcaaacacgacagcaatctttttttatttttattttttttcaaaaaaaaaaaaaaaaaaaaaaaaaaaagcggcagctcaaaaagatcaaaacttaaaataga

SEQ ID NO: 435766 - DNA, 944 bp, Triticum aestivum
tccacgcgtccgcccacgcgtcccgccgcccgtccggtggactccgtgtgggcggagcgaagtgggagccaacgccaagccagccgagcggactcctctcctcctcgcagcagttcgcgattcgcccccaaatccagcgccctccccgccggaatccggcgccgaatcttgcagagagcttgaaccgagctatggacaacttgtggcatctcggagatgagttccgtgggcaatcaaaggtggtggaggaccgccaatggtctctcatgacatcaaagctggctgagatcacaaagtcaaaggctgagaggatgaatgactttgagtatgcacggatgaacaccgtccctgatgtgaagcaatgggataagttatcctaccaccaagaagacaacaagatggaccacctcaatcttggcctcatgaacctggatcttaagatgaatgatctcaagatgaacgaggctgccatgaagtaccctttccgcaacatggcctattacatgaatccgatgtaccccaagggaaacaacggtaatgtcaattcgttcaagatgaatgttggggtcaacaaatatcccaataatcagaatgggaaggaaacaaacggcaaacacaatggtggtaacaacaacaatggaggcaacagcaacaacaactctgttgacaagcgcttcaaaacattgccaacaagcgagatgctaccgaggaatgaagttcttggtggatacatctttgtctgcaacaatgataccatgcaggaggatctcaagagacagctttttggcttgccagcaagatatcgtgattcagtccgagccatcactcctggtctacctcttttcctctacaactacacgacccatcagctacatggggtgtttgaggctgctagttttggaggatcaaacattgatcccaccgcttgggaagataagaagtgc

SEQ ID NO: 435767 - DNA, 451 bp, Triticum aestivum
ttggtcagtggggggagctggaggttcgcagttggtgcgcgagcgagacagcgagtcgcggcgatggcggaggcgggaaagccgagggtggtggtggtcggcggcggcatcggcggcgccctcctcgccaagaccatggagcccgacgccgacgtcgtcctcctcgacccgaaggactacttggagatcacctgggctgaattgagatcaacggttgaaccatcctttgctgagagatcattaatatatcacacggattacctccacacaggcaacaatggtaacatcttcggcattcagtatcactgacacatgctgttctgactgctgatggtcaatcacttgcatatgattacctcgttgtagctattggccatgtttttgcttctgctggaagcagaacagagaggcttacggaattccagagagataacgagaagataaaatcttc

SEQ ID NO: 435768 - DNA, 625 bp, Triticum aestivum
ttgtaagaagcccagcgagaagataaaaagcctcaaggcccatttccccatctctatcatcggcggcggcggctcgagcagaggaaaggaagctttctaccctagcagagaaaaaaaaagcagaggagaggaagcggaggcgacgatgtcggcgatgacggcggcggtgcccttctggcgcgcggcggggatgacctacatcggctactccaacgtctgcgcggcgctggtgcggagctgcctcaaggagcccttcaagaccgaggtctcctcccgcgagaaggtccacttctccctctccaagtgggccgacgagaagcagcagaagcccactgtgcgcacagatgatgaatgaagatcgggtgccatggtgattgatgttttgagaagttgttgagtcagggcttaagaacttgagaataaattcttgcggtgacaatggatctattccgatactatgttgttatatttactaattgctccttttctacttgatgaacctgaaccatgtgaaactcgtgtcttgtggggctcgagtgagcgtgtttttatgcgttaaaaaaaaaagaacggaaaatagtaccaaggaggcgtcgaaaaattagaacataacaacttggaagag

SEQ ID NO: 435769 - DNA, 372 bp, Triticum aestivum
ggcaaattacagtgtctgaactgaaatacatggaggagatccagaccatgcaagttgaaacaactgaaaagaatgaagcacttacaagcaagatgcaggagcatgcaaacttagtccatgaaaaagatcagttggagcaacaattgctggaagttaggaaggaactggaggctgcttaccgtaccatcgctaaccaggaagagcaagcttcagtgagggagataaagtgggatgcgtttaagacgtattcagcggatcaactagaagctgcacaaaaacacgctgcagagctggaagtacaagtatcagctcttaatcagcagctgcaagaagctgagatccattacaagaaaaaggttgcaaaggagagtg

SEQ ID NO: 435770 - DNA, 512 bp, Triticum aestivum
ccttcttcgtccggcaggctgccaagagcatcattgctagcggtcttgcacgccgctgcattgttcagatctcctacgccattggtgtgcctgagcccttatctgtcttcgttgactcttatggtactggcaagatccccgatagggagatcctcaagattgtgaaggagaactttgacttcaggcctgggatgatcagcatcaaccttgacttgaagaagggtggcaacaggttcatcaagacggctgcttatggccactttggccgtgaggatgctgacttcacctgggaggttgtgaagcccctcaagtttgacaaggcctctgcttgagaggtgggtatgaaggagtctatcattcctgctgctgccgctggtggttgtatcttggataattgaattccttctctttagaaggaagcagggtttcaacatcgccgtggacacgctgaattggcgtctagtgattggtattttggtatggcatacacaattatgtgctgagttaatact

SEQ ID NO: 435771 - DNA, 566 bp, Triticum aestivum
acggtcaggacttcccgggtggcctcctacggcaccgacaagatccccgacagggagatcctcaagctcgtgaaggagaactttgacttcaggcctgggatgatcagcatcaacctggacttgaagtggggtggaaacaggttcatcaagaccgctgcttatggtcactttggccgcgatgatgccgacttcacctgggaggtggtgaagcccctcaagttcgacaaggcatctgcctaagaacaagacatcacattggggttattcttggtctgctgcctctcaagttcgacaaaggcgggatccttttgctcctgggaagtaagaagaagcattcgacatcaccgcgacgtgctacactggtcgtgccgtctagtgatcagtgctaagttttcttactggtgtatcatttcatatatttttccttttctttttgagtctgctgaaactgctgagtgatgtgcaatttgctctgtcacttcgtcactttcacttttcatattctgttttgtgtagtttcccctcataatgctctcctcataatgctctttcttccagagtttaaa

SEQ ID NO: 435772 - DNA, 444 bp, Triticum aestivum
  unsure (1)..(444): unsure at all n locations
tcggttgatcgggtcttgagagtccaagagaacggtgctgctacccccaaagaacaagtggttgatgccagcgtcgaagaggccagggctccacaagtgccttcacaagatgcaggcgttgtggcggcgaacgtggtcgggccttcgacggtaaagccggaggacaaaacggaaatcgatggttgatgttgagggataagaactgcatcggaccccctcttcagtttagttgctaaactggttctagtctaccagtagtcagtactaatgattacctataccaaattttcctgtcccgtatgcttgcgttgttttattgagactttgagaggctaccgttgtttatggtgtactcaaaaaaaaaaaaaaaaaaaaagttctagannnnnnnnnnnnnnnnnnnnnnnnnnnnnnnnnnnnnnnnnnnnnnnnnnnnnnnnnnnn

SEQ ID NO: 435773 - DNA, 414 bp, Triticum aestivum
tctactcgtccggccacgcgtccgaaaaaatctctctcggctccccgctccgagtcgcgtcgcgtgaggagaaaggaacggaacccggaaagggttctccgccgacgcggaagggggagatggccgggaagggaggcaagggcctgctcgcggccaagacgacggccgccaagaccgccgagaaggacaaggggaagaaggcccccatctcccgctcgtcccgcgcggggctccagttccctgtgggccgtatccatcgtcagctgaagcaaaggactcaggccaatggccgtgttggtgctactgcggcggtctactctgctgctatcctggagtacctgacagctgaggtcctggagctggctggcaacgccagcaaggatctcaaggtgaagcgtatcacccctcgtcacc

SEQ ID NO: 435774 - DNA, 487 bp, Triticum aestivum
cccatgcgtccgcacaagccaatcaagctctctgctccttcccagctacatttccagcaagcaagccgaagcactagatcctcgatggctcgcgtggcactgctcgccgtgttcgccgtgctcgccgcactggctgtggcggagatggcgtctggggcggtgacctgcggcgacgtgacgtccgccatcgcgccgtgcatgtcctacgcgacggggcaggcgtcggcaccctcggcggggtgctgcagcggggtgaggaccctgaacggcaaggcgtccacctcggccgaccggcaggcggcgtgccgctgcctcaagaacctggcggggtcgttcaagggcatcagcatgggcaacgccgccaccatccccggcaagtgcggcgtctccgtctctttccccatcaacaccagcgtcaactgcaacaaccttcactaagttatctgtcagcatcatcacaccaggctctatatggatagctagccga

SEQ ID NO: 435775 - DNA, 320 bp, Triticum aestivum
ccctctcgtccgtatattagcaagtggtggtttggatcattgcgaatgggtggcgttactggagaccaccacccctgcgtcacactggacgacgatggattgcaagctctccaaagctcggtccatgaagggctcgatcggctctcggagattacgccaggcatcggtctgtgtcgagttctgcagggccgatgaatccgccgccgctccaaagacgggagcaggggccggtctcgagtatctacacccacccaggaatgatccaaactccagccggaagaaacagatgtacaagtatgctttgccctttgattattctc

SEQ ID NO: 435776 - DNA, 442 bp, Triticum aestivum
  unsure (1)..(442): unsure at all n locations
gctcttggatcagatcaaatattgcagtggtggtccttcggctgcatcatgggaaagtgcactaagcaagttcacgcgctgttgctacttcttctcgtatgcttcactattcatgggcagtttgaagccatcggtgtcaatggcgagcgtattcctccgtggtgcacaaagagtgcaactataccaatctgcaacccagataaatatagatgctattgttgtgttcaaaattggcaatgctacaaaacaatggatgagtgcagagccaagtgtgcatatttacctccctcctcttcctctgtacttccatgaaaccgggttcttctcatgagctagaagaaaaatgaataagatccagacaataaacaatttgctatgnnnnnnnnnnnnnnnnnnnnnnnnnnnnnnnnnnnnnnnnnnnnnnnnnnnnnnnnnnnnnnnn

SEQ ID NO: 435777 - DNA, 144 bp, Triticum aestivum
tctgtcgcgtgggtttccgaccagagcatatttctcgttccatatgatctgtgtttgtacgaacataggttgtggagcatgcatatgtaaattctagcgaaaaatctatactgaagtcgagaggggctcggggctccgctgctt

SEQ ID NO: 435778 - DNA, 619 bp, Triticum aestivum
gggcggacatcgatttcaaagcaatggagcacaagagccccgagcatctcgtcagaaaccccttcggccaaatccctgccttccaggatggggatctgcttctcttcgagtcacgcgcaattgcaaagtacgtgctccgcaagtacaagaagaacgaagtggacctgctgagggaaggcaacctgaaggaagcggcaatggtggacgtatggacggaggtggacacgcacacctacaacccggccatctcgccgatcgtgtacgagagcctcatcaacccgctcatgcgcggcctgccgaccaaccagacggtggtggacgagagcctggagaagctcaagaaggtgctggaggtctacgacgcgcgcctgtcccagcacgagtaccccgccggggacttcgtcagcttcgccgacctcaaccacttcccctacaccttctacttcatggccacgcctcacgcggcgctcttcgactcgtacccgcacgtcaaggcttggtgggagaggctcatggcgaggccggccgtcaagaagctcgccgcacaaatggttcccaagaagccgtgatttgctaggcgggatttcgcatcgtgggatccgattccgatcactgatct

SEQ ID NO: 435779 - DNA, 463 bp, Triticum aestivum
ttttccacgcgtccggttcccgttctcctctccccctgtcgcctccatagcagcagcagctccagctcgagcaagaaagaactagtttgatctgtgaaaatgttggccatcttccagaagcaggtggcgcacgcgccgcaggagctcaacagcccgcgcggcagcaccgccaagcccaagaaccccgacgagatcctccgcgacttccacgccgcccacccctccgacgccttctccacctccttcggcggcggcgccgccctcgcctgcgtcgccgcgcagccccgcaacctcgccgccggcgggtaccagaggatgttctgcgggctggacgacatctactgcgtcttcatggggacgctggacaacctgagcgcgctgatgcggcagtacggcctcacgggccgctccaccaacgaggcgctgctggtgatcgaggcctaccgcaccctgcgcgaccggg

SEQ ID NO: 435780 - DNA, 466 bp, Triticum aestivum
cgtctttcccgttctcctctccccctgtcgccggcatagcagcagcagctccagctcgagcaagaaagaactagtttgatctgtgaaaatgttggccatcttccagaagcaggtggcgcacgcgccgcaggagctcaacagcccgcgcggcagcaccgccaagcccaagaaccccgacgagatcctccgcgacttccacgccgcccacccctccgacgccttctccacctccttcggcggcggcgccgccctcgcctgcgtcgccgcgcagccccgcaacctcgccgccggcgggtaccagaggtaacgccaccatctctcatgacccaaatcgctcccagcaaccgcaacgatgtccggacgaataagaagaaccgatctctctgtgtgcgcaggatgttctgcgggctggacgacatctactgcgtcttcatggggacgctggacaacctgagcgcgctgatgc

SEQ ID NO: 435781 - DNA, 401 bp, Triticum aestivum
gtgcccccaaatcggcgacccctctctctccgatctccaatccccacctcgcacacgcgcaccaaccgggcacgatgcgggcgatctcgtcggcggcgggagggatgctgcgggcgcggctgagcgcggcggcgcgcctccgcggcgggcacggcgacggcgggggccgctggacgacgcccggccacgaggtgcggcccaaggggtacccgatgaaccgcacgccgccgccgccgggcgagtcgcgcaagtgggaggactgggagctcccctgctacgtcacctccttcctcaccgtcgtcatcctcggcgtcgggctcaacgccaagcccgacctcaccctcgagacctgggcgcaccacaaggcgctcgagcgcctccagcagcaggagctcgccgcc

SEQ ID NO: 435782 - DNA, 716 bp, Triticum aestivum
gagcgccgcactactataaaagctcgctcccaaaactcgccccgctaccgcagccgccacacacgacgaaccccgggacgaagcagatcggcggcgcgtcactccaatcaccggttcggataaatggcgacggtttcggattctctggtctgggagctcgtcaggaagaacaactgcttcctgatcaagcagttcggcaacagcaatgccaaggtccagttcagcaaggagcccaacaacctctacaatgtccactcctacaagtactctggcctggcaaacaagaagactgtgacggtgcagccagctgctgagaaggagatgactgtggtcctctccacaaccaagtcaaagaagcagaacaagcctgctgcgttcacccacaagactgtcatgcgcaaggagttccgcaagatggccaaggctgtcaagaaccaggtcagtgacaactactacaggcctgacttgaccaagcctgctcttgcaagactgagcgcagtttaccgcagcctccaggttgccaagtccggtgtcaagaagaagaacaggcagtaagcactgaggggccaatgagcttgttttgtggatccgttggtttatgtttccagctttttagatttgttctaagagtatggaggttgaatatgatgaatggtgtgctctgcatactggcccaagttttctcagtaggttctatatctgtacccatgactatg

SEQ ID NO: 435783 - DNA, 477 bp, Triticum aestivum
cctacgcgtccgcttagactccgacgatgcactctgtggtggtttcagcaggcttgatcatgatgtcgactacttcacaaccgaacatccgcatgacaataggccacgctctttctcggtgtacactcctagcagaactgcggtcgtgtatgcccttacagagtaagaaccagcagcggcttgttacaaggcaaagagagaactcgagagagctcgtggattgtgagcgaagcgacgggcaacggcgcgaggctgctctaagcgccatgaccgggaggggatcgtgcctcttcccctgatgccaggaggatcagatggataaggtagctcgttggtgagcgctcgaaagaaaatggacgggcctgggtgtttgtcgtgctgcacttaaccctcctcctatcttgcacattcccggttgtttttgtacatataactaataattgcccgtgcgcttcaacatgaacatataaatattct

SEQ ID NO: 435784 - DNA, 598 bp, Triticum aestivum
cgggtcgacggggtactgaaagacaagaagaagccgatcatcttctcgatggctaggttggaccgtgtcaagaatatgactggcctggtagaaatgtatgggcggaatcctcgcctacaggagctggtaaacctagtggttgtctgtggtgaccatggaaaggtgtccaaggactacgaggagcaggcagagttcaagaagatgtttgatcttattgaacagtacaacctgattggtcacatccgctggatctccgctcagatgaaccgtgtccgcaatggtgagctctaccgctacatctgccacaatgaagggagcctttgtgcagcctgctttctatgaggctttcggtcttaccgtgatagaggccatgacatgtggccttccaacattcgccactgcatatggtggtccagctgagatcattgtcaacggcgtgtccggctaccacatcgatccttaccagaatgacaaggcctccgcactgctcgtggacttctttgggaagtgcaaggaagacccgagccactggaacaagatctcgcagggaggactccagcgcatcgaggagaagtacacctggaagctgtactctgag

SEQ ID NO: 435785 - DNA, 411 bp, Triticum aestivum
cccacgcgtccgcggacgcgtgggtctggagctcgccgggaacgccgccaaggacaacaagaagagccgcatcatcccgcgccacctgctgctcgccgtccggaacgacgaggaagatgaggaccagccgccggccaagaagaagaaatgatctgccttcctgctgtcagtgtttcagtcccttagtttatctgctgtctagatgttgattgagcgggtctggtacacaccgacctatgtagcttctgtgtcgtggtggttcggtgtctcatagggtagaacattgaacttctaatgttgtttcctgcgttgtgcaagtagtcttaacatttcggtgttgatgtctgtgtttattggagctgtgataccattcaatctaattcttgttactccaaaaaataaaggttagaa

SEQ ID NO: 435786 - DNA, 373 bp, Triticum aestivum
attaggaaaacaattactattcattaattgcctgaacaacgtggtcaggcacatcagacgtgcgcatcggctaggactggagtacagcaaggagttgccagttcactcacgcatacggacgcgtgcatacatgtcgcataaatatatatgcacacacagtgtgtgtgcaaggtacagacatagacacacttactgaaataacacacacaggcaacttcattttattttttagtagctcatcatctgtatgagcactccatcatcgtagtaattaagctcctcgcaatgcgcggtctccattgcatgcacgtaggaaggattatatattgaactagttgacattgttgcagttggtggacatgctgatggggaa

SEQ ID NO: 435787 - DNA, 606 bp, Triticum aestivum
gtgggcccagtctggaccaaaatagcattgaacccaaacaatgtaagtttgagtgagcatggcaagcatctctgaagacagtccgaactccaaaccatacaacaagtgctaaatctcacacattacaaatattaggacacaaaatgcctgattccataagcatcggttttgaccaaacactattaagtactaaaccagaagcaggtaagccaaaatatcactgagacctggcaattggttcaagggcttcaatcatcaccacactatttcctctcagaaccaccatccctatgtcggtcttctcatctccattgacctccacagtgttgtccaccaccaaattcatgaactgatcaaatccacgaagcgtgccaatgacaacacggttcgcattcagcttgatttggagcttcttgtccatgtacttcttcagatccggcggctgccccgatcggctcatggcggctcccgactggacgagggggaaagcctctctcctctacgcagccaaaccctagaccttcgcaagaggggggaggaagtcgcgccgccgccgcaagaaccctgaaccctagatataagacgagggagggctgggacgtacaa

SEQ ID NO: 435788 - DNA, 711 bp, Triticum aestivum
ttgtcgttgcctcgcaccaaaacacaactaccaccagcggcagcagttcgactccggagaggcagagatgggctccaccgcaaccgacatggccgcctccgccgacgaggaggcgtgcatgtacgctctccagctcgtctcgtcgtcgatcctcccgatgacgctcaagaacgccatcgagctgggcctcctggagaccctggtggccgccggcggcaagctgctgacccccgccgaggtggccgccaagctcccgtccacggcgaaccccgccgcggcggacatggtggaccgcatgctccggctgctggcctcgtacaacgtggtgtcgtgcacgatggaggagggcaaggatgggcgcctgtcccggcggtacggcgccgcgcccgtgtgcaagttcctcacccccaacgaggacggcgtctccatggcggcgctcgcgctcatgaaccaggacaaggtcctcatggagagctggtactacctgaaggacgcggtccttgacggcggcatcccgttcaacaaggcgtacgggatgtcggcgttcgagtaccacggcacggacccgcgcttcaaccgcgtcttcaacgaggggatgaagaaccactccatcatcatcaccaagaagctcctcgaggtctacaagggcttcgagggcctcaacgcccccgcccacgtcgacgagggtgttgaggccctcgaagcccttgt

SEQ ID NO: 435789 - DNA, 241 bp, Triticum aestivum
tttctctttgacatctaactgcctttcggatccagtgcagtggctgtgctgctgaaggttccctcgtgaaataaaagctttcctttacaagagaacggcactctgttttattttgtcttgtgggttaggaagaagcccactgaacaatctttaatttcctttctaccgaaaaaaacatggacaaaaacatgaagagaggtcatggaaagtttttaattcaagtgtttgtaattttcgtttg

SEQ ID NO: 435790 - DNA, 459 bp, Triticum aestivum
gaaaggcgaggactatgtcggccacgacgggggctgtgccgttctggcgaacggcggggatgacctacatcggctactccaggctctgcgcgtccattgtgcggagctgcctcaaggagccctacaagtccgaggccgccgaagtcgagaaggtccactactcccgctccaagtggaccgacggaaagcagcccaagcccaccatctgcgaagatgataaatgaaagatccggtgccatggtgacacagtccttcctacggacgttttcaaaagctactgtgtttcgtgctggccattctacctaaaactcgttatctgttagatttatgtttcacgctcaagaataaattatttacgtgacattggatctgttccgacaccattttattttaacttttaatcgctccttctctaaaaagaaaagaagtggaagaaatcaaaacaaaaaagcggccgct

SEQ ID NO: 435791 - DNA, 614 bp, Triticum aestivum
tttagatcatgtggctggatttcatcattaaaacctcactgcttgtttcctgaaaccacaggtgttgaactgatggggatactatccactcattctaataggatcatgggcattcggcactattaaccgtatccatgatttcatcgagccagggcataagatcttctggctctcagttcttgacgttgggacagctgcactaatggtagcaaacctatcaaataaataagttataaaattcgccatagatcatctttgctcttcccgagtcgatgttctgaatgttgtattttcagggcttgttcaattcaatagcctatggtttcaacagctcagtgcgtcgagcaatccatgagagactggagctgtaagtcaccaccgatctctttggtttgctatattattcccaataatcaatgaagcttgatttttatgaaacccttggtctgctagattcttgccagaacggctatatcgatggcttccaagcaatttcagaccaaaaaaccatctgattctacatcagcaacaacaacagcgaagcgaaatggtatcactcaagaccgaggaccagcaatgacactaactttcaactaatacattggaccgataac

SEQ ID NO: 435792 - DNA, 628 bp, Triticum aestivum
gatttaccgatccaaagggtttcaagcttgagttccacttcaataccaatccattcttcaagaatgaagtgcttacgaaaacgtaccacatgatcgatgaagatgaaccaatccttgagaaggccattggtactgaaattgaatggtgccctggaaagagcttgacacaaaaggtgctaaagaagaagccaaagaaggggtcaaagaacactaaacctatcacgaagattgaaaattgcgagagcttctttaatttcttcagtccacctcaagttcctgatgatgatgaggaaattgatgaggataccgctgaacagttgcagaaccaaatggagcaagattatgatatcggatctaccatcagagacaagattattccacatgctgtttcatggttcactggagaggccgctcaagatgaggactttgacggcatcatggatgatgatgaagatgatgacgaagatgatgaggaggatgaagatgaggatgaggatgacgaggaagatgaagatgatgacgatggtgataagaagaagggtgggcgagttcctgcaggggaaggtcaggcaggggagcggcccgcggagtgcaagcaacagtgaggtccttcccagatgaagactat

SEQ ID NO: 435793 - DNA, 1047 bp, Triticum aestivum
gggggagaggaaacactgctaatgtcatccgttacttcccaactcaggctttgaactttgctttcaaggattacttcaagaggatgttcaactttaagaaggacaaggatggttactggaagtggttcggtggcaaccttgcttctggtggtgccgctggtgcttcctcgctgttctttgtgtactcccttgactatgctaggacaaggctggccaatgacgcaaaggcatccaagggtggaggtgagaggcagttcaatggcctggttgatgtctaccgcaagactctcaagtcagatggtattgctgggctttaccgtggattcaacatctcctgtgttggaatcattgtctaccgtggtctgtactttggactgtatgactctctgaagccagttctcctcactggcactctccaggacaacttctttgccagctttgctcttggttggttgatcaccaacggtgcaggtcttgcatcttaccccattgacactgtccgcagaaggatgatgatgacctccggagaggccgtcaagtacaagagctccttggatgctttccagcagatcctgaagaaggagggtgccaagtccctcttcaagggggctggtgccaacatcctccgtgccattgctggtgctggtgtgctctccggctatgatcagctccagatcctcttcttcggcaagaagtacggctcaggcggtgcctagaggggacgaaatgatgacgaacaagagaagtctgttcccagtcctgcccttcgaggatctggcgaacttttatctttttaacgttggaaggcaataatttctgtagagggtggattttcccaacattcgtttttggtggaggcatcgaactccagaggttgtcgtaggttggcggcagcgttctcaaaacatttactatcataggggttgagtttgagttcgagtatgtgccctgaatcgttactgggcaattttccttaaatacattgtcctccaatccgactgagattattatggtccttgtgctataaaaaaaaaaacccaacatcat

SEQ ID NO: 435794 - DNA, 424 bp, Triticum aestivum
tgaagaaagaagatcgagcgagcgagaaatccccaatccccaccaaaccctaacccaaaccctaaccctgattgaaacgaccaggagaggagaggagaggagcggatccggcgatggccgtcgagaagatgcacttgtccatgccgttgcccgccggcttggagggtttccccttcaccacgttccaggcggagctggaggccttcaccgtcaagttgagggcggaggcgaagaaggccaaggccaagccggaggtcaaggaggccaaggccaaggaggagaaggccaagccggaggtcaaggccaaggtgaagaaggccaaggcgaaggaggccaagccggaggtcgaggccaaggcaaaggaggccaaggcaaaggaggccaaggcgaaggaggccaagccggaggtcgaggccaagtcaaa

SEQ ID NO: 435795 - DNA, 473 bp, Triticum aestivum
acaacccactctttaacaaatttcacacgctccctgcatttcgtgttctccccaaatatattactgcatcttcacttccacccccaccatattatcaccgcaaaaatggtggaccacggtatatcctcacagctactcctatcacacaggttatcatagagccattcaaacagagatttcgaaaagaacccctgctgcctccttcgcggcacaaatctgacccaaatccccaattgagctggacagtctctaagcacgtgaagcacagattcaactccacctttacaaacctgagacacattcgaggcgctaagatgtcttcgatgccgttcctcatctgtcataactatgtccagtttggttatatatattttctggttatacttatacttatatatatctttcctaaatataactattacttttgattatttgttaaacatgtccatggatttaactcaatctcaataaat

SEQ ID NO: 435796 - DNA, 643 bp, Triticum aestivum
tttgtcgcgaaaccccgctccaatctgagatctgctgtcgtgcgcgacccggagccgaaaccctagagtagagcaggggcggcggccatggccatcatctcggacatccaggaggaggaggcgccgccgcagcagccgcaagcggccccggccccggcggcggtcgacgtggacctggaggtcctcgaggcggtgctcgagcgcaagggcggcgcgctcccgttcctccacgcggccatcgacgtcgcgcaccggcgctccgacctcttccgcgacccctccgcggtcggcaagatcaccgcgatggcctcggcgtgcagggcgcaggtggaggcggaggagaggaaggccagggatgccaagaggaaggcggcggagctggagaaggcagcggcggccgagaaggagagggtggtcaaggccgcggccgagaaggagaagcgggagagctcggtggtgacggaggagcggggtgcagggagctcggcggagaaggatggcagcacggaggtggagaagaaggagagcaaggcgaacaaaccaaatgctggcaatggtcttgatatggagaagtattcctggactcagcagttaccagaggttaatgtcaatgttcctgttcctgaaggaacaaagtcaaggt

SEQ ID NO: 435797 - DNA, 415 bp, Triticum aestivum
ttaagctcttgccttcagactcccgattaaggcccgacagatatgcccttgagaagggcgacatgtctaaatctggggcacacaagagcaggcttgaagaacaacatagagctgagaagaaaattcgggacaccaagggggagcaatttactccaaaatggttcaagatgacggaagacatctcccctaccccgtggggcgacctggaggtgtatgaatacaatggcagatacgccgagcaccgggctgcgatagacagctctagcgtcgctgccaaggagaaggacgtcagctccatcgagttcaacccgtggcagtatggcgacttgccttcccaatgatttcaatgggtctgaaaccacccatatattattttctcatcgaaaaagctatcaggccttgtgctgatgcatac

SEQ ID NO: 435798 - DNA, 632 bp, Triticum aestivum
tcgtttatatacatttggacctgataaagtggctggatttcttgagaagcatgatttagacctcatctgccgagcccaccaggtcggtgaggatggcttcgagttctttgctgatcgtcagctagtaacaatattgtcggcacctaattactgtggagaattcgataatgctggtgccatgatgagtgtagacgagacgctgatgtgctccttccaaatactcaggcctgcttggaatatgttgccgggttcgactaataacaagtctggcttcaagtcaatgagaggatggtgacggtggcacggcgattggtgagcaagctgtggtctcatttgcgggcaggcacatgcctaccactagcggctgcgactaaccggcattttcgccgatgcctccagcccggaccggaacaagaacgcagattgtacaactctctcgtcgatggactgtacatcgttcatgtcggattaacactcgtggtaatgtattatagtttttctaccgcgcggatctctttatcgtacgagaggaccatgtgaatgaaactgttgctcctcctttcccccctctaaattcaaaggattcaagcaggcatatacgccaataaaaactggtaagagtcttgggtgct

SEQ ID NO: 435799 - DNA, 734 bp, Triticum aestivum
tggacgcgtgggcggacgcgtgggaaaatgttctggcacttcgaggagatcctccacatggccaggacaaatttgttcaagttgctggtggattttcttgtgctctagatctggtggagcacattaaagccaagtatggtgattactttggcataactgtcgctggctatccagaggcacaccctgaggtaatactaggcgaggaaggtgctacggaggaagcatatagcaaagatcttgcttacttgaagagaaaggttgatgctggcgctgacggtatagtcacccagcttttctatgataccgatatctttctcaagtttgtgaacgactgccgtcagattggtataacctgccctatcgttcctggcataatgccaataaataactacaaaggatttgtgcgcatgactggattctgcaaaactaagattccagctgagattactgctgccttggatcctattaaagacaatgaggaggctgtgaaagcatatggaatccaccttggtactgagatgtgcaagaaaattttggctagtgggatcaagactttgcacctttacacactaaacatggaaaagactgctttagcaattttgatgaatcttggattaatagaggagtccaagctttcaagaacattaccttggaggcctccaactaatgttttccgtgtcaaagaagatgttcgccctatattctgggccaacagaccaaagagttacatctca

SEQ ID NO: 435800 - DNA, 576 bp, Triticum aestivum
tcgcccacgcgttcggtcaaactgggtctgatgtcttgctttgacaaggctgctgtttctggactgcataaccagtcaatcgtgaatgctgtcattgacggcgatgacatcatatacagagactatgtcgacgttagtgtagctgctggcacttccaagggtcttgtggtgccggttatccgagatgctgacacaatgaactttgctgacatcgagaaagggataaacaaccttgccaagaaggctactgagggggcgctgtcaattgacgagatggcgggaggaacattcaccatctccaacggtggtgcctacggaagccttattagcacgcccatcatcaaccccccacagtcagcgattcttgggatgcactccatcgtgcaacgccccgtggtcgtggacggcagcatcctcgccaggcccatgatgtacctcgcgctgacataccaacacaggctgatcgacggcagagaagccgtctacttcctgcgccgcatcaaggacgtcgtcgaggacccccggaggctgctccttgacatataagccccatgcgcccgatctcctttgctgcca

SEQ ID NO: 435801 - DNA, 532 bp, Triticum aestivum
tcccacgcgcccgaccaaaccaaagctgcggcggcgcgcgcataggaggcgaatcagcagcggaaccaagccgccgacgccaccatgggtatctcgcgtgactccatgcacaagcgccgggccaccggtgggaagcagaaggcttggaggaagaagcgaaagtatgagctcggccgccagccagccaacactaagctttcaagcaacaagacagtgaggagggtccgtgttcgcggaggtaacgtgaagtggagggctctccgtcttgacactggtaacttctcatggggtagtgaggctgtgacccgcaagacccgtctcctggatgtggtttacaattcgtcaaacaatgagcttgtgaggactcagacccttgtcaagaatgccattgtgcaagttgatgctgcccccttcaagcagtggtacctgactcattatggagtcgaaatcggtaggaagaagaaagctgctgcagctgccaagaaggaagctgctgagggacaagaagctgaagttgctgctgctgccacag

SEQ ID NO: 435802 - DNA, 529 bp, Triticum aestivum
  unsure (1)..(529): unsure at all n locations
cctcctaggctatggctgacatcggggccaagctcgcgcgggcagccctcgcatcccgccccgttggagatattgctggtggcatctccccgtgtctctcccggctctatctggcggctggtaccagccgtcgcatgtttgcagctgcaggcggtcccaagtcaaaagaagcaccccgaatatttccccttgttgatgagaattccattaagtcgaaggaatccctatgggcctcgtatgaatgctggtgcaagtattggggggtatcccgtgaccgcgaagagatggtccgccggttcaagtcatttgaggctactgcacagtgggtttacaaaatgaacaactctgggtgttcgcaagtgtctcaactgggcccgcatgcagatttttcagagagtgagtttgctgaggtggtgtttcctccacttcctgatgatgatgatgaagacataaaagagatggtgccaggtcaagatttgggccaggagcttgaggagcccttanataattaattcgagaaattatgaac

SEQ ID NO: 435803 - DNA, 646 bp, Triticum aestivum
gccctggaagaggaggagggcaaggaagagggccgacccatcgtcgatgtcggaccgggagctcccgccgccgttgcgatccatccgaatcacaggggacgggagatgcctgttccggtccgtggcttacggcgcctgcataaggagaggcaagcagtcgccgagcgacagcgttcagaaggaactcgccgacgagcttcgagcaaaggttgcagatgagttcatcaagcgaagaggagataccgaatggttcctcgaaggcaatttcgagagctatgtgcggaagatgaggaagcctcacgcctggggtggagaacctgagctgctcatgtgctcccacgttcttgggatgcccatcaccgtccacatgtacaccaagggcaccgataaccccaggatcatagcagagtatggccaggagtacggcaaggacaacccggtccgtgttctatacgacggttatgggcactacgacgcgctgcagccatctcttgtaagaacacaaccaagactgagaggagcgtagctaaccggagaatggtgcgctatgtaagcttcttctactacttctctagggcagccgcataaattccgacatctgctgcaacttggtttcgttcgagttggcagatcacggtatagcaca

SEQ ID NO: 435804 - DNA, 681 bp, Triticum aestivum
gggaatttgataaatcaaatccatggtttaataacgaaccgtgttaacttaccataacaacacctcaattcctatcgaattcctatagtggaattcctataggatacaacatacacagggtgtacgcattacatatgaatgaaacatattcattaacctaagcatgccctcaattttctttaatgagttgatattatattaattgaatatcctttttgttttacgagatttttgctaaagtttcatttacacctaattaacatcgagtagaccctgttattgtgagaattcttaattcaagagttatagggagggacttatgtcaccacaaacagaaactaaagcaggtgttggatttaaagctggtgttaaagattataaattgacttactacaccccagagtatgaaactaaggatactgatatcttggcagcattccgagtaagtcctcagcctggggttccgcccgaagaagcaggggctgcagtagctgccgaatcttctactggtacatggacaactgtttggactgatggacttaccagtcttgatcgttacaaaggacgatgctatcacatcgagcctgttgctggggaagacagccaatggatctgttatgtagcttatccattagacctatttgaagagggttccgttactaacatgtttacttccattgt

SEQ ID NO: 435805 - DNA, 768 bp, Triticum aestivum
cggtcagtaatccgggtggacgggatcttgaaaaaagtagtttaggcattttgcttgtgtcaactatatgaaatctgcaaagtcttttttgtgtgcagaaaatttcacactctgcattacttgcaaaagatgctgattttgatcttaacaattatagttgttgttcaagcagtagaagatctggcaacctcacggccatctcattcgaaattgaagtcctatccttaaagtttagctaagtgtattatttattttctggtttaaattattttcctcatgtgacacaaaaggcttgaagccttcttttaactcgcacttctatgctaaccaaatttatttctggctgtcagaagagttcggagcgaagctggccagcatcttcgcatgtgacacaaatattgttgttcaagcacacaactgctgtatttcgtaaattgtgacgtgttcatatgattttttactgaaggtgcttgtcaattataggtgaaaaacttggcatggaggcgcataggattgctgcttctgtttttggattggcccttgcgagggagaccgaagcaaactccagcaggtttcagggataatacaaccaatccaactactacctttggtgtgctttttggatggactaatctgaagatgctgactagcttgcaccaccatcatatagtcacgaagcaagggcaaggattatagggaaaataaaggcaattcaccatccggaggaaatgccaactaatacatttttgtactttctctattactatt

SEQ ID NO: 435806 - DNA, 413 bp, Triticum aestivum
ctttcgcgttcgatcccatcccgcaccgctcgacagacagacagcacgaggaaggcgagccagccacccaccaccgccgcgagactagcaccacgagcgagctcggccgattccgattccgtctgcgctattaaggtttgtttggaggaaggggaggagtctcggaggtggagctgaggagagagaccggagatggcggcttccgcgaggcagggggagagggcgaccagcttcgccatggcctgcagcctgctcagccgctacgtccgccagaacggcgccgccgcggccgagctcggcctcggaatcaacaagggtgaggccgaggctcacaggacggcggacaccaagagccctttgcctggggcggagggcgaggaggccggcaggaagaaggagaccatggagctgtt

SEQ ID NO: 435807 - DNA, 499 bp, Triticum aestivum
ttgttgaattggcacagcagaggttgagtctgctttggtttcgcatccacagtgtgcagaggccgctgttgttggtgttgagcatgaggtcaaaggtcagggaatatatgcttttgtaactttggtggatggcgttccttacagtgaagaactacgaaagagcctcatatcaaaagtccgcactcagatcggggcatttgcagctccagacaggatccactgggcgccggggctccccaagacccgcagcggcaagatcatgcgcaggatcctgcgcaagatcgccgcgaagcagctggacgagctcggcgacataagcactctcgctgaccccggcgtcgtcgaccagctgatcgcgctcaaagattgctaggatgtaaagcagttatgcgactgttttttcccctatgcggttatgtggttggtagaaggttgattttagtgctcgctagtccttttaatcagtgcgattttctcctgaggctagtgagctgcagcg

SEQ ID NO: 435808 - DNA, 1098 bp, Triticum aestivum
gtagcaaacaccattcaagctagctacagggcactagctagacagagctagcaatggcgaaggacattgaggcggccccccaggggggcgagttctccaccaaggactactcggacccgcccccggcgcccatcgtggacttcgaggagctgaccaagtggtcgctctaccgcgccgtcatcgccgagttcgtcgccacgctcctcttcctctacatcaccgtggccaccgtcatcgggtacaagcaccagtccgaccccaccgtcaacaccaccgacgcggcctgcagcggcgtcggcatcctcgggatcgcctgggccttcggcggcatgatcttcgtcctcgtctactgcaccgccggcgtctccgggggccacatcaacccggcggtgacgttcgggctgttcctggcgaggaaggtgtcgctcatccgggcgctgctctacatcattgcgcagtgcctcggcgccatctgcggcgtcgggcttgtcaagggcttccagagctcctactacgtgcggtacggcggtggcgccaacgagctcagcgcaggctactccaagggcaccgggctcgcggccgagatcatcggcaccttcgtgctcgtctacaccgtcttctccgccaccgaccccaagcgcagcgcccgcgactcccacgtcccggtgctggcgcccctcccgatcggcttcgccgtgttcatggtccacctggccaccatccccatcaccggcaccggcatcaacccggcccggagcctgggggccgccgtcatctacaacaaggacaaggcctgggatgatcagtggatcttctgggtcggccccatgaatcggcgcggcgatcgcggccttctaccaccagtacatcctcagggccggcgccatcaaggccctcggctccttcaggagcaacgcgtaacaagttatcatccatgtcatctgtatgcaagactgaagcaatggcgacccgtgttgtgtccatccatccagagagaaatgcgcttttgcaacttctcgacagttcagttcggccgccgcaatggtcgtgttattatgtgtcggcagctgcatatgcgtagtacgtggtccggtcatg

SEQ ID NO: 435809 - DNA, 418 bp, Triticum aestivum
ttctgccactctcttctactttcccccctcccgtgcgcacggatcggatcggatcagatcagatcagatcaccatgagctccaacgttcaaggtgagggtgaagtccccgtctacgaatcgggtgcagatgccctgcagaagctgcaagagaaatggaagtccacggcggcgccgtacccggccatgtactcgagcttcttgggcgggatcatcctggacccggccatgatggccctccccatcgacgaccacatggtccaccgcggccacggcgtcttcgacacggccatgctcctcgacggccacctctacgagctcgacacgcacctagatcgtttcctgcgctccgcggcgcaggccaaggtgggcaccccgttcccgcgcgacacgctgcgcagaatcctcgtgcagatgacg

SEQ ID NO: 435810 - DNA, 371 bp, Triticum aestivum
gtggtggtgctggcggcgtaccgggcggtgttgcgggcggcgcggcggacgttctcaggcgaccagctgatgctgacggagtcggccgtggagatccgacgccgctttgaggatcaccgcggcctcgccccgggatcggaggacgccgtccgcgccctctccgaggcccgcgaggccgcggacttcatcgccaacatgatcgtccaggctaagcgctcaccctccggatccttcgttgtgaagcctgagaaggcacatgccggagctacgcttgagattccttccgaggagatcctgtctacgttgaaataggggagggttgcattatccactgtgcaagcgtcactgataggctagttataataagacca

SEQ ID NO: 435811 - DNA, 412 bp, Triticum aestivum
cgcccacgcgtccgtccgagacgacgatgccgtccaaaagtaagcaacgccgccgacccctcgaggggtgaaacaaggcaaagggagagtaatgtggcgtcgctgcatttgctgtcaagccactgagtttgatgagaatgaaaatgggcgtgccaaggccaaggccccaacaaataacgtagatggaatgaaaaagggtttgaaagattctgctactgtgaaagccgagccacaagattcagctccctctatcaatattcctgttctatctttggatgaattaatagaaaagactgatgattttggggcaaaggctttaataggcgaagggtcttatgggagagtgtactatgctgtccttgatgatgggacaaaaatggcagtgaagaaactcgatgctactgaaaatgag

SEQ ID NO: 435812 - DNA, 487 bp, Triticum aestivum
tttttccgcgctcccaaaccctagctcccaccgcagcggtcaccgcctctcgacccccgcccctctcccggtgcgcgcctgttgctgcagacgagaagcggctgaggcgaagaggaatcgaccatggcgacccgtatccagtttgagaacaactgtgaagttggtgttttctccaagctcacaaatgcctactgtctggttgcaattggaggatcagagaatttctacagtacatttgagtctgagcttgcagatgtcattcctgtggtcaagacctctatcggtggcactagaataattggtcgcctctgcgttggaaacaagaatggacttctcttgccacacacaaccactgatcaagagcttcagcatctgaggaactgcatacctgatcaagtggttgttcagcgcatcgatgagaggctgtctgcccttggaattgcatatactgcaatgaccatgttgcgctcacacacccttgacctga

SEQ ID NO: 435813 - DNA, 428 bp, Triticum aestivum
ttcttgtgggaccactacctcgatcttctccaggccgactacactgagggggatgctctggatgccttgggcttggttcgctactgctgccgccgtatgctcatgacccatgttgacctcattgagaagttgctcaactacaacaccctggagaagacggagacaagttgaagttaattgaacccattctgcctcgaaacctttgttcctttgtactttccaagatgctgtttcttgcgtcagtgcttaggaggtgcaaagtgaggcactgaaatgaagttggtttgttcatgaatctccaaggactgttagtgtgaccatccgtttctactatgtgatcttcagggctatattaaccaacaagtctatgcattatccagtttaaaacttccaaaaaaaaaaaaaaaaaaggacgccaaaaaagcacc

SEQ ID NO: 435814 - DNA, 582 bp, Triticum aestivum
tcgcttcgccgccgccgccgccgccgctcccgagcggtctggttgctcgccgccggccagctcgcgccgcgactccgccatgaagttgaacatcgcgaaccccaccacggggtgccagaagaaggtcgagatcgatgacgaccagaagctgcggaacctttatgacaagaggatctcccaggaggtagttggtgatcttctgggtgaggaattcaagggttatatcttcaagatcatgggtggatgtgataagcagggcttcccaatgaagcaaggagtgctaacttctgggcgtgtccgccttctgcttcacagaggcacaccttgcttccgtggttttggcaggcgtaatggtgagcgcaggaggaagtccgtccgtggttgcattgtcagccaagacctatcagttatcaacttggtgattgtcaagaagggtgagaatgatctgccaggccttaccgacactgagaagcccaggatgaggggacccaagagggcttccaagatcaagaagcccttcaaccttggcaaggatgatgatgtccgcagctatgtcaacacataccgcaggaccttccttaa

SEQ ID NO: 435815 - DNA, 362 bp, Triticum aestivum
ttcacgcgtacggcagccacacgtaccggcgttgatcacactagcttgcttagcatcgccacctgctcttagaatggcgggctactacaacggcggcggcaggaccatgccctactccaacaccgacgagtgcttcgacggcggcaggaccatgtactccaacaccaccgacgactgctacgacgccggcaagcacggccacgggcacgggcacggccatggccatggcggggcaaacatgtacgctaacaccactgacgtggagtgcttccaggactccggcaggcacggctacggtcggtggcggcaggaccatgtactccaacaccgtcgacgaggagtgcttcgactccggcaggcac

SEQ ID NO: 435816 - DNA, 491 bp, Triticum aestivum
cacttaggcacagccgccgccgccgcggctcccaggacagcagccaaggaagaggaagccaagcctccgccatgccgaaatccaagcgcaatcgctcagtcaccttgtccaagaccaagaagaagcctggtctagagcgtaagggcaaggtggtcacggagatcaaagacgcgattgagcgccacagcagcgcctatgtcttcaccttcaacaacatgaggaaccagaagctcaaggacctcagggaccaactcaagtcctctagccggatattccttgctggaaagaaggtcatgcagatagcattggggcggtcacctgctgatgaagctaagacaggcctgcataaactctccaagttccttcaaggtgcttctggattgttatttacaaatctcccaagggatgatgtcgagagattattccgagaatttgaggcgaatgattttgcgaggacaggaagtattgcgactcaaacggttgagctaaag

SEQ ID NO: 435817 - DNA, 538 bp, Triticum aestivum
gagaatagaaaatacacaaaagatagaccacgattgccggcatcgagcccgacgaggcgtcggaggtgcgacaaagatgaggaagaagctgggcacccggttccccgcggcacggatcaaaaagataatgcaagcagatgaggatgttggcaaaattgcactggctgtgcctgttttagtttcgagagcccttgaattgtttctgcaagatttgatcgaccactcatacaaaattactcttcaaagtggtgcaaagacactgaattccttccacctaaagcaatgtgtgaagaggtacagctcttttgacttcctaactgagattgtcaacaaggtgccagatctcggtggcggtgaatctttgtggagatgaaagaggattacccacaagaaggaaattttcaaatggaagcgacccagagaatgaggagccccgatctagcaaaatgcccataagaagcttgaacaccagtcccagaggacgaggcagaggtcgaggaagaaggcgagggcggcctccaaccaagagaaaggaaat

SEQ ID NO: 435818 - DNA, 582 bp, Triticum aestivum
cctgcccacgcgtccgattgattaccattgtgggaagtgtgaaggaatctgctcaaatccctacagaatcaagtcaggagcttgctatgctgcaggttaaaacagtatacctcgaacatgttcctctttcttgggataagggcaaagttaaagaatgttgcaaagcatatggggtgattcaggatgttcacactttaaagaagtcaaaaacgaaaacttcttttgtcgaattctcatccaggaagagtgcattagcttgtgtggaaggaataaacagtgccaattttggtggtgaagttaagctggctgcaagtcttgctcgaccacgtcgggaaatacaactggacaagaagagtgctaaaggtggggtcaaggtcaatagtgacgcaacttctaaagacaccaacaattctattaagaaaaagaaccagaatagggaggtcgaagtgaagaaggattcaccacataaattgcgaaaaggtgatgtgagcaagctgacctcacatgttgatgcgaaagtaccacaatcatccaacccatcgaaaggcaaacggaaagctggaaagactgaaaataccgctg

SEQ ID NO: 435819 - DNA, 744 bp, Triticum aestivum
tttgccacaagccggagcagacgatccgccgtcgacgcgacctcctccgcccgccaggatcggagacgactatatagacggtctaggggttgaagcaacttaacaatgagtagcataggaactgggtatgatctgtccgtcaccactttctccccggacggacgtgtcttccaggtcgagtatgctggcaaggccgtcgacaacagcgggacaatcgttgcgatcaaatgcaaagatggaattgtccttggtgtggagaagctgataacatcaaagatgatacttgctgggtcgaaccggagacttcattccgtgcaccggaactctggcttggctgtggctgggttagcagcagacggtaggcagatagtctcaagagcaaagtcagaagcagccaactatgaaaaggtatacggagaacccatgcctgtaaaggaattagctgatcgtgttgctagctatgttcatctgtgtacactctaccggtggctcaggccttttggctgtggagttattcttggaggctatgatagggatgggccacagctctacatgatcgaaccttcaggcctctcctataaatattttggtgctgctctgggtaaaggaagacaagctgcaaagacggagattgagaaattgaagctctctgagctaacctgcagggaaggcatcgttgaggttgccaagataatttatggtgtacacgacgaagcgaaagacaaatctgttgagctggaactg

SEQ ID NO: 435820 - DNA, 432 bp, Triticum aestivum
gggccgacactggaaccaacagtggtgcagagattagcgagatatggggtctgacggcgccgcgccaccgattctcgctataccaccaccatcggggtcaagccatcagaaaaggattgaagggcatgagattgggtcggtcaggtgtccagcgtgtagcacattgtgtggtttcctatatgatgatgcgattggttgattgattctgcctgggttggttggttggctggtgttgtatactgtcctctggttatacaggtctgctcaaagtgtagcgtgactgagtcgagcggtaagaattgaattgcgatgggaggaactctgtttttgtcgagtcggagaaggcggtgcgggtgcgcgccttgtaggttataggaagttgaggtcggtcggtcgagtcaaaatttgtattggctggttgcagtggggtct

SEQ ID NO: 435821 - DNA, 392 bp, Triticum aestivum
aaatcaaaggttctagttgaggtgttttcagaaggcaaatatgtattttatattgataagagcatcgatatcacaaaaatcacatccttccacatgagttgctcttcggaatgatagctatatgcttcatttggtccttccaagcaaagttgatccactggtcaatcttatgaaagttgagaaggtcccagattctacatatgatatgattggaggtcttgatcagcaaatcaaggagatcaaagaggtcatcgagcttcctatcaaacatcctgagttatttgagagccttggaattgcccagccaaagggtgtcctcctttatggaccaccagggacaggcaaaacattactggcacgtgcagttgctcatcacaccgactgtaccttca

SEQ ID NO: 435822 - DNA, 659 bp, Triticum aestivum
tcccacgcgttcgcggacgcgtgggcggaggcgtgtgcagcgccactcacacatactacactcatccacgcacaagctaatgctagcggcgttgcagctcacttcagtccaggcggcatggcggctcccaggggcgcggcactggtgctggcgatggtgctcgcggccatgctggtggcgccgccggcgacggtgcacgccatatcctgctccacggtgtacagcacgctgatgccgtgcctgcagtacgtgcagcagggcgggtcgtcggcccggggctgctgcaccggcatccagaacctgctggccgaggccaacaacagccccgaccgccgcaccatctgcggctgcctcaagaacgtcgccaacggcgcctccggcgggccctacatcacccgcgccgccgcgctcccctccaagtgcaacgtcgccctcccctacaagatcagccccagcgtcgactgcaactcgatccactgaacgaacctgtcgacgtacgtctgccgtgtgaggagtcccatgtccggagaataaattgctgctactactagtactgaagcttagctaggccttggcggccagatccgtgtcgttctacctagtcgtgtggtgtgtggttttagggtcgatggatctgtgtgtgcacgcagtccatggtg

SEQ ID NO: 435823 - DNA, 504 bp, Triticum aestivum
tttgttgtcccaatcctcgatctgttctcagaccctcctccgtccgtcgcagctccagatttccttccccatggctccgatcaagatcggcatcaatggtttcggccggatcggcaggcttgtggccagggttgcgctccagagccccgatgtcgagctcgtcgccgtcaacgaccccttcatcaccaccgactacatgacctacatgttcaagtatgacactgtccacggacagtggaagcaccatgaagttaaggtgaaggactccaagacccttctcttcggtgagaaggaggttgcggtgtttggctgcaggaaccctgaggagatcccatgggctgctgctggtgctgagtacgttgttgagtccaccggtgttttcaccgacaaggacaaggctgcagctcacattaagggtggtgccaagaaggtcatcatttctgctcccagcaaggatgctcccatgtttgtctgtggtgtcaatgagaaggaatacaagtctga

SEQ ID NO: 435824 - DNA, 542 bp, Triticum aestivum
tttcctctgacgcgtgggtcgccgtcgcctctccactttcgtctccatctcactcactctctccctccgccgccggcgcagcgtcctccccgcgactccgatggccagcaagtgggtcaggcccgaggtgtacccgctgttcgcggcgacgggcgtggccatcggcatctgcgccttcagcctcctccgcaacatcaccggcaacccagaagtcagggtcaacaagatggggagggcagcgggagtgcttgagaaccatgaggagggcaggcgctacgccgagcacggcctcagagcctatgtgcaggacaagacccccgagatcatgccaggaatcaacaagttcttcaccagcccgaaatgaagcactttagtctctctgtgactcgctattagcaactgttgtggtcaagtgcaaacctatttcaagcattcagtaatgttgtcgcgtccataattcagaggatatcataaagtacctcttattgaaagaaccatgtgatgtttgatggcttgctatatatgtgatggctgatggcttc

SEQ ID NO: 435825 - DNA, 415 bp, Triticum aestivum
ccactgttttgtgaccgtgagctctcagaggactggctggtctatttcatcggacagggaaaaagaatgttttgcttcttgcctcttcatttgctacgacttgattcgtgcggatgttgctcttgagcttgcatggacgaataacatgctggatttcgcgttcccctatctattacagctcatccgggagtacacaagcacggtggatgatttggtgaaggacaggatagaatcgcagaaggaagaaaaagcttaagagaacgaagagaaggaactagttgcgcagcagaacatgtacgctcaattgcttcctctggccttgcctgctccgcccggcatgatgggcggtccacctccgatgggcggaatgggcatgccgccgatgggcgggatgggtttgcctccgatgggtcct

SEQ ID NO: 435826 - DNA, 898 bp, Triticum aestivum
cccacttttccggccgccgccgcctcgccaaaatccggcgtcaactgatcggcggcagccatgagtaagctccaaagtgacgctgttaaggatgccatcacccagattgttggggaggcgagagaaaagaagcgcaagttcactgagactgtggagcttcagatcggtctcaaaaactacgacccacaaaaggacaaacgtttcagcggctcagtgaagctgccccatatcccccgcccaaagatgagggtgtgcatgcttggtgatgcccagcatgtcgaccaggctgagaaaatgggacttgactacatggatgttgaaagtctcaagaagatgaacaagaacaagaagcttgttaagaagctagccaagaagtaccatgctttcttggcatcagaggccataatcaagcagatccctcgtctccttggccctggtcttaacaaggcaggcaagtttcccactctggttagtcaccaggaatctcttgaagccaaggtcaacgagacaaaagctacagtcaagttccagctaaagaaggttctttgcatgggtgttgctgtgggcaacttgtcgatggacgagaagcagatccaacaaaacatccaaatgagtgtcaacttccttgtgtccctcctgaagaagaattggcagaatgtgaggtgcctgtacgtgaagagcaccatggggaagcgtgtacgggtgttctaagtgtgtgcgctccagtgaagttgataagataccgggctttcctgccgacccctgcttgtctttggattagatctgtttcactgataccaattttgtgcttgcctaagcgaatatcaacaagtattttatctttctagtcttgtcttgaacagaaatcatgggagcaatggaactgcattttctgttt

SEQ ID NO: 435827 - DNA, 463 bp, Triticum aestivum
ctctttctctcttcctctctgtggcggcgggtcggggctcccaccaagcagcggtggacaccggcggttcgcgcggcgcggcggcggggaccggcggcagaccggccgtgcggcgccaggccctcgggctccgtcaaggttgctaaaatggataagctcaagggctctgcgcgtcttatgattgtttcagatctcgatcacacaatggttgatcatcatgacgaagagaacctgtctttgcttaggtttggggccctttgggagtctgtttactgtcaggattctcttcttgtcttttcaacaggaagatcacctactctgtataaggaattgaggaaagagaagcctatgctaactccagatatcactattttgtctgtgggctctgagataacttatggtgaagccatggtccctgatcatggctgggaggaatatctgaacaataagtgggacaggaata

SEQ ID NO: 435828 - DNA, 414 bp, Triticum aestivum
tcgtgtttcctgctagggttttggtccttcgttttcggcggcgcaagatgggggagagggtcaagggaaccgtgaagtggttcaacgtcaccaaggggttcggcttcatctccccggacgacggcggcgaggaccttttcgtccaccagtccgccatcaagtccgacggctaccgcagcctcaacgagaacgacgccgtcgagttcgagatcatcaccggcgacgacggacgcaccaaggcctccgacgtcaccgcaccaggaggaggggcgctctccggcggctcccgccctggcgaaggcggtggtgaccgcgggggccgcggcggctacggaggcggcggcggtggctacggcggcggcggtggcggctacggaggcggtggtggcggctacggcggcggtggtggcggct

SEQ ID NO: 435829 - DNA, 728 bp, Triticum aestivum
  unsure (1)..(728): unsure at all n locations
ccgctggagtgtggtcaagcgggggggggatgtccaggtgcttgttgaatcaccacacaaattccaaaatgcacttgaagctgtgaagactctaagagcagagcccaaggccaatgatcagtatttgcccccatttgtgatagttgatgagagtggcaaatcggttggtcctatagtagacggtgatgcagtcgtgactttcaatttcagagctgatcgcatggttatgcttgcgaaagcactcgagtttcctgattttgataaatttgaccgtgttcgtgtaccaaaaattaagtacgctgggatgcttcaatatgatggtgagttgaagcttccaagcaagtaccttgtttccccacctttgattgagaggacatctggtgaatacttggtgaagaatggtgtccgcaccttcgcttgcagtgaaacagttaagtttggccatgtcacatttttctggaatggaaaccgttcgggatactttgacgagaccagggaagagtatgtagaaattcccagtgacagtggtatcacattcaatgagcagcccaaaatgaaggcacttgaaattgctgagagaactcgggatgctatcctcagtgggaagtttgaccaggtgcgtattaacctgccaaacggtgacatgngttggtcacactggtgatattgaagccacagttgttgcttgcaaggctgctgatgaagctgtcaagatggtcttggatgct

SEQ ID NO: 435830 - DNA, 724 bp, Triticum aestivum
gtttcttggctgacacctccaagaagggcgagggcaggctcaaggccgccggcggcgccagcaagaggaagaaggacgccgctgccgctggcaagcccaagcgcccgccctccgcctttttcgtcttcatgtctgagttcaggcagcagtacaacgcggagaaccccaacaacaagagtgtcgccaacgtgagcaaggcggcgggtgagaagtggagagctatgtctgatgaggacaaagcaccttatgtggaaaaggctgaacagaagaagaaggactatgagaagaccaaagccacctttgataacaaggagagtgcgagctccaagaaggccaagactcagaacgatgaggaggtcaaatctgaggtcgaagatgagggtagcgatgaggaaaatgaggacgatgacgagtaaatagtgtatcagatcatgaggtagcaaattgggtgttgggtccccgcttagtgtactagtttgctatcctgctatcctcagtgctagatgatgagatttggtagtacatgttgtgtttgtgtgttaagggggcccttttagacgtgtggactcatggtttgagaagttgtttagtagtgtattagcagagaggaagcagagaatgctaccagctgttccaatgcttttctcttgctaaccacctgtgtaagaacttgttttcattcgctaatctgatgactgcccagccattggctcttggttaaaaa

SEQ ID NO: 435831 - DNA, 1119 bp, Triticum aestivum
ttctggtctgcgtctcctctctcctttccccaacccaaaccaggagcgccctccctcccccagccgcccgccccctccccacccaggaaaccagccatgaagggggccaaatccaagggcgccgtcaaggccgacaccaagttggcggtgaagagcaagggggcggagaagccggccgccaaggggaagaagggcaaggccggcaaggaccccaacaagcccaagagggcgccctccgccttcttcgtcttcatgggcgagttccgcgaggagttcaagcagaagaaccccaagaacaagtccgtcgccgccgtcggcaaagcggccggtgagaggtggaagagcttgagcgaatcggagaaggccccctacgtggccaaggccaacaagctcaagggcgagtacaacaaggccattgccgcctacaacaagggcgagagcgctgctgctgctgccccaaagaaggcggcggccaaggaggtggaggaggacgatgaggaggagtccgacaagtccaagtcggagatcaatgacgacgacgacgatgagggtagcgacgaggacgaggacgatgacgagtgaagcggacaatgccggagctgctgtgcgagaagcgacctgagctgtgtgccggtggtgtcataaggagcctatccatctccactagaattatcccaagtttcacttcacatcgtgatgttgttttaccttttttttcttgtcgtcgtcccgctgcctgctataacggacagcgctccctgttggcgccgccgccggcgggggtgtgccctggtggcggagggtgtatgtcctctgccgcggggtgcccctgcttgtacctagatggttactctttccgtccattgtcaccggctaacattgtgataatatcagtctgggtaatgttagatcagtacaacttcaactccttcctcacaacgatgcagctggtaatctgcacctgcaccaacatcaagatgcaattccctgaaaacgtcaggcagtccaaaaggattcagtcttatctacgcgtacataccacttcatagctcatcaattgagcccctgaatttcatttcattggccctcattttaaagtatcataactggcaaacccct

SEQ ID NO: 435832 - DNA, 450 bp, Triticum aestivum
aattcgcgggccgacgggtgaagaaaacgcatcttgtcaaggctgctccggcggacaagtcgggagctgctgtgcgagaacggacctgagctgtgtgcggtggtgtcataaggagcctatccatctccactagaattatcccaagtttcacttcacatcgtgatgttgttttacctttttcctgtcattgtcctgctataacggatagcgctccctgttggcgccgccgccggcggggatgccctagtggtggagggtgtatgtcctcttccgcggggtgcccctgcttgtacctagatggttactctttccgtccattgtcaccggctaacattgtgataatatcagtctgggtaatgttagattaagctgttgtcctcgcctgacaaaaaaaaaaggccgtccatttacaaaattctaacaggaaaaaaccgaagagtcacgcaactt

SEQ ID NO: 435833 - DNA, 465 bp, Triticum aestivum
ggtcatcaacacgcatcgtgtcatagctgctggctccgtgcggccaaaagcgggagctgctgcagccctataaccgacttaagctgtgtgcggtggtgtcataaggagcctgtccatctccactagagttatcccaagtttcacttcacatcgcgcatgttgtgttaccttctcatttttcttgtcgtcgtcgccctccctgcgattacggacagcgctccctgttggctccgcagtccgtcgagcagcagcacgggtcaggccctacccctggatctgacggcgctgctgactctacaggcctaggctcaggcccatctgagaagacaggcgatcgtggtgacgtcatagacgctgattttaccgacagcaactgaatacaacactacgttaggacatgatgaacaagtgagtatgagtttgttccacattattgcctagtagtataccgggtgaccgctttct

SEQ ID NO: 435834 - DNA, 709 bp, Triticum aestivum
ttcttttctttgcttccgcctccacagcccccactttccaacttagggttctagggtttctccagcagcgccggcgcctccacccgcccacccaaccaccatgacggccgagaccgcgacgcaggcggagctgctccgcgccgtcctggatgagcagaagctcgcggcgcagggagacgagcccgtagttgaggatgatgatgatgaggaagatgaggatgatgatgacgaggatgacaaagacgatgatgttgagggagttgatgcaagtggaagatctaagcagagtaggagtgagaagaagagcaggaaggccatgctgaagcttggcatgaagactatcactggcgtcagccgtgtaactgtcaagaagagcaagaatatcctgtttgtcatctccaagccagatgtattcaagagccctgcctctgacacctatgtcattttcggtgaagctaagattgaggatctgagctcacagctgcagtcccaggccgccgagcaattcaaggcgcctgatcttagcagcgtcatctcaaaccctgaggcttctacagctgttcaggaggatgacgaggattgtgatgagactggggttgagccgaaggacattgagctggtgatgacccaggccggtgtgcctaggcccaaggctgtgaaggcgctcaagtctgctgacggtgacatagtcagtgctatcatggaactg

SEQ ID NO: 435835 - DNA, 503 bp, Triticum aestivum
tcgctgatatacaggacaggagtatcaaggaggaagacgaggaaacgttgatggccggcggtgaagagctgaagctgctggggtggtgggcgcccggggtgagcccctacgtgctccgcgcccagatggcgctcgccgtaaaggggctgagctacgactacctccccgaggaccgctggtccacgagcgacctcctcatcgcgtccaaccccgtgtacaagaaggtgcccgtcctcattcacaacggcaggcccgtctgcgagtcgctgctcatcctggagtacctcgacgacgccctcggccttcccggcaacggcaagcccatcctccccgcagacccctacagccgcgccgtcgctcgcttctgggccgcctatgtgaacgacaagctgttcccttcgtgcaccgggatcctcaagactacgaagcatgaggagagagccggtaagatggaggagaccctgtccgggctcagacacttagaagctgtcatggcggagtgc

SEQ ID NO: 435836 - DNA, 483 bp, Triticum aestivum
ttggacgcgtgggcggacgcgtgggtggtactacaactactacgacgacaggcgcgtcggggggcagcgtgacgaccaccagcagggggctcaagaagaaggcgctcaaggcgctgccgaagctggcgtacgcggacgcggtggccgcggctgcggcggcgaggggcgccgccggcgcgcggtgcgcgcgctcccgccgcaacgccaacgcccacgccaaccaatcctcgccgtccggcagcccggcccacgccctggcggccttcggcgggggcggcggtgggcataaccatggtgctacaactactaccgcagtgaagtttttcttctcaagaaatggaaaggagaataattagagctgtgaatgtgactcttttctgcaacctttttcgccctgcacttgcgctactgctccagtacgtgtggatgtggggaacatgacatcagatttgtaaagagcgtgcgtggtctcgtgtaaaaata

SEQ ID NO: 435837 - DNA, 773 bp, Triticum aestivum
ttctcgcgtccgccacgcgtccgcggacgcgtgggcggacgcgtgggtcgcgcttcgctctcagatcccttctcctccgtctcgcccgcgtgttggggtaggagccatggcggaccagctcaccgacgaccagatcgccgagttcaaggaggccttcagcctcttcgacaaggacggagacggctgcatcaccaccaaggagcttggaactgtgatgcgctcgctggggcagaaccccactgaggcagagcttcaggatatgatcaatgaagtggatgctgatggcaatggaacgattgactttcctgagttcctcaacctgatggcgcgtaagatgaaggacactgattccgaggaggagcttaaggaggctttccgcgtgtttgacaaggaccagaatggtttcatctcggcagctgaactccgccatgtcatgaccaaccttggtgagaagctgacagacgaggaggtggatgagatgatccgtgaggctgatgtcgatggtgatggccagatcaattacgaagagtttgtgaaggtgatgatggccaagtgagctgccatactaagctagttctatctcgatgttagcagctagtttagccttgaaaactgacagcacttggtactactgttaagtccagtgaatgaacatattgctcgctcttcctttcttctcagggatgttgagaatttcgtttggattttcctgcagttgtattacctttgtacaatgtagctttctttccaaattgagatcatgaatttgctgt

SEQ ID NO: 435838 - DNA, 398 bp, Triticum aestivum
cctacgcgttcgccgtttattcccctccggcgcagccgcccccgtgtcctgtgcgcaccttctcgaagcctcctccctccctcatggcggaccagctgaccgacgagcagatcgccgagttcaaggaggccttcagcctcttcgacaaggatggcgacggttgcatcaccaccaaggagctcggaaccgtgatgcggtccctcgggcagaaccccacggaggcggagctgcaggacatgatcaacgaggtcgacgcggacggcaacggcaccatcgacttcccggagttcctgaacctgatggcgaggaagatgaaggacactgactcggaggaggagctcaaggaggcgttccgcgtgtttgacaaggaccagaacggcttcatctcggcggcggag

SEQ ID NO: 435839 - DNA, 457 bp, Triticum aestivum
ggtccgtaattaccggggccacgcgggaaccagggaaaatcttctcctacccacaagaacgctcattcgcatcgccaccttcctccctccccccctcgccatctccgacccgacttgcggccaatggcggaccagctcaccgacgaccagatcgccgagttcaaggaggctttcagcctcttcgacaaggatggggacggttgcattaccaccaaggagctgggaactgtcatgcgttccctggggcagaatcccactgaggcagagcttcaagacatgatcaatgaggtggatgctgacggcaatggaacaattgatttccccgaattcctcaaccttatggcccgcaagatgaaggacactgattctgaggaagagctcaaggaggcattccgtgtgtttgacaaggatcaaaatgggtttatctctgctgctgaactgcgccatgtcatgacca

SEQ ID NO: 435840 - DNA, 461 bp, Triticum aestivum
tgtcacgcgtgcggcctctctctgtttgctctcgcgtccgccgcgcccatcctcgtccgcgcctgcgccccgcccgtgctcgctcgcctcccgcccgactcccccgcctccatccaccgcgccggcggcatggcggatcagctcaccgacgaccagatcgccgagtgtcaaggaggccttcagcctcttcgacaaggacggagatggttgcatcaccaccaaggagctgggaacagtcatgcgttcgctggggcagaacccaacggaggctgagctccaggacatgatcaatgaagtcgacgctgatggcaatggcaccattgacttcccagagttcctcaacctgatggcccgcaagatgaaggacaccgactcagaggaggagctcaaggaggccttcagggtgttcgacaaggaccaaaacggcttcatctctgctgctgagctccgccacgtcatga

SEQ ID NO: 435841 - DNA, 937 bp, Triticum aestivum
ccgttatatggttgcaaaccagttgtatgagctctgcgaggcagttggtcctgagcctacaagagcagacctggtgcctgcatatgttcgcctcctccgtgataatgaggctgaagtgcggatagcagctgccggaaaagttactaagttctgtaggatattaagtccacagcttgcaattcagcacattctgccgtgtgttaaggaattgtcatcagattcgtctcagcatgttcgctcagctttggcttcagtcatcatgggaatggcccctgtcttggggaaggatgctaccattgaacaacttcttcctatttttctttctttgctgaaggatgaatttcctgatgttcgactcaacataatcagcaagcttgatcaagttaatcaggtcattggaattgacttgctgtcgcaatctctattgccggctattgtagaacttgcggaggataggcactggagggttcgccttgcatccgcccacgcctcccctctgctggctagtcagttaggtgttgggttttttgatgacaagctgggggcactttgcatgcaatggttggaagataaggttttctcgatcagagaagctgccgcaaacaacttgaagcgcctggcggaggagtttggtccagagtgggcaatgcaacatataattcctcaggtgttggagaagataaacaacccacattatctgtatcgcatgaccatcctgcaagctatctcattgctagcccctgtcatgggtgcagaaataacatgccaaaagctgctccctgttgtcattaattcctcgaaggacagagtgccgaacatcaaattcaatgttgcgaaagttctgcagtcgcttgtaccaatccttgatcaatctgtcgctgagaagactgtgaagccatgccttgtcgagctgagcgaggaccctgatgtggatgta

SEQ ID NO: 435842 - DNA, 514 bp, Triticum aestivum
gggtcgatgggattcccaaaagtgaatcgtagtattcgaataaaattggaggacagcaaccaggttcatgggcagcagctctgggagcacaacaacaatgtactgggctaggaacgtcagccggaagtgcagccgccgatgcacggcggcaatggatttttccacccccttgatgctgctggtgaacccacacttcacatagggtaccctcctgagtccatgagtaactcatgcatgacaactttcatgcccccgtggttgccttgattgaagacggcgaagaaagtgcgacgaataagtatatacgtggcacccggccggccgcatatatgcatgtatactacttcgagtgatggattattccagtcaagatcctcaattattttgcgtgcaacttttgtgtgatgaaaacttcagaaccctgtatttgatgctcaacattattgtgttactgcatgtaaaagatcatacattgtattactagagtggctatgcgtgatgatattttcccctt

SEQ ID NO: 435843 - DNA, 712 bp, Triticum aestivum
  unsure (1)..(712): unsure at all n locations
gctcttgcggccacgacgggcccttcggcgccaccggggtcaagcggctccaggacatcggcatgatccaggcggtgcccgggatgaaggcgctcgacatgaacacggccgaggatgccatcgtgcgcctcacccgggaggtggtccccggcatgattgtcaccggcatggaggtcgccgagatcgacggcgccccgagaatgggcccgaccttcggcgccatgatgatctccggccagaaggcggcgcacctggcgctcaaggccctcggccggccgaacggcatcgacgggacgctcaagaacgtgaccccggcgctgcacccggagatgatcctggcggcgaccaacaacggcgacatcgtggacgcctaagcaaagcaatgaaccacggacaccaaggcgtacgtacgctggtgtttgggggcgcaaaatcaataagatggttcggtgaaacggaggatgcttagggacgagggcttgtctttgtgatttgtcagactcgtgtttaattccgatgtttatctttagttttcttgtgttagcgtattttgttcatgccacctgcccgccatgtgctctgctctgctctgcctcacggcagctccatggatgatgaatccttctggaacaagaggagggaataaaaaggttgagttctatgtaannnnnnnnnnnnnnnnnnnnnnnnnnnnnnnnnnnnnnnnnnnnnn

SEQ ID NO: 435844 - DNA, 399 bp, Triticum aestivum
ttgacgcgtgggcggacgcgtggggggtgagttttggagcaaacactttcatctcagtctgtaccacacaccacgcctgcctcatctctcggagcaggatgaggaggagcttgcaggaacaatggcggcccagggtcttctctctgggaggcagctgctggggaggcctctgcagtcctccatctccaggtcgtcttcctcccggaagtcccccttcgtcgtcagggcatcgtccagcccccctgccaagcaaaatgacaacaggcagctgtggttcgcgtccaagcagtccctcacctacctcgacggcacgctgcccggtgactttggtttcgaccccttggggctgtccgacccggagggcaccggcgggttcatcgagcccaggtggctggccta

SEQ ID NO: 435845 - DNA, 734 bp, Triticum aestivum
cggacgtttgggcggacgcgtgggtgattgagaggtccaccaaccttgactggtacaagggcccaaccctccttgaggcgcttgaccagatcaacgagcccaagaggccgtcagacaagcccctccgccttcccctccaggacgtttacaagattggtggcattggaactgtgcctgttggccgtgttgagactggtgtcatcaagcctggtatggttgttacctttggtcccactggtctgacaactgaggtcaagtccgttgagatgcaccatgagtctctcctggaggcgcttcctggtgacaacgttggcttcaacgtcaagaacgttgccgtgaaggatctgaagcgtgggtttgttgcatccaactccaaggatgaccctgccaaggaggcagccaacttcacctcccaggtcatcatcatgaaccaccctggtcagatcggcaacggctacgccccagtgctggactgtcacacctcgcacattgctgtcaagtttgctgagctggtgaccaagatcgacaggcgatctggtaaggagctggaggccccgcccaagttcctcaagaatggtgatgctggcatagtgaagatgattcccaccaagcccatggttgtggagacctttgccacttatcctcctcttggtcgttttgctgtccgtgacatgaggcagactgtggctgttggtgtcatcaagggcgtcgagaagaaggacccaaccggggcc

SEQ ID NO: 435846 - DNA, 524 bp, Triticum aestivum
tatcgcatcgcatcgcccgcccacacctccctcgccggtacccactgtagcatacacatccatccatacctacctctagagtttttctcttctgttctgtcctgttctatacaccaaggagaaggaaaataacgagccgccattgccgcacctctgcgcttctggacgaggaggccggtgcaacgcaatgcggcatcttactactactacgtactttatagtcactacaaaacacagttactgtgctggtaacaggaaggaagggtttgagtgttgtgtctccccggaacggcgggaggtagtagccgtagttattactcttgtggtagctagcggtactaagttttgcaactttgttgttcttattaggtgtgtttgatatggtagatgtacatatatgtatactatcacagatggggaatggtagcgagactggtgttgatattcgtcgtcctgtaataaccttcagaatgcttgctgctcctgacggccttcttcaatgtcactgtgcttgtttttgcttg

SEQ ID NO: 435847 - DNA, 704 bp, Triticum aestivum
  unsure (1)..(704): unsure at all n locations
tctgtccacgcgtacgaggacgcgtgggcgcagccgccgcctcctcggatcgtccctgccggagagacgccagagagcgcgagcaaaccctagcctccgacgatggtgctgcagaacgacatcgacctcctcaacccgccggcggagctcgagaagctcaagcacaagaagaagcgcctcgtccagtcccccaactccttcttcatggacgtcaagtgccagggctgcttcaacatcactactgtgttcagccactcccagactgtcgtggtgtgcccgggctgccaaacagtgctctgccagccaacgggtggcaaggccaggctaaccgagggttgctccttccgccgcaagggcgactaaacctccgaagtctatctgaaaaagcaagccgttgttgaactttgagtttttccagggtgttagtctgaagattttgcaatgtctggcaaattgaacccatctttggcaatgtgatatctagcttgagtagtattatgatgaccactgtactatgttccgtttgggttgtgagatcagactagtagtacctgcctggcaatatggttgtctttgatgnnnnnnnnnnnnnnnnnnnnnnnnnnnnnnnnnnnnnnnnnnnnnnnnnnnnnnnnnnnnnnnnnnnnnnnnnnnnnnnnnnnnnnnnnnnnnnnnnnnnnnnnnnnnnnnnnnnnnnnnnnnnn

SEQ ID NO: 435848 - DNA, 396 bp, Triticum aestivum
ctgcgaactccagagaccgagcgaggaaagttgcggggggagacctgaaagttagggagatatggctgggattggtcctatcaggcaggactgggagccgatagtggtgcggaagaaggcgcagaacgccgccgacaagaaggacgaaaaggccgtcaacgctgcccgccgctccggcgccgagatcgacaccaccaagaagtacaacgctggaacgaacaaggctgcatctagcggaacttccctcaacaccaagcggctcgacgacgacacggagaacctttcccatgagcgtgtttcaagtgacctgaagaaaaaccttatgcaagcaagactggataagaagatgacccacgcacaacttgctcagatgatcaatgagaagccacaggtgat

SEQ ID NO: 435849 - DNA, 646 bp, Triticum aestivum
ttgtgcacactagcacagaatggccaacgcagggttgctccctgcgctcatctccttcctcatcctgcccttctcttccctggccctgacccaggacttctgcgtggccgacctagcctgccccgacacaccggcggggtacccgtgcaagccgggcgtcggcgcgggcgacttctactaccacggcctcgccgccgccggtaacaccaacaacctcatcaaggcggccgtcacaccggccttcgtgggccagttccccggcgtcaacgggctcggcatctccgcggccaggctcgacatcgccgtgggcggcgtcgtgccgctgcacacccacccggccgcctccgagctcctcttcgtcaccgagggcaccatcctcgccggcttcatcagctcctcctccaacaccgtctacaccaagacgctctacaagggcgacatcatggtgttcccccagggcctgctccactaccagtacaacggcggcagctcgccggcggtggcgctcgttgcgttcagcggccccaaccccggcctgcagatcaccgactacgcgctcttcgccaacaacctgccgtccgccgtcgttgagaaggtcaccttcttggacgacgcgcaggtgaagaagctcaagtccgtgctcggc

SEQ ID NO: 435850 - DNA, 409 bp, Triticum aestivum
  unsure (1)..(409): unsure at all n locations
tcccgggtcgacggggttaggaagaagtggggtggtggtgtcatgggctccaagtcgcaagcgaagaccaaggccagggaaaggcttatcgcaaaggaggctgcgcagcggatgaactaagtttagcattgttgaaccatatctattcctcatccttgagtagtgtgcaagcatactgtggcagtttggctccagttttgaaagtcatttttgtttgtctgaaacatcttggaaagaacagtgtaagaatgaagtatttctgtttaatgccagttagtatttttgtcgaaaaaaataaaattcaaataacaaaaaaggataaaaatcagaattcccnnnnnnnnnnnnnnnnnnnnnnnnnnnnnnnnnnnnnnnnnnnnnnnnnnnnnnnnnnnnnnnnnnnnnnnnn

SEQ ID NO: 435851 - DNA, 413 bp, Triticum aestivum
ggtcgacggggtcaggaagaagtggggcggtggcgtcatgggctccaagtcgcaggccaagaccaaggccagggaaaggctcatcgccaaggaggctgcgcagaggatgaactaagcctagccctataagtattgtcagagcatatgccatgtagtttccctttcagtctgtcctgattttgacgaggaactcgaacccttttagcagcactgtggaatcgtattgtggttttctgattcgctgttccgttctccagacttctgcaaagatcagatgaggtttacccatgtttggattctatatagttttatgtcctttgtcgagtctgaagttagttgtgtttgacatcttccaaacttggctggcttttggttaacatgcaatgacgaccagctcagagtgatcattactt

SEQ ID NO: 435852 - DNA, 761 bp, Triticum aestivum
tcttccttttccacccgccatctctccagcctccgccgacgcccgacgccatggggcaggcctgggcgtctctgcaagagaagctccaagggcggcactggaaggagaggcaggtgcggaagatcaccgacaaggtgttcgaccggctcaccgaggacacccagaagcccgagaaggacgccctcaagttcgaggaggtctacatcgccgtcctctgcgtctacaatgacatcaacaagtacttgccagggccgcactacgaccccccgtccaaggagaggctcaaggaactcatgagagagtttgacatcgacatgaacggtctcctggaccgcgaggagttcgcggagttcatccggaagctgaccgccgagtcactctgcgcgatcagcctcaagctgatcatcacgctggtcgccgcccctgcgctggcgctggcgaccaagagggcaaccgagggcgtccccggcgtcggcaaggtagtgcacaaggtgcccaatgccatctacgccgccgccatcaccatggctgccgtgctcatccagagatccgccgagggcgtcgagtagaagcggcatcgcgccgtgaactgtagatgcaccaggcaaccagggagggtgtaaatgtgctgtgatttgccgtgtgaagggtgatgccctgtgggacttatagttttctgtaatatcttcctgtctgtgcttcttggtgttgctagcctggtgtgattcaaaaagacagtattcgctgcttggtgacatgat

SEQ ID NO: 435853 - DNA, 761 bp, Triticum aestivum
ttcttactccacgcgtccgcccacgcgtccgctgagtctgttgacacaaaatcacatgaaaagcatcaagaaagaggcctgctggactgtttcaaatatcactgctggtaacaaagatcagatacaggctgtgattactgctgggattattggacctctggtgcatctgctgcaaacggctgaattcgatatcaagaaggaggctgcttgggccatctcgaatgctacctccggtggttcccatgaccaaatcaagtatttggttagcgagggctgcatcaagccactgtgtgacctcctgctttgcccagatccaaggattgttactgtttgcttggagggtcttgagaacattctcaaagttggagaaactgataagaatttgggtgcttctggggaggggaatgtctatgcgcagatgattgatgaagcagagggcctggaaaagattgagaacctgcagagccatgataacaatgaaatctatgagaaggctgtgaagattctcgaggcttactggatggaggaggaagatgatgcgatgggggcaactatggaagctcccacaggtgttgcctttgactttggccaaggtggcaaccctgatctgaacttgggctgaatacagatttgaccaatggtggtaattcccttgtcgctgcagttgtcaccatttggtctagtcggtgtgtggggtaaggtcatggttgtggtgggtccaataagctgaagattttcaaggaagcaactggtcctgggta

SEQ ID NO: 435854 - DNA, 449 bp, Triticum aestivum
cattttcgccccttcctccctccctcctcctcctcgcgcgtcctcgtcctccatccagcccaggtgattaaggtcgccatgtcggactccgaggaccaccacttcgagtccaaggccgacgccggggcgtccaagacctaccctatgcaggccggcgccatccggaagggcggcttcctcgtcatcaagaaccgcccctgcaaggtggtggaggtttctacctcgaagactggaaagcacggtcatgctaaatgccactttgttgccttagatatattcaatggtaaaaagcttgaggacattgttccttcatcccacaactgtgatgtgccacatgtggaccgcactgagtatcagctgattgacatatcagaggatggatttgtgagccttcttactgataatggtagcactaaggatgatcttaaactcccaactgatgatgctat

SEQ ID NO: 435855 - DNA, 383 bp, Triticum aestivum
  unsure (1)..(383): unsure at all n locations
ttcgcgactacgcgtccgcccacgcgnccgcccacgcgtgcgatcagcgcccctccgtccctccctcctcctggcgcgtcgtgatccatccagcccaggggcgagaagctagttagcgggtgattaaggtcgccatgtcggactccgaggaccaccacttcgagtccaaggccgatgcgggggcgtccaagaccttccctatgcaggccggcgccatccggaagggcggctacctcgtcatcaagaaccgcccctgcaagggtggtggaggtttctacctcgaagactggaaagcacggtcatgctaaatgccactttgttgccttagatatattcaatggtaaaaagcttgaggacattgttccttcatcccacaactgtga

SEQ ID NO: 435856 - DNA, 468 bp, Triticum aestivum
  unsure (1)..(468): unsure at all n locations
gatgatccccagcaangnngagctcgacagctggaaggtttctggcgatgtctcctttggctctggagccgcgctcaagggcaacgtgaccatcgcagccaaggctggagtcaagttggagatcccagacggagctgtgctcgagaacaaggacatcaacggccccgaggatctttgagtgacgcctgctgcatcgccagtcgcgttcccagaaaccttcctgtcctccttcgctgagttaacagtcatgtaattttcgcgtgcattctgctggggtgttgtcctgggatagcccctttacataataaattgtaatcccctctgtgctgttcatctacacttgttcttcctgggcgtgccagggacgtaaaatttcttttggttatatgatgcccatagttttcacatgcctaaatttgtttcttctttcgccctgctgggccgtaagagttgctttttgctggaaaa

SEQ ID NO: 435857 - DNA, 661 bp, Triticum aestivum
  unsure (1)..(661): unsure at all n locations
cgttttaccaccttcnttncagcaggagggcacttttaagtgtttatgcagacatgtctttagcgtgcaaggagtactatgatccaaaccgttcgatgctggagttggtttttgctccagcagaggaatggatcggacggagtgacaccgaaatcatcgaagcaactatgctagagctagccaagttgtttcctgatgaaatcgctgctgaccagagtaaagcaaagattcttaaataccatgttgtgaagacaccgaggtccgtttacaagaccgtcccgaattgcgaaccttgccgacctctgcaacgatcaccgatcgaagggttctatctggccggcgattacacaaagcagaaatacttggcttccatggagggtgcggttttgtcaggaaagttttgtgctcagtccatagtgcaggattctaagatgctgtcccgcaggagccaggagagcctgcaatccgaagcccccgtggcttcccagttgtagctagctagcgcgattcaattgtttagcattttctatgtgtcattgtcacattgttgtagagtccaccagtgaattgagctgacaaccatactggaacaaaaaggagatttgtaaaacaaagaagaactttgcagaagggcaaaagtgataaagggatcttagatatc

SEQ ID NO: 435858 - DNA, 497 bp, Triticum aestivum
cgtacgcgtgggcggacgcgtgggcggacgcgtgggattgggttgactacatggagtcctctcgcttcaggggttctcactgggaagtatagcaaagggaatatactccgctgaatgccggtttgccctacataactacaagaacctggcaaacaggtctctggttgacgacacgcttagaaaagtgaacgggctcaagccaatcgcttcggagcttggcgtctcgatggcgcagctgggtatcgcctggtgcgcgtcgaaccccaacgtgtcgtctgtgatcactggagccaccaaagagagccagatcgtcgagaacatgaaggccctggaggtcgtcccgctgctgaccccagaggtcctggagaagatcgaggcggtcgtccagagcaagccgaagcgcctcgagtcgtacagatgaagcggtcggtcggtcggcttcgtcagctgtgcagcgtgtgccccgccgccgcccggtgggattttttcagtacccg

SEQ ID NO: 435859 - DNA, 347 bp, Triticum aestivum
tccgcccacgcgtccgcatggaccaaccatgtcatggcccgttccaggcacacttatgattgaacccactgagagtgaaagcaaggctgaactagacaggttctgtgatgcccttatctccatcagggaggaaattgcacaggtagaaaatggcaaagcagatgcgcacaacaatgtcctgaagggcgctcctcacccaccccaactcctgatgggtgacgcatggactaagccatactctagggagtatgctgcgttccccgccgcgtggcttcggggtgccaagttctggccaacaacatgtcgtgtggacaacgtgtacggggatcgcaacctgatctgcactc

SEQ ID NO: 435860 - DNA, 433 bp, Triticum aestivum
atttgaagtttggaactttgatcctaaaattgctaccttctggatcgactctgatagtcgattgaagggtgttttccttgagagtggaaccccagaggaattctcgcttcttccaaagctcgcgagatcacagcccattgtcgacaaagctaagctcaagagtgcgacttcagtcgaagatgcattagagatcgcgagaagctctctttagtctggctctttgtttaactagttgtcaacacatatggcctcttctgtttgggactgcagctcgttttgaaaagtcaggactacgatgacaataatgcggccatagtatccggtctatgcggggtctgtaatttgcttagatgccccttggccgccattttctagcttggcataaactatgaccacccttttgaggggtcgaggaagatatgatggaatgaca

SEQ ID NO: 435861 - DNA, 681 bp, Triticum aestivum
ggcgagtcaccttctcaaccgaagcagactccggagagcaggcaaggcggagaccgagatggcgcgcggcgtgccggcggctaccaagggcggcgcgggcgccgggaagaagaaggggtcggtcaccttcgtgatcgactgcaccaagcccgtcgacgacaagatcatggagatcgcgtcgctcgagaagttcctgcaggagcgcatcaaggtcgccggcggcaaggccggcaacctcggggactccgtcaccgtcgcccgcgacaagagcaaggtcaccgtcacctccgatggggccttctccaagaggtacttgaagtacttgacgaagaagtacctgaagaagcacaacgtgcgtgactggctccgggtgatttcatccaacaaggaccgcagcgtctacgaactccggtacttcaacattgctgaaaacgaagggcaagaagaagaacaaatgttcaacggcctggttccgttccgttttaaactttgaacttggtggggcaattccgcaataaaattttgaagtttaagttttcaaccctggtttgaattgtgggcaagaagccatgttatggatgcctaaataaccaaactgaagaattgtccgttcctggtcctggggtttaaaaaaatgttggtgaaaatatgttgggcgtaaaaaaaaagttaccgaaataa

SEQ ID NO: 435862 - DNA, 352 bp, Triticum aestivum
tcggttgtagcccgcgcgccctcgccagcgccgggggcgccgttccccgcccccttcgccgcgccgcgtgcggccggccaggtgcgcggggttcgtgggcccggcggtggagtcggcgtccccgggcgcgagggcggcgacgctcgcgagcagccgcggcgggaccgactcgtcactggccatctgccgggtgctcaacggcatgtggcagaccagcggcgggtggggccgcatcgaccgcgccgacgccgtcgacgccatgctcgcctacgccgacgccggcctctccaccttcgacatggccgaccactatggaccggcggaggatttatacggcatgttcatcaacaaa

SEQ ID NO: 435863 - DNA, 657 bp, Triticum aestivum
tcgatgcgtgggcgaacccctctctccccacttacgattcttcggctcccaacgcccaaagccttcgcatccagagctccaaaccctacgcgaggcgaggcgcggcgcaccggagggagaggccatggatcccgattcggtctcgaaggcgttcgtgcagcactactaccacacgttcgactccaaccgcgccgcgctggtggggctgtaccaggacggctccatgctcaccttcgagggcgagaagttcggcggccccgccgccatcgccggcaagctcggatctctccccttccagcagtgccagcacaagatcgacaccgtcgactgccagccctcggggccccagggcggcgtcctcgtcttcgtctccggcaccatcaccaccggccccggcgagcaccccctcaagttctcacagatgttccatttgctgccagctggagggagcttctacgtgcagaatgacatgttccgcctgaactatggttaaggaagggcgaccgctctggcagcaaagaacttgttcagggatttatgttgaaacaatgaacatcaaatgatgatgctgcagactctttgtttgttcgccaacttgtgcaatttatcgcaaaaaattgccagacttgataggcatccaccagatcatcttttgtt

SEQ ID NO: 435864 - DNA, 518 bp, Triticum aestivum
  unsure (1)..(518): unsure at all n locations
gnnnnnnnnnaattggtntgcgcngccntaccggtcnggaatcccgggtcgacggggatgaaccaagaatgtgtggggttggtgcaagcaaaagcttggtgctcatgcaatcctggctgtgtcactagctgtttgcaaagctggagccagcgtcaagaagattccgctgtaccagcacattgccaaccttgctggcaacaagcaattggttttgcctgttcctgcattcaatgtcatcaatggtggatcccatgctggaaacaagcttgctatgcaggagttcatgatccttcctactggagctgcctcattcaaggaggcaatgaagatgggcgttgaagtgtaccacaacttgaagtctgttatcaaagaagaaattacgggcaagatccaacaatgtccgaaaataaagtggttttcccccaacantcangaaaatnangaaggccttnanccctttaanactcaatttaaaaggtggatacnnccggcaaggtttcattggaaangaantttcc

SEQ ID NO: 435865 - DNA, 829 bp, Triticum aestivum
ctttcttgtgctttgggcgattccatccgaggcgagatgagtagaggagagcataggatgaggccacggaggagaagttcggtagggagatcgatggggctgtcgttcgggacgctgctcgggggtgctgttcgccaagaaggagatgcggatcctgatggtcggcctcgacgccgccgggaagaccaccatcctgtacaagctcaagctcggcgagatcgtcaccaccatccccaccatcgggttcaacgtggagacagtagagtataagaacatcagcttcactgtttgggatgttggtggccaggacaagataaggcccctgtggaggcactacttccagaacacccagggtctcatttttgtcgtggacagcaatgacagagagcgtgttgttgaggcaagagatgagcttcaccggatgctgaatgaggatgagctgcgcaatgctgtattgcttgtttttgctaacaagcaagatcttcccaatgccatgaatgctgctgaaataacagataagcttggtctacactctctgcgtcagcgacactggtatatccagagtgcttgcgctacaagtggagagggtctatatgaagggttggactggctctccaacaacatagccagcaagtcctgatcgcttccaatggattggcagggccgcagaagcaactagcggctggacaaatgactggaatatgtacgcatgttaaaatgctgccagagtgttgacatgtctttgtaagctcgatctttgagctgttatcacactgctactatgttgtatcaatgattgaatgtacacacgatgaaaccctttatgctg

SEQ ID NO: 435866 - DNA, 334 bp, Triticum aestivum
gggaccgcaatgcacgacagccatcatcctccgtgcggttccaagctccaactcccacgcccgtctcccccgagatcaggaggagcacgccgcaccggagcgccgagacctcgaagccttcgtctccacctcggagcagagatggggctcacgttcaccaagctgttcagccgcctctttgccaagaaggagatgaggattcccatggttggtctcgatgcccctggtaagaccaccatcctctacaagctcaagctcggagagatcgtcaccaccatcccaaccatcggatttaacgtcgaaactgttgaatacaagaacatcagcttcactg

SEQ ID NO: 435867 - DNA, 396 bp, Triticum aestivum
tttctatgcgtccgcgcgacctcctgtttccgcccaccttctccggctccggcgccggcgaacccaccgcggatcgagcgattcctccgatcaggagaggccagccgggaggaagagcacctacgcgggaggagacgagatggggctcacgttcaccaagctgttcagccgcctgttcgccaagaaggagatgcggatcctgatggtgggtctcgacgccgccggaaagaccaccatcctctacaagctcaagctcggcgagatcgtcaccaccatccccaccatcgggttcaatgttgaaactgtggagtacaagaacatcagcttcactgtctgggatgtcgggggtcaggacaagatcaggccactgtggaggcattacttccagaacacaca

SEQ ID NO: 435868 - DNA, 415 bp, Triticum aestivum
ggggcaccctctctctcctccatttctctcctcctcctgccaccgatcccgatccagggaggaacccggcgcgaggcgggcaaaggaagagaagaggagatcaccgagcccagcgcgcgcacaggacagcaggcgccgcgatctcgcgcaggagcggagatggggctcacgttcacgaagctgttcagccggctcttcgccaagaaggagatgaggatcctcatggtcggtctcgatgcggctggtaagaccaccatcctctacaagctcaagctcggagagatcgtcaccaccatccccacaatcgggtttaatgtcgaaactgtagagtacaagaacattagtttcaccgtttgggatgtcgggggtcaggacaagatcaggcccctgtggaggcactacttccagaacatcc

SEQ ID NO: 435869 - DNA, 260 bp, Triticum aestivum
tcgttacgcgtccgatcaatccatctttccatccgcattcatctcctttgagcagctcctctcctctccattgctgctctgctcgaagatgaagctctccatgcagtcgctggcccggaagctctccatcccgtcgcccaagcggggcaagaagcagcagcagcagcaggacggcggcaagcgcggcatctcccggagcgaggcgccgtcgttcgcgtctgcgtcctcctcctccaccacctcgttcttctccgaggacg

SEQ ID NO: 435870 - DNA, 422 bp, Triticum aestivum
cttacttgtgggcgcctacgctcttcgcttcctccgccgccgccttcccccggtcttctcgcttcagatcagttaacgtagatggctgacgcagaggacattcagccccttgtctgcgacaatggaactggaatggtcaaggctggtttcgccggagacgatgctccacgtgcagttttccctagtattgttggccgtccacgccacactggtgttatggtagggatggggcagaaggatgcttatgttggtgatgaggcccaatccaagaggggtatcctgactttgaaataccccattgagcacggaatcgtaagcaactgggatgacatggagaagatttggcatcacaccttctacaatgagctccgtgtagcacctgaagagcaccctgttcttcttacagaggctcctcttaaccc

SEQ ID NO: 435871 - DNA, 496 bp, Triticum aestivum
ctcatggcattctaccaccccaccgcacaagtgaagtgagagctttgcgctaaaagttcatcagcaaccatgaagggcaccaagctcgcggcgatcctgatcctccaggccgtcctggtcatgggagtcctctcgcacgtcaacgccgacttcttccccaagtgctgcaacaactgcaggtccttctcgggggtcgacgtctgcgacgacgcccaccccaagtgccccaagggctgctcggcgtgccgcgtggtgtcgacgagccccgaaatgtggcgctgcgcggatatgaaatccaccgtcgacggcacctgcggtgggccctgcaagaagtactgatcggctcatgccagcatatgatatgttccgcctaaggccccgcttggatcgtcggtttgctcctaaatacacttgtaaccaaaacagacctcgagccgtcgttttcaatctaggcggaaataacactgcgaccggtaaaatacacttgtagattaaa

SEQ ID NO: 435872 - DNA, 463 bp, Triticum aestivum
ttggctttctaccaccagaccgaccgcacagttgaagtgagatctgcgctaagggttcatcagcaaccatgaagagcaccaagctcgcggcgatcctgatcctccaggccgtcctggtcatggggatcctctcacacgtgaacgccgactatttccccaagtgctgcaacaactgcaggtccttctcgggggtcgacgtctgcgacgacgcccacccccagtgccccaagggctgctcggcctgccgcgtggtgacgccgagccctcacaagacgttccggtgcgccgacatgaagagcaccgtcgatggcacctgcggcgggccatgcaagaagcactgatccgttcagggcttcaggctcagacgaggtgtgccgcctaaaataaagctcagatgagatgagcagtcatggtgcctatgcttgtgtgtgggtcgtgctatacggccaacaatatgtatact

SEQ ID NO: 435873 - DNA, 580 bp, Triticum aestivum
ctcattcgtccgaacagagagcattctaccaccgcaccgctcgagtgaagtgagagctttgcacgaaaagttcatcagcgaccatgaagggcaccaagctcgcggcgatcctcatcctccaggccgtcctggtcatgggagtcctctcacacgtgaacgccgactatttccccaagtgctgcaacaactgcaggtccttctccggggtcgacgtctgcgacgacgcccaccccaagtgccccaagggctgctcggcgtgccgcgtggtgtcgacgagccccgaaatgtggcgctgcgcggatatgaaatccaccgtcgacggcacctgcggtgggccctgcaagaagtactgatcggctcatgccagcatgatatgttccgcctaaaatgaaataaaagctcagacgagatgagcagcgtcatcgtgcctatgcgtgtgtgtgtggccaacaaatatgtataccagtatgccgtgtcttcgtcgctgtgttttctctctcgagaaaaagttggtgttgcttgttgttcagatatccggaatatcctccgtgaataagtaatgattgtgcgttggcggcaa

SEQ ID NO: 435874 - DNA, 266 bp, Triticum aestivum
ttagatcgtggcggctacaacaacggctacggcggcggtggctcgtacagcaacggcaacggcggtatcacgccctacaacggcggcggcggtggctacaacagcaactcttcctacggaaacggcggcggtgggtacaacaactcttcttacggcaacggcaacggcggcgacgggtacaacaacgctcccagctgggcatcccaggacaccggcggccggacgccgatgtacataaacaccagggaggtccacgtttatggggc

SEQ ID NO: 435875 - DNA, 1616 bp, Triticum aestivum
ttttcggaaggctttctttaatcgaattacttggacgacggcaactctaccaggccctttaagttcattttctgttactccatctttcttttccgttccatattcttcaataccatttggtgccacatccgttgttaattcaatagataggactccagtggcatttttggcaaaattgtttagatattggagggggtcaattgaagtgactattaaagttgtgaagacagaatttcatactggtagacttattttgtccttttcgccccaattagctcagactactattacaaattctaatacaaactatgttcatcgtgagatagtcgatctacgtgatggctctgagtttgtgattaaagtgccttattgctacaactctatgtacatggatactgaccaagctcaaaatgatttattcatgatgatgcaggtcaatgtattaaatgaattggtagctccagacacttgcgcacaaagcgtagaaattttgtatgaggttaggggtggagtagacatggaatttcaagttccagttcctttcaatgttgtaccagttcaacagatagttcctcagagtggtggagaaggccaagctgagttagttcttgattcttgtattggtagttccactgtgcatgacccgtctaagatgtctgctgagctttgcattggtgaatcttgcacttctatgttacagttgatgaagaggtatctccgattggcaacaactaatgcatcatggactgcgaacaattcttttgcagtctacccgtattattatggggcttactttacttcgggtgtggcattgagtggcaccacaggctatattactggtgattatgtggggcttttggcttcatgttatgcccattctcgtggagccctgaggtatagatggatgaacggtcaaaccactgcttcgggtacgatcactaagattataccctatgataggctagtggtagctccagtgtctgttacaactaagacgacctcccaattgcttggccaagcacctcaaatcacattaagtgaaaatgcggagctctctaatcaggcgaccacctatgatgatgttcagtcatcgggtgctagttcttttatacctatgtataatcgaactttttgtagattgaatcggttgttctatacgaacaatcctggagatgctttggtctcacgtgctcctgatattgcaaaatttcaactggaaatagatagttcatctggcaactttggtgcaacatcttctctccatagatgtgcatctgatgacttccatttctcgttttggttaggagttcccacgatgggatggttacaaacttaaagtccaagtgactataaaagaaacaacaaaaacatagtaaaatgtataaaattacgcagctttccccccaccactggtggggggttttggagctgaccccttaggaaaacaattcttcgattgtttgctagatacgttatgagacggacctgtttaaggggccgttccatttctgaagctaacaaactttaagtcgttgatttgcctgcgatttgaagacgtcgtagctgcatctgctctggttaatttcagtgcatttgcggctgtttttattgcaaaa

SEQ ID NO: 435876 - DNA, 448 bp, Triticum aestivum
tcttggacgcgtgggcggacgcgtgggctccagggttcgtttcccctcggagccgaaaccctagccgccgccgccgacgaccgcgagcaggctcagatgggaggcaagtgcccgcaccgcaaggtcaaaaagcgccgtctcaactgcaagcaggtgcgccgcggcaagttcctcgtcaaagccgacgacgccgtctacgacgagctcgtcaagctggccgaccagggcaaggattccgagggcaaggcgcttcccgtcgacgaggacctccccggcatgggccagttctactgcctccactgcgatcggtacttcgcggatgagaccgtgaaggaggatcactaccgctcaaagcgccacaagaaaagggtcaagcagttgtctggaccagccccacacacgcaaatagatgccgatctcgctggtggaatgggaatgccggacaacg

SEQ ID NO: 435877 - DNA, 462 bp, Triticum aestivum
tatcgctctctcgactccggccagtctcttcttctctagaaagctagcgaggcttggaggtgagcgaaaatgccggtcagcaggatcgccgcggggagccaccgtgaggtgtacgaggtcggcgccctcaaggcggcgctcgccgagttcatctccacgctcatcttcgtcttcgccggccagggctccggcatggccttcagcaagctgagccccgacggcgcggcgacccccgccggcctgatctcggcggcgatagcgcacgccttcgccctgttcgtggcggtgtccgtgggcgccaacatctccggcgggcacgtgaacccggccgtgaccttcggcgccttcgtgggcggcaacatcaccctcttccgcggcctgctctactggatcgcccagctcctgggctccaccgccgcctgcttcctcctccgcttctccaccggcgggctccccaccggc

SEQ ID NO: 435878 - DNA, 403 bp, Triticum aestivum
tttcttttcacgcgtccgcccacgcgtccgcccacgcgtccgtccacgcgtccgcccacgcgtccgcatgtatctccactccggccggccagccagtctctgcttcttcttctccagcgagcgagcgagctaggctcggaggtgagcgaaaatgccggtcagcaggatcgccgtggggagccaccgtgaggtgtacgaggtgggcgccctcaaggcggcgctcgccgagttcatctccacgctcatcttcgtcttcgccggccagggctccggcatggccttcagcaagctgagccccgacggcgcggcgacccccgccggcctcatctcggcggcgatagcccacgccttcgcgctgttcgtggcggtgtccgtgggcgccaacatctccggcgggcacgtg

SEQ ID NO: 435879 - DNA, 175 bp, Triticum aestivum
gtttattagatataacatgggttaagcatgatggctcctcatggtggccagcccaggtcattgatgaagcatgtgccagtagcaaggccaagaagaagaccagccatgatgctctggttcgactgtatggcacatgcctagacttgtatgttgacccatggaagtctaacatgga

SEQ ID NO: 435880 - DNA, 357 bp, Triticum aestivum
ctgatcgtgtggcaaacccaatcagaaatctcaagcttagcacagcaccagggcgtctgagcagaccttggtgatgatcaagcctgatggcgtccagaggggcctcatcggtgaggtcatcatccgcttcgagaagaagggcttctacctcaaaggtctgaagctccagaacgtggagaagtcgttcgccgagcagcactacgccgatctgtcctccaagcccttcttcgctgggctcgtggagtacatcgtctccggccctgtcgtcgctatggtctgggagggcaagagcgtcgtctccactggacgcacgataattggcgccaccaaccccctggcctttgagcccggcaccat

SEQ ID NO: 435881 - DNA, 581 bp, Triticum aestivum
tttacgtgtccgcccacccgtccggggccccttggtacggcggcaagagcgggtgcatcaaggacctcaacacgctgtcgtgggtgcacaacgtggcgctgcagcgcaagatcgtggagctccggaagaagcacgccgacgtgcgcatcatgtacgccgactactacacgcccaccatccagttcgtcctccacgccgagaaatgggggatgctaaggcagaagccgagggcgtgctgcggggcggcgggcgtgggggtgtacaacttcaacctgacgtccaagtgcggagagcccggcgcgtacgcgtgcgacgacccctccaaccactggagctgggacggcatccacctcacggaggcctcctacggccacatcgccaggggctggctctacgggcccttcgccgacccacccatcgtcggcaaccggaacctcgagtagtactgtagcagcagtggtacagggcttgtttttgcgtacatgccacctgcacatgggttttactactgtatgtagagaaagaaaggaaaacaagtcaaagaacacacatgccttgtgcagattaattgattgctaatt

SEQ ID NO: 435882 - DNA, 474 bp, Triticum aestivum
atcagggagtcagctcgacggtccaggaggaggaagcatgcgcagctgactgaccttgagttgcaggtcgagcaacttaaaagtgaaagtgcaaccctcttcaagcaactgacagaggcaaatcagcagttcaccaccgcggtcactgacaacaggatcctcaaatcagatgtagagaccttaagaatcaaggtaaaaatggcagaagacatggtggctagaggcgcagtgtcatgcggcctaggacagcagctcggattggcaccatttctgaactccaggaagatgtgacaaagccttggtgagcgttctcacaggcacagggttgaacttgaaagggaaccatgcactcttcagaggtttctagctctagctcttcaagttcagacatcggcggcacgaagcactgcaagtctagagtgctcgaataaccggatgcccgcttgcccagcgaggcggccagatgtgtggatg

SEQ ID NO: 435883 - DNA, 367 bp, Triticum aestivum
ctcacgcgtccgcccacgcgtccgcaagtctcaaagacagtgtagctagtaagtgagactgtaagtgtcgagacatggagtactctcgccgcagcaggttgctcctggtgtgctcagttcttgtgctctgcctcgtaaccggaggcgcgtggtgcaccaagttaagcagcaatttctatgactggacgtgccccggagtgtacaacgtcgtccagcagcacgtgttttctgccatgagggaagagctgaggatgggggcctccctgctcaggctccatttccatgactgctttgtcaatggctgcgatggttcaatcttgctggatggcgctgatggcgagaaatttgcactacccaacatgaactc

SEQ ID NO: 435884 - DNA, 280 bp, Triticum aestivum
tggtagctgactcaactacctactaggttgaggttctcgtttatttacctttagttacccggcgccatcggcatccttcatacagtactgccaggcagatttccaagccaagaaacggaccaacagctggctaatcggcgccgttactggtcatggccgacgcgagtttcatcaaggcgcccgccgggcagaatcccaggctggcaatccacgctccggggaggggcacccgggtggtcaggtgctcgcttggcgcggacgtaggcggccggaccgagtg

SEQ ID NO: 435885 - DNA, 365 bp, Triticum aestivum
ttgcttactacctccctcgcctgcgacccatcacacatacacagcgcgagcgtcttaaccgggcctgcgcgaagagaagagtgcagaggagcgcacagagtaagcaacagcaatggtgagggctccttgctgcgagaagttggggctcaagaggggcccgtggacggcgaaggaggacatgaccctggtggctcacatcgagaagcacgggcacagcaactggcgggcgctgccgaagcaggccggcctgctgcgctgcggcaagagctgccgcctccgatggatcaactacctgcgccccgacatcaagcgcggcaacttcaccagcgaggaggaagaagccatcatccaactccacgccatgc

SEQ ID NO: 435886 - DNA, 323 bp, Triticum aestivum
acggggatacaatcggtttccacttctctcctcacctcgcattctctactcaggctcagatccgatagcccccccgcctccaaccccgctgcgcccaatcggaatgtagctctcccccagtagactagtttaagagcagaagaatatagttaatggttcctggatgagaagtggaaatgctactggctgtggaaggaggaggtttcttctcatcgtcagcttcaggatacagccatggccttgctcttttgctgctgggacggacagaagacgacaagcctgtcaaggcatggagtcagtaccgagtagtcgatggggaagct

SEQ ID NO: 435887 - DNA, 458 bp, Triticum aestivum
tttctcacgcgcccgccggcggcggcgcgtagcacaggagaaggagcaggcggcggcggtgcccgaagaggagaagcacggcgacctagcccgagctcgcaaccatggctaggggtttgaagaagcatctgaagaggctcaatgccccgtctcactggatgcttgacaagcttggtggagcttttgcccccaagccatcatctggtcctcacaaggccagggagtgcctgcctctgatcctcatcctgaggaacagactgaaatatgctctcacctaccgtgaagtgcaatctatccttatgcagcgtcatatcatggttgatggaaaggtccgcactgacaagacctaccctgctgggttcatggacatcatttccattcccaagactggtgagaactacaggcttctttatgacaccaagggtggcttccgccttaactatacaagggatgaggat

SEQ ID NO: 435888 - DNA, 761 bp, Triticum aestivum
tcgcttcgcgtccgcctgccaatcccctcaccgcctccgctcccacgccgccgaatccgagacctgatctcggattcaccgcgagcgcgaccaaaccctcaggcgatccccggcacctcctccccgacgcttcagccatggcaggaatggcaccggaaggttcccagtttgacgctaagaactatgattctaagatgcaggagctgctgaaccaaggtgagactgaggagttcttcacctcttatgatgaagttcacgagagctttgatgacatgggtctccaagagaacctcctcaggggaatttatgcttatggttttgagaagccttctgccatccagcaaaggggaatcgttcctttctgcaagggccttgatgttatccagcaagcacaatctggaacaggaaagactgctactttctgttctggaatcctccaacagcttgactatggtttggttgagtgccaggccttggtccttgctcccacccgtgagcttgcacagcaaattgagaaggtcatgcgtgcacttggtgactacttgggtgtgaaggttcatgcctgtgttggaggaacttcagttcgtgaggaccaaaggattcttgcaagtggagtgcatgtcgttgttggtacgcctgggcgtgtgtttgacatgctccgtaggcagtctctgcgccctgacaacatcaagatgtttgtcctcgatgaagctgatgagatgctttcccgtggtttcaaggatcagatttatgacatcttc

SEQ ID NO: 435889 - DNA, 428 bp, Triticum aestivum
ttcactcgtccggcccggccgcccgactttgaccgcctcctcgtctccgctcccacgcccgcgggagagaggcgaccggcggcggcgcgcgaggaggggcctacccacccatcccaccaccccgccggccaagatgttcggccgcgcccccaagaagagcgacaacaccaagtactacgaggtgctcggggtgcccaagaacgccgcccaggacgacctcaagaaggcctaccgcaaggccgccatcaagaaccaccccgacaagggcggagaccccgagaagttcaaggagctggcacaagcctatgaggttttgagtgaccctgagaagcgtgagatctatgatcagtatggcgaagatgctctcaaggaaggaatgggtggaggaggaatgcatgatcctttcgacatcttccagtcattctttg

SEQ ID NO: 435890 - DNA, 833 bp, Triticum aestivum
tttctgtctgctctacccgcttctaacaaacgcgcgcacactccctctcgctctcgcggcgcaggtcggaggctaaaaccctagacacaggcgactatgacggcgccggcggacaaggggaagaaggccaagaccgacaccgacgtcggcgaggagaacgagcagatcgacggtgccctcgtcctctccatcgagaggctccaggagatccaggacgagctcgagaaggttaatgaagaagcaagtgataaggttttggaggttgagcagaagtacagtgagattcgcagacctgtctatcttcggaggtgtgacatcatcaaaacaattccagacttttggctgacagcgtttctaagtcatcctcttctcagtgagcttttgactgaagaggatcaaaagatgttcaagtacttggaatctgttgatgttgatgattctaaagatgtcaagtcaggctactccatcactcttaacttctctgagaatccgtactttgaagacagaaagcttaccaagtcatatgcctttgctgatgatggaacaaccacaataaatgccacttccattaagtggaaggagggaatggaaattaatgggaatgccattaagaagaaaggaagcaagcgcccattggttgaagaaagtttcttcacctggttcactgatacagagcacaagagccttgctgacggggtgcaagatgaggtggcagagatcatcaaagaagatttgtggccgaacccattgaaatatttcaacaatgaggttgaagagtttgaaggagatgactaggatgaagagggatctgatggggaggatgctgaggagga

SEQ ID NO: 435891 - DNA, 399 bp, Triticum aestivum
cccacgcgtccgcccacgcgtccggccaaacgaaccagcgccgcagcccgcagcgcacccatcccaccaaacaaacagctagcaggcgaggcgacccgctccgacctcgagccgatgccgacgccgtacagcgcggcggcgctgcagcagcaccagcgtctggtctcctcctccggcggcctggcggcgacgggggcccacaggtgcggcgagcacgacgggacggtgccgccggaggtggcgcggcaccacgagcacgcggcgccgggggggcgctgctgctgctcggcggtggtgcagcgcgtggcggcgccggcggcggacgtgtgggccgtggtccggcgcttcgaccagccgcaggcgtacaagagcttcgtgcgcagctgcgcgctgctggac

SEQ ID NO: 435892 - DNA, 429 bp, Triticum aestivum
ttcgactgatgttgcagggcgtggtattgatattcctgatgtcgctcatgttattaactatgagatgcctagttcagttgatacatacacacatcgcatcggaagaacagggcgtgcaggaaagaagggacttgcaacttcattcttgaccctggataacactgatattttcttcgatctgaaacagatgcttactcagagcaatagtcccgtccctccagaacttgctaggcatgaggcgtcgaagtttaagccaggatcggttcccgatagacctccaagaagaaatgacaccgtctatgcatctcactgaagcaatctgccgcagaagaggcgggagatccttcctgggttcaattcagggccaccttctactgtgtcgagatttagtacttatgaggtacaaacatcataacaattgaacaatta

SEQ ID NO: 435893 - DNA, 226 bp, Triticum aestivum
ttcagagcagaagcagaagcaggcaacaggcgagcaggaaggaagcaagggaggtggagatggcgcccatcaagctgtacgggatgatgctgtcgcccaacgtgacccgcgtggccacgctgctcaacgagctcggcctcgacttcgacttcgtcgacgtcgacctccgcaccggcgcccacaagcagcccgactttctcaagatcaacccttttggccagatccc

SEQ ID NO: 435894 - DNA, 257 bp, Triticum aestivum
tctgccattcttgaatgaaatgcctagagacggtaacttaacaccatatatatttcatctctgctcgacagtacgtttggttacagcggggggcccttccatacatccatgtaagctgtaacgggtatgcaggaagtcaagagctgggatgcttgctgttgtttcaagatgtagacattgtgtagtgacgtcggaaatgaggttccacttcttattttttgcttctacatatatactcgtatagtatttgtcgagat

SEQ ID NO: 435895 - DNA, 634 bp, Triticum aestivum
ccctcgcgtccgcccacgcgtccgggcttcctactaactaaacagtaaacagagagctcgctctccgtgaatgatgtcgaggaagaagaggaagaagaagaagtgtggagcacgctgctgctacctggtcacgctctcagcagtgtgaatttccagaagcatgcttgccgtgccttcttccgggtgcaccggaggctggcatgtgagcaggggtgcttcagtgatgcagaagaaaaaaggcaagtcttatcggcaagggaaggctacgcctttcttccaggtctccctctctccatctaaatctgtgtttggaggagggggctacggttagtttacccaccggtttactgtgtccttgtgagttgtgatcattatcatgcactcgtcagttgcttgacatgtatggtgtcgttcttgaattttcagctacatataatggtcggttgtgtgagtgaatgggagttgtgttcatgtgtcggtctgtgtgtcgactgtcactgtgagtcaattagctaaaagaagtgtgatgtgtgggttcagcgagggagtaacagtcactgaataagaatgtaagggtcctatcctatatgtatgtctaaaatagtaacatgtaacatgtgttgctctttctttc

SEQ ID NO: 435896 - DNA, 470 bp, Triticum aestivum
ctcgttttcatcaaacacgcaagccgtctgcccccgcacggaaagtgatccgtcggaggcgacgcaatcgtcggcgagctaaaacgacatcattcacatctcagtctggggttgcgaattcctttgggttccgtagtagacgccttagcactaagcgttaccggaatatgctttggaactcgtctgtacttaggactaagattagaaccaatagcgctttcacgcagagtcaagcatccgctgcaagctctgcacagtatacagtgggtatatacgatgccttcggcaatacagctagtcccttctggaccgcgggtggaggcgcatttgcaccggatttcggctctggtgttcctacaattactggtaacattgtcgtacgtggcggtgttcttggtatacgcgttacaaaccagagtgctgatactcagcctcaagaagtcaggattacattgatacgtactggaagt

SEQ ID NO: 435897 - DNA, 527 bp, Triticum aestivum
tgtctcttcggatttcgccgccgccgcagccgcagcagctcgccgcccacgcctcctacccgtcgacgagatgacgaagcgcaccaagaaggctggaattgtcggcaaatatggtacccgttatggtgccagtttgcgtaagcagatcaagaagatggaggtgtctcagcactccaagtacttctgtgagttctgtgggaagtttgctgtgaagaggaaagcagttggaatttggggatgcaaggactgtgggaaggtgaaggctggcggtgcttacaccatgaacactgccagtgcggtcactgtcaggagcactatccgtcgcttgagggagcagactgaagcataagttgctactagtgttttgtcctagtgaatcatctgggattttgcagtttagacgatactttggattcagttctgttggctgtttagtcaaggattatctttgtacttggtgcgatgatgttctgttatgttattctcccaaccttttgttgcctgattccactctgatttactggtgg

SEQ ID NO: 435898 - DNA, 545 bp, Triticum aestivum
gttgtcgtcgccgccgaccgttgttgcggacgcgtgctccttgtcgacgagatgacgaagctcaccaagaaggctggaatcgttggcaaatatggtacaaggtacggtgccagtctgcgtaagcagatcaagaagatggaggtctcccagcactccaagtacttctgtgagttctgtggcaagtttgccgtgaagaggaaagcagtcggaatctggggatgcaaggactgcgggaaggttaaggccggtggtgcctataccatgaacaccgccagtgcggtcactgtcaggagcacgatccgtcgcctgagggagcagactgaagcttgatcgcggtcaatctgacaaaggagcctctggattttgtagttcagacgagactcattcgacgcaatatagcctaaattgacaacatacaatgttatttatcggcttgttggggttctgaatgtatccagctacgttacaatgtgtatctcgtttatcgtgcttagttgattgtctaagggtattcgttgtgtgtgtcgttggttcttgaatcttaa

SEQ ID NO: 435899 - DNA, 697 bp, Triticum aestivum
gttattctggcaggtgccgcagtacgtggtggtaggcgcggcggaagtgttcacgtttatcgggcagatggagttcttctatgaccaggcgccagacgccatgcggagcgtctgctcggggctctccagcgcggcgtttgcgctgggcaactacgcgagctcggcgctcgtggccgtcgtggtgcgcgtgacgactaggggcgggcggcccgggtggatccccgacgacatcaacgacggacaccttgactacttcttctggctgctcgccatgctctgcaccggcaacttcggtgcgtacctgctcgtcgcacggtggtatacctacaagaagaccgctgactaaacctggcgatcactgtgccgtatgtgctagggtacttctttgatgcaataaacgtgtaattgggaaagctacctgtgttgcggcaaatcttgaaggaactctgctcatagaagattcagaatcgttgatctagaaaaagttcgtcagcagtctggaaaattcaggtttcagcaccgactcctgttggacgcccgcaggagtcgggtaggcgcggcagtaatgcctaaaagcaagggaaactggccggccaactctggcgcgagcatgctttttactctttattaatcttttaatcggtttttctctgattttttttgcgaatcttgatgttttaaaccctttttaaaaatc

SEQ ID NO: 435900 - DNA, 441 bp, Triticum aestivum
tcgtttttgccaagctgcaatcatggcaaaaatgggagctgagcagtcaaaacctgctgattgtatgaagtcgtcaggaaatgaagggcatgatgttccaacaattgagactgccgttgagacgcgaccagtttgctctctgtgccaggattcggattccaaaagtcgactctgctgtttgattcgtcttcaggctgccatggaaactatgatggcagagactgttgaagatggtcagaccccaagttcaattgcagagctcgcttccaaggtactctcccatgtcagttccacaagctcgctggagtcgccggctgttcaagttcttgaggataaactcgaggcagaaagacggggtgcagttgcgctccgggaagaaatcagtgccctgaataagcgagcagaaaaagctgatgtggtaatcgcgaaaacccaacagga

SEQ ID NO: 435901 - DNA, 690 bp, Triticum aestivum
tttgtcgcgtgggcggacgcgtgggcgcacccgcacccgcacccgcacaacagagacccagggcaggcgtctcaccgcccaggcccagctgcagctccggcgagatctccggcgacccttcgagatgagccgcggatcgggcgcgggctacgaccgccacatcaccatcttctcccccgagggccgcctctaccaagtcgagtacgcgttcaaggcggtcaagtcggcgggggtcacctcgatcggcgtccgcggcaaggactccgtctgcgtcgtcacccagaagaaagtcccggacaagttgctggatgacaccagcatcacgcacctcttctcgattaccaagtacaccggcttgcttgccactggcctcacagctgatgcgaggtccttggtctcccaagcaagaaatgaagcagctgagttccgtaaaaaatggggatatgagatgcctgtggatgtattagcaaaatggatagcagacaaagcacaaatatacacgcagcatgcgtacatgagaccccttggtgttgttgccatggtcttgggttacgatgaagagaaaaatgctcagctcttcaagtgtgaccccgcaggtcacttctttggacacaaggcaactagtgccggactgaaggagcaggaagcaataaattttctggagaagaaaatgaaggatagcccccagtt

SEQ ID NO: 435902 - DNA, 587 bp, Triticum aestivum
tttcgcgtccgaagctcaactcaccagcttaattaccctgacagacattgttaggtcttgtgttagtgaagctagctaggtaagaaaaaccatggcggcttcccgtgccttggctgcactgcttgctgtggtggtactcatggtctgctctccggcgcctcgtgttctcgccactgaccccacccagctccaggacttctgcgttgctgatataatgaaccctgtgattgtgaatgggttcgtgtgcaagaacatgaagatggtgacggcgaacgacttcttcttgcccgggcttaacaagccgggcatgttgaacgctcagggctcggcggtgacaccggtgacggtgcggcagctgccggggctgaacacgctgggcatctcaatggcgcgcatcgacttcgggcccaacggcgggcagaacccgccgcacacacacccccgcggcaccgagatcctcaccgtgatcatggggcagctgctggtggggttcgtcacctccaaccagcaggacgggaagaacctgctcttcaccaagcagctggtggagggcgacgtgttcgtgttcccacaggggctcatccact

SEQ ID NO: 435903 - DNA, 1295 bp, Triticum aestivum
tcacgcgtccgtcctcctaaaccactctccctatccccgtgtccagaagctaccccccggctccaatggcggcgaaggaaccgatgcgcgtgctcgtcaccggcgccgcaggacaaatcggatatgctcttgttcccatgattgccaggggagttatgcttggtgcagaccagcctgttattctgcatatgctggatattgaatttgctgctgaagctcttaaaggtgtcaagatggagttgattgatgccgcatttccacttctcaagggagttgttgcaacaactgatgttgttgaggcctgcactggtgtgaatgttgcggttatggttggtggattccccaggaaggaaggaatggaaaggaaggatgttatgacgaaaaatgtttcaatctacaaagctcaagcatctgctcttgaagctcatgcagcccccaactgcaaggttttggttgttgccaacccagcaaacaccaatgctctcatcctgaaggagtttgctccatctatccctgagaagaacatcagttgtttgacccgcctagaccacaacagggcactcggtcagatttctgagagacttggtgtccaagtttctgacgtgaagaatgctattatctggggtaatcactcgtccagtcagtaccctgatgttaaccacgccactgtgaagacttccagtggagagaagcctgttcgtgaacttgttcaagatgatgaatggctaaacggggagctcattgccactgtccagcagcgtggtgctgcaatcatcaaagcgaggaagctctccagtgctctctctgctgccagctcagcttgtgatcacatccgtgactgggttctgggaacccccgagggaacatttgtttccatgggtgtgtactctgatggttcatacggtgtgcctgctggtcttatctactccttcccagtaacgtgcagtggtggtgaatggacaattgttcaaggtctcccgatcgatgagttctcgaggaagaagatggatgcgaccgcccaggagctgtcggaggagaaggcgctggcctactcatgcctcgcgtaaatccacattggaagggcagctgctcctctggatgttttgaataaatgaaaccttccgctccttagaaactctcgtctccacccagaacagccgcacatcgcgatgcatgctccttttcgctggttttcccagtgtgtatgaaggcttgtagctccccttttgcctgatgatttacaggacagtacatttgctggaagagtgaaacaatttgacacctgattagaatct

SEQ ID NO: 435904 - DNA, 481 bp, Triticum aestivum
tcttttctctctctcacctccggcgaataacacaccagagctcacctctcccctcgctttctcgcgaaaatgtcgactgaagtggctgccgctgacatcccggtgcctcaggtggaggtagccgccgacgccgccgttgacacaccggcggcgaagccggccaaggcgcccaaggcggccaaggccaagaagtccactggcccgaagaagccccgcgtcaccccggcccacccgtcctacgccgagatggtgtcggaggcgatcgccgccctgaaggagaggagcgggtcgagcaccatcgcgatcggcaagttcatcgaggataagcacaaggcgcacctcccggccaacttccgcaagatcctgctgacccagatcaagaagctcgtcgccgccggcaagctgaccaaggtcaagggctcctacaagctcgccaaggcccccgccgccgtcaagcccaagacggcgaccaagaagaagc

SEQ ID NO: 435905 - DNA, 449 bp, Triticum aestivum
ttccttgcgtattgttcgaccccccgctctcgtccaatccaagtccctttcatactaagtgacaccttctgaacatcggagtttttttcggaaaggaagttgaaacctcagcctctgcatcattctgaacattggagttaacggagctggctttgcatggcttttcctatgtgccaatccagtcttgtgatatagatgtgccatctctctctgcatgacaagttctcaggtactctgctgctgatgaacttcctccacacctgcagtgacaagaaaacgctgaagaagtggttcttcatcgacaagacagcgggctaagaaaatcctgctgaaagagagacgaccgccgtaccgaccacactttttcttcgtccgacccgatggatttgagcaacggctcaccggtcatcagtgatccgatgtcaatgagccactcgctgatgggagtg

SEQ ID NO: 435906 - DNA, 532 bp, Triticum aestivum
acctcgtggtgggagtagcccgcaatgggattttttttcctgatgcttttgtcgtgaggcaagaaggacgaaggcatatacaacaattgaacatagagaccgagaaggcgaaaacaaaagcggctcgggcccggcccgatcccggatcttcgccgccggcgacgccggttggagaggtgatgggggaggtgcgcggtgctctatagcagctagtaggtgtagttctagtttttccttagaggagtttggcctagtgccggagattggcgtcatgccgatgaggattttgctgccggcgcgcccgagccgcgttcggtggttcctggcgatgctcttgttggtggtggcggttggctcgctgctgctggaagcaggcgcgctggaatcctcggaaataagctcgatgtctcccctggtatgcaggaatccccttcgcttgctctcgccgacggcagtcaccatggtggtggtcaagtcgactgttcttgcgaccttccagagcaaatcatcgatggtgcttgagctttggcgc

SEQ ID NO: 435907 - DNA, 444 bp, Triticum aestivum
cggcaactacgtgctgtaggatttcggcggcatcaacatgctgcacaagggctcggtcgagcaggccgggttcgcggtgctgaaggcgcccgacattccgtcgatcctcgtcgagaccgcgttcatcagcaacccggacgaagagcgccggctcaacgacgacagctatcgcgacgagatggccgacgcgatcttccgcggcatcaagcgttatttcgccgcgaacccgccgctcgcgaagaaccggatggcctgacggccgaacctccccccccgccggcacgcagcgcgtgccggcgcgtcacgacgccgcgaagcggcgcatcagtttcccgccgaacacgttcaccgcgagcccgcccatcacgagcgccgtgccgatcagttgcgtgcgcgtcaggtgttcgtcgagcagcagcgccgacgacgcgagcccgacgatcg

SEQ ID NO: 435908 - DNA, 464 bp, Triticum aestivum
tttcgttcacgcgtgcggtcaccccgaacccccagctcccctccccggcgccgccgcagcagcaagatggtgaagggacgcaccggccagcgcgtgaggctctacgtccgcggcaccatcctcggatacaagcggtccaagtcgaaccagtacgagacggcgtcgctggtgcagatcgagggggtgaacaccagggaggacgtggcctggtacggcggcaagaggatggcctacgtctacaaggccaagaccaagagcaacggcacccactaccgctgcatctggggcaaggtctcccgcccccacggcaacaccggcgtcgtccgcgccaagttcacctccaacctgcccgccgaggccatggggaaaaaggtcagggtcttcatgtacccgagcagcatctaaaaggttactttgaagtctggagggtttcgctcgtcccttaggtttcatttcgagtcatg

SEQ ID NO: 435909 - DNA, 808 bp, Triticum aestivum
tcttcgcgtccgcccacgcgtccgcccacgcgtccgcccacgcgtccgcccacgcgtccgctactagctagccatggcaatcttccaagagtagtcttgcaatgtttgcactggccatagtcatggccgtggtggctgacgtctcggcgcagaacaccccgcaggacttcgtcaacctgcacaaccgcgcccgcgccgtggacggcgtcggccccgtggcatgggacaacaacgtggccaggtttgcgcaggactgggcggcgcagcgcgccggcgattgccggctgcagcactccggcgggccgttcggcgagaacatcttctggggttccgggcagtcgtggacggccgccgacgcggtgaagctgtgggtggacgagaagcagaactaccatcttgacagcaacacctgcgacgccggcaaggtgtgcgggcactacacgcaggtggtgtggcgcaagtcgacccgcatcggctgcgcgcgcgtggtctgcgccgggaaccggggcgtcttcatcacctgcaactacaaccccccgggcatcttcaacggcgagcgcccgttcgcgttcctcacccttggcgccgaagccaagtagtacgtgcgtgtgagtgtgatcatgcatgcgtacgtacgtgcgtgtctttatgtgtgtgtggtttgaatatttatacgtctacaaatgttacgtacgtacgtaaataagcacacattccggcctgcatgtatccatgcggctctgtgcagcgtgtaaatgtatgcatacatcttctccgtccttgtgttgttcaaaacttggacctagcc

SEQ ID NO: 435910 - DNA, 403 bp, Triticum aestivum
ttgtaacgtccgtcgatcttcttcctcgtgatcatagatcgcaacgaaattttgttaccgttcattaactaatcaatttgcgattgattttgactagcaggtggtgaaggatgggtaccaatggcggaagtacgggcagaaggtgaccaaggacaacccgtgcccgagggcctacttccggtgctcgttcgcgccgtcgtgccaggtgaagaagaaggtgcagcgcagcgccgacgacaaggccgtgctcgtggccacgtacgacggcgaccacaaccacgcaccgtcgcccaagcaacaaggccctggtggcaggaagagcggcggcgcagccgccctccgcgcaccaccggcgccggtgcttgttcagcagcagcggaagcaggaagcttcgacggcggag

SEQ ID NO: 435911 - DNA, 409 bp, Triticum aestivum
tcgacaggggcagctcaacttcgcctcaacaccaaaccctagcctcctcctccgcgcgccgccgccgccgccgccatgtcagggaggaagaagacccgcgagcccaaggaggagaacgtgacgctcggccccgccgtccgcgagggggagcacgtcttcggcgtcgcgcacatcttcgcctccttcaacgacaccttcatccatgtcacggatctgcccgggagggagacgctcgtccgcatcaccggtggcatgaaggtcaaagctgatcgtgatggatcatccccttatgcagctatgcttgcatctcaggatgttgctgtaagatgtaaggagcttggaattactgctctgcacattaagctccgtgccactggtggaaacaagacaaaaactccaggtcctggtg

SEQ ID NO: 435912 - DNA, 561 bp, Triticum aestivum
ggtctagaatacccgggccgacggggggcgtatgtgcatttctattcttcatccacctggtgatgatcccaatggttacgagcttgcaagtgaacggtggacaccagtgcacacagttgagagtatagttttgagcattatttcgatgctctctagtccaaacgatgagtctccagcaaatattgaagcggctaaggactggagagaaaagagggccgagttcaagaaaaaggtgaggagccttgttcgcaaatctcaggaaatgctctgaaaaaggaggatcatatgggggagtccacaagcgctgcaattctcttgctttcaccaaatggggcacctgatgccagcacttgcacttctcccctgtttattttccgttcagcgtcggtcgaatggtggtgttggtcttgtctctccgagacactcggggtgctgcctattatgaacttctgattgtattgtggcatggagttggtcaatgtcaagaagtattttcgtgtgatgccacttaatcgtagtcattgccgggaacatcatatcaaagaaattggctgttttgtg

SEQ ID NO: 435913 - DNA, 390 bp, Triticum aestivum
tctgtcgcgtgggctccgctacagccctgactcggagatccaaacccaggattcctgagctcctcatacctacaaattattaggtcgtgcttttcggcttccttctgtctccttagctttccccatttattgcaaccttctcaaatctcaagattccaactggtcaaggaagtgaagaacaaggacagaaggacatggatgccttaagttcaatgctcgacaaggcgaaagacaaggtgaaaagcaaccctgatgtgatggagaaagtcaattcggtcctcgacaaggttaagaaccacccagaagtcatggagaaagttgctgaggttttacatctgggaaaacgtgaatccaaagagaaagaacccgaggccgaggacaagacaaaag

SEQ ID NO: 435914 - DNA, 626 bp, Triticum aestivum
ctgatggctgctcttaaatctggaaatgcaccccaaatggtttcggggtatgcaccccaaatggttcccgggaatgccagtgtgctaaatgctaatggttctaatgcccctaatggaagcttgccttcccatagctggcctaatctaggttatcagaaccctgcatctatttcagcagcagcaccacaaaatggtgtcgccaaggctgggaacaacaatcaggacttcttttctgggaacttcggttttggttcgcccggcatgccagcaaatgggtccacaaccgcaggtgctaacaagagcgcatccacccctacctcttctaccctgccctctcaatcaggcaaagagtacgatttttcctcattaacgcaaggaatgttctcgaagcgatgagtggcttgcaatacttggagatggatgaggcctccattgggcgcagatttagggagaacgctggggggcagcttgtacactgttttaccgaggcagctctgccagttgtggatacatagttacatcaccttgtgggtcaacaagtgcggatatggcagaaaactgctcatgttgtttcctacagctgaatagtctcattgttacagtgatgccaaagaacttaaaacaga

SEQ ID NO: 435915 - DNA, 370 bp, Triticum aestivum
gtcactacaagcacagagggagaagaagaagggatggcgcctatgaaggtgtacggctgggcggtgtcgccatggatggcgcgggtcctcgtctgcctggaggaggccggcgccgagtacgagctcgtgcccatgagccgcaacggcggcgaccaccggcggccggagcacctcgccagaaaccccttcggcgagatcccggtgctggaggacggcgatctgacgctctaccaatcccgcgccatcgcaaggcatattctccgcaaacgcaagcccgggcttctaggagcgggcagcctctaggagtcggcgatggtggacgtatgggtcgacgtggatgcccaccagctggagcccgtactcaagccca

SEQ ID NO: 435916 - DNA, 292 bp, Triticum aestivum
cggtcaagataaccgggtcgacgcgagggtggaagaaaacgaaggaggctgtcactccatgcacgttcaaggatgggacagtacgaagctatcgatatcctgcgtcttgcaccttgttctgtactactccgtttatgatgttaagtcagatcttgtggatttatagattttgagcgatattgtgttgcatgtttagaatatgaccctttcccctcctttgaatcaaatggttgccatctattattacttttccaatttcagcgaagtcattgaagttagataagcagctgcg

SEQ ID NO: 435917 - DNA, 942 bp, Triticum aestivum
gcgtcctctcgtccgccacgcgtccgccacttgagatggacttaattcttccagtttccgagtgccgagatagtttggagcaactactggagagcatcccgagcatgtttgaaaacaatagggttgctgattcagcgtttggagcagctatgaaggcaggtttcctagcaatgaagcccactggtggaaagttgcttgtgtttcagtcggtgctgccatcagttgggactggttcattatctgcaagggaaactgaaggtagatcaaatatttcgagtggagataaggaagcacataagctcctgcagcctgttgataagacactcaaaacaatggcactagaatttgctgagtatcaagtttgtgtagatgtgttccttaccacacagtcatacacagatgttgcttcgatatcagttgttcccagtaccactggtggccgggtttactactattttccattttctgctctttctgacccagccaaactcttcaacgatctcagatggagtatcaccagaccccaggggtttgaggctgtcatgcgtgtcaggtgcagtcaggggcttcaagttcaagactattctggcaatttctgcaagcgcgtccctactgatattgatttgcctgtgattgactctgacaaaaccataatggtttcctttaagcatgatgataagtttcaggagaattcagaatgtggttttcagtgtgcacttctttacaccacggtatatgggcaaagaaggatacgagttataaatatttcacttccatgtacaagcatgctcagcaaccttttccgatgtgctgatctggaagcacagtttacgtatgttgttaagcaagctgcaaatggcattccatcaagttccctatcccaagttagggaccaagtaacaagtacatgcatcaatattctccagtcctaccgacaatatt

SEQ ID NO: 435918 - DNA, 388 bp, Triticum aestivum
tcgtaagaagggacggggcaggaggcagtagtatcatgctctggatttctttcagaaagatcacaactgggagtggtgggtgggtattttgatcgactcctgttaagccatgttacaactgtgagtggtgggtggtctaagagtggcgagatagttttcaagacaatgtgcgagccatcgtcggatccttttcctggcacagaaccgcgaagtacacctacccacacaatcatggttgatgagacaactcatatctttgaccgtctgcgtgtattgttgatgaatcatggttggttgatgagacaatcacatcattgcccgcctgcgtgctttggtgatgatttttcacttaggaatatggcaaaatgttttcttgaatccatccata

SEQ ID NO: 435919 - DNA, 299 bp, Triticum aestivum
tattcgcaaagtgcgggagattgttgagcagagctggacggcagactaataagctgagctcaccatgcgttctcatgcggtttctgtaccaaaatgtttgtaactaaaatggctgaactccatcgttaccacctgaaaccccaacttgcggtgttgcatcatttggctgggcggctggagattgctctgtcatggcctgtgcctatactgtctgtatcttgaacacaaacattttgtaacgtcttgtgtgggtttgtaatgttctagtatcatatcatattgattctgaactcgggcac

SEQ ID NO: 435920 - DNA, 288 bp, Triticum aestivum
tcgcctacgcgtccggaggaattgagctgcatctcctgggggttcagcattggcttccttgcgccggttgcctcgagttgaaggcatgcacgggttgcatgcgcaactacacacttgtggattgtaactctagaaacctctttatcctagtatacgttttctgtgtaacactcgtcggtgccgcaacactttgtgttcgactaagaagtttttatcaagagttgaacatcacaataaaatgaaaatgtggtgtaatgagacatggaaccgggttagtttctgtgaaaa

SEQ ID NO: 435921 - DNA, 615 bp, Triticum aestivum
ttttctggacctggacatgccggccctgcagtacatgatgagggagtaccctgggaatgaagaggagaagatgagagctgcaattggcaagtttggcctgtcaggaaaggcacaggtgatgccaatgaaaaacctgtctgatgggcagaaggcccgtgtcatttttgcttggctagcatttaggcagccacagatgctgttgcttgatgagccgacaaatcatcttgacattgagaccattgactcacttgctgaggcactgaaggaatgggacggggggttggtcctggtgagccatgacttcaggctgatcaatcaggttgctcaagagatctgggtctgtgagaaccaggcggtgactaggtgggaaggcgatatcatggatttcaagcaacacttgaagaaaagggctggtctctagatttcctgtcttttccttctctcggctctttggagatctagacaacccaaagttttgcctctgtatcagaaaagcttccatcatttagcgcgacaagtacgagtactattgtatcacttaaaacatatcttctccacgctattttataaccagacgatccgtgtttaatttcatatcttttaacattgttgatc

SEQ ID NO: 435922 - DNA, 547 bp, Triticum aestivum
tcgcctcacgcgtccgctcgcggtggccctggccaagtacacagcggatatttccgcgaagttcgccgccgagaggggcgccgtcaccgtcgtgctctccggcggatccctcatctacgccctcaggaagctgacggaggcgccgtacctggagacggttgactggagcacgtggcatgtgtactgggtagacgagagggtcgtgcccaaggaccacgaggatagcaactacaagctcgccctcgatgggttcctctccaaggtaccaattcctgctggtcaagtgtatgctatcaatgatgccttgtctgctgagggagcggcagaggactatgaaactatcttgaagcaacttgttaagaatggcgtccttgcaatgtcaaagacaactgggtttcccaggtttgatctccagcttcttggcatgggccctgacggtcacatcgcctctctcttcccaggccatcctcttgttaaagagaacaagaagtgggtcacccacatcttggactctccaaagccgccaccacagaggatcacattcacg

SEQ ID NO: 435923 - DNA, 933 bp, Triticum aestivum
tttggttgttaagatccaagaagagcttgacattgatgtgcttgtgcacggagagccagagaggaacgatctgggggagtacttcggtgagcagctctctggtttcacattcactgccaatggctgggtgcaatcttatggatcaaggtgcgtcaagccaccgattatctatggtgatgtgagccgccccaaccccatgactgtgttctggtccaagatggcacagagcatgactgctcgcccaatgaagggaatgttgacaggccctgtcacaatccttaactggtcttttgtcagaaatgaccaaccgaggtttgagacttgctaccagattgctcttgcaatcaagaaggaggtcgaggaccttgaggctggtggtattcaggttatccaaatcgatgaggctgctttgagagagggtctgccactccgcaagtcggagcatgctttctacttggactgggccgtgcactccttcaggatcaccaactgcggggtccaggacaccacccagatccacacccacatgtgctactccaacttcaacgacatcatccagtccatcatcaacatggacgctgatgtgatcaccattgagaactcgcggtctgacgagaagcttctctccgtcttccgcgagggtgtggtgtacggtgcaggcattggcccgggtgtgtacgacatccactcccccaggatcccgtccaaggaggagattgccgaccgtgtcaacaagatgctcgcggtgctcgacaccaacatcctgtgggtgaaccctgactgcggtctcaagacccgcaagtacgccgaggtcaagcctgccctcaccaacatggttgaggccgccaagcagatccgtgccgagctcgccaaggcgcagtaagccgtgctcgtatagcagagccccccttttaattgcaaggaggatgtcac

SEQ ID NO: 435924 - DNA, 325 bp, Triticum aestivum
tactgccgatatctcatggcccttcatcacctgagacctggccgcaggatgctgcaaaagtcatcaaggccagaattgcgacgaaccctaactcgttgaacttcaacgtcatggttctttcaaaacagtgaatcggtgatgtaaggtggaatggataggcttggtcttttccattctcatgggctggtgcctgatagtcagcatagcccgtcggaaaaacagagacttgttgcctaaaagtaaactgtgctctttgtgcagaagttatgtctttgtcttctggcttttgtatcagaaataaaaaaggagtattagttgctggatt

SEQ ID NO: 435925 - DNA, 516 bp, Triticum aestivum
gggtcgacgcctgcatcaaaaccttcggctgcggctccgcaatcgcgtcgtcctccgtcgctactgaatgggtgaagggaaagcaaatggaggaagtagtgagtatcaagaacactgagattgcaaagcacttgtcacttccaccagtaaagctccattgcagtatgcttgctgaagatgcaattaaagctgccgtgaaagattatgaatcaaagaaggcgaagctgggagacagccctgcagagaaggctgccgaagcatgagcatgatatatgcttctgttctatgagggtgggaaatggtgtgcaatgttcacaaactccagtgttgtagcatgtatcataaggatgaacacgaacagcttgaaataaatgtgctctcatgtttggagaagttgtgcatgtatagcagctgctacgaaaatttgtgcatgtatagcaactgcttggaagtcgtaatgtacaatttgtcatttgcccgttccaaaaaacattcggtactatattgctggttatt

SEQ ID NO: 435926 - DNA, 206 bp, Triticum aestivum
taacgacatcctgtggtgtggtgtatcattccctttgtgcggattcttcaaatttgtcgcttcaagtagaaactgcacgtggatgattgctattcgatgtttgcttgtggtgtggtgaagtcaataatatctcatcataagaaataagcacacatgtttgctaaattttgatcatcccgtgtctgggttattcttgttccatttgc

SEQ ID NO: 435927 - DNA, 528 bp, Triticum aestivum
tttcgttcagttatcgcaggacaatacaactcgaatatgacattactatttggtttcttttcatggttgggagttttccttgcaattgctggactagttatgttttatagatgtagcaggaaagatcctggttacatcaacaagaatacaagagactcgcaaactcaaagagatgatgaacctttgttgaagaggggtctagataacccagaacttctggctggcaattggtctcaactatgtattacttgcaaaattgtgaggcccatacgctcaaaacactgctctacatgtgatcgctgtgttgagcaatttgatcatcactgcccttgggtttcaaattgcatcggaaagaagaacaaatgggagttctttatgtttcttatcctagaagtttctgcgatgatcattactgctgcaacggctgtcataagagtagcaggtgatccaggctctccagcatcgtttggtggatggcttaactattcagctacgaaccatccttgggtggtgtcttttgttataatg

SEQ ID NO: 435928 - DNA, 457 bp, Triticum aestivum
tcgtccacgcgtccgagaagatcgatcgatcgatctcggagcctggttgaatccacccaccgccactcgatccaatcacatacagcgaggaaagattaaaccgccgccgccgccgcgatgaagttgcagacggaggccgccgccgccgccgggggggaggggaggctgatgatccggcaggtgtgggcgaacaacgtggagtcggagttccaggcgatccggcaggtggcggagcggttcccgtacgtgtccatggacacggagttcccgggcgtgatccactgccccagcaagcaccacgcgacgctgaccccgtcggagcggtacgcggcgctcatggcgaacgtggacgcgctccacctcatccaggtgggcctggcgttcgcggcgtcccccgacgcggcgccggcggtggcgttcgagatcaacctgcgggagttcgacccgcgcgtgcacc

SEQ ID NO: 435929 - DNA, 537 bp, Triticum aestivum
cttcgattccggcttctcgtgaagaagctgttcaatctgccacaggatttcctgacaaaaagggacgcgtgggctgggaccttcgaaggtgtcgtgcaaaccagaactgaaccgaggacagactgcccagagcaactccccgggccgacggggatccggaagacggaggcgaacgaggaggcgaagctgagctcgttccagcaggagatcgtgcagctggcggcggtgctgaacggcgaccaccagctaagcagcctgcaggagaggatcagggagaggatgaacgtgagggaaggcacctcctacatgaggagcgccgtgcggcgcttcttcgaggccggcatgtcggccaagaggatgggcctcgccgacgacgagcagatcgtcaagatgaggccctcccttaccaccagaatgacctcctcccctgcagatcaagatgatagtccgtagagagcaacgatgcatacatacataggatgaagattgatgttggaattaccaaaattcttagtactacacatacatacatagaag

SEQ ID NO: 435930 - DNA, 509 bp, Triticum aestivum
cggtcctagattcacgggtccacgggggagcgagagcctctctctccatcccgacctctcgtggccgccgcgaagaaaaggagcttatcatggcttcaaaacgtatcctgaaggaactcaaggacttgcagaaagatcctccgacatcatgcagtgcaggtccttctggcgaggatatgttccattggcaggcaaccattatgggtcctcctgatagtccctatgctggaggtgttttcttagtgaatatccatttccccccggactaccccttcaagcctccgaaggtatcgttcaagacaaaggtcttccatccgaacatcaatagcaatggaagcatatgcctcgacattctgaaggagcaatggagtcctgctttgacaatctctaaggttctgctttcaatctgctcactgcttaccgaccctaacccggacgaccctctcgtccctgagattgcccacatgtacaagacggatcggtccaagtacgagacgacagcccgcagc

SEQ ID NO: 435931 - DNA, 859 bp, Triticum aestivum
caagggcattgttgattcagaggaccttcccctgaacatctcccgtgagactctccaacagaacaagatcctcaaggtcatcaggaagaaccttgtcaagaagtgcattgagctcttctttgagattgctgagaacaaggaggactacaacaagttctacgaggccttctccaagaacctcaagcttggcatccacgaggactcccagaacaggaccaagattgctgagcttctgaggtaccactccaccaagagtggtgatgagctgacgagcctcaaggactatgtgaccaggatgaaggagggacagaacgagatctactacatcactggtgagagcaagaaggctgtggagaactctcccttccttgagaagctgaagaagaagggctatgaggtcatctacatggttgacgccattgatgagtatgccattggtcagctcaaggagtttgagggcaagaagcttgtctctgccaccaaggagggtctgaagcttgatgagagcgaggacgagaagaagaagcaggaggagctcaaggagaagttcgaggggctgtgcaaggtcatcaaggaggtgctgggcgacaaggtggagaaggtcatcgtctctgaccgcgtcgtcgactctccgtgctgcctcgtcaccggcgagtacggctggaccgccaacatggagaggatcatgaaggcccaggccctgagggactcgagcatggccggctacatgtcgagcaagaagaccatggagatcaaccctgagaacgccatcatggacgagcttcgcaggcgcgccgacgccgacaagaacgacaagtctgtcaggaccttgtgatgctgctcttcgagacctccctgc

SEQ ID NO: 435932 - DNA, 468 bp, Triticum aestivum
ttccacgcgtccgcagaggcgcagacccagaggagcgcttttaccggaccgtgaagaggctgacggcggcgatgggcggcggaggcgcgcacggcggcacgacgtacaagggctacaccatcccccacaacaagcgctggcacaccatcgccggcaagggcctctgcgccaccatgtggttttggattttctacagggctaagcaggacggcgctgtgctcttgggtatgcgtcatccttgggatggccatgatgatcacgcgcatggtcatggacatgcacacgagcatgaggcttcgtcgtcgtcatcgccgtcccattgagctcgacgctgaaagcggctgacagagaccctgacgcgtcgcatgtttcgacgcaagtctctgctaataaaaaacaatcacaactatcattgttcacccctgttgtttgcgagtatatttttttttagcacacaaactggccttg

SEQ ID NO: 435933 - DNA, 482 bp, Triticum aestivum
tttgtcacgcgttcggctcacacacacacagaggcggtgtcaatcccccagacgaggcggcgacaccggaccaagggggggcggtcggcggcgatgggcggcggcggaggcgcgcacggcggcacgacctacaagggctacaccatcccccacaacaagcgctggcacaccatcgccggcaagggcctctgcgccaccatgtggttttggattttctacagggctaagcaggatggcgctgtgctcttgggtatgcgtcatccttgggatggccatgatgatcacgcgcatggtcatggacatgcacacgagcatgaggcttcgtcgtcgtcatcgccgtcccattgagctcgacgctgaaagcggctgacagagaccctgacgcgtcgcatgtttcgacgcaagtctctgctaataaaaaacaatcacaactatcattattcacccctgttgtttgcaagtattttttttagcacacaaac

SEQ ID NO: 435934 - DNA, 536 bp, Triticum aestivum
tgtgttttcggacgcgtgggcggacgcgtgggcggtggtagtgctacaagcgagtgacactagttcttgcaccgatcagatccaacttctgcacaggatgctggacaagctgtgggacgacgtggtggccgggcctcgcccggagacgggcctcgacaagctccgccgggccgccgccacccaacccctcgccatcaacacagctgcaggggaggcgattaagcagtcgccgtcgatgccgacgaccccgaccacgccggtgacgccgtcgtcgtccacgccgccgcgcggcggcagcgtgtggcggagcgttttccaccccgggagcaacctggccaccaagagcctcggcgccaacctcttcgaccgcccgcagcccaactcccccaccgtctacgactggctttacagcgacgagaccaggaccaggagcaaccaccgttaaataagagccgtcggccgaagaagaagagagggtgctcatcatcttctgcgacgctcgccatgtttgctgctcttttggttatctaatcctg

SEQ ID NO: 435935 - DNA, 798 bp, Triticum aestivum
ctttcgcgtccgcatcttcttcctctgctcctgctgggatcctataccctgctcctcaacccccttcgcggcgcggcgcggcgcggcacagcacagaggagtcggcggagatgtcgggagtgacggcggacgaggacaagaagcccgcgggcgacggtggaggcgcccacatcaacctcaaggtcaaggggcaggatggcaatgaggttttcttccgcatcaagagatccacacagctgaagaagctgatgaacgcttactgcgaccgtcagtctgtggatctcaactccattgctttcctttttgatggtcgtaggctccgtggtgagcagacccctgatgagcttgagatggaggaaggcgacgagatcgacgccatgcttcaccagaccggagggtgctttcctggcccttagaaggagcttgctgcagcctggctgttctatgtcgtatgctacctttagaactagagtaaaatgtaagaagtgaaagaacttgtgaggctatggttctgtgccatagcctgagggggggtctggaggtgaaacaacatcggagtactgttgatgtcgtgactgaactatcatccattgcctaatatatcatgccttgttgtgttcccaatgatttgcaatagaagaaacaatttcagatgaaagtaaaatccggcgctctaaaagattcaaacctaattgagcctggcagggacattaaaagtcctcgagaatgacaaccaaattcaacttcatgggcctcgcttttgcacgtcataaatgggaaaaacccggggttaaccaa

SEQ ID NO: 435936 - DNA, 446 bp, Triticum aestivum
tcccggctggacgggggcgggcggcgacggcggcggcgcccacatcaacctcaaggtcaagggccaggatggcaatgaggtgttctttcgcatcaagagatctacccagctgaagaagctgatgaatgcctactgcgaccgccagtctgtggatatgaaagctattgcattcctgtttgacggtcgcaggctccgtgccgagcagacccctgatgagcttgagatggaagatggcgacgagatcgatgccatgctccaccagaccggaggccgcctccctccacgcgcctagaagaagccgttgagagtcctgcttgttgtcggtctacaagactctgatccatcattagagagcacatgaacgaatgaaagtctaaaaagaacttgtgaggctctggccccatgccatagctgaaggacattaggggaggttttgtttagtgccg

SEQ ID NO: 435937 - DNA, 180 bp, Triticum aestivum
tgcttgtggtgctggagtattacatatcttgtccaaaaaatttgtactatgactccatatatgaggccctcggttgcaggctagctagatggtggcttgtggcgttgtagtattacatatatctgtccaaaaaaatgtactactgagattggagcagtaaccagagatttcatctcatct

SEQ ID NO: 435938 - DNA, 570 bp, Triticum aestivum
gttgtagggcttcggtacacagataccgagcggggaagacgaggtatgcccattaccggcaaactgacgaccttctggcagactcagggtggcactgcagcttttgctttcggtacataaatgattatgtcttcaaaatgaaagcctacagccatgtggaccggatcaggttcagctacttcttgaacccgaaaagaattcagcatgtgatatgccaaggggctgatctctttgatatgcttccggaggagtacacgttccaagagatcatcgccaagcttgggccgatcccaagtacgtattcggcggttcatcttcccgcctatctgctcgagaaggctgatcagtacagatatcttcttcctggcaactgcatgagagaaagtgggtagcctccgctgtttgcatcaagatgtgatgcccccttggggaagagcgtggcttagcggttgtatttgataccagtggctggctgacttagttggatggcggctgggttgggttcatgattttgtaccatgtaattcaaaacaatggaaggagggcctgacagcatagcgcatgctccat

SEQ ID NO: 435939 - DNA, 396 bp, Triticum aestivum
tgtgtatataaagaggtcaaacgaaggggcggcgaccgatgcttcagagggcgctgggttctaggtaacaccgaggaagatgactcggttgatctcttgcatcctgacagctctgccaggagttcagaatctaggccttctggtgtaatggaggtgcagcttgagcctctcaccagatgagtagtagaatagcgtagatcaatctgtatctcccagtgtcagatacacacacacacacacaccaagtcctgttttcagtcatacaacagaaacagatggtgtccacaagcacggtgactttccgctcagaaagaaaattgaatttctcatgcttgtttcttctaccatggcagaatggtaccaggctacataggatcttcaaattatgcctttgat

SEQ ID NO: 435940 - DNA, 1556 bp, Triticum aestivum
caaaaaataggctccagaagtaaggatagctagcagatcatacgtgcagtagactctgataccaacctgtgacgcccccgattcaatcgtacactaatcatgcacgcaaacgtgtacgatcaagatcagggactcacgggaagatatcacaacacaactctaaaaataaaataagtcatacaagcatcataatacaagccaggggcctcgagggctcgaatacaagtgctcgatcatagacgagtcagcggaagcaacaatatctgagtacagacataagttaaacaagtttgccttaagaaggctagcacaaactgggatacagatcgaaagaggcgcaggcctcctgcctgggatcctcctaaactactcctggtcgtcgtcagcgggctgcacgtagtagtaggcacctccagtgtagtaggagtcgtcgtcgacggtggcgtctggctcctggactccaacatctggttgcgacaaccaggtagaaaggaaagggggaaaagagggagaaaagcaaccgtgagtactcatccaaagtactcgcaagcaaggagctacactacatatgcatgggtatatgtgtaaagaggcatatcagtggactgaactgcagaatgccagaataagagggggatagctagtcctgtcgaagactacgcttctggccatctccatcttgcagcatgtagaagagagtagattgaagtcctccaagtagcatcgcatagcataatcctacccggcgatcccctcctcgtcgccctgttagagagcgatcaccgggttgtatctggcacttggaagggtgtattttattaagtatccagttctagttgtcataaggtcaaggtacaactccgggtcatccttttaccgagggacacgactattcgaatagataaacttccctgcaggggtgcaccacatttcccaacacgctcgatcccctttggccggacacaccttcctgggtcatgcccggcctcgggagatcaacgcgtcgcagccccacctagtttccgccgaagcagaaaaagcatcgtctcgtctcgtctcgtcgaggaatcaacagccatgggcggcggcaacgcgcagaagtccaagatggcgagggagaggaacctcgagaagctgaagggcggcaaggggagccagctcgaggccaacaagaaggccatgaacatccagtgcaagatatgcatgcagactttcatctgcaccacctctgaagcaaagtgcaaggagcatgccgaggcaaagcatccgaagagcgagctcgtccagtgcttcccccacctcaagcagtgatatctgcccaatcagacggagagagagataaaagagagagagagaagctgtcataatccacctagtattatcatgttccgcaatgactgattgttgacctaagcttgggtctgaactctggtgtgctgctgtcccagctgctttggttgtgtgcccatctactatgtaatcgtcctctatcagcctgttgtgctacattatcttaatcctctgtggatttgctcctcgtgcttagtcagtatgct

SEQ ID NO: 435941 - DNA, 599 bp, Triticum aestivum
atttgattccattgctaagcattgagtttaggtccacatatattgtgcaatcgagcaaatttatgtatgctttgggcatgatgcgttcctcggatagagaggtattattttggtagtgtagatattctttggatacttcttttgttatatgaatttaaaaaaatttaggaccccattttgtattttgtcccgggcccccaaattactggagacggccctgcgtctggctcctgggctccagcctctggttgcgacaaccaggtagaagggtaaggggggaaaagagggaggaaagcaaccgtgagtactcatccaaagtactcgcaagcaaggagctacactacatatgcatggatgtatatgtgtaagggggccatatcggtggactgaactgcagaatgccagaataagagggggatagctaatcctgtcgaagactacgcttctggtagcctccgtcttgcagcatgtaggagagagtagattgaagtcctccaagtagcatcttcaagtagcatatccaagcagcatctccaagtagcatcgcatagcataaccctacccggcgatcctctcctcgtcgccctgcggaaaagcga

SEQ ID NO: 435942 - DNA, 527 bp, Triticum aestivum
tatggaatgccacccactctcaaagggatcataagattattcatgctagaaacttccgtgtgcagcagtgacgcccccgatttgaccgtacactaatcatgcacgcaaatgtgtacgatcaagatcagggactcacgggaagatatcacaacacaactctacaacttaaataagtcatacaagcatcatattacaagccaggggcctcgagggctcgaatacaagtgctcgatcatagacgagtcagcggaagcaacaatatctgagtacagacataagttaaacaagtttgccttaagaaggctagcacaaactgggacacagatcgaacgaggcgcaggcctcctgcctgggatcctcctaaactactcctggtcgtcgtcagcgggctgcacgtagtagtaggctcctccggtgtagtaggagtcgtcgtcgacggtggcgtctggatcctgggctccatcatcggaccctgtaggtgtgcaatagtgtgcgcgaggaggagtcggggaggcgccggagctcga

SEQ ID NO: 435943 - DNA, 636 bp, Triticum aestivum
  unsure (1)..(636): unsure at all n locations
gggatcataaaaagccttgcaagcaaagtgactaatgagttagttgcaagatgatgtattacggaatgagtaaagagacttgtcagtaatgagattgaactaggtatgaagatactgtgacaccctcgattcaatcatacactaaccatacacgcaaatgtgtacgatcaagatcaaggactcacgggaagatatcacaacacaactctagacacaaaataaaataatacaagctttatattacaatccaggggcctcgagggctcgaatacataagctcgaatacacaagagtcggcggaagcaacaatatctcagtacagacatgagttagacaaggttgccttaagaaggctagcacaaaagcagcaacaacgatcgaaaaggcaaggcctcctgcctgggagcctcctaactactccaaatcgtcagcggttgtcacgtagtagtaggcatcctccaggtagtggtagtcatcactggcgtcgtctggctcctgngatccgatatctggtcgcaacaatcgggtatgggggaaaacaagtagcaaagcaaccgtgagtgctcatccaaagtactcgcaagacttgcattagatctaaactaagtatgcatctgtatcaaaggaatgggttgt

SEQ ID NO: 435944 - DNA, 606 bp, Triticum aestivum
ggtcgaaataccgggtcgacggggagatcgaccgcgctcgccctctctggtttcctactgctggtgctcatcaccggactccccgacgccgccgtcgccgccaacatgaccgaggtctgcgtcaaggccgccgtcggccaccccgacacgctcggcgactgtcccttctcccagagggtgctgctcacgctggaggagaagaaggtgccctaccagatgaagctcatcgacgtcagcaacaagcccgactggttcctgaagatcaatccggagggcaaggtgcctgtgtataacggtggtgatggcaaatggattgctgattctgatgtgatcactcaagtcattgaggagaagtacccaactccatcacttgtgacccctcctgagtatgcatcagtgggatcaaagatcttctccaccttcgtcacgttcttgaagagcaaggatgccagcgatggctcggagaaggcgcttgttgacgagctgcaggcactcgaagagcacctataggcccatggaccctacatcaacggggcgaacatctccgccgtcgatctcagcctggctccgaagctctaccatctgcaggtcgccctggagcacttc

SEQ ID NO: 435945 - DNA, 426 bp, Triticum aestivum
tttaagtctttccaaccatcattggagacaatgtcacagtagggcatagtgctgtattacatggatgcactgttgaggatgaagcttttgctggtatgggagctaccctgttagatggtgttgttgtggaaaagcatgggatggttgctgctggagcccttgtaagacagaacacgaggatcccttgtggagaggtatggggtcggaaaccctgcgaaatttctgaggaagctcacagacgaggagatcgcttttattgcggaatcggctgccaactactccaacttagccaaggcacatgctgttgagaatgccaaacccttggagaagattgattctgagaaagtcctgcgcaagaaagttgctcaccaggacgaggaacacgattccatgcttagtgtcactcgagaggtccctccagagctg

SEQ ID NO: 435946 - DNA, 479 bp, Triticum aestivum
ttggtggtttccaaagtcctgtttggagatccgggcgagatgctgtgccaagccatccatgacatgcccatcacctccctggtcattgggagcaggggccttggcaagctcaagagggtgctcttgggcagcgtcagcgattacgtcgtgaacaatgccgcctgccctgtcaccgttgtcaagccagcgagtaaccatgcctgatctcatcatcgcaaatgtcgcacatgtgttttagtttgccagagtcctatatatccagttggccgcaacttattgaaccatccagtgttatttgtaataataattgacaattagcctgtggatgattcccaggtgtgtgtaagctgtgcatgtgtcctgtacatcctgtacatttgtgtgcttatcttcagcctagcttttgctccatgagtcagtccgtgctgctgtttgttgcatacagtttgtagagtctgaataaaatggattctgctgtc

SEQ ID NO: 435947 - DNA, 205 bp, Triticum aestivum
ggagagaatggccgccgcggctggggggcaggatttgtggcggggctcgcggcgtccaccagcggcgggctcccagtgaggatcaagcccgcttcgacgtcgggtgcagacctcaaataattactagtgataaattgggatgcgctaacaatgtacataagtaggagatatcagtaggatagttgtttctttaataagaaaatca

SEQ ID NO: 435948 - DNA, 279 bp, Triticum aestivum
tcttggggctcaccaatccaacccacgacgccaaggtcaaggaattgcttgtttcagtatgcaacggcgcagtggagactttggtgaagacctctcaccaagttatctccaaggccaatagtaagttggataacaatgccaatggcaacagcaatggaagtggcactggcagtagcagagctggggaaggggtgggtggagacagtctctagcacattggcagtgccaagcaacaggaattttgtgcttgatgttactgggaggggtgacatttgagac

SEQ ID NO: 435949 - DNA, 632 bp, Triticum aestivum
atttaggtttgttccaaggttccaagagttgactaccggggggcttttgaaggctggatggggcacagagaagtcatttggaacaacaaaagatcggatgctatacatcgagaagtgtgccaattccaaagctgtaactattttcatccgtggtggcaacaaaatgatgattgaggagaccaagcgaactattcatgatgctctatgtgatgcaaggaatctgatcatcaacaactcaattgtgtatggtggtggctcaccagaaatatcttgctcaattgctgttgatgctgcagcagatcggcatcctggagtcgagcagtatgcaatcagggcatttgctgatgctttggatgccattccactagctttagctgaaaacagtggtttgccgcctattgatactctcaccgtcgtaaaatcccaacatgtcaaggagaacaattctcgctgtggcatcgattgcaatgatgttggtaccaatgacatgaaagagcagaatgttttcgagactctgataggcaagcagcagcagatcttgctggcaacacaggtggtcaagatgatcctcaagattgatgatgtcataacgccttctgagtattgatgacgccttcaagaacggaatcgac

SEQ ID NO: 435950 - DNA, 684 bp, Triticum aestivum
cccactttttcggcctaccatggtggtgacggggcgtacgtgagccctagcgggttcgaggaggcagcgccggcggcggagatgtcgacgccgtcgagaaagcgcctgatgcgggacttcaagcggctgcagcatgacccaccggccgggatcagcggcgcgccgcacgacaacaacatcatgctctggaacgccgtcatcttcgggccggatgatacgccatgggacggaggcacgttcaagcttaccttgcagtttacagaagattaccccaacaagccgccaactgttcgttttgtctctaggatgtttcacccaaatatttatgcagatgggagcatctgcttggatattctacagaaccagtggagccctatatatgacgttgctgccatattgacttctattcagtccttgctgtgtgatccaaaccccaactctccagcaaattcggaagctgccagaatgttcagcgagaacaagcgagagtacaaccgcaaagtccgcgagatcgtggagcagagctggactgctgactaaggcagggcgaggcggcggctgccagaaagttgcaataagcaaccatgaaacctttgtttatggctctctatagttggttcttagatgaaatattaaacatctccagtgattgcttgcaggtcaaaccgtcaaagtatctttagt

SEQ ID NO: 435951 - DNA, 480 bp, Triticum aestivum
acggtccatatccggtcgacgggggagaaagaaagttgggaatgatgcagtcgatcagctcaacaagttcaatcagaaattggcagatctttccactgttcccacagcgagactgatcgatggtatcctgctcaccaagtttgacgctatcgacgacaaggtcggagccgcgctgtccatggtttacatatccggatctccggtcatgttcgtcgggtgcggccagtcctacactgacctgaagaagctgaacgtgaaatccatcgtgaagaccctcctgaagtaaaatggtagtgctagtacatgtcgtgctccgatatgtgccgcattccaggagtctctgctatatctccgaatatcccccgtgacctcgtcgttttctcgtttggtttggcgtgaaactgtcgtccctagcaaacttttctggttgctgataacttattctgttatgtggatcgttatgcttggttgcctcatcag

SEQ ID NO: 435952 - DNA, 185 bp, Triticum aestivum
tgcgttcgcgtgggcacggtgagcgggttcaacaagacggggctgccgggcgccatctggaacttacacggcgccctactccaaggtggacagcgccggcggcatctccgtgctctgcgtcatcatgctactgctcttcaacctggcctgcaacgtaccaacagtgctgctgatggggaacgagg

SEQ ID NO: 435953 - DNA, 459 bp, Triticum aestivum
tttcgttcacgcgtgcggccacgcgtccggtgccaacagatcggttaaatcacccccaaaacgcacccaccaccacaactccggcggcggcgaccagacgaacacgagcaccaaggcgatggcgactgctctcaaccgcggcctccgctccgggatccgcctcctcgccaccggcgccgaggcctccaagccagcttcacgtggattccatgctaccggcgtgaagaggatgtcagggcacggccatgatgagccatactacctccacgccaagcacatgtacaacttgcacaggatgaagcatcagaagctgactgcatggacttcggtgctgggagccgtaagcattggtatcggtgtcccggtcttcgcgggtcgtcttccagcaaaagaagacctcctccggatgagctcacataccctcccagggcctacttattggacctattttgaatttag

SEQ ID NO: 435954 - DNA, 474 bp, Triticum aestivum
tttcaacccaagcaaagccaccaattgattgaagcaaagtcacagagcctgcgtgcaagaaagcctcggccaccggagctgctgcaggtctcctatcgagtatggacaaggtgctggccttctccatcctgagcgcctcgcccgccgacatcgcccccggcgccggcaaaggcggcagctgggcccggctctcctggcgggggaggaagctgcaggagggcgaccgggcaggagcagagcaccaagggaagcagggaggcctgccgcgggaggcagagcaacagccgggcaaagggaaatcgcagtcgccgtcaacgttgccgccgcggtttgcgccggagtttgatgggatcgactgcttcgagaccatcgtgtgccattgatcgctgatgaatcgcgatctgctcgtggtccagccgggcgtgtggctacggactgattctttctccgtttgtcggccgtacgatcggcgtg

SEQ ID NO: 435955 - DNA, 701 bp, Triticum aestivum
tggtatcaacacgtaccagtacccagcacactagcagctagcttagctcaccatctgctcttagaatggcggcctactacagcgccggcaggcccatgtactactccaacaccgaggagtccttcgacggcggcaagaccgtgtactccaccaccaccgaggagtgctacgacgctggcaagctcggccatggtaccggctacggccagggtcagagctatggcaatggtgggaccaacatgtactccaacaacactggcgtcgactccagcatgtacgggcatggcggtggcggcggtggcaggaccgtgtacaccaccaccaccgacgagtgcttcgactccgtcaggcccgggtatgggcagggccacggctacgggcacaacaacggtggggccatgccgtacaccaccaccaccaccgagtccttcggcggaggcgagcaggggcaggggtactacaagaaggaggtgacgcagcacaagaacagggagcgcgtcggcgaggccggcgccctcgccgccggtggcttcgccctgtatgaggggtatgaggcaaagaaggacccagcccacgcgcggaagcaccagattgaggccggcctggcaggggcggcggctgtcggagcaagcggctacgcctaccacgagcaccgcgagcagaagcagcccggctacggcgggaagcaggagtacaggatg

SEQ ID NO: 435956 - DNA, 318 bp, Triticum aestivum
tcgcccacgcgtccgcccacgcgtccgcccacgcgtccgtccacgcgtgcgccgacgcgtcccctcctatagtggtatcatcggtatcgccagaagaagagaaatgagaacctgtggcaagacaaaggtagtgtcgccaggccgccgtacccagtggcggtggcctggcgcggttgtgtcgcgtctgttttcggtcggtatttgggggggtttcgagtaagtactatgtgtttgtgttcgagtgctgggtgagtggatctgtaagtgggttctagattggagctgttttcgcgtcttattaagattatattacaacag

SEQ ID NO: 435957 - DNA, 451 bp, Triticum aestivum
tttcgtttatcgatagcacagcacagcacagcagaagcaactcgtagccagaggacatacctgatggagaacaacaggagcaaccagcaggctcctccaccaccgccagggtacccgacggcggctgcggagcaggaccaggtcggcgggaagaaggggcgccgggcgagcaccaaatccaggggcgagaagggcttcatcgagggatgcctcgccgcactgtgctgctgctggatctgcgagatgtgctgcgactaaccggccggccggcgaggccgctgctggctggcacaagacctcggtgctatagtacccacgaggaggaggagcgtatgcgtatacagagagagaattgttcttaatttcagtgcccgttgttttaggttctatacagtatatactcctaagttgatgcatgcatgatcagtaccagtgtgagatatcgattcat

SEQ ID NO: 435958 - DNA, 565 bp, Triticum aestivum
tcgtcacgcgtgcgggtgaatccgatcgacgggggagtacaggagaagcggggggttgccagagggcgtacctgatggagaacaacgggtgcaaccagcaggctcctccaccaccgccagggtacccaacggcggctgcggagcaaggccaagcgggcgggaagaaggggggccgggcgagcaccaaatccaggggcgagaagggcttcatcgaggggtgcctggcggcgctgtgctgctgctggatctgcgagatgtgctgcgactaaccggccggcgacggcgaggttcctggcacaaggcctcggtgctatcgtacccacgaggagcgtatgcgtatacagagagagaattgttcttaatttcagtgcccgttgctttaggttctacatatatactcctaaggtgatgcacgcatgatcagtactgtacccgcctacctgtgtgcgtgtgtgagatatttcatgtatccgtccgtgtgcagtgccatattcatgcaccgcgtcgtgtgtaattaaccggtgtgtacgagaccgatatactactcagtaatactgtgattgag

SEQ ID NO: 435959 - DNA, 761 bp, Triticum aestivum
ttgctacgcgtccgatcaaacccaaagaggaggaagaacaccaaggactcactaccagcgcctctccgcgatccaaatcctcccgggaaagttcttggttgatctcttcctcctcgaccgcctcccaggttcttggtgtagcttttgccactctcaccaggagatttcatgtctgatcttgacgttcagatcccaactgcctttgacccctttgccgaggcgaatgctggggacgctggtgcagctgccggatcaaaagactacgttcatgtacgcatccagcagcgtaatggtcgcaagagcctgaccactgtccagggtctgaagaaggagttcagctacagcaagatcctcaaagacctcaagaaagagttttgctgcaatggtacagttgtccaggacacagaacttggacaggtcattcaactccagggtgatcagaggaagaacgtctcaaacttccttgtccaggccggcattgtgaagaaggaacacatcaagattcatggtttctgagcaactgccagctccatatcagagtctacatgcaaagcagctatatattggtggtgcagtatatttagttgtgtgctagcgctagcaggcgttaccagcttgcgcgctctgagtatacagaaaatctagcatagcccacctctctgcgtgtatgcttgttaccgttgtgttgaaactttgtaaggagcaccgtcgttagatggcttgttaccctctcccatcaaggttgaataatatttgctgcg

SEQ ID NO: 435960 - DNA, 551 bp, Triticum aestivum
tgttcacgcgtccgcccacgcgttcgcccacgcgtccgcccacgcgtccgcccacgcgtccgcgcgccgccgcagccatggtgaagtactcgacggatcccgccaatcccaccaagtccgccaaggccatgggccgggacctgcgtgttcatttcaagaacactagggaaacagcgcttgccctgaggaagatgtcgctcaacaaggccaagaggtaccttgaggatgtgttggcacacaagcaagccatccccttccggaggtactgccgtggtgttggacgcacagcccaggtgaagaaccgtcagcccaatggtcagggacgctggcctgccaagtctgctaagttcgttctggatcttctaaagaacgctgagagcaatgctgaggtgaaaggtcttgatgttgatgctctctacatttcacacatccaagtgaaccaggcccagaagcagcggcgccggacctaccgtgcccatggacgcatcaacccctacatgtccaacccatgccacattgagctgatcttgtcggagaaggaagagccggtg

SEQ ID NO: 435961 - DNA, 910 bp, Triticum aestivum
ttcttggtgactacttaggcgtcaaggtgcatgcttgtgttggtggaacttctgttcgtgaggaccaaaggattcttgccagtggggtgcatgttgttgtcggcacacctggtcgtgtgttcgatatgttgcgcaggcaatccctccgcccagataacatcaagatgtttgtgttggatgaagctgatgagatgctttcacgtggtttcaaggatcagatctatgatatcttccagcttcttccatcaaagattcaggttggggtgttctctgccaccatgccccctgaggcccttgagattacccgcaagttcatgaacaagcccgtgaggatcctcgtcaagagggatgagctcacccttgagggtatcaagcaggtctatgtcaatgtggagaaggaagagtggaagctcgacacactgtgtgacctgtacgagactcttgccatcacccagagtgtcatctttgtgaacacccgccgcaaggtggactggctcaccgacaagatgaggggcagggaccacaccgtctccgccactcacggagacatggaccagaacactagggacatcatcatgagggagttcagatctggttcttctcgtgtgctcatcaccaccgacctgctggcccgtggtattgatgtccagcaagtctccctggtcatcaactatgacctcccgacccagcctgagaactacctccatcgcattggtcgtagtggtcggttcgggaggaagggagttgccatcaactttgtcacccgtgaagatgagaggatgctgttcgacatccagaagttctacaacgtggtcattgaggagctcccggccaatgtcgctgaccttctctagattatatcttaggaatgcagtaaagtgcttgataaagttcgtttttgttgaatatc

SEQ ID NO: 435962 - DNA, 597 bp, Triticum aestivum
tgttgtccacgcgtgcgtccacgcgtgcgccacaagccgcctccaccgcccgctgggaggggcacagaactcctgtgtatcggagggttgcgcgaatcgccatctccagcaaccaatccccaaccctcgagctatctaactatcccgatcttgatcccgatctcctaccatggtgtccgatgccagcaagaagaaagccgcgcagaagaaggccgccgccgccgccaagaggggagccaagtccagcgccgctgcctcgtcctcgtcggcgtcgtcagcggccgataaggccgccaatggcgtagcggcccttaacttatccgatcggacatgtaccggggtcctggcttcgcatccgctctcccgtgatatccacattgagtccctttcattaacatttcatggacatgaccttattgtggattcagaattggagcttaactacgggaggcggtatggtttgctcggcttaaatggttgtgggaaatctacccttctcaccgcaataggctgcagggaactccccattcctgaacacatggacatacatcatcttactcgtgagattgaggcttctgacatgtctgcgctgcaagc

SEQ ID NO: 435963 - DNA, 568 bp, Triticum aestivum
  unsure (1)..(568): unsure at all n locations
cgtccggagcagccctgacgcgagcgggattattggcctgctgggccggatcatggacaagctgcctggttaccacaagacaggggaggaggacaaggccgccgccgctacaggcgagcacaagcccagcgcttgatcgccgccgtgcccgagacccgtgaccggacctcgattgaattgctggcgtgtgttgtgtttgctttacgtctaagttggtgtcaaggtgggaggggttgatcgtctttgaaggtccggtccgtgaagctcgctggtcgacgggtgcttctgtttcagtttggttcagagtcaggtcctggatgttgtcaagtttgtttacttatgggcacttgtgtattggtttattgctgggcattatgccttgatattaaagatttccgcccagtacatattgttgcattttgtgnnnnnnnnnnnnnnnnnnnnnnnnnnnnnnnnnnnnnnnnnnnnnnnnnnnnnnnnnnnnnnnnnnnnnnnnnnnnnnnnnnnnnnnnnnnnnnnnnnnnnnnnnnnnnnnnnnnnnnnnnnnnnnnnnnnnnnnnnnnnnnnn

SEQ ID NO: 435964 - DNA, 400 bp, Triticum aestivum
  unsure (1)..(400): unsure at all n locations
cccacgcgttcgcggttacctcttctgctagagccgtcgcggtggcgtgtgatgagatgagatgacccttcttcgtcttgtccggcttggtttactcgtcgtcttggtgtgtgtgcgtgtgttcgtgccggggcgtgaggtgtgggcgcgtgcgtgcgtgtatgtatgggtcgcggtggtgtgggaggtgtctcctacgtgcgtgcgccggcgtgccattctttgtgttggtgatcatgtacttactctcttgttcttgctatgaatgagaccatttatttgattctttcnnnnnnnnnnnnnnnnnnnnnnnnnnnnnnnnnnnnnnnnnnnnnnnnnnnnnnnnnnnnnnnnnnnnnnnnnnnnnnnnnnnnnnnnnnnnnnnnnnnnnnnnnnnnnn

SEQ ID NO: 435965 - DNA, 292 bp, Triticum aestivum
ttgttcacgcgtccgcccacgcgtccggccgcgccccctccggggacaaggccgaggtctacggcgtcgccgcgctcaaggtggacgagcagctcccggcggaggacgtggaggtgttctacgacccgggggagctgctcgcggggcttatcaagggtcccaaggaggaagacgaggaggcggcggcgctcgccgggaggctccgggaggcggctacggtgtcggcatcaggtgccgacgcgcagcctgaggcctgccccttacttggctctggaaagcaggggtgatcgag

SEQ ID NO: 435966 - DNA, 551 bp, Triticum aestivum
tgttcaaccccggctacccctacgaggagtcgctcatgggataccacaacgtcaccagcatgaacatgtgcatgtattttcccaagttcaatgcgtttaacttcaccaagggcggtctcgcgcagttcaaccacggccagggccaggcgctgcagtacgccgtcgccaactccttcctcgccgcgctctacgccgactacatggagtccgtcaacgtccccggctggtcctgccgccccaacttcatgaccgtcgacgacctccgctccttcgccaaagcccagctgaactacattctcggggacaacccgatgaagatgagctacgtggtggggtacggcatgaagtacccgaagcggctgcaccaccgcggggcgtccacgcccaagaacgggatcaagtactcgtgcaccggcggcaacaagtggcgcgactccaagaaggccgaccctcacgtgctcgtcggcgccatggtcggcggtccggacaagaacgacaagttcaaggacgcgaggatcagctacgcgcagaacgagcccacgctggtcggc

SEQ ID NO: 435967 - DNA, 302 bp, Triticum aestivum
gtctaccacgcgtccgcccacgcggccgctcccctgcgacacaagccaccgcttgaatctcaagcgcggagaggaggaagacaagcaaggaagagcggagcaatggagtacgggcccccctgcaacagctgcagccgcaacaaggagaagaggcctccgctcaagagaggccagctcaagctgcagatcgccaggactctcggcagcctcgtggtgccgggcgccaagagcagcttcagcttcagaagatgatcacctgagcagccactcagccagggcaagcagcattttctcgaccaatc

SEQ ID NO: 435968 - DNA, 631 bp, Triticum aestivum
cgggtcgaccgggacagatcttacgaaccatcctcctcgaagaactccagtgctcatctcctactcgcccctggcctaatccatccaatctctcggttcagaaggcgaggagggtgcggtgcctggtccagatctcgtggccgccatggcggagcagttcgcggagtcagcgaacaatgtaatcatcgaagaggtgaacaagggcctgaaccctggaatgatagtcctgcttgtggttgcgaccaccctgctgcttttctttgttgggaactatgcgctgtacctgtatgcgcagaagacgctccctccgaagaagaagaagccagtctccaagaagaagctcaagagggaaaagctgaagcaaggggtttctgcaccaggggagtgaagagacccatcgatttctcatgtcgattgctttatgctgggctcctttttttacctgataaaaaatatataccagctggagctgcagtgttgagcgactgtttatgtagaagccttgtcttgagtggtacatcgtcggtattggacaccttatttaagcgaactgataaaccttagtctgaattgagctgctcctggttatagtttttgtaaatttaaaactttgctggggatcatctgtggc

SEQ ID NO: 435969 - DNA, 423 bp, Triticum aestivum
ttcgattcccgccgcctacgccctctgccgccgcagccgttgccatgggcgcgtacaagttcgtgtcggagctatggaggaggaagcagtccgacgtgatgaggttcgtgcagcgcgtgcgttgctgggagtacaggcagcagcccgccatcgtccgcatcaccaggcccacccgccccgacagggcacgccgtctcggcttcaaggccaagcaggggtatgtggtctaccgtatccgtgtgagacgtggtggcaggaagcgcccagtgcccaagggtattgtttatggcaagcccaagcaccagggtattacccaactcaagttccagaggaacaagaggtctgttgctgaggaaagagctgggcgcaggcttggtggtcttcgtgtcctcaactcctactgggtgaatgaggactccacct

SEQ ID NO: 435970 - DNA, 161 bp, Triticum aestivum
ttctaagggaaaaaaaggattttactatgttttctttttaatgtttggcatcgcgtcgtatcaaactcagccgctctttcgctgagtaatgtacatttgcctggtcatggtaacttgtgggttctgctgctgctttattgaaagatgattgcaattttagc

SEQ ID NO: 435971 - DNA, 428 bp, Triticum aestivum
ttatagatcattttagcgggagtaagaaagagggagcatggggaagaagggggttgccctggtggcgctgctgctggtgatggtcagcatggcggtcgtgatgactgccgacggccagggtgccggcagcgagttcggcaaagcggccgaaggagccgggacaggcgccgccaccgctgctgagggcgcgggagccgccgtgaagtcggcggcccagggagcaggccaggcagctagtggcgccggcgaaggtgctggtaaatcttactccggcggcggccgtcgttgagcctgccgtgtaccgcgggatcgtcgccgccgtggctgaggaatgatacccaaccatgccactgcgaataataaaaatcaagctgcttaattagcatgctgtcaactgaaaccatgttaacatgccgctcgatgtatgt

SEQ ID NO: 435972 - DNA, 371 bp, Triticum aestivum
cccacgcgtccgcaacgacgtcgactacggcttcggcgagcccacctacgtcttcacattgaacgacgacgtcaacattgtgccgtcggtggtgtacctcaagccgcccaagccgaagcagggcatccggctcgtgctccagtgcgtcgaggagccgcacgccgccgtcttcacccaggagctggagaagctcgcctaagagggcttgcgttcgtcatggttacctccatactttacagaattattacaggtgggatttggagttgctgttgttgttgtattcttcatcttgttgtgtgttgtagttgttgtattccacaccaggttttgcttccaacaaacaaataaatcactgaggggttcttctttaa

SEQ ID NO: 435973 - DNA, 491 bp, Triticum aestivum
cacgggaacgccgtaaacgccgcacgccgcgccggcgtcgacatcgacatcgccaagaagcataatgctgggacaaacaaagctgctcatagcaccacatcgctcaatacaaagaggcttgatgatgatacagagaatcttgctcatgagcgtgtgccgtcagacctgaagaagagcattatgcaggctagaacggacaagaagctcacacaggcacagcttgcacagctgatcaatgagaagccacaagtcatccaggagtacgagtcaggcaaggctatcccaaaccaacagatcatcggcaagctggaaagggctcttggcacaaagctgcgaggcaagaagtgaagctgcgtgcatctgacaggagtcgaggctttcaagagagcttggctgggcaagtttaccgctaaataaagcttgtctactaaatcatgcgacttaagaaaaccctggagtttggtatttcgctcaggtttgggtgaatgtaa

SEQ ID NO: 435974 - DNA, 408 bp, Triticum aestivum
tttttaattccagcctgtcatccccttcgcgacactctaccgctctcccgatggatccgcagcagccggagcccgtcagctatctatgcggagattgcggagctgagaacacgctgaagacaggggatgtgatccagtgccgtgagtgtggctaccgcatcctctacaagaagcgcacccgcaggattgttcaatacgaagctcgctgaagacagaagaacaaacatcattcactgttggtaggtgcctcgattgatgtggagtgtgccctgagacaaagctacaatggagaaatgtattatatacagtacttttaggtcttatttgtccgttggactttggcttgaagtggtaaaacttgttgcaaaccgattgagattttagacaattgagaatccagattatgca

SEQ ID NO: 435975 - DNA, 232 bp, Triticum aestivum
ttgctatcctccacaatcagagcaagcgagcgaccaagaaaccatcacagcgaccatcatcttctctgcctccatggcggcgcaccagcagcagcaaccgcagcaggcggtggggttcgaggactacctgccggtgatggcggagcggctgggggaggagggcctgatggaggagctggcggcggcgttacgactgctcatggacccggcgtcgggcctcatcaccttacac

SEQ ID NO: 435976 - DNA, 721 bp, Triticum aestivum
tcctcgcgtacgcccacgcgtccgcccacgcgtccgccgacgccgccgccgccgcctcctctcggttccttctccttcctccgagcttcagccatgggtaaggagaagactcacatcaacatcgtggtcattggccatgtcgactctggcaagtcgaccaccactggccatctgatctacaagcttggaggtattgacaagcgtgtgatcgagaggttcgagaaggaagccgctgagatgaacaagaggtctttcaagtacgcctgggtgcttgacaagctgaaggccgagcgtgagaggggtatcaccattgatattgccctgtggaagttcgagaccaccaagtactactgcaccgtcattgatgctcctggtcaccgtgacttcatcaagaacatgattactggtacctcccaggctgactgtgctgtgctcatcattgactccaccactggtggttttgaggctggtatctccaaggatggccagacccgtgagcacgccctccttgctttcactcttggagtgaagcagatgatctgctgctgtaacaagatggacgccaccactcccaagtactcaaaggcccgttacgaggaaattgtcaaggaagtctcttcgtacctgaagaaggtcggctacaaccctgacaaggttccctttgttcccatctctgggtttgagggtgacaacatgattgagaggtccaccaaccttgact

SEQ ID NO: 435977 - DNA, 381 bp, Triticum aestivum
gccgccgcctcccctccgttcgttcttcttcttcgggttgggtagtttacgtctacccaccagccatgggtaaggagaagactcacatcaacatcgtggtcattggccacgtcgactctggtaagtcgacgaccactggccacctgatctacaagcttggaggcattgacaagcgtgtcatcgagaggttcgagaaggaagccgctgaaatgaacaagaggtctttcaagtacgcctgggtgcttgacaagctcaaggccgagcgtgagagaggcatcaccatcgatattgctctctggaagttcgagaccaccaagtactactgcaccgtcattgatgcccctggtcaccgtgacttcatcatgaacatgatcaccggta

SEQ ID NO: 435978 - DNA, 1501 bp, Triticum aestivum
tcgccgactgaggtttccgccgcgatctcgtctcgatccgcactctctatctgagatttggaatcgggcgaggcctgcagctcctgccgacatggcgctcgttttgcattcgggcagtggcaacaagaatgccttcaaggcacttattgctgcagagtactgtggggtcaaggttgagctgaccaagaacttcgagatgggtgtctcaaacaaaacccctgaattcatcaagatgaacccccttggcaaggttcctgttcttgagactcctgatggtgctgtttttgagagcaatgctattgcacgctatgttgctcgctcaaagggtgacaacctgctttggggtggttctcttattgaatatgcgcgtgttgagcaatggatggactttggtgccacagaggttgatcccaatatcgcaaggtggctgtacccaaggcttggttatatgccttacaatgcccgcgcccgggaattcggcattgctggattgaagagggcccttgaagcattgaacacacacctggcatcaaacacattccttgttgggcattctgtcactctggctgatattgtcatgacatgcaacctctaccatggttttgctcggatcttgaccaagactttcacatctgagttccctcatgttgagaggtacttctggaccatggttaaccagcctaacttcaagaaggtcattggcgatttcaagcaggcagaggttgtacctcctgttcagaagaaggctgctcctgctaaaccaaaggaggccaagaaagaggctcccaaggcggccccaaagccagcagaggttgaggcaccagaggaagaggcaccaaagccaaagcccaaaaatccccttgatctactgccaccaagcaagatggtacttgatgactggaagaggctatactcaaacactaagagcaacttccatgatgttgctgttaaaggtttctgggagatgtatgacccagagggctactctctctggttctgtgactacaagtaccaggaagagaacaccgtgtcctacgtgaccctgaacaaggtcggcgggttcctgcagcggatggatctgtgccgcaagtacgcttttggcaagatgctcgtgattggttctgaggcgcccttcaaagtcaaggggctgtggctcttccgtgggcaggacatccctgagttcgtcatgaacgaggtctacgacatggagctctacgagtggaccaaggttgacctctctgacgaggcccagaagaagcgtgtcgaagccatgatcgaggaccttgagccgtttgaggggcaggccttgctggacgccaagtgcttcaagtaagcggatcagtgcttgggatcgtgatggcggtggcaaaagaacctatctaggacttgaaattcagtgtcgaaacagttggtctttttttggaagagtttgcttgttacttaatggctatttgacctggtgaacttgttaatttttgtgccatgcttagagttcttgggt

SEQ ID NO: 435979 - DNA, 363 bp, Triticum aestivum
ttaccctccacctccaaacgcgcacgcacgcgtccacgaataaaggccgagggcggcgaagccaggcccaatcgccaaaaaccctagcgccgatccgatccgatcgagctctgcttcccctcccatggcggccccctcgagccaggcgagcctcctgctccagaagcagctccgagatctagcgaagaaccccgtggacgggttctcggcggggctggtggacgacggcaacgtgtttgagtggcaggtcaccatcatcggcccgcccgagacattatatgatggaggctacttcaatgcagtaatgacctttcctcaggattatcccaacagtcctccatcagtaaggtttacttctgagat

SEQ ID NO: 435980 - DNA, 442 bp, Triticum aestivum
tcttcacgcgtgcgctcaagcgcaactggttcgtcgtcgtcgcgtaccgaatctccaccatcccccccgcgcgccgccgcctccgcctccgccctcgacgatgggtctctgggacgccatgtaccgcgtggtgatgcgccgtaacggcgtgtacgtcaccttcgtcgtcgccggcgccttcgctggcgagcggctggtggactacggcgtcaacaaggtctgggagatgaacaacgtcgggaaacggtatcaagacatatctgttctggggcaaaggccggttgaggagtgaagacattgaagcccagatttcccatgatcttttaagtgaaattaggcaccttataaagctccatgttttggcattttcttttggcacaataatattgtaaaactcttgctgggtgttattcactctctctgagcactatggcacccatct

SEQ ID NO: 435981 - DNA, 353 bp, Triticum aestivum
ccgattggactcagggaagaaacttggttagtcttcgcgggtgtcgtgtgatcagagctcgggagtcggaatgggggccgagatggcgagccagcacggggcgctgctcaaggtggggctgttcgtgctggtgcaggcgctggtgtacctcatcctcgcccagtcctcctccgtcttctccaccaccaagaccctcggcctccccccggcgcgctccctcagcgcccgccgcatggccgcactgctctccgacctgccgctcggcggcgaaccctcgccccgcgccgtctccgtggagccgtcgtcgcccgtgcccgtgcacgcccaccagaagaaggattagttgacagagc

SEQ ID NO: 435982 - DNA, 561 bp, Triticum aestivum
gcaggcatggcttgctgcggcaaaatacccaccgccgccgcccccgtcgtttgagctgccggagtccgaggtgagggagaggttctccaagtgggtgatcaagtactcaaagcactactcgtgccatgaggaggaggagatgcggttccaagtcttcaagaacaacaccaacgccatcggccaattcgaccaacagaatcctggcaccgtcgtcggtcgcgggttccggccagctgggtcgcaggcccgcggctcgggcggggtccgtatgaacaggttcggcgacctcagccccagggaggtcatccagcagttcaccgggctcaacaccaccagcttgaatgccacgtcacccacctacctcccctaccactccttcaagccctgctgcgttgactggcgctccagtggcgctgtcaccggcgtcaagaatcaaggcacttgtggatcgtgctgggcattcgcggcggtggcggccatcgaaggcatgaacaagattaggacaggggagctggtgtcgctgtccgagcaggaactcgtggactgcgacaccgggagcag

SEQ ID NO: 435983 - DNA, 554 bp, Triticum aestivum
ctttctcgccctcccccgcccgccaccggcagccatggcgacggagctggcctacgcgccgccgatgaagtcggggaagctcgggttcgagggcacccaggaggtgcagcaccgcatccgcatcaccctctcctccaagtccgtcaagaacctcgagaaggtgtgctcggatctggtgaagggcgccaaggagaagcagctcaaggtcaagggccccgtccggatgcccaccaaggtgctcaacatcaccaccaggaagtccccctgcggagaaggtaccaacacctgggatcggtttgagatgcgggtgcacaagagggtgatcgacctcgtcagctcccccgacgtcgtcaagcagatcacctcgatcaccattgagcccggcgtcgaggtcgaagtgaccatcagcgaccagtagttatgctaccccatgatatgtgtctttaaatctttctacaagggtggagagacaccagcgtaccaagatatttttgaaactttctgtagtatgagaactgggttttgtatgactaggttctttgcttcgtgattct

SEQ ID NO: 435984 - DNA, 767 bp, Triticum aestivum
acaaaacgcatgactcaaggggcatgatgcaattgtcgatgctttggccatcactagggactctgatgataaagaagccaacattcttggaccagctagtcaagctgcaagtgtcatcggaaaatctggttctgtcatcaagaggctgcgctcagtttcaaaatcattcattaaaggtaaaccaaaagatccaagtgacgttacacactcatgtgctatgagttttgataatttcgctcagataactggggacactagagctgtcaagaaggcattgatagcaggatcaacaattctctacaaatggccatcgaaagagaacatttctcttgaaacatctattgatgaacatcctccaaccattatacttccttcagagcttccagtttatccagctagtagcttatactcagtgtcagatgcttctatgtcatctgggcatccaagtctgtctatcttaggggcaagaagtcgtggttctcatgttcctgaatttactgtacccactgatgcccatggtggattgcccatttatcagtcttatggtcccagctattcctgcttataacacccccaaatgttcaggagagctattggtgcgtgttgtatgccctggtgacaagattgggttagttattggtaaaggtgggatgaccataaagaatataaggaaagaaagtggtgcaagcgtagatgttgatgacgcaaagaatgataaggaggaaagcataatcaccattttgtcaactgaggccaccaatgatgtt

SEQ ID NO: 435985 - DNA, 358 bp, Triticum aestivum
tcttcctgatcctccagtgctgtccgccatcacagcgtccgtgatagtgttgtgatccgctgatcattcgctgttagctcgcggagcaggcgcagcgttcgtttcttgcagggagagtgggtcgagcgatcggtcgggcgggtggcatgagcccggcgagcggcaagctgcggtggctgcggagggcgccggcgcgggcgttcggccgcgcgcgggacttctacgtgcggagcatcacggggtgcgcgcgctacgtcccggtcgacgcggccttaggcgcctatccggtgctcgtgcccgcgccgctgtccaggagccagagctgcggctccggcgccgactatggcggcgaggagga

SEQ ID NO: 435986 - DNA, 528 bp, Triticum aestivum
tctgttgggaggagactaaggacgtgccaaagccggtgacgtactcctactcattcttccacctcatcttctccctggcgagcatgtactcagcgatgctcctgactggctggtcgacctcggttggcgagagcggtaagcttgtcgatgtcgggtggccgtctgtctgggtcaggatcgcgacccagtgggcaacggcaggtctgttcatctggtccctcgttgctcccctcctgttcccagacagggagttctagatcgacctggttacctgctaagagtgcatcatccgtttggagcacctacttatcgtatcgaacgtgtttcggctgtgatgatagctaagctgactatctgtatctggtctgtaatattgtgtgagcaaacccatggcaaggagctggtgtttgtgtgacgttgtcgagtctggtttgcataatgtgtgacctaaggcattgttgccagtatttcaacagtgaagatacgctctttggttgtatatatattgaagttgatcattctctgttg

SEQ ID NO: 435987 - DNA, 478 bp, Triticum aestivum
gcgctgacgcgtgggtcgcactctacgagacccgcagcctagagtcttactcctatcacccgacccgatctcctcctaggtttcgctccccaccaccgcggaacgaaccggaaatggcggcgcggcacctcagatccggcctcccgctcctccaagcccgcctcgcggccaacgaatccgcggccgtcgctcaggtgtcgagggggctggcaacggaggcggataagcctaaggagaacaagatcaaggttccaaaagctctgtatggtggcaccggcaactatgctagtgcgttgttccttgcagcagccaacgcaaattcgttggaaaaagttgaatccgagattctcgatgttgtaggggcatccaagaagagccctatgttttctcaattcatgaaggacacatcagtgcctaaagaaaccagggtgaaggctataactgaaatattctctgaagccgggtttactgacatcac

SEQ ID NO: 435988 - DNA, 594 bp, Triticum aestivum
ttggtctctctgaggaagttcggcgagacggtggagaagtgcctggccgactacggcgtggagcggccgtcgatgggggacgtcctctggaatttggagtatgtcctgcagctccaggatgtggattcttcgaccgtgtcggacgtgaacagcatgaaccggatcgtcgacctgtcgtcacaagttcagcatgtgggtgccatggagagcatcagcgtgacgatggcggaggacggagctttgcacgagcctgaccacgacctctccgacgtgtcgatgagcagggttttctctcagctgatcaaagccgaggggaggtgaaaacgcgccggatgatctgtagggtaccggtagaggtgtgagcaagccttggatttttcttttcttgttgaagtttacctgagatgtgtcacgtgtaattggttgtttcatcccttgtaattgtactgaactacggtttggatttctgatggccttaccttacccacttctgggggcacacgatttagcggatataggtatcttcttgtatggaatctaaaaaaaaaaaaagaataaatgggaaaaaatgaaaaaaaaaaaagcggccgctct

SEQ ID NO: 435989 - DNA, 779 bp, Triticum aestivum
tttcctcccacgcgtccgcccgacgctcaagcccccagacgccgcagcgccgccactccacccgcagcggcaaccatggcggtcggcaagaacaagcgcatctccaaggggaggaagggtagcaaaaagaaggccgtcgatccgttcaccaagaagcagtggtatgacatcaaggcgccgctgctgttcaccagccgcaacgtcggcaagaccctcgtgtccaggacacagggtaccaagattgcctcagagggtctgaagcacagggtgttcgaagtatctctagctgatcttcagaacgatgaggaccaggcctacaggaagatcagactccgtgctgaggatgtgcaagggatgaatgtcctcacaaacttctggggcatggacttcaccactgacaagctcaggtctcttgtgaggaagtggcagacactcattgaggctcatgtggatgtgaagaccactgacaactacatgctccgcatgttcgccattggcttcaccaagagacgcccaaaccaggtgaagcgcacttgctatgcccaagcaagtcagatcagacagatccgccgcaagatggttgagatcatggtcaaccaagctgcaagctgtgacttaaaggagcttgtgaacaagttcatccctgagggtgatcggaaaggagattgagaaggccacctcaggcatcttccccctcagaacgtgtacgtccgcaaggtgaagatcctgaaggcccccaagttcgacctgtggaagctattggaggttcacggtgacta

SEQ ID NO: 435990 - DNA, 424 bp, Triticum aestivum
tgcctcccctcccctccattccatctccaacccattaaacaaccggagccgtcctcctcctcctcctccccccaccagatctcagatccgcggagctccgccgcgcctcccatggcggtcaaggtctacgtcgtgtactactccatgtatggtcatgttgctaagctagctgatgagatcaagaaaggtgcttcatctgtcgaaggcgtggaggttaaagtgtggcaggtccctgagatcctgaacgaggaagtccttggcaagatgggcgccccgcccaagaccgacgtgccggtgatctccccgcaggagctggcggaggcggacggcgtcctgttcgggttcccgaccaggttcggcatgatggcggcgcagatgaaggcattcttcgactcgacgggcgggctgtggagggagcagagcc

SEQ ID NO: 435991 - DNA, 393 bp, Triticum aestivum
tgagatggtccccgtcgttgagcgcctcaagaccggcttcgagaagttcaagaccgaggtctacgaccagaagccggatctgttcgagcccctcaaggcccaccagtcacccaagtgaccttgggcctggagccaggcgaggccttcaccgtccgcaacatcgccgccatggtcccgtgctactgcaagaacaagcacactggtgtcgggtcggccatcgagtatgccgtctgcgccctcaaggtcgagttcatcgtggtgatcggccacagccgctgcggcgggatcaaggccctcctcaacctcaaggatggcgccgatgacaccttccacttcgtcgaggactgggtcaggatcgggtacccggccaggaagaaggtgaaggatgagtgc

SEQ ID NO: 435992 - DNA, 358 bp, Triticum aestivum
ttcgtttgcgcactcatcgtgatctcaaccaggcgcgcactcctcctccccgccgtcgtcgtctccggtccaccgccgctccgcgcgaccatgtcgtcgaagaggaagaccagggagcccaaggaggagaatgtcacccttggaccggctgtccgtgagggagagcatgtctttggcggtgctcacatctttgcatccttcaatgacaccttcatccatgtgactgacttgtccgggagggaaaccctggtgcggatcactggtggcatgaaggtcaaggctgatcgtgatgaatcgtcaccctatgctgctatgcttgcatctcaggatgttgctacccgttgcaaggagcttggta

SEQ ID NO: 435993 - DNA, 551 bp, Triticum aestivum
ctcactcgtccgccaaacctatgccacacccagagccagagccttgcaaacctgaaccgatgcccaaacccaaaccaaagcccgaaccaaagcccggacagaagcccgaaccagaacccaagcccaagccgatgccaaaaccaaagcccaacccctgctccaaaccaaagccaggtcctaagcccgagccaatgccgaaacccgaaccaaagccggagcccaagcctaaacctgaaccgaaaccgaagccgcctcctaagtgcaaaccaccgacagctcacagttgatgggatactctatatacgacagttcatggaggagaccccatacgaagccacactatgctatttctagaataagtggtgtaatattccctgtattccagttatttctattgttccatgcatgtgtgatgagtattagtactctgtatttttttttgcttggtggtatatgttcatctactttggatgtgactcgactccttgttcttctgactatctacgcatgattgcatccattcacatgaatgagctattttgtcaatgaac

SEQ ID NO: 435994 - DNA, 428 bp, Triticum aestivum
gctcccaaaccctagcgccggcgcctccacttctctgctccctcgtctcctctcgcgcagggcccggcgaaagggaagcaagatgtacaccgccaggaagaagatccagaaggacaagggcgtcgagccctccgagttcgaggacaccgtcgcgcaggctttctttgacctggagaacggcaaccaggagctcaagagcgacctcaaggacctgcacatcaacactgcaatccagatggatgttgttgggaacaggaaggccgtggtgatccatgtgccataccgtctgcgcaagcccttcaggaagatccatgtcaggctcgtcagggagctcgagaagaagtttagcggcaaggatgttgtctttgttgcaacaagaaggatcgtgaggccacccaagaagggttctgctgttcaacgccctcgca

SEQ ID NO: 435995 - DNA, 395 bp, Triticum aestivum
ttcggttctagatcgcccctaccagacagcactcttcgctcgcggggtaccatgcctttcgcaatcatctgagtagtagaatggcctcgaaagctataaggaggaggcctaccgagaaagaaagagagagacatatggaaacaacaatgccggaatctgtcacagcacctcttctaggaaatagtgcccaggggaataaatcggaggggtatgagcctataccggatttctgggatggaaaatcacgcgagtgccttcattgggtgcatattgtatctacttttattactcagtctgcaagaaagatagtcaatgctatttcggagtttggttcgttcctagcaaggttctttggttgctcccgtgctccccaaagttcacaaaatgcacagaca

SEQ ID NO: 435996 - DNA, 669 bp, Triticum aestivum
  unsure (1)..(669): unsure at all n locations
gatgaatacaggaatctgttaaaagaactcgttgttcagggcctgcttcggttgaaagagccagctgtactgctccgctgccgcaaagaagatcaccataatgtggaatctgtactgcattcagcaaagaatgagtatgcatcaaaagcagatgtccatgagcccgagatactagttgaccacagtgtctacctgccaccttctccgagccatggcgatgagcacggccagatttgccatggaggtgttgtgctggcttctcgagatggaaagattgtgtttgagaatacagttgatgcaaggcttgaagttgttttccgcaagaaattgccagagatccggaagcttcttgttgcggcataatgcccacttgtattttggtgatggtacagctgtttctatgtaaaatggctgctggtttgacccccagcaggtgcaacgaactccgcccggttttgcgaacattgattgtttaaagtatcccatcctcttatgtaaacactacttatttgttcattattgtcgccgagcacaaactatttggacgaactttgctctgaggaataataaataaagcaccttcggactgtgtttatgnnnnnnnnnnnnnnnnnnnnnnnnnnnnnnnnnnnnnnnnnnnnnnnnnnnnnnnnnnnnnnnnnnnnnnnn

SEQ ID NO: 435997 - DNA, 209 bp, Triticum aestivum
  unsure (1)..(209): unsure at all n locations
cgtcntttagcttgtacgcctgattttgacagtatgatgctctgccccctaccattatattgattcagaaagagatataacctagcagaagtgcaacggaagttgttgtactcggacatcaaaaaggaagatattattgcgttgcgcgtgttgctaaatttgtatcgacgagcgtacaaataatggaacatatcaaagattttttgttt

SEQ ID NO: 435998 - DNA, 443 bp, Triticum aestivum
ctggctagctgcaaagaatcttgcgcctaaggttaacagtttctccaaaaatatttctgttcacctcggagttgtggtgcctcatgtagagttgaagcatgtggttgctgctaccattggtctgaagggtctgggtggtctcctgtttatcgccagcagttcatttggtgcttatctcctggctctctaccttgctttcatcacgcccgtcgtctatgacttctacaactacgacatggagaaggctgaatttgtgcagatcttcatgaagttcacacagaacctggcgctgtttggagcccttctcttcttcctgggcatgaagaactcggtccccaagaggcaggccaagaagaaggcccccaagtccaagacaacttagatagttgcggagaagactcttatttaacaaagaagctaccgtacctggttctcttatgtgt

SEQ ID NO: 435999 - DNA, 640 bp, Triticum aestivum
  unsure (1)..(640): unsure at all n locations
tttttcttcccacgcgtttgttcatcttcggtcagatgtcatattctgatgctatctagctacttattgggtccaacaagaaatccgagttcccggtaaagtgggggctggctccgcaaagcgagcatgaaagatatatcacagaagtcgcatttggcggcagtcctgcaataattagagattatccaaaggaaatcaaagctttctatatgcgacaaaatgatgacgggaaaacagttgcggcaatggatctattggctcctcgggtcggcgaactcattggaggaagccaaagagaagaacgacttgattaccttgaagctcggctggatgaatcaaatcttaacaaagatagctactggtggtatctggatctgcggcgatatggatcagttcctcatgctggttttggccttggatttgaacggcttgtacagtttgcaaccggaatagacaacatcagagacgccattccatttcccagggttcctggttctgcggagttttagcacttgaagagtatccgtgtataatctctaaaagcattcttgcctgngacttgaagaaaaccttacgttgatttgtcattgtaaagagtttacctgactgatttctaatctgcangagcgcactgtatcat

SEQ ID NO: 436000 - DNA, 587 bp, Triticum aestivum
tcggtggccagaaggcaacaacaaagtgcgcgtgagaaataagcggtgcttgccaagcagagagagagagagagagagagatggcggcggcggcgacggcgacgactacagcggcggcgacggcggcggcggtggggccgggggaggtgatctccgaccacagcctggagcagtggaccatgcagatcgaggaggccaacgccgccaagaagctggtggtgactgacttcactgcatcatggtgcggaccatgccgcatcatggctccaatttttgctgatctcgccaagaagttcccagctgctgttttcctcaaggtcgacgttgatgaactgaagcccattgctgagcaattcagcgtcgaggccatgccaaccttcctgttcatgaaggaaggagacgtcaaggacagggttgtcggagctatcaaggaggagctgacgaccaaggttgggctccacgcggctgcctagtaatcacctagcggagtagtattcgcctaaataaaattgccgcttgagaagtagtgcctccaatggcaccggatatgctgtgtactgcttgcttcttgcgagtttatggatgat

SEQ ID NO: 436001 - DNA, 382 bp, Triticum aestivum
tgacggacccgaaccccgatgatcctctggtgcccgagatcgctcacatgtacaagactgatcgggccaagtatgagtccacggcgcgctcctggacgcagaagtacgccatgggctagagcctggacggccagctggtgaccatggatgcgccgagccccagaaccgttatcacctaaataaccagccaaagtatcaccccaccccgcgacgaagtgaatggacttttgaggccgtcgtgcccctgttgaactcgtatgaatgtactctttgccatgtcaagtccgttgggtctgggtagtctgttctacctgacgtttcgttatccattaagttaaatctctgtccgtatctatgatatgtgtggctatccattgcatgc

SEQ ID NO: 436002 - DNA, 914 bp, Triticum aestivum
ttggacgcgtggggtgcccttcaggccctgatggtgggcatccagatcctcaccttggaggatgttgtctctgaggctgatatctttgtgaccaccaccggaaacaaggacatcatcatggttgaccacatgaggaagatgaagaacaacgccattgtctgcaacattggtcactttgacaacgacacgcgtccgaacggccttgagacctaccctggtgtcaagcgcatcaccatcaagccccagactgaccgctgggtcttccccgagaccaagactggcatcattgttcttgctgagggtcgtctgatgaaccttggatgtgccactggccaccccagcttcgtcatgtcctgctcattcaccaaccaggttattgctcagcttgagttgtggaacgagaaggccactggcaagtacgagaagaaggtgtacgtcctccccaagcacctcgacgagaaggtcgcggccctccacttgggcaagctcggcgccaggcttaccaagctcaccaagtcccagtctgactacattagcatcccagttgagggaccttacaagcctgcggcctaccggtactagtgtgtccagcgcgactagcggctggcctgagcctgagtccgtgcagcggcaccaacgggaactctatcaactatcctgtttcccttctattatcttacatgctgtctcttaggcggaggatttgttattatggttatgttttgagccgtgtgagggttgggagaggcggcgtttgcttttgcccagaaataatggcattattattggtttgagtgaggaggtgtgcttttccagatacagttttgtctcgtgtgttctgccatgtctgaaatacttcgcaagctgttgctcatatttgtgcgtgttttgttaatgatcctggccctacatga

SEQ ID NO: 436003 - DNA, 675 bp, Triticum aestivum
ctttttaggaaaaaaaggcctccgcaaaccctaaggtcacggtcggcggcggcggcggcagagatggaccccgactcagtggcgaaggcgttcgtcgagcactactaccgcacgttcgacaccaaccgggcggcgctggtggggctgtaccaggagggctccatgctctccttcgagggcgagaagttccagggagccgccgccatcgccaccaagctcacctccctccccttcaccaagtgcgcccactccgtcgtcactgtcgactgccagcccgccggccccacgggcggcatgctcgtcttcgtctccggatccctccaagtcgacggcgagcaccacatcaagttctcccagatgttccacttgatgccaatcggaccagggaacttctatgtgcacaacgacatgttccgcctgaactacggctaagaatcttaccaaaggtcgtgcttccccatggaagacagaatgttctgcaaaacaaacaattcggttgtggtttttgtgtttgatggtgaaaaactttgtggtgctttcatgccaacagcttatgaaatccactgaggatgaaacataacaaaacaccctgtactatgggtctgcgtctgaaattgtatcgtggttattcttgtatcaatgttatgtggaggtcatgagaaaaaaaggcagggg

SEQ ID NO: 436004 - DNA, 448 bp, Triticum aestivum
cggtcgcgtgggttcctgcccattctgcaaccatgggagcagcgttgagtgccggattgatttgaagaatctgattggtgaggctaactgtcaaatctgccaggaaagcttcagcaccactgcaaatgcgctgactgaacctattgatgtatacagcgaatggatcgatgagtgcgagcgcgtcaacactgttgaagatgatgatggtgcatgagcatgtgtaactataatactcgtatggcctcaatgtgttgatgtcatttactgccaccgtcagccatatctgtagtagcattgtaacaatgtactggccgatcgaaacgttagtaggcagtttgtcccgtgcttaatacacaaccgatgatattgtgtacctgtatttgtaaaccttgatatagcggctgagattacacctaatctcggtacctgcaaagaatttatacttatg

SEQ ID NO: 436005 - DNA, 521 bp, Triticum aestivum
tgtcacgcgtccgcccacgcgtccgcgaagcccaccgaattcctcgcgattcctctcccctcgcctcctcgtcctccccctcctaggggatcgccggagaggaatcgcgacgagggcttcctcctatcagttaaatcaaagccatggagcacaaggagaccggctgccagtctcgggagggccccatcctttgcgtcaataactgcggcttcttcggcagtgcggcgaccatgaacatgtgctccaagtgccacaaggagatggcgatgaagcaggagcaggccaagctggccgcctcctctttcgacagcatcgtcaacggtggcgatgccgcgaaagaacatcttgctgctggcagcacggcggtggcagctgctcacgttgaggcgaagacgcttattaccgcacagcctgctgatatcgctggtcccagcgaggcggcgatggagaaccccaaaggcccaagccggtgcagcacctgcagaaagagggtcgggctgaccggattcaactgccggtgc

SEQ ID NO: 436006 - DNA, 429 bp, Triticum aestivum
ttacgcttccggcccccaatcgagccgagctcctcgcgattcccaatccccgcacgcctcctcgccctcctcctccggccccgccgccgccgccgcctcgccacaggctcacggttattcaagatggaacacaaggaggcgggttgccagcagccggagggcccaatcctatgcgttaataactgtggcttctttggcagtgcggcgaccatgaacatgtgctccaagtgccacaaggagatggtcatgaagcaggaacaggccaagctggctgcctcctccttcgatagcatcgtcaacggtggcgacggtgggaaagcacctgttgttgcggctgtagccgcgagcgcagaggtggtggttgctcaagttgacgtgaaggcgctcgttgtgcagcctgctgctgatgttgcaggcaccagcgaagct

SEQ ID NO: 436007 - DNA, 551 bp, Triticum aestivum
tgccgtcctccgcctccccgtctcgctcgctcccacctctcgccgccgccgccgccgcccgcgcagccgcaaaatgccgttcaagaggttcgtggagatcgggcgggtggccctggtgaactacggcaaggactacggccgcctcgtcgtcatcgtcgacgttgttgaccagaacagggcacttgttgatgctccggacatggtccgctgccagatgaacttcaagcggctctcgctgaccgacatcaagattgacatcaagcgtatccctaagaaggcaactttgatcaaggccatggaggaagctgatgtgaaaaccaaatgggagaacagctcatggggcaagaagcttgctgtccagaagagaagagcatcgctgaatgactttgacaggttcaaggtcatgttggctaagattaagaggggtggtgcgatcaggcaagagcttgccaagctcaagaaggaggttgctgcttagattatcttagtggatggcatgttgagttttttgttccaagttggatctgctcgatgttccagtgttcttaaag

SEQ ID NO: 436008 - DNA, 258 bp, Triticum aestivum
cgcgcgacaagagcaaggtcaccgtcacctccgacggcgccttctccaagaggtacctcaagtacttgaccaagaagtacttgaagaagcacaacgtgcgggactggcttcgcgtgatcgcagccaacaaggagcgcaacgtgtacgagctccggtacttcaacatcgctgagaatgagggcgaggaggaggattagagcgcattgccatattgtagcgcttgccgagttttgatacttgatctgagtacctcctagt

SEQ ID NO: 436009 - DNA, 481 bp, Triticum aestivum
tgaaatacacaacacgtacatcattcagagctagtcgatcggcaatggcaggccaggccgagaaggtgttcgtccccaccgacgacggagctgctccaggcgcagtcggacctgtggcgccacaccctctgctacctcacgcctatggcgctccggtgcgccgtcgaccttggcgtccccactgccattcaccgcctcggcggcgccgcgtccccatccgaactcgtcgccgccctatccctccccacgtccaagctgcccttcctcgcccgcctgctgcgccaactcgccacggcgggcgtcttcagtgcaaccgacgccggaacgtaccgcctcaacccgctctcgtacctcctggtagacggcgtccgcatcgacggcgacgctagccagacggccctcgtgcgcgccgtggactcgcgctactacgtggaggcggctatggggctggcggactggttcaggaaggacttcgatggag

SEQ ID NO: 436010 - DNA, 2346 bp, Triticum aestivum
tctttctcccacgcgtccgcccacgcgtccgcccacgcgttccttgccagcagccgccgccagcagctgcgcaaaggctccacaaaccctaaccctagtccatagcttagcttccttcttctcgatctagctagagccatggcgccgaccaagggcgaggggccggccatcggcatcgacctcggcaccacctactcgtgcgtcggcgtgtggcagcacgaccgcgtcgagatcatcgccaacgaccagggcaaccgcaccacgccctcgtacgtcgccttcaccgactcggagcgcctcatcggcgatgccgccaagaaccaggtcgccatgaaccccatcaacaccgtcttcgatgcgaagcgtcttatcggcagaaggtttgctgatgcccctgtccagagtgatattaagatgtggccgtacaaggttattcctggccctgcagacaagcctatgattgtagtgcagtacaagggtgaggacaagcagttctcagctgaagaaatttcttccatggtcctcatcaagatgcgtgagatcgctgaggcttacctaggagtaactattaagaatgctgttgtcaccgtgcctgcttacttcaatgattcccagaggcaggcaaccaaggatgccggtgttattgctggtcttaatgtgatgcgtatcatcaacgagccaacagcagctgcaattgcctatggtcttgacaagaaggctaccagtgtcggtgagaagaatgtgcttatctttgaccttggtggtggcacttttgatgtctctctccttaccattgaggagggtatttttgaggtgaaggccacggctggtgacactcaccttggtggggaggactttgacaaccgtatggtgaaccactttgtccaagagttcaagaggaagcacaagaaggatatcagtggaaaccccaggtctttgagaaggctcaggacttcttgtgagagggcgaagaggaccctttcttccactgcccaaaccaccattgagatcgattcactctttgagggagttgatttctattccaccatcaccagggccaggtttgaggagctcaacatggacctcttcaggaagtgcatggagccagtggagaagtgcctgagggatgccaagatggacaagagcaccatccatgatgttgtgcttgttggtggttccaccagaatccccagagttcagcagctgctgcaggacttcttcaacgggaaggagctctgcaagagcatcaaccctgatgaagctgttgcctacggtgctgccgtccaggctgcaatcctcagcggtgaggggaacgagaaggtgcaggaccttctcctcctggatgtcaccccactgtctcttggtcttgagactgctggaggagtcatgactgtgctcatcaccaggaacaccaccatccccaccaagaaggagcaggtcttctccacctactccgacaaccagcctggtgtgctcatccaggtgtttgagggtgagaggacaaggaccagggacaacaacctgctcggcaagtttgagctctctggcatcccgcctgcgcccaggggtgttccccagatcactgtctgcttcgacattgatgccaacggtatcctgaatgtctctgctgaggacaagaccactggccagaagaacaagatcaccatcaccaacgacaagggcaggctgagcaaggaggacattgagaagatggtccaggaggctgagaagtacaagtctgaggacgaggagcacaagaagaaggtggaggccaagaacgccctggagaactactcgtacaacatgcgcaacaccatcaaggacgagaagatcgcctccaagctgccggcggacgacaagaagaagatcgaggacgccatcgacgctgccatccagtggctggacacgaaccagctcgctgaggcggatgagttcgaggacaagatgaaggagctggaggccctgtgcaaccccatcatcgccaagatgtaccagggtgctggtgccgacatggagggcggcatggacgatgacaccccggctgcatccggcggtgctggccccaagatcgaggaggtcgactaaacagtcagttgttctgttgcagaggcggcgaagcctgctgcttattataccgtgtctgtgttatctgagacttgaggttgtggtggttattgttttgcttccgagtggtcggagttattccgtgcgagttgcaacattcgtggtactggatcaacggttatgatgtctcgcgtctaagtatattattagtttgttggtaaaaaacaaaatctaaaaccaaaaagttagcatgccaagattgacaaaataaaagacaccatc

SEQ ID NO: 436011 - DNA, 370 bp, Triticum aestivum
cccgggccgacggggacgccaatgaccaggccatccagtggctggacggcaaccagcttgctgaggcagatgagtttgacgacaagatgaaggagctggagggcctctgcaaccccataatcgccaagatgtaccagggtgccggagctaacatggcgggtggcatggacgaggacgatgcacctccggctgctggcggcgctggccccaagatcgaggaggtcgactaagcgagcacttgtaccagtcttaccctaaagttattccgttcgttatgttggatgctactgcagtacgtggtgttggatgtgatgtgtgtgaactgcgtttgctgctgcttttctgttaatgttagttgcatctggtgata

SEQ ID NO: 436012 - DNA, 517 bp, Triticum aestivum
cctttttgtccggcgattgccgtggccatgcagcccgtgacggtctacattgacgccagcggttttgagttccagttctactccggcggcatctaccgtggcccctgctccgccaatgtgaaccactccgtcaccatcgtcggctactgcgagggtcctggccagggaaacaagtactggattgccaagaactcatggagcaacgactggggtgaacaaggatatgtctacctcgcaaaggacgtgccctcgtccacgggcacatgtggcctcgccacctcgcccttctaccccacggcttgaccacaggcagcactatgtgtgatatctaaggaattgcttccgtttcgttgtgataatgctaaattactatttttgttatacttccctttaatttgatcaataagcggtagaccgtgcgtgcgatagcatggcctgagtgtaataaatcgtcgtgtgaattacactttctacaagttaattgtacatttgtgacacatatttaccgatttaacgg

SEQ ID NO: 436013 - DNA, 452 bp, Triticum aestivum
cccttgcgtccgcccacgcgtccgtagcatcaccagccctgcttcagcagttctattgtctctgtgaaatcgaccgcggcgtcgaccatgagctacccgccaccgggcaccgcgtacccgccgccgggccaggaggcctacccgcctccagggtacggcgcgccgccgcctgtcgccgctaactaccagcagcaagccccgccgcaggactcgcaggaccgcggaggcgacggcttctggaaaggatgttgtgctgctatttgctgctgctgcctgctcgacatgtgcttctgatcacaagttcctactgccaacaccaggaaatcccacgatgatctactcactcagagctgctcatagctgatcatggttatttctattgtagtatttgtgctgtccgggtggagatttgtatgggctcgttgtgctagttaattttgcatctggatttt

SEQ ID NO: 436014 - DNA, 311 bp, Triticum aestivum
tccttggtgaggtggaagaagcactcggtattaataaacgggtgatgactgtagtttccgaggcgacagttttgcagcgctggaaaccgtagctagggtcgaatgatgtcgccgtcccctgttaattcgtttaggtcgattgatattcttgtactgctagtcatgttctttgccaccgagaaatttgatcggtggctgcgttggtctcttgacattgtatttcgcaagcaagatataggccttttccctcgccttcaatgctgataaataaactggagccccacctttccaaataaaaaaaaaaataatgt

SEQ ID NO: 436015 - DNA, 290 bp, Triticum aestivum
  unsure (1)..(290): unsure at all n locations
tgtgtacgcgtgggtgctccttctgtccacatttactcaagctcaaacagagaaaaggttcaacaacgactacatgggtcttttgcacaagtaccaagtccagaagaggttcaacaacgacttctatggcatgcttggcaggtatcagcagcggccatacaaaaggatgatgtacggtgactactacaactggctaaggaactaccaagatcgcctaacctactagagagacagagagcttgggtaaagatggagctgttnnnnnnnnnnnnnnnnnnnnnnnnnnnnnn

SEQ ID NO: 436016 - DNA, 498 bp, Triticum aestivum
tcgtcaaagcctagctaagaccaaaaatcttcactggcaatccactagatacaaaataatagcacaaacagctatggctaagtcaaatgcattggctgcaacactcggtgcttgtcatggcggtgtccctcgccacactagagggtgttcatggcgtctgcggcatgtcgaatgatgaattcaagctttgccagcccgcggcggcagtgaataacccgacagagagtccgtcgggtgagtgttgtgctgcgcttgggaaggccaatctatcatgcatttgccgctacaaaggcatcgccggcatatggctgagaatgtaccacatcgacgcaaagcgcgccatggctctgcccggcaagtgtggtctcaccatgcccaacaactgctcatgatcattggatgtactactcatgagctgatgagcatctaggagtcggttgttctacatctgcatcgacacttatatatggctaaataagtggaggagcacttgaaaaa

SEQ ID NO: 436017 - DNA, 253 bp, Triticum aestivum
tgctcatgcgtccgcccacgcgtccggccctgatacccgttgaaacacctctcccgaacaatggaaggtgttgacgattgcaccgcctggatgcatgcctccatctagttagcaatacaagctattgccacgaccttatattgaacccatagtaatatcgtctcgtgtgcttaaatgtttactagtccgaataaaactggatgtctgttgtttggttcagaaataataaagatggacggcgtttctaacgaat

SEQ ID NO: 436018 - DNA, 504 bp, Triticum aestivum
taactaaccacaccatttcgcaatctcgcaagcgacgcttccgtctccaccaccaggaaccagaccgcgcactcctccttagctcgagcccagaccggagccctgttccgccgtggatcgctggaggagagggccaccggccggatcccgacgggccagatggtgggcgacccccgcggcgggggcgagtagcacggctgcgatcggcggcggacggatcggcggcgccgcaaggcggcgggggccaccatgtctgccgtagtgtgcggcaagaggtcctccatcttcgccgacgagctcatcccttcctctccgccttcccctccccaccaccacccttccaagcgggcccgctgctccccgacccgcgccttcgacgacgccgccgcggcccaccggcgggaggcgctgctccaccaccttcgctccctcttccctcacatggatccccagttgcttgaaagagctcttgaagcatctggagatgatttggattttgcaata

SEQ ID NO: 436019 - DNA, 412 bp, Triticum aestivum
tcgagccagccagccaaatcgagccccgttccccgaatccaggcggcaccaccaccacccacccatggcctccctggcggcgagatccggcctccgctccctggcggcgcgcgccagggcccccgccccggccacgggcggacgccgcatgtcctcctccgcccacgacgacgcctatgagacggccaagtgggagaagatcaccatcattggggccgtcacctgcaccctcctggcggcgtggaacctctccaagggccacccccacttcgacgagccgccggcctacccctacctgcacatccgcaacaaggagttcccctggggacccaatggctctgtttgaggtcaagcacgaccattgagtactgaatagtgcatcataagaagtcggtgaatgcttcagtaaaat

SEQ ID NO: 436020 - DNA, 530 bp, Triticum aestivum
cggtccagactaccgggtcgaccgggggacatatttgaagcagtcggattaaacctgtatctctttccctatggtgttttgcccactggccctgaacgaggcataattgaggttgtcccaaatactcggagtagaaatcaaatgggtgaaacaactgatggtggtttattagaaatatttcagcaagattatggccctgtagggtcaccttcttttgaagctgcacgtcaaatgtttattgttagtagtgctggatatgctgttgccagcctgcttcttcaaccgaaggatcggcataatggcaatcttctctttgatagccaggggagactagttcatattgatttcggatttattttggagatttcccctggaggtaacatggggtttgagagtgcacatttcaagctaagccatgagatgactcaattgcttgatccatctggaactatgaagagtgacacctggaatcagtttctcagactgtgtgtcaagggatacctagcgggaaggagacacatgaatggcat

SEQ ID NO: 436021 - DNA, 414 bp, Triticum aestivum
tcttaaccactctccactccacttttgtacgaagaacacttgtgaaatatggctgcccagatcaacacggaggtggatgccctggtggagaagatcaccggcctccacgccgccatcgccaagctgccgtcgctcagcccatccccagccgtcgacgcgctcttcaccgagctggtcacggcctgcgttcccccgagcccagtggacgtgaccaagctcggcccggaggcgcaggagatgcgggagggcctcatccgcctctgctccgaggccgaggggaagctggaggcgcactactccgacatgctcgccgccttcgacaaccctctggatcacctcggcatgttcccctactacagcaactacatcaacctcagcaaactggagtatgagctcctggcgcgctacgtgccc

SEQ ID NO: 436022 - DNA, 338 bp, Triticum aestivum
acgcgtccgcccacgcgtccgcccacgcgtccggtgccatcatgtacccgaccatcacgtcgcgcacgcagaaggtggagctggccaaggacgacgtcgacggcatccagagcctctacggcggcaaccccaacttcaagggcgtcacgccgccggccaccagcagcgaggagacccacagcgccgccccccgcgcgctctccggcccgtggagcggcctggccggggcggctgcgctcgcactagccctgtcgtgctagttcttcttggcgtcgatcgattcacgaccattttttggtttttaccttttttaacgggcattcactttgctctaggat

SEQ ID NO: 436023 - DNA, 380 bp, Triticum aestivum
ttggcggcgtcctcctcctcaccggcggcggcggcggttgggcgagcggtcgaggaggtgcgttcggcgctgaacgagcacgccgacgtggtggcggagctcttcggccgcgtctccaccgagctccgcggcgggttcggccccgccgtcgacactttcgtcggcttcttccacgccgtcgactggaaggaaccttggttgatcggcatgataagtttccatgccattctgctactggtaaccatcatctccaggaggaacatcaatttccaacttatcttgtcagccttaacattttctggtgtattccttgccgagaaactaaacacgttcctaggacaaaactggaagagcttctcaagccagaattactttgatcc

SEQ ID NO: 436024 - DNA, 255 bp, Triticum aestivum
tgttggagaagcgcgcggagcatcagaaacatcatccctccttgccttgttcttttatctcttcctaatagtttgttggtcgaatttataggattcttaatcgacagatcaggaatcacctccccattcagctaagctgcatgtcttttgcttatattttgtcctttcttgtacttacatctcatgctgtgtggatttcctatggctcaagtttgttgctgcgctcaggtttcagcaattgctgcacctgcaaaa

SEQ ID NO: 436025 - DNA, 642 bp, Triticum aestivum
ttgtgatagctggagcccaaaaccgagcaaaatcgatttcaagcggaccaaaatccggcaccgcatgggtttccccaggcactgatccggcgggtggacgctaatgcggcgccgctgaagggatctgctgcgcccgcggggttcacatggcggcacagaacggcagcggcggcgcggcggtggtcctcaacgtgtacgacctgacgcccataaacgactacctctactggttcggcctcggcatcttccactccgggatcgaagttcatggtctggaatatgcttttggagcccatgatctctcaaccagtggggtttttgaggttgaaccaaaacgttgccctggctatgtctatagaaggtctgtatggatgggtacaactgagatgtctagggcagagttccgctcgttcattcaaactcttgcaggaaagtacaatgggaatacatatcatctgatttcaaagaactgcaaccattttacggatgatgtctgtaagaacataaccaaaaaaccagcccctggatgggtaaatcggctagcaagagtgggttactttttcaatcgccttctaccaaaaagcaattaagactctactgttactcacggagcaacccatcctgcattctctgatgatgatg

SEQ ID NO: 436026 - DNA, 475 bp, Triticum aestivum
tgttgcaccggttcggcaacacctccagcagctccctctggtacgagctcgcctacgccgaggccaagggccggatccgcaagggcgacctcacctggcagatcgccttcggctccgggttcaagtgcaacagcgccgtgtggagggcgctccggtcggtcaacccggccaaccccggggacgtcgccggcaacccctgggccgacgagatccaccgcttccccgtgcgcgtgccaaacttctcagccatcgatcctccatccactttcagcgacaccacccagcaataaggatttctagtggtcacgtacgtacgtcttttggtctgtagctagcattatactgtattagcgagctgcttggttggggttgcattggtattaagtagagtcagtcgagctaggtttgcttaatttagttggggtattgtatttgatctgattgatgagattactaagtcttccgttgatcctct

SEQ ID NO: 436027 - DNA, 418 bp, Triticum aestivum
cattttctcccctgtggaggcgtcctcatctaccagagctttaccgtgaacgaagaggttgctgtctctgccgggtcgcccaggtccgtcttccactgcttcgaggccgagagtgtgcacagccaccctctggtcaaggaaggcaagctcgccaacctcctcgcatggcgggcggggaggattctctggaagagggcgcggtgctgtgcgagtgaagacatgatttgctgtcgctattccatctgtggaatttgttctgactgtcagtttgtcgtttggttactgtgaagcagccggccaggctattgctctctgaataaactattagctctaggtggtttgctgcgtctgccacaatgagcgtacttctggggaaaagctgtctcgaacttataaataagcattatttttcctaaaa

SEQ ID NO: 436028 - DNA, 727 bp, Triticum aestivum
ttttaaaactgaagagtgcgagagcttcttcaactttttcagccccccacaagtacctgatgatgatgaggacattgatgaagaagccgctgatgagcttcagggtcaaatggagcatgattatgacattgggtctaccataagggacaagatcatccctcatgctgtttcttggtttactggtgaggctgtgcaagctgaggatttcgatgatatggaagatggtgacgaggatgacgacgacgatgatgatgatgatgaagaagatgatgaggatgatgaggacgaggacgaagacgatgatgaagatgaggaagagctaagcaagccgacgaagaaggtggcgggcaaaccgaagggacctgcaaagggtggcgcacaagggaacgccgagcaaccgacggagtgcaagcagcagtagaactttgtggatgcagttgttgcagtattttttccattgaactgcccagggggaatgagcttttatgctggttgtgttgtgcacgggtgagacgtttggtgtggatatttaccgtaggcatggttttgtatcaggtggcgtggtgattgtgctggtgtgggatggatggtttgggagtttgggacggtcatgttagcgtgttattcttattatggtctctagctatatgcagtcgaaggacaccctaagactgtaattatatttgaactcgtaatagagccttttattattattttttgtgccatc

SEQ ID NO: 436029 - DNA, 428 bp, Triticum aestivum
  unsure (1)..(428): unsure at all n locations
cgcgtgggcgtgcaacagcgcggtgatcggcccggcggacaagctcgtcggcgacggggacgagcccgtgtaccgcagctacacctacgacgagtactacaagaagttctggagcaggaacctggaccaggaccactgcctggagctcttcacgggtcagaagtgatccgtgtgcgcaagcttgcctcatctacggctgggtgcagtggacatccacgacgcagcattactcaaataataaatgcccccaatgtgcggggttactcgagttgtttgaacttgtttttgcttcagcacaacgtatctatcgatgtccatcttgtattgtattccctatatactagtacgggtgtgcgcgcgctgcttgtttattaattgtgatcctactcgtaatgaattatggtactacaacatagnnnanattanag

SEQ ID NO: 436030 - DNA, 416 bp, Triticum aestivum
cccatttttccgattccctcgctccaccgccgctccttctcggcccttccccgccccctcgcattgcagggaggagaggactcaatcaagatgccgaccatcatcatcaaggtggacctggattgcgcccgctgccaccgcaagatcgagagggtgctcgacaggatcagagagaagggcgagttcgtcatcgacgacatcgagtacgatgagaagaacaacaaggtgatcgtgaagggccccttcgacgccgacaagctctccgacaagctctgctgcaaggcctgcaagatcatcaaggagatcgagatcgtcgagccgccgccgccgccgccgccggaggagcccaagaaggaggtgcccgcgcccccgccgccggagccggaggtcgtggtgccgccgccgccagcggtcgt

SEQ ID NO: 436031 - DNA, 511 bp, Triticum aestivum
tattttgctagtatacatgttagcagtacatacaaggtggtgaattcaaaccgcacgcggtcgattaggaagaaggtgaattcaacaaggcggaccggctcaaactcatggaaccacaactcggagtcagattccgagatagaccggatatacgccatatgagggtgatctccggtcttctatggatcttcagtgttttcggcggcgccacacgacacggatgtaaaaaggaaggtgggatggcactcaatatgaacagctttcaccctccaggtgccaagggttttaccgtatacattccaataagctggtgttcctggatcggcaggaggagccaggacgcgacggtcgtgttgtatacatcttctacagatagattgtgatcatcagaatatgcatgcagcctgtgctgtgctccctatgcatggctggctggctggccttcataaaatttctctcagcctttttctgtaccttttgttaatatgctgtggtagcagaatggtcggta

SEQ ID NO: 436032 - DNA, 732 bp, Triticum aestivum
  unsure (1)..(732): unsure at all n locations
ccggggaaggatgcggagagcgcttactgggaactcgtcataaaggacatccaagacgcgtgcaagctgtttgagcccatctacgacgagactgatggggctgatggttacgtttcagtggaggtgtctcctaggctggcaaatgacacccaaggaaccgtcgaagctgcgaagtggttacacaaagtggtcaaccgccccaatgtgtacataaagatcccagctacagcagaatgtgttccttctatcaaggaagtcattgctaatggcatcagcgtcaatgtcactcttatcttctctgttgcaagatacgaggctgtgattgatgcttacctcgacgggcttgaggcttctggtttgagcgacttatcccgagtaaccagtgtagcatccttctttgtcagccgagttgacagtctgatcgacaaaatgcttgagaagattggaacaccggaagctcttgccctgaggggaaaggctgccgtagcacaagcaaagatagcaaatcagctttacctgaagaaattctctggcccgaggtgggaggctttggtgaagaagggagccaagaagcagaggttgttgtgggcatccaccagcgtgaagaacccggcttacttggacactctttacgtcgatcctctcatcggacctgacaccgtctctacgatgcccgaccaagctctggacgcgttcatcgaccacggcacagttgctangacaatcgacgct

SEQ ID NO: 436033 - DNA, 377 bp, Triticum aestivum
tcggacgcgtggttccaaggaaggaaggaagaaaatccagagaaactccagagaagaagaagaagaaggtcgacgacgatggcggcgtcggtggagctgcccaaggagtacggctacgtggtgctcgccgtggtggcctacgccttcctcaacttctggatgagcttccaggtcggcgccgcccgcaagaagtacaaggtgttctaccccaccctgtacgccaccgagtcggagaacaaggacgccaagcgcttcaactgcgtccagagggggcaccagaactcgattgagatgatgccgctcttcttcgccacgctgctgctcggcggcctgcagcacccggtcgccgccgccgcgctggggctgctctacaccgt

SEQ ID NO: 436034 - DNA, 390 bp, Triticum aestivum
tttgtcaagcaccaaccacacaagaaccgatcaagacaccagcaatggccggaggaggaagcgacgaagtgaagctgctgggcatgtgggcgagcccgttcgtccttcgagtcaagctcgcgctcagcctcaagggcgtcggctacgagtatgtcgaagaggacctcaagagcaagagcgagctgctcctcaagtccaaccccgtgctccagaaggtgccggtgctgatccacgacggcaagcccatctgcgagtcgtcggtcatcctgcaatacatcgacgaggctttcgccggcgtcggctcctcgctcctcccggaggaaccccacggccgcgccgttgctcgcttctgggccccttacatcgacggcacgctcgtgaaagcatcgt

SEQ ID NO: 436035 - DNA, 603 bp, Triticum aestivum
gcgattacacaccagcacgcggcacgcgcccgagacgctcgtacgggccggcgcaccctagccgggccgcgatgcccacggctaacgtgcgcgcggcgcagactagcgccgaccgcaggttaagtacgctggtgcgccacctgctggcttcttgcccacgaacatgagcagcgaccgccacctccgccgactcgctccaacctttccccaccatggcagtcgccctccgtcttcgccgggatcgcgcagggcccggaggaccccatcctcggggtgacggtcgcgtacaacaaggatcccagccccgtcaaggtcaacctcggcgtcggcgcctaccggaccgaggaagggaagcccctcgtgctgaatgtggtcaggcgcgccgagcagatgctgatccaaaacgagtcacgtgttaaggagtacttgccgatcactggattggccgatttcaacaagttgagtgccaagcttatctttggtgctgacagtcctgctattcaggagaatagggtggctacagtacagtgcttatcaggaactggttccttaagagtgggaggtgaatttcttgcaaggcactatcatgaacgcactatctac

SEQ ID NO: 436036 - DNA, 412 bp, Triticum aestivum
ttgaattcaagaaagacatggacgagcagtggatgatggggcagacttccctcagcctcggcctcaacgtcggccggccgacggcgcggcggggtgcccctccggtgaccaaggtcctcgtggaggaggacttcatgtcctccaagaagaatcacgaggtcgaggcgctggaggccgagctccggcgcgtgggcgaggagaacaggaggctcagcgacatgctccgcgcgctggtggccaagtactccgacctgcagggcagggtcagcggcaagatggcggcggtgaccgcggccaaaaaccgccagtcacccacgacgtctgagggcggctccgcatcctcgccgtccaggaagcgcgcccgcagcgacagccccgacaccgccgtccaggaagcacgcccagccagcgg

SEQ ID NO: 436037 - DNA, 416 bp, Triticum aestivum
tcgtgcctctcttccttttctcctttcaaactgagatccttctcttaaaccctctcctcctcccctatccctctcccttttttaccctgtctttgtctctaaaagaaagaactcggaagatcctcttgaaatgcaaaaccgcccaatttttcttcaattctttttttctcttccacttcattttctcggctgtctggttctggtgtcggtttgtttgggctgggtactggttcggatggatcaacacaggactttgggaaagctacggttgattagggtgtattgggtgtgttttttgttgccttcctgggagggctttgaggggcgaggagatatgaaaaccttttgggggtgaagggaaatggggaatgattgagggtcatgccatgggctcgttagagcggtttcagatgtgt

SEQ ID NO: 436038 - DNA, 708 bp, Triticum aestivum
gtcggaaatcagggtcgaccgggatcagcgcctcgccgtcggaggagaacatgcgctacttcaatgtcatggtccttggccccgcgcagtcgccctacgaaggtggagtcttcaagcttgaacttttcttacccgaggaatatccgatggctgctcctaaagttaggtttctcacaaaaatataccatcccaacattgacaagcttggtagaatatgcctcgacatcctaaaggacaagtggagtccagctcttcagatacgcactgttcttcttagcattcaggcactgctgagcgccccaaacccagatgatcccctctcagaaaacgtcgcaaaacactggaaatccaatgaagctgaagctgttgagacagcgaaggaatggactcgtatgtatgccagtggcgcatgacaagctaacgctgttatggatgtaataacaccgtgtcatagttgggcctaatcgaaaaccatttgcttgataaaaacacacttgaaatgatttgcgatggacgaatgtatccagagcggcatcatttcttgttggtggttgtatttgtggtgcgtgttctggcacgcttcataacttgctgcttatagaacacgctctgtttctcgttcatcttcaattgtttctccaattaaaagtatctgttgtgatccgagtatgtaagctctccaaatgataatagtggctctctgtttgt

SEQ ID NO: 436039 - DNA, 427 bp, Triticum aestivum
tcgttcacgcgtccgcccacgcgtccgcccggaccagagcaagagagagatttcccccgattcgatccgatcagatccgagatctccatccccgatggcgtcccggagctgcaccttcctggagatcctgctcgccatcatcctgccgccgctcggtgtcttcctccactacggctgctgcagcatggagttctgcatctgcctgctgctcaccatcctgggctacatccccggcatcatctacgcggtctacgtgcttgtcgcgctcggctcggaggagcgggatcgggactacgacacccttgcttaataatcctgcagcaactcgtattgtgtgatgaacctctcgcctggtagttgcgaatcgacgtcgtgtgttcccatctggactgtgtagcgtgccttctttctgtcagcctgtaaatgc

SEQ ID NO: 436040 - DNA, 355 bp, Triticum aestivum
tctcgctcattgcgctgtgcctaccgctactgacgcgcgtgacgaccgctaccgacgcagcaaagatgccggccgaggagctgcgccacggccccgtcggcgccttctcctggctcggcatcgccttcctcaccgtcaactcggccatggcgatccacaggtccaaaggcgacccgtccgcggtcggcttcgtggccttctcctacctcgacctcgtactgctcttctacttccataggaggttcgagagcgccgcgcccggctcaccggcgagacggaggctcaaggtggccgtctgggtcctcaccaccatgctcacggccgttctaagctataaggtggcggctatcatgcc

SEQ ID NO: 436041 - DNA, 424 bp, Triticum aestivum
gcgcaacgcaccgttactcggacaagcacgagtgcaagtttgactaccgcgccgcggccatggacgccatcgccaaggccaacccggtggtgaaggcggagaagcttgacaagatctaggaagggtcccccctacagtcggcagaacataaggtcccaaatcaaatctgcgctacctcgtcatcgtgcgtctttgctgcattatcctttcatcatgttggcttctgcaatcttagttgttgggcaatcgtgatgcatggcacacgcgcctcggcggcagccccaggtccgaacggtctccttgttggctatgttgtgtaagctttatttatggtcgtctctctgcgcggcggaacgggaacggtattgtggctttcgcattttggctagcactctgtaatgtactgctgtttcctcccgtcggc

SEQ ID NO: 436042 - DNA, 516 bp, Triticum aestivum
cgacggggcctccgtcttcctcctctccgcctaccaagagttcagtgagtttggaacggatggaggaccagcagcaaagtctctgaagcccaagttcaacctgtttgtcaagcaggtgtccgccggcattgggatggcggtgccacacattgacatcaagtctgtcattgccttcaccatgtttcttaaagcctttggtggtctccttttcatcatcagcagctcgttcggagcgctcgtactgcttgtttacctggcattcataacccctgtcgtgtacgacttctacaactacgagatggagtcccagcaattcgccaagctcttcaccatgttttcacagaacctggccctcttcggcgcgctgctcctcttcctgggaatgaagaactccatcccaaggaggcactccaagagaaggaccgcaaaggctaagacaacctgaagccagtaaggggattgtgataggaggggaagctatcaatatggaaactcgtcgtgttttacgcatacttt

SEQ ID NO: 436043 - DNA, 321 bp, Triticum aestivum
tgttgatccatgtgaccgtctttttcaacacctctacgttgggtcctggaggaccaatcagtatgaaagtgtcatgtcgtcattcctactggtctattttatgcctaagacatgcaaagttgtggatcgtctgtaagctaccatgtgctatcgtatctcctatgcctatgatatttgctagtaaacctatcgtgcaacgtgctttctatgtccgtacattgttaggtggcttcttattgtgtgcatacaaatgaaccttatttctgaatgattcttcattagtttttttatttttatcatggttgacataagaatgagtgc

SEQ ID NO: 436044 - DNA, 901 bp, Triticum aestivum
ttgcccacgcgttcgcccacgcgtccgcccccgcgtccgctttgttggacctgtgccatcgccgttcgaggacgtgcatggcgcggccatcttcgaggagagcatgacgctcctggacccggagatggatcagctgatccacgacgccgtcgctgctcacgaccacatggggatcggccccgtgctccggcagtgccgtgagctcttcgaggggcttgagtctctcactgactgcggtggtggtgatgggacgacggccaggtccatcgtcgaggcctacccgcacatcaagtgcactgtgctggaccttccaaaggtcatggacaaagttcttcttcccgctgaagaaggagcggttaagtatgtttctggtgacctgttccacgtcgtcccacctgctcaagccgtgttgctcaagcttgttctgcacttctggagcgacgaggattgcatcaagatcctcgctcaatgcaagaaggccattccttcccgagaaatgggaggaaaagtgatcatcatagacatagtgcttggatcttctctagagacaataactgaaaccgaactgctgatggacatgctgatgttcatatgtaccagaggacggcaacgggatgaaaaggagtggagcacgatctttacgaaagcagggtttagcaactataagattgtcaagaaacttggccatcgaggtgtcatcgaggtctatccataaggttggtgcagatgcccatctggtgtgtgttctatatgaatagtagtgtgaaataagaaataaataagtacagtgccttactcgtcaatggaaaatgcaacaaattcttaagtagacgaagtggtaaggggccggtcgcttgagaactgtatgcacgtaaccactcatatgtatgtatgtatgtat

SEQ ID NO: 436045 - DNA, 601 bp, Triticum aestivum
ttattgtttcatgtctgatctcgacgttactctgccatctgccttcgatccttttgctgaggcaaatgctgaggatgctggggcaggctccggcccaaaagattatgtgcatgtgcgcatccagcagcgcaacggcaggaaagagtctgaccactgtccagggcctgaagaaggagttcagctacaacaagatcctcaaggatctcaagaaggaattctgctgcaatggcacagtagtccaggatccggagctaggccaggtcattcagcttcagggtgatcagcgtaagaatgttgctactttcctagtccaggctgggattgcgaaagaaggagctcatcaagatccacggcttctaagccgaagccgcctccgataaatgcccgaaccgccagccggctcttctctatattgaagacttaaggcatctatattgccgcccgcttgttgaaccggtttcttgcttgatgcaagttgtgttgtcacctggttattatgctgctgctgtaccagcatatcagtatggtttgtctaagatgttgccgactaaataaaaatccgtatcgtttggctgaaaaaaataaaaaacgtcactatacg

SEQ ID NO: 436046 - DNA, 345 bp, Triticum aestivum
tctttccacgcgtccggaagctatcaaccttctgggtgctgttaattttgtggcatcatcagataaaaaccagatggagttcctgaaaaattctctggatttcattgtcgatactgcctctggtgaccacccatttgacccttatctcgcgcttctgaaagttcgtggcacaatggcactagttggctttcctggcgaaatcagagtgcatcctgcaacacttaatctgggtgcacggactctatctggcagtgtagttggaggcacaaaggatacccaggagatgataaatttctgcgcggcaaacagaatatacccaaatgttgaggtgataaaaatagacta

SEQ ID NO: 436047 - DNA, 456 bp, Triticum aestivum
ttgtttatccccaaatccccaaccccgactgacgacgagtggatctgttccggcgcttcctgccgccgtcgaccatggcggcttccaactccggcggcatccccatcaaggcggaacaggattcggatggctcggcccagagcacagctgatatgactgcttttgtgcaaaatcttctagttcagatgcaaaccaggttccaaactatgtcagagaacatcattacaaagatagatgaaatgggtgcaagaatcgatgaattggagctgagcatcaatgacctcaaggctgaaatgggcagcgatggtatgacccctactaaagtgaaggacgaagaatcaaagccagcagacagctctgcctgatttaagcagaagtagcagaagcaagtcgtattaggcttggctccatgtcaatatcatcagccattcatcactaacttaatgcatgtttggg

SEQ ID NO: 436048 - DNA, 333 bp, Triticum aestivum
tgtttcttctgcggcgagccgcaccggtgcctcgaggtgccccacatcgacgaccggcagaactgcatcgccggacgccccgaccagcggcctggcgagcagtgcatcgagttcctccaccggccgccggcacagtgtgctgcgcacgggcaatcgtcgccaccgccgatgtacgcgcctccaccgccgatgtactgatacgtggcagacggcaatactgcaatttgtaactgtttgctgcctttgtgccgtgagaaagggtaaaaatgcacacatttggtatatactggaatctttatttttcggaaacaaatgaaataacaatggattggt

SEQ ID NO: 436049 - DNA, 419 bp, Triticum aestivum
cttattcgtccgtaccccgattccccttcccctgtgcgatcgatactctctagggttcatcggcggtcacaccaagcaaggatgactacttcaaggcgtcttgctgacaggaagagtgcgaagtttcagaagaacgtcacaaagaggggctcagtgcctgaaactactgtgaagaaggggaatgactatcctgttggacctatcgcgcttggattcttcatctttgaggtcataggatcatccttgtttcagattatcaggacggctactagtggtgggacggcttaatatcaagctgaaaacaagacgatcattatcagagatttattttatccatgtgtctgggacgcaatatcatatctgtaccctgtagcaaacttcaaccctgatgatgttatgtagagatttaaatcttgtgc

SEQ ID NO: 436050 - DNA, 544 bp, Triticum aestivum
tcgtaccaccaacaaggactattcggacttggcccagacggaggacatcaacgcgggcgtcttcgccaccgacgacttccgcatgtacagcttcaaggtcaacccgtgctcccgcgcctacacgcacgactggaccgagtgccccttcgcccacccgggcgagaacgcgcgccgccgcgacccgcgccgcgtgccctactcctgcgtcccctgcccggacttccgccgcgacccgcaggcatgccgcaagggcgacgcctgcgagtacgcgcacggcgtcttcgagtcatggctccacccggcgcagtaccgcaccaggctctgcaaggacgaggtcggctgcccccgccgcatctgcttcttcgcgcacggcgcccgccagctccgcgccgtcaacccctccgccgcctccatggcctcgccatccccgagctcctcgccttcgccgacgcgctcctcctcctcctcctccaggccggcgctcaccgcgtcgctcagctcgcgggagctcgacttggacgccgacaaccagaaacagtacgcg

SEQ ID NO: 436051 - DNA, 472 bp, Triticum aestivum
gataaagataacagagagaggggaagagcacacgggcccgggaaatatgaacacgggcgggaaagggctgaacgcgacgggcgagtttttccggcgccgtgacgagtggaggaggcaccccatggtggggaaccagctgcgccacgccactccggggctaggcatcgccatcgtcgcctttggtatctaccttgtcggcgaggccgcctacaaccgcctctaccgccgcgccggcgacaaccaccactagatctcccccagaggtgaagtagatggagcaaaccaatgttgatcttttccggtttgatctcataaggtctgcatgaccaccttgtaattcgcgatcaggagatgtgctgttggtccaactagtgttcctggaacgcgtgtcctttaaatctgatactccctccgtccgcaaatacttgtcggacaaatggatgtatctagacatattttagtctagatacat

SEQ ID NO: 436052 - DNA, 373 bp, Triticum aestivum
ttgctacgcgtccgatcaagtctttcatcttcgacggccgagcttacagcatcacgaaggatgtcttgcagctgtggatcaagctgcggctgcggctcaaactgcaactgcggcaagatgtaccctgacttggagaagagcggcgccaccgtgcaggccaccgccgtcgtcctcggcgtcgggcctgcgaaggtgcagttcgaggaggccgccgagtccggtgaggccgcccacggctgtagctgtggcgccagctgcaagtgcgacccttgcaactgctaaggtgcaagcggttgatgcgcttctggtgattgtgccgtgtgtgatcgagtgcgaataatgaaaccgacgccggccgtctggttggtgctgt

SEQ ID NO: 436053 - DNA, 638 bp, Triticum aestivum
acgcttacgctctcgcccacgcgtccgcatcttcttactgggggcaacttgctgctcctcccggatccgaagctcagtcccgtggccacgcagattatctccggaaaatcatagtgcagggtcgatcctccaagtcaaccaaagttggagatatcatgaccgtagagaacaagctgatcacggtgaaacctgaaaccagagtcctgaaagcaatgcagctgatgacagacaagcgtatcaggcacatcccggtgatcagcggcaccgagatgatggggatggtctccatcggcgacgtggtgcgcgcggtggtcagcgagcacaaggaggagctgaaccggctcaacgcctacatccagggtgggtactaggaccccgccgttttgcagggcgtccctttgatgtgaactctacaataacgaccagggtgatgatgacgaaataggccgtgtttcttcgcggacaatggccgttgaacttgaatttgggtgtgtgatgttttcctgcttatttagtgtatatttccgtggccgcgcgcgccgccacgcacttgtttctggagcgtatagaccatccatctcagctgatggtgatagacgcagaataaagcttgggagtgtcctggaaaggatacttga

SEQ ID NO: 436054 - DNA, 393 bp, Triticum aestivum
accatctgcatcaagcattgagggccaacaaactcaagaattcgagacagggacattgaagaaaggtggccacagtggctacagttcaggatacaccgggccgtcgtgagggaattcttttttacccccccttttttgactttctcgtcgatgcaatttgtaaagtccggttgaatttatatgctgacttgacttgtgtgcgaggaagggatgtttgacccaagtatagcttctggtagctgcagccgttgattctttcatatgttgttgaccgatctgcccaccgccgtttgctatgtaattcaaagagctaattgagtgctgtactgttcatacccactcagggttgagtaagagtaacccaacgattctttttaccaaataagatgcata

SEQ ID NO: 436055 - DNA, 884 bp, Triticum aestivum
gggtcgaggcgaagatggacgccttctactcgacctcgtcggcggcggcgagcggctggggctacgactccctcaagaacttccgcgagatctcccccgccgtgcagtcccacctcaagctcgtttacctgaccctatgctttgccctggcctcatctgccgtgggtgcttacctgcacattgccctgaacatcggtgggatgctgacaatgctcgcgtgtgttggaaccatcgcctggatgttctctgtgccagtctatgaggagaggaagaggtttgggctgctgatgggtgcagccctcctggaaggggcttcggttggacctctgattgagcttgccatagactttgacccaagcatcctcgtgacagggtttgtcggaaccgccatcgccttcgggtgcttctctggcgccgccatcatcgccaagcgcagggagtacctgtacctcggcggcctgctctcctctggcctgccgatcctgctctggctgcagtttgccacgtccatctttggccactcctctggcagcttcatgtttgaggtctactttggcctgttgatcttcctggggtacatggtgtacgacacgcaggagatcatcgagagggcgcacctcggcgacatggactacatcaagcacgcgctcaccctcttcaccgacttcgtcgccgtcctcgtccgcatcctcatcatcatgctcaagaacgcatgcgacaagtcggaggacaagaagaagaggaagaggaggtcctgaacgtgttgtcctctgcacatcgtagataccatcaccgtcgccggcgctactggttccacctccactgctaagtacttgtaggaattaagctggcgcagtaacttgtcgccgtgccacccttgttaa

SEQ ID NO: 436056 - DNA, 379 bp, Triticum aestivum
cgtattcgtgggctatagcttactagcagcagggctctcttcttgctcttcgctatctagctccactttgctcgttgtcctctccctcttggatcgatccggccttcggcggccatgaattgcgccggggtcgctcgatgggttgcctgcaggcgagccggataccggcgtcgtcgaccagccacggaggaggagctgcctgtagcgtagctgagctatagtgctcggtcgatctgctgcttcttgggggcgaggaagaagaataaccgaggcttactctcgacgacagcacaaggcggagccagataatttccggtgacgcacaccatggatccccagacatttgtgaggctctcagtcgggcagcttggcctgaggc

SEQ ID NO: 436057 - DNA, 1590 bp, Triticum aestivum
tcgtcgcccacgcgtccgacgcaaactcgttgcacaagaattcctcccaccctcgccgtctcgccgccgtcaccaccgcagctagataagagaaaaaaagagagagaagaactcgtcgggagggctcgagatctgtgttcggagaggggaattcttgaggtcggaatcggaacaagcgggcgcgctcgggatcggggttaccatacaatttttcccaggaacctttagtgaatgtgctaatggagtcaaagggtggcaaaaagtctagcagtagtagttccctgatgtacgaagctcccctcggctacagcattgaagacgttcgacctgctggaggcgccaagaagttctctgctgcatactcgaactgcgcgaagaagccatcctgatatcgtttttggcatccccttcccgtagtttaggatttttatgcaattttattctgactcttttctcccaccaatctctctggcttgctgcttcacgataatcgaccagttctctagtctttctccctctgttcctctctgctctgctttctgactcaaactgcaacaatggctgccccgacctctgcgatcgggtttgagggctacgagaagcgcctcgagatcaccttctccgaggcatcaatctttgccgaccctcatggtcgtggcctgcgcgccctctccagggcccagattgactctgttcttgatcttgcacggtgcaccattgtgtccgagctctccaacaaggacttcgactcctacgtgctatccgagtcgagcctgttcatctactctcagaagattgtgatcaagacctgtgggactaccatgctcctgctcaccattccaaggattctcgagcttgctgaagagctgtgcatgccgcttgctgccgtgaagtactcccgtgggatgttcatcttccccggcgcacagcctgctccccacaggagcttctctgaggaggttgatgtcctgaaccgctacttcggccacctgaagtctggtggcaatgcttatgtgattggagacccagcgaagcctggccagaagtggcacatctactatgccaccgagcaacctgagcagcccatggtcaccctggagatgtgcatgactgggctcgacaagaagaaggcctctgtcttcttcaagacttctgctgatggccacgtttcctgtgccaaggagatgaccaagctctctggtatctctgacatcatccctgagatggaggtctgtgacttcgacttcgagccctgcggctactccatgaacgccatcaacggatctgccttctccaccatccatgtgacccccgaggacggcttcagttacgcgagctacgaggtcatgggcatggacgcctccggccctggcctatggcgacatcgtcaagagggtcctccggtgctttggcccttcagagttctcagtggcggtcaccatcttcggtggccgcggccatgccgccacctggggcaagaagctcgacgccgaggcatacgactgcaacaacgttgtggagcaggagctcccctgtggaggcgtcctcatctaccagagctttgccgcgaacgaagaggttgctgtctct

SEQ ID NO: 436058 - DNA, 762 bp, Triticum aestivum
tttttgatccgttggcctcctgttcatccgctcccccctcccgccgccgcctccagcctagggtttcctcccgccgcccgtccgccccacccgccgccatggcccgccgcagcggaggaggaaggtcttcccgccctgctccacgtgctgctccagtgagaaacccaccagcgccagcccgtccagctcctccacctgctaccacccagagcagcggtggtggtatcatgagcggaattgggtccaccattgctcagggcatggctttcggtactggcagtgccatggcgcacagggctgttgatgctgcgatgggtccccgtaccattcagcatgagactgttgtcggtgaggctgctgcatctatgactccaatggacaacgctgctgatgacaagtgtggcaacccttccaaggccttccaagattgcatcaaccactacggcagcgacatcagcaagtgccagttctacctcgacatgctgaacgagtgccgccgtggaggagcaggagctggtgcaactctttaagctactatctttgcttgattgcggcttaattgggcggaacctgttttcagtcatgatgatgatgatatatatctcctaaataattcattggcaatattatgaacctatgccacagcttgtgtctattacctaccctagttcgtggtctctgttgtcccgggagtatttccttgtattgatgttggaattaccttcatggcagtgggtttataaatatggagtttgaataaaa

SEQ ID NO: 436059 - DNA, 686 bp, Triticum aestivum
tgaatttccagacgagccacggcaagatcaggttctactgctgggacacggccggacaggagaagttcggtggcctccgtgacggatactacatccatggccagtgtgcaatcatcatgttcgatgtcacctcccgactcacctacaagaacgtccccacctggcacagagacatctgcagggtgtgcgagaacatcccgatcgtcctgtgcggcaacaaggtggacgtgaagaaccggcaggtgaaagccaagatggtgaccttccacaggaagaagaacctccagtactacgagatctctgccaagagcaactacaacttcgagaagcctttcctctaccttgcaaggaagctctcaggggacatgaccctccggttcgtcgaggagacggccctcctccccgccgacgtgaccgtcgacctcgccgcgcagcaacagattgaggcagagatagcagctgcggcggcaatgcccctcccggatgacgatgatgacaacatcatggactgagctgatcaattggaggctgtgcctagtttagtagcagcatatatagtttcaatcaaactcttataagaagtgagacttctgtatccgtatcagacattcagtaggcatctgatgacgatggtttgtgcgatagttccatgtttttctcagtggtagttgatctgagatttcttt

SEQ ID NO: 436060 - DNA, 457 bp, Triticum aestivum
cctacgcgtccgcaaaaccagaccaaatcttcggcgagcccatcggcacattctgagagcggagaggaagcaggaggcggcggatcatggagaggagactagaagatgggtggcggcatggaggtgaacaagaaccgctggatcgaggagtggaacgccggccgggagaacctcgagctcaacttccgctttacccgccgcagcctcgccgtcatcggcctcttcggcctcgccgtccccatcctcgtctacaagggcatcgttcgcgaattccatatgcaggacgaggacgccggccggccgtacaggaagttcctgtgagcgtcgcctccggtggatgtcgagactccgagccgtctgcagggtttcggtcagggagaaggaatctccattcggtttgtttcccgtactgttgtagtcagaccggagtattttgttctcacatgttgtgcgatat

SEQ ID NO: 436061 - DNA, 607 bp, Triticum aestivum
ggtaccggacgtacaattcgcgggtcgacgggtaaggggattgttgcgtatgggataaagagaacttgatgctttaatgctatggttgggttttaccttaatgatctttagtagttgcggatgcttgctagagttccaatcataagtgcatatgatccgagaagagaaagtatgttagcttatgcctctccctcaaaaaaaattgcaatagtgattatcggtctagttatcgattgccttgggacaaataacttctctcgtagacaaaaagctctctactaatacgtactttgttgcgtctttatctaaacagcccctagtttttgtttacgtgctctttattaattcttgcaaacctgtcctgccacacctacaaagtacttctagtttcatacttgttctaggtaaagcgaacgccaagcgtgcgtagagctgtaccggtggtcgatagaacttgagggaatatttattctacctttagctcctcgttgggttcgacactcttacttttcgaaaactgttgcgatcccgtatacttgcgggttatcactccaacacaaagtgcttgccaaaggaaaaagtgtaaaaaggaaagttgatgatccct

SEQ ID NO: 436062 - DNA, 749 bp, Triticum aestivum
tgaataaacgttattatcttgcaaacctatccaacaacacctgtgaagtacttctaatttcatacttgttctaggtaaagcgaacgtcaagcgtgcgtacagttgtatcggtggtcgatataatttgagggaatatttgttctacctttagctcctcgttgagatcgacactcttacttctcgatgactattgcgatcccctatacctgtgggttatcactctccacatctattggcgtaagctgatggacaaaacgacttgtgcggccaacgccacgggagaatacgacagaagtcgacggggatgagtctggctggcatgaagcaaggggatctaatcatttggtatgttgagcagcagaatgcccaaggtgcatatagttctacagaagaggtgaaggaggaagtaaagtgcatcaaagccattatagagaggctgatacagagggaaggccatcttgtagtcatagacgaaggaacagcggcagcagaaggtgctgcagcaagggcatcggagcacagaatcctggctgttaacccgaactacgtcattgattgattaaccagctgaggacacagctaactagatccatcatatgtggttgaccaatagagcagacattcaaacggaagacatcctgttgtcatatgctctagaaatgatatgttgtacctgccatccccttcccaaggaagcataagatctctggaattgtatcttctatccaaggttgaaatgtggtaattaa

SEQ ID NO: 436063 - DNA, 672 bp, Triticum aestivum
ggggctcaccaggccacatccggactatgaaatctatgcctgcccacttcgcccaccctgtggagttcaaccaactgcttcagttggtcactcagaggcatcaagtgttcggctccagcatactgggaccagagcagtttctccgttgagctcccctcctcggcatggtagaactccgcagcatcagatacgctgcgtggcagatctgcgaatgcccctggagaggacttgatacttaatgctatggttgagtttcacgaccttaatgatctttagtagttgcggatgcttgctaggggtccaatcataagtgcatatgatccaggtagagaaagtatgttagctcctgcctctccctcatatagaattgcaagaatgattaccggtacttgttatcgattgcctagggacaaatgactttcttgttgacaaaatccatctacttttactttcccgcaatttattcatagttttattctcgcaaagtactcgtagtttattcttgcaaaatagttcatacttgttctaggtaaagcagacatcaagtgtgcgtagagttgtatcggtggtcgatagaacttgatggaatatttgttctgcctttagctcctcgttgggctcgacactcttatttatcaaagaaggctacaaaagatcccctatacttgtggg

SEQ ID NO: 436064 - DNA, 403 bp, Triticum aestivum
ttggaaaaaccctagccctcgcagccgcagcggcgcgcacccctctccctccttcctgaagacagcgccgccgtcggccagagcacaggatggcgaccgtccccgctcccgcagccgagaccgcggcctccaccgcgcgcacggtgaaggatgtcaacccccacgagttcgtcaaggcctactccgcgcacctcaagcgctccggcaagatggagcttccagagtgggttgacattgtcaagactgcaaggttcaaggagctgccaccttctgatgctgactggtactacatcagggctgcctcgatggcaaggaagatctacctgaggcagggaatcgggatcggcggcttcagaagatctacggtggccgtcagaggaacggttcacgcccaccgcacttt

SEQ ID NO: 436065 - DNA, 522 bp, Triticum aestivum
cctcgcgttcgcccacgcgtccgctcattccttcctaccacctcggcaccaccagcccaagcagagccatggcgcccaacggagacaacaccgtggccaacgtccacagcggcatcgacagcaccaacaagacgctgctcaagagcgacgccctctacacctacatcctcgacaccaccgtcttcccccgtgagcacgagtgcatgcgcgacctgcgcctcatcaccgacaagcacccatggggctacatgcagtcgtcgtcggacgaggcacagctgctggggatgctgatcaagatggcgggcgccaagaagacgatcgaggtgggcgtgttcacgggctactcgctgctggccaccgcgctggcgctcccggaggacggcaaggtggtggccatcgacaccgaccgcgagtgctacgaggtgggccgccccttcatcgagaaggccggcatggcgcacaaggtggacttccgcgagggcaccggcctggcgcgcctggacgagctgctcgtcgaggacg

SEQ ID NO: 436066 - DNA, 380 bp, Triticum aestivum
ttgtgcttgctgagtggataaaaacaagctggggggaatcttcggacgtgagccaggcccttcgccaggatattagcaaacactgccagttaacaagtgctacagccccggtcgacgatgaactataacagcacgtgttagctccccgtatttactcgacaaagaaaagcagatgaatgcctgagaagcgtcaaagaagaagctccagtaggatatgaggctgtgatgtcttagcgtctgcatttttacacactcgcattgttgtcttaaagagggacttgcagattttcacatatgattactgatgtattgagaacattcaaactttgaggaatttctgcatgctgaattacagttagcagcatggtatgattcgctga

SEQ ID NO: 436067 - DNA, 347 bp, Triticum aestivum
tggtctcgtgggttgggacacaagcggataaggaggatgtggaagcacacatccaagaggagccgctgggatgagatgttcgagtacatcaaccgcgccagatatagtacactcgatgacttatattgcctgctggattaaataagtggcgtgttgtaacccaccaccatcaagtcattccgtgctatataatgtcaagatcaatcaagattagggtatgatgcccatgtaaatcttgtggttgtcctgacttacttttctggcttctatggaggataagtatgtgtgtgctggttgtactatgattgtgtaatgatatatattaaaatttctactttgtacctttt

SEQ ID NO: 436068 - DNA, 602 bp, Triticum aestivum
cgggtcgacccactttttttttgatgtccttcttgtgatattcagaaacctttatgaagacaggtccctggagttgaagtctttgcatgatgattttctgtgtctccaagccgtaggaagtgagctttgtaaggacatcaggatgatgaacaagaagcttggtgattttgaattcctggatgaccatctcggcaaagatacaaccatgagcatttgtgaccggtctagtgaagaaaataatcacaaagaagttgacggcgctggccttcaagaatcaaatgaaatgctactggaggagatactcaagttacatggaaatgtgggaatgcttatgagcaaggagaaggcttctgtcgacatcagatcctgcaatgaggagatcacaaagttggtatcccacatgcacatggccatcatgaatgcagctctgttcaaggagaagatcattgagctcatcgtaacatgtgagagctatgagataagtgccatggtgcagaaggaggtgctcaaggaagatatcacccgaaggaattcgtatgtggacgagctgaaagacaaactaaatgctgtagagattgagaacagaagactgaaggtcgatc

SEQ ID NO: 436069 - DNA, 398 bp, Triticum aestivum
aagtcgacgggggccgccatctccttaggtttcagttctcctccgcctccggtctcgagagctcgccagaatggtcgcccacaggttccaccagtaccaggtggtgggtcgcgcgctgccgacccccggcgatgagcagcccaagatctaccgcatgaagctctgggccaccaatgaggtccgcgccaagtccaagttctggtacttcctgaggaagctcaagaaggtgaagaaggccaacggccagatgctcgccatcaacgagatctttgagaagaaccccaccaccatcaagaactacggcatctggctgaggtaccagagcaggaccggttaccacaacatgtacaaggagtaccgtgacacgaccctcaacggcggggtggagcagatgtaca

SEQ ID NO: 436070 - DNA, 716 bp, Triticum aestivum
tttctcacgcgtccggacgacgaatcattacagagcattattgacatgacttctgactggacaaaggaagaaagagagatgttgagacggaaggtgccagtaactggtttgaagacgccattccgggatgggtatgtaagagatttagctgaagatgttctccagttagctaagaatggattagaaagaagaggatacaaggaggttggtttcctgagagaagtcgacgaagttgttagaacaggagtgacacctgccgagaagcttctgaatctatacgagacgaagtggcagcgcagcgtggaccctgtgttcgaggagttgttatattgatatgtactgatatcgtatataacttcggtggacgctggacaaggtggacagggtcttcagattgtatccccatacaaaatcccgtccccaattctacaagccacctgaccagggaaacctactctccggtctcgtggctgcgaataattttgagctcggaacactctgtttgtggcttgccgcctttcttttttcggctgtgtggaccttttacagcttctgatttttctcgcatctccagggagccggaacaaacacctgtttgtaccgatccccttttcatcttttcctgatgaacggcttgtattccgaataaatccacctcgcgtgatgatggaaggaacctgatttccagaaataataattcagagtgtttgagacgt

SEQ ID NO: 436071 - DNA, 583 bp, Triticum aestivum
ggggctctgtgaggataatgacccaatggacgtccttgtcctgatgcaggaacaagttgttcctggttgcttcctgcgtgcccgtgctattgggcttatgcctatgattgaccagggtgagaaagatgacaagatcatagctgtctgtgctgatgatcctgagtaccgtcacttcagagacatcagtgaacttcccccgcatcgcctacaggaaatccgtcgcttctttgaagactacaagaagaatgaaaacaaggaggttgcagtgaatgatttcctcccagcagaagatgccatcaacgcaatcaagtactcgatggacctctacggttcgtacatcatggagggcttaaggaagtgatctccagttggcggactgcggatgctacgcgatccgccctacggcttatcaatagtacgacaaacatctatgttaacatgatgatcgaaaaccatcagtctgttggggatctatatataccttctgtccatgctgagtcaagcatgggtacattttccttccgtatatgccatgtcaggtccaagtatgtgacctcttgctggaaccttttttgtcaaaccg

SEQ ID NO: 436072 - DNA, 429 bp, Triticum aestivum
gcccgtggtccacgaaccatttcccaaaatttccccactcgcgaaccctaacttcgaccagcctctcgccccagatcccctccccctactctcaccaggagcagaacccacccgctcggaccgctccgcgtaatcgccatgtggggcggacgaggaacccgttgatcccaagaagtatcttgaggagcggtgcaagccacagtgtgtaaaaccactgtatgagtatgagaaatgtatcaagagagtcgaggccgatgatactgggcacaagcactgcactgggcaatattttgactactggtcatgcatcgataaatgtgtagcaccaaagctctttgaaaagctgaaatgatattggggcgctactttcagtgagtgagcctggtcattggccagaaccttgttcaagttgaaatatttgtcgagtct

SEQ ID NO: 436073 - DNA, 565 bp, Triticum aestivum
ttgcccacgcgtccgctgtaagagaaaaggcagatcttctttctgattctcagagaattaaatatactattgagactttcacgaagggcatccctgttgctaggacgtacttggattccctccagcagctcaggaaaaagagtggtctcatagatgatctgggtatcgaggatatgatgatggaagctctcgagaaagttgagaaggacattaagaagcctcttctgaggagtgacaagaagaacatgggtctcctcttggcagagtttgacaagataaacaaaaagcttggcattcggaaggaggatcttcccaagattgaggaaaatcttgaaatggaacttgccaaagctgagctgacggaacttaagaaggaagttgttgaagcaatggagggccaactaaagagggaggagtttaaagatgaggcgatgcctgacgtcaggaagttggacattagaaacttcctctaagtccctgattgatgataacccttggggtgaccgatctgtgatttttcttttcaagtgacggcaggtgctgttagccacaccgaatggatgtt

SEQ ID NO: 436074 - DNA, 628 bp, Triticum aestivum
tttttacccggagggaggaagcagcagcagcaggtcagcgagggaggagtagaggggatggcggacaagaagggcggagccccgcgcaaggacgaggtggtgacccgcgagtacaccgtcaacctccacaagcgcctccatggctgcaccttcaagaagaaggcacctaatgccatcaaggagctcaggaagtttgcacagaaggccatgggcaccaccgacgtccggatcgacgtgaagctcaacaagctcatctggagcagtgggatcagaagcgtgccccgtagggttcgcgtgaggattgcccgcaggaggaacgatgaggaggacgccaaggaggagctctactcactcgtcaccgttgccgaggtgcctgctgagggtttgaaggggctgggaaccaaggtcgtcgatgacactgagtagactcttttctttatctacatcgttagaatgagctgttatttggaattgcaccagcatgctttttgtatcccgcagaagttttggagtatggaatatcgggagctatctattttccttcatctaaatcttgatgattggttttgtccttcatactgtgctcgttattggcgtcaatacaggatgtgcagttgagcttgcaaaa

SEQ ID NO: 436075 - DNA, 478 bp, Triticum aestivum
ttgtttatcgcgtccgccgaaatccccaattccccaccccagagcgtcagcgagagagatggcgtcggcgacggagatgcagtcgctggcaccgtcgggctaccgccgggcgccggagatgaaggagaaggtggaggcgtcgtcgatcgacctggaggcggggaacggggagacgctctacccggggatctcgcgcggggagaacgccctccgctggggcttcatccgcaaggtctacggcatcctctgcgcgcagctggtcctcaccaccgtcgtctccgccatcaccgtcttccaccccaccctcaacgccacgctctccaactcgcccgtcctcgcgctcgtgctcgctgtcctccccttcatcctgatgatcccattgtacatctatcagcacagacaccctcacaatcttgctatcttgggtttgttcactctgtgcttgagcttcagcattggtgtggcttgtgcaaacact

SEQ ID NO: 436076 - DNA, 444 bp, Triticum aestivum
ttgggcctcatcaccttccacagcctccgccgcaacgcgccgctgctgggcctgggcgccatgtccgacgacgacctccgcgggatgctcgccgagggcgacttcgacggcgacggcgcgctgtcccagatggagttctgcgtcctcatggtcaggctcagccccgacctcatggaccagccccgccggtggctcgacgacgccgtcgcccaggcctcccacttcctcttcaccagctaggcggagcatctggtgtcgatcggataggaaatgaatcttcttcttcgctgttgttttgtcttctctcccccgctgctcatagagtcaggattcaagaaaagaaagggcactgtcgattggttgaatgatttcaatgtgtgctctcccgctctctgatgtatcccatgggaatgtgtgttaatcgacatacgcttcttaattttc

SEQ ID NO: 436077 - DNA, 555 bp, Triticum aestivum
  unsure (1)..(555): unsure at all n locations
gactcgctgaaccccttcatgcacgcgcgcggggtggccttcatggtggacaactgctcgacgacggcgcggctggggtcgaggaagtgggcgccccgcttcgactacatcctgacccagcaggcgttcgtgacggtggacaaggacgagcccatcaaccaggacctcatcagcaacttcatgtcggaccccgtccacggcgccatcgaggtgtgcgccgagctgaggcccaccgtcgacatctcggtgacggccgacgccgacttcgtgcgccctgagctccggcagtcctcctaggctcgccccttgcacctaagttaactaagctgcgccgggccggtcggggcccggcaggagagttggtttttgatggatggacattcatggactgtaatgtatgtgtgcgactagctggtttgaactcgtgagctgctgctgggtagagtgagtcgtcttcgtttccagagtaataaagttggttcgtccggttnnnnnnnnnnnnnnnnnnnnnnnnnnnnnnnnnnnnnnnnnnnnnnnnnnnnnnnnnnnnnnnnn

SEQ ID NO: 436078 - DNA, 373 bp, Triticum aestivum
tctgttttcgtgtattaaatgcttatgcaaggttccttgatgacacacctgagctagtgaagattgttagagtatcatgtggagagtaccatgcagcagctatatcagaaaacggggaggtgtatacatggggacttggaagcctggggcagcttgggcatcgctcgcttcagtctggagataaggagctaatcccaaggcgagttgttgcccttgaaggaatagtaattagggatgtgtcttgtggtggggttcactcttgtgctgtgacggaaggtggagccctctactgttggggaggaggacatgtgggccaactggggcttggacctcagaatggtttcttttcatgcgctcttaatggatccgacat

SEQ ID NO: 436079 - DNA, 413 bp, Triticum aestivum
cctacgcgtccgcacgagttctggatctgcctcctgctcaccttcctcgggtacatcccggggatcatctacgccatctacgccatcaccaagtaaatcaaggcagccgccccgagtgttccggcggaatagtagtatatttccatgatgatctcgcctgtctattcctagcgtgctcgggttattgcttgtgtgggttctttgaattcttttccgtgtacgttgacgatgcgaatttctctgtggtttccatggaccgtgtgaagagatttcagcttctttatatgtactatgtatatgcactagtatcatgtatgggagtgtatgcatacagtacttattgttgaagttagattaccgcctccctgttcaagtctggaatcggcagtgatgtgtatgtagtcgggtttctc

SEQ ID NO: 436080 - DNA, 399 bp, Triticum aestivum
ctctcgcgtccgatccagctctgctcagctctgcctctgccgctgcctctgccgcctctcctccacccaccgagtgaaagagctctccatccgacgaaagatcgaccatggcgggcacggccaactgcatcgacatcatcctcgccatcatcctcccgcccctcggcgtcttcctcaagttcggctgcgggcatgagttctggatctgcctcctgctcaccttcctcgggtacatccctggtatcatctacgccatctacgccatcaccaagtaaaatcgggccgtcccaaagcgttccgcgatgtaatattttcaggatgatgatctcgtctgtctagcccctccatgccttcgtgggttcttttgattcttttccgtgtgcgttgatgatgcgaatt

SEQ ID NO: 436081 - DNA, 291 bp, Triticum aestivum
tctgtgattgaggtctatccataaggttgtgctcccaaagtaagatgcttatatatgttgtggattgttgtgtgctcgctctaaggatgcaaaaataaaggagtgccttgtcattttccaaacaaaagtcctgggtagatcatagaatagcaaggcggttatgccttgttaccttttgatacccgtggaactttcttttggaaaaaatagtatgcagatagagtgcttatcatatatgtactgtgtacaatatcatacaccataatatcaagtcatgtatttgttatccga

SEQ ID NO: 436082 - DNA, 574 bp, Triticum aestivum
tttgtctaggcaggggcttggaaaagcaagcttgaaccagcatctagggagttgtttgacttcttgcccaaaaccattcaggagcagcttttgcttgaaagagatccccatggcaatgttcaggttgcgaaaattgaaactgagaaaatgcttattgccatggttgaaactgaattggagaagagaagagcggcggggaagtactctgcacatttcagaggccagtctcacttcttcggatatgaaggaaggtgcggcctccctaccaattttgattccagctattgctatgcattaggctatggtgctggtgctcttctccaatttggcaagacaggacttatttcgtcggttggtaacctggctgctcctgtggaagaatggactgttggaggaactgcactgactgcgttgatggatgttgagaggaggcatggcaagaacaagccagtgatcaagaaggctatggtggaacttgatgctgcgccatttaagaagtttgcctcgctgcgagatgaatgggccagcaagaaccgatacatcagccctggtcccatccaattcagcgggcctg

SEQ ID NO: 436083 - DNA, 418 bp, Triticum aestivum
gcgtgggcgggtatattggagctccgatggagtggtgtcggcatcgaggactggtggaggaacgagcagttttgggttattggtggcacatctgcccatcttttcgcagtgttccagggtctgctgaaggtgttggccgggatcgacaccaacttcacggttacctcgaaggcaaacgaccaggacggcgactttgccgagctatacgtgttcaagtggaccaggctcctcatccctccgaccaccgtcctggtgattaacctggtgggcatggtggcaggcatatcatatgccatcaacagcggttaccagtcctggggtccactcttcggaaagctcttcttctcaatctgggtgatcctccatctttactccttcctcaagggtctcatggggaagcagaaccgcacgccaacca

SEQ ID NO: 436084 - DNA, 578 bp, Triticum aestivum
  unsure (1)..(578): unsure at all n locations
ttttctggccgcagtacgtgctcctgggcgcggcggacgtgttcgccatggtcggcatgcaggagttcttctacgaccagatgcccgtggagctcaagagcctcgggctcgcgctctacctgagcgtccttggcgtcggcagcttcatcagcagcttcctcatctcccgcgtcgacggcgcgacgaggaggggcggcgggacgagctggttcgccgacaacctcaacaggggccatcttgattacttctacctgctcctcgctgctctcagcgcgctggagcttcttgctttcctctacttctccgcgacttacatttacaagagaaagcctgtcaatgttcactgaccgagactgatacatccgtctatgtactatggatttgtggccaggtatacagtacaattgcagttagcatcagtaaagttatacgagtacgctgacgaccgaccctcagattttttttctttttttgnnnnnnnnnnnnnnnnnnnnnnnnnnnnnnnnnnnnnnnnnnnnnnnnnnnnnnnnnnnnnnnnnnnnnnnnnnnnnnnnnnnnnnnnnnnnnnnnnnnnnnnn

SEQ ID NO: 436085 - DNA, 725 bp, Triticum aestivum
ggcacgccgcggattcacctcggctgttcgtctccacattattctctccggcggcggcgactcgactctcggcgaggggcggagatgtcctacctactcccgcacctgcactccggctgggcggtggaccaggccatcctcgccgaggaggagcggctggtcatgatccgcttcggccacgactgggacgagacgtgcatgcagatggacgaggtgctgtcaggggtggctgagaccataaagaactttgcggtgatctacctcgtcgacatcacggaggttcctgacttcaacaccatgtacgagctgtatgatccgtcaacggtgatgtttcttcttccgcaacaagcacatcatgattgatctcgggacgggaaacaacaacaagatcaactgggcaatgaaagacaagcaagagtttgttgacattgtggagaccgtctacagaggagctcgtaagggccgtggtctggtgattgctcccaaggattactccaccaagtaccgttactgaggtatctgtgcctggctattcatgtgcagtgtgtggcctgctctgttccgtgatatgcgctgtgtgacccttgatgtaatgtctgtcaactttgaaagtgtcgcgtaactatgtatttgtatcttgaatatcaacatgtcataaacctgtaaccctttgaaacaggacctgctgtctattggtattactgattaaagtgatatttggtttg

SEQ ID NO: 436086 - DNA, 485 bp, Triticum aestivum
ttgagttcccttctcgcttcctcctcaccccgcactgccccaccgcgccggccccgactccgactccgacactccccggcggcgcgcgctcgccgagctcggtcgcgctgcggttcggatcccccggaggcgtgcggcttcggcgcgggcgagggtcggcggcggtcgcgatggcatccgacgggcgcgtggagcggatcgcgtccagcatccgcgccatccccaacttccccaagccagggattttgtttcaggacatcacaaccttgcttctcgatccgcaggcattccgtgacaccactgacctctttgtcgagcggtacaaggacaaagacataactgtagttgctggtgttgaagccagaggattcatttttggtcctcccattgcattagccataggtgcaaagtttgttccaataaggaagccgaaaaaattacctggtgaggtgatatcggaagaatattctctggaatatggcact

SEQ ID NO: 436087 - DNA, 382 bp, Triticum aestivum
tcttccagaggtgcagtggagaatggcaccgccgcagagccgaaccgcatcgttgactgccggtcataccctctataccggttcgttcgcaaggagctgggaacggtgtacttgaccggagagaagacacggtcccccggggaggaggtggacaaggtgtttgttgctatgaaccagggtaagcacatcgacgcgctgttggagtgcctcaaggagtggaacggcgagcccctgcctctctgctaatcagggagatgaagagaagatgctgtgcttcaggattctgaaggctcccgttgttctgaactgataatgctactgttgtttgatttcgtcctttctctgtttttccactcttctaaaacgttggtgcatgcaacgt

SEQ ID NO: 436088 - DNA, 384 bp, Triticum aestivum
tctgtcacgacagatttctgagctgggcatttaccctgctgtcgatcccttggactcgacatcaagaatgctttctccccacgttctgggtgtggatcactacaacactgcccgtggtgtccagaaggttcttcagaactacaagaatcttcaggatatcattgccattttgggtatggatgagctcagtgaggatgataagatgacggttgctcgtgcaaggaagatccagaagttcctgagccagcctttccatgttgccgaagttttcactggtgctccagggaagtatgtggacctaaaggagggtgtccaaagtttccagggtgttttggacggcaagtacgacgacatctcggagcacgcgttctacatggttggagg

SEQ ID NO: 436089 - DNA, 732 bp, Triticum aestivum
tttttgcgatttcgattggaatcggagccagctccgctgcctgattagccggccggccccggccccgtctccgtccccatggcgtccaagcggatcctcaaggagctcaaggacctgcagagggatccccccacctcctgcagcgccggccctgtggcagaagatatgttccactggcaagcaacgatcatgggcccatcggaaagcccatatgctggtggtgtatttttggttactattcacttccccccagactacccattcaaaccaccgaaggttgcatttaaaacaaaggttttccacccaaatatcaacagcaatgggagcatctgtcttgatatcttgaaggagcaatggagccctgcattgacagtttcaaaggtgctcctttcaatctgctctctactaacggacccaaaccccgacgacccgttggttccggagattgcacacatgtacaagagcgaccgtgcgaagtatgagtccacagcgaggagctggacccagaagtatgcaatgggctgaccctggtagccgcgcgtggaggatgatgttggggccatcttcgcttgttacacctaatgtatctttgttcctgttctgctgctgctatatgggattgtactgtccacctgactgaattcaagtgtcatattgtgaagtgatggcaaaaggcctctaatgggtctatgggtgcacccattcaacaaattaatagagatgggaactgaa

SEQ ID NO: 436090 - DNA, 371 bp, Triticum aestivum
gtggtcgctcctccctctcgattccgatcggagtcgcatctagctccgccgcttgattagccggcagccccgtccccatggcgtccaagcggatcctcaaggagctcaaggacctgcagagggatccccccacctcctgcagcgccggccctgtggcggcagatatgttccactggcaagcgacgatcatgggtccatcggaaagcccatatgctggtggtgtatctttggttactattcacttccccccagactacccattcaagccacccaaggttgcatttaaaacaaaggtttttcacccaaatatcaacagcaatgggagcatctgtcttgatatcttgaaggagcaatggagccctgcattgaca

SEQ ID NO: 436091 - DNA, 358 bp, Triticum aestivum
gcgctagacttaccgcaggtttagggaggggagagagctctagtttcgtcgctgctcctgaattgatcgttcttttttctctctctctacccgcgccaccttgctgcatcggagggattgctaacagagaaattagtagccagcaagaacgcggatcatgatcgcgaatcatgcgcccggtcggtagatttctttgatccgtcttgtttgttcaccttgctgtatagaaagatgagagatcagtgatcggaaccgatgcattctgagttagagagtatctgttcatctgcacggggtgcaaatatcagtttctgtaccaccatggagattactatctgaaatggagtctgcttttctc

SEQ ID NO: 436092 - DNA, 621 bp, Triticum aestivum
ttggttttcggttggtatcttctgtttaccaaagcatgctatcattcctctgcacaaccatcccgggatgaccgtcttcagcaagatgctcttcggctccatgcacctcaagtcgtatgactgggctaggagtatctcggaggctggcactactgcgctcaccacctcagacggggctcgtctagcaaagatcaacacaaacaatgttgttgacgcctcagctgataccatagttctgtacccggagaacggaggcaacctgcactgcttcacggcgctgaccccttgcgctgttctcgacgtcatgggacccccttacagcagcgctgctggcagggactgcgcgtactacagcgagacccccttctcaaacacagctggtgtggctgacgtgcggtactcctggctcaaggagattcccaataccttccggatgaagggcgtaacgatgccgcgggacttcgtcgtctaggaacctgcatgctgaagggcgctcccgccgtctagcttctttgtgtagataacagctgtaacctgcgaaaggcaggtagtcagtcagttgtcagtcggtccaacctagctctcaggctagcaaactcttttttttttacccttacccgt

SEQ ID NO: 436093 - DNA, 534 bp, Triticum aestivum
cttacgcgtccggacacatcgccccaaagtaggtcgaatctaagcgatggcgtctcgtctgcttgcggcggcctcctcctcctcctcgtcttcctcccccctcgctcgcctcatctccagccgccgtatggccggcgccgcagatcaccacggatcgacaaaggtgaacatgtggcaggagcccttgaaccccggcaactggaaggaagagcactttgtgctaaccagcttagcgatgtggggcgctattatatatggtggattgaaggcgtttggcgggaaaaaagaagtgaaaaccgaggcggggtcagcgccagcagcagcaccggcacattaaacttcatccgagctttattttcttaccacaatctgttttaagtatgttgttgacgataaattgagaccaagtttgtaaggctggcaaggttaaggagctgcgctgcccagccaccatgaataatctgaacgtggtgtaacttttcatccaacaatttttctactacaggaagttggaaatatgctattttctgtgtg

SEQ ID NO: 436094 - DNA, 352 bp, Triticum aestivum
ttgttcctcctccccgttgagagtccccccgggttccccggctcctctctctttctcctccggcggcgccgctgcttggagtggggatgagaggggcgcttgggctgctcatgtctatagtagtagtaggtgtaggtgtgccgttttagtggtgtttggccttgtgccgtggattggcgtcatgccgtcggggagttggtcaccggagcttgcaagcagcttctggtggtcgccgttggagccttctgctctgcctccatggtggaggcctaaggaaggagccggatctggcgaatccccccataataagcttgttgggccactggatcaaacctgtgtggttattctctcg

SEQ ID NO: 436095 - DNA, 503 bp, Triticum aestivum
ttgattgtctcgaccggtgagtcacctgaatgggacgaggcctttgcatgggcttttgacagccctcccaagggccagaagcttcatatctcttgcaaaaacaacagcaaattcggaaagaaatcgtttggcaaggtgacgatccagatcgaccgggtcgtcatgctggggtcagtcgccggagagtacaccctgctgccggagagcaagagtggtccgaataggaacctggaaatcgagttccaatggtcgaacaaatgacagcatctacagaattaggcgcccgtgtaagttaaaatatataaagttaagagtggttttcttgtttcacatcctctgctaaatgttaccctgtttgtgcatcagtgtaaatagccggcagagaaagtcgttttttggttgttgttgttgtactttcttctgtgagataaaaacagatgagatcagttgttttttgtactgattgtaatggaccgaccgattcattattttttcgacgggat

SEQ ID NO: 436096 - DNA, 421 bp, Triticum aestivum
tcgcccacgcgtccgcttgtcgttgggctctgggccctgctcctgctttctctcctcgccgtctcctccgccgaggaattcgatgtcttctaccttggtcagcaatggcctgggtccttctgtgacacgaagaaggggtgctgcttcccggacaccggctagccggcgacggacttcggcatccacgggctgtggcccaactacgccaagtgcaagacccgcggcgagctcgacggcgccctggagatggtgaccaagcgcaagaagaagtgctggccggagaactgcaacagcgagcgcctcaagctctgggagatcaaggacctggtgacggagctggacgccaactggccgacgctggcgtgcaagggcggcaagagcatcgagttctggacccacgagtgggagaagcacggcacct

SEQ ID NO: 436097 - DNA, 234 bp, Triticum aestivum
tcgtttgtttttccttgccatcgccatgagtcgatttagtttgatttgaatgaatccatgcatccctgggtcgatcggtcggtcagtagtcgagtcagtttgtggtgcgttcgtgcgtggagctgtaaaagcgtggatgatctcgatctgggacgaccgaccctgtcaatttgcttctgtaaaactgtgaattcgcccgccccgcccgagtaatttcaagttcagttgagttgg

SEQ ID NO: 436098 - DNA, 367 bp, Triticum aestivum
tcggctgcgggaggtgctgcagttctcgaacgcttgcggcgccatctgcaccaccaagaagggagccatcccggcgctgaccaccaccggcaccgacctggagctcatcagcaagggcagtaactagagactcattgtgtcgcgccatcggggttgaatcttaggagttttagctgcacttttattattattattagggatgaattgagtttagttcgtgagtcaagtgtgtgtgacctcgtgggcgcttaataaaaagcaagcatgtgtggtgattttggttgccggctgtcggcggggaggctactgattgttgtagccttcacccaaactttatcagagtctttaatgaatggacaagttcatc

SEQ ID NO: 436099 - DNA, 418 bp, Triticum aestivum
tcccacgcgtccgcaccactgcactacactggtgcggtacagaggaagcagcagaggagcaacgcacgaacgagctggcggcatggcgaggccgtccatctccctccacctctgcctggccgtcctggccatggccgccgccgcgtccgaggccgggttctacgaccagttcgacgtggtcggctccggcaacaacgtgcgcgtgaacgacgatggcctggcccagcaggtggcgctcacgctcgaccagggcaacggcggctccggcttcagctccaaggacaagtacctctacggcgagttcagcgtccagatgaagctcatcggcggcaactccgccggcaccgacacctccttctacctgacgtatggggagggcgacagccatgacgagatcgacatcgagttcatgggcaac

SEQ ID NO: 436100 - DNA, 659 bp, Triticum aestivum
tcgcgtcgcgctcgccactcagagaagatgagggagatcctgcacattcagggtgggctgtgtggtaaccagattggttccaagttctgggaggtggtgtgtgatgagcatggcatcgaccccaccgggcggtatgtcggcacctctgacctgcagctggagcgtgtcaacgtctactacaatgaggcctcctgtggtcgctttgtgccccgtgctgtccttatggatcttgagccgggcaccatggacagtgtccgtactggaccgtacgggcagatcttccgccctgacaactttgtgtttgggcagtctggtgctggtaacaactgggccaagggtcactacactgagggtgcagagcttattgattctgttcttgatgttgtcaggaaggaggctgagaactgtgactgccttcaaggtttccaagtatgccactctcttggtggtggtactggatcaggcatggggacccttttgatatcaaagatcagggaggagtaccctgaccgcatgatgcttacgttctctgttttcccctcacccaaagtatctgataccgtggttgagccttacaatgccactcttttggtccatcagttggttgagaatgcagatgagtgcatggttcttgacaaccaggccctttatgacatctg

SEQ ID NO: 436101 - DNA, 466 bp, Triticum aestivum
accggtcctagattcgcgggccgacagaagacgacaaaagcggggaattgtgacaaagttgagtgtttcatgggcccctgacgtatatgatcctcctgttacttctgactcacacacagtgaagccgcaccagagaagttcaaggaagagccactacaagtacaagcccccaaagggcagcagcagcagcagcagcagccgcactagcagtggcagcaaaaaggacaagaagcattctcaccacagcagcagcagcagcagtaaaagagataagaaaccttcccatcgcagtagcaatggtggcagcagcagaactgacactagtgatcctcaccatcggaaggcatatggcagcagcattaccagcagaactgatactagtgttcctgaatatcataagttatcgccgtggcagccaccggctagtgccgcagtggaagaagccatacctaccgtacctgtactg

SEQ ID NO: 436102 - DNA, 330 bp, Triticum aestivum
tcgccgaggtgtcttcgccagggcatccggtgactacgccatcgtcatcagccacaaccccgacaacggcaccttaaggatcaagctcccctctggtgccaagaagattgtcccaagcagctgccgtgccatgattggtccggttgctggtggtggcaggactgagaagccaatgctcaaggctggtaacgcctaccacaagtaccgggtgaagaggaactcctggcctaaggtgcgtggtgtggccatgaaccctgtggagcatccccacggaggaggtcaccaccagcatattggtcacgctttcactgtacgccgtgatgcaccacc

SEQ ID NO: 436103 - DNA, 313 bp, Triticum aestivum
ttcatctgcagctacagctcctcttcagcacagccctttcttcaggacacagatcaatccagatacacatacaccacctgccgagtgccgacgtctagctgctagctgactttcagaagccagagacacacacacctgccggcgtccgttgctgcatatttcgatggagtgcgagaacgcacacgttgccgccaacggcgatggcttgtgcgtggcgcagccggcgcgggccgacccactcaactgggggaaggcggcggaggagctctcgggtagccatttggaggcggtgaagcggatggtggaggagtac

SEQ ID NO: 436104 - DNA, 421 bp, Triticum aestivum
acggggaggttaaagcgacgccgccgccgcaagccgtccgcctcgctcttctcccgagcctggtcctcatcctctcgcctctctccccccacacaggcttagcaatctagcgttagcgcctccgtccatctcgtagctgcttcgatggcgatcaagaggaccaaggccgagaagaagatcgcgtacgaccagaagctctgccagctgctcgaggagtacaccaaggtgctcatcgccgtcgccgacaatgtcggctccaagcagcttcaggagatccgcaagggtctccgcggcgactccatcgtgctcatgggcaagaacaccctcatccgccgctgcatcaaggtgcactcggagaagaccggcaacaaggacttccttgagctcagcaacctcctcgtcggtaacgttggcctcatct

SEQ ID NO: 436105 - DNA, 160 bp, Triticum aestivum
tttttggttttcatggtcgcgtgagtcctactgtggtggtttgaaaactgtcggatccccgtgtcagtcctactgcgtggggttactgcactatctgttggttgaaaccgttgctggcgcgtccgtatcattataagtaatgaataagtgaacttcagat

SEQ ID NO: 436106 - DNA, 462 bp, Triticum aestivum
tttcccacgcgtccgcccacgcgtccgcgtcccgtctccccgccgcctcctcctcctccgcgtcgcaaaccctcgtcctaatccgccgaatcccgcgacccacgaaccaaggcagatcgatggcgaagagctcgttcaagctggagcacccgctcgagaggaggcaggcggaggctaaccgcataagggagaagtactctgacagaattcctgtgatcgttgagaaggctgggaagagtgctattcctgacattgacaagaaaaagtacctcgtccccgccgaccttacggttggacagttcgtgtatgtcgtccggaagcggatcaagctcagtgctgagaaggcgatcttcatctttgtgaagaacactcttccaccgacagctgccctgatgtctgccatttacgaggagaacaaggacgaggacggcttcctctacatgacctacagcggcgagaaca

SEQ ID NO: 436107 - DNA, 581 bp, Triticum aestivum
ctcgcgggtcgacggggctagccaccggatccatccatccgcccctcgctgccgctgcgtctcgtctccaccaccccacttgcccccggactcaggaggatcgtcggagatgtcggacaccgatgagcaccacttcgagtccaaggccgactccggcgcctccaagacctacccgcagcaggccggcgccatccgcaagggtggacacatcgtcatcaaggcccgtccctgcaaggttgttgaggtctccacctccaagactgggaagcatggtcacgcaaagtgtcactttgttgccattgacatctttaatggaaagaagcttgaggatatcgttccttcatcccacaactgtgacgtcccccatgttgaccgccaagattatcagctgattgacataactgatgatggatatgtcagccttctaactgagagtggcaacactaaggatgacctgaagcttcccactgatgatgttctgcttggccagatcaagactggatttgctgatggcaaggacctgatcctgtctgtgatgtccgccatgggtgaagaacagatctgcgctgtgaaggaaatcg

SEQ ID NO: 436108 - DNA, 442 bp, Triticum aestivum
tttctccgtcacggcccaggcaaagtgaaacaacgaaaagcaaacagcacatccgaaagcatccatcccctgagttggacagcttcctaatcgcagttcgtcctcgcccaaatcgagcagccatgtcgctgattccccgcggcaacgccttcgaccccttctcccccgacctctgggaccccttcgacggcttccccttcggctccggcggcagcagcagcggtggcagcctcttcccctcgttcccgcgcatcagctccgagaccgcggccttcgccggcgcgcggatcgactggaaggagacgcccgaggcgcacgtgttcaaggcggacgtgccggggctgaagaaggaggaagtgaaggtggaggtggaggacggcaacgtgctccagatcagcggcgagcggaacatggagcaggaggagaagactgacacctggca

SEQ ID NO: 436109 - DNA, 449 bp, Triticum aestivum
cgggccgaccggggtaacaaatcgaagagtgggtctctctctcccggcggcgcaggcgtctctctccttctcctccggcggcggcaaggcattttggcatctgagcccaacagctagcagatggcaggcggcagagttgcacatgcgaccctcaaggggccgagcgtggtgaaggagatcttcattggactcacccttgggctggttgctggtggtatgtggaagatgcatcactggaacgagcagaggaagacccgatccttctacgacatgctcgagaaggggcagatcagcgtcgttgtcgaggagtagttctgaagtgctgaaccagaagttctacatctcgaagtcttttgtcattttggttttgccagtaatttctgaaactctctggagagcatgacagagtgattgctgtggagattgtcatgaaaataagcacaccacca

SEQ ID NO: 436110 - DNA, 406 bp, Triticum aestivum
tggaacaccggcaccttcttcggcatccacgtcaccgtcgaccccttcacgctctcctactcccagctcaacctcgccgccggagacctcaagaagttctaccaggggcggagcgggcggcggacggcgagcgtgaacgtgaaggggaacaaggtgccgctgtacggcagcgggccgacgctgatggcgcagccggcggggggcaagggcggcgccggcaaggtgatcccggtgccgatggtgctgcggacgacggtgcggtcgcaggcgtacgtgctgggggcgctggtgaagccccggttcaccaaggaggtggagtgcaaggtggtgatgaacccctacaagctcaacaagcccgtctcgctggagaaggcctgcaaatactcatgatttgctcactcatgat

SEQ ID NO: 436111 - DNA, 573 bp, Triticum aestivum
tttttagcctctccattccgtgtggcgaccgagcgaaccctagccgagattagactaccatccccaatctaccggaggaggacgaggacgacgccgacgagatgctgagggttgcggggaggaggctctcgtcttcgctctcctggcgccccgtggcgaccgtcggagccaggggcccgctcgccggcgccggcggccctgggagagacgacgacgacggttcggcctaccagcggcggttcgccatcgagtcccccttcttcaccgccgcgagaggcttttcttcggctgaaacacttgttccacggaaccaagatgctgggttggctgaactcccagccactgttgctgcactgaagaaccccaactcaaaaatcctttatgaccagtacaaccatgaaagatatcctcctggagatcccagcaagcgtgcctttgcctactttgttctgagtggtgggagattcgtatatgcatcactgctgcgtctccttgtcttgaagtttgtcttgagcatgtcagcaagtaaggatgttcttgcacttgcttctcttgaggttgatctatccagca

SEQ ID NO: 436112 - DNA, 391 bp, Triticum aestivum
ttttggcttttaaccactttattgtctgcataagcatacagggaaaagaagaggaattaagctccaagacttggaggcgatgtcgtggtggaggtccaagccgcacttcagcgccgacagccaggactcgagctccgacgacgcgtaccgcggaggcaaggaccgctcgccgtcgcgtcgcaagaagtccgacgacgacgaggaggagtaccgcccatacgcaggctacggcgccaacaccaaccgcggcggggccaacgaaggcggtggcggcggcggcggctacaacggtggttacggcggcgggggcggcggctacaacaacggctacggcggcggtggcggtggctcgtacagcaacggcaacggcggtatcacgccctacaacggc

SEQ ID NO: 436113 - DNA, 367 bp, Triticum aestivum
aaccaaaaaataccaagaaatttcaagaaaaaaataaggagggaaacaaacaggctgatgcaattcgcattcccgttccctctctgctttacggccacataaataataacactactactagtactacttgagaactctgcttcttcttctttatcctacgctgatgttgtacagcagccccatcggagcaagccaatcgggctagagactagctcaatcgagcggctcgatcagtagctccagagcgggacctcgccggcgccgtaccaccgctgtcgttgcagtcgtcgtcggctccgtccatgtgcgagccgctctgccagtcgccgccggcggcgctcatcccgtcgtagtagtaggaatcctg

SEQ ID NO: 436114 - DNA, 481 bp, Triticum aestivum
ttgaacaatatgcaaagcaaactgcttaatgcgccattgcctggctgtactggaagtgtccgcgagatccaaatagatacgacgacgggaaggaggctcgtgaagaaggagaagattcaggtctcaggtgagatcgatggggaagatggctcgcaacacaattatatctgggaatttagaattgtactacgtagtagtttaccgtgctgctttcttttcttttttgtgggtagatctgatgtctctacgtataatagataccgagtgtatgctggtggttctttccattcttttgggttcgtgggtgccatgtaaatgttggtggatcgattccttatgtttttgcctcctgcggtaaataaaagctaatgcagattcgtggtcgaaaaaaaaacttaaaaattaaattcatagttaaaaacaataaaaaaaataacccaaatgaagaagttcaacaaaaaaaaaaagcggccgccccaaa

SEQ ID NO: 436115 - DNA, 302 bp, Triticum aestivum
ttttcgcccacgcgtccgcccacgcgtccggccacgcgtccgcccacgcgtgcgcccacgcgtccgcccacgcgtccgcaaagccaaaggctacgtacgtggatgggaagaaggaacgtactatggcgaacctgtggctgtggagcattgttgcgccacatgttgtgttctaattaaccgcccttctttttgtggggatgtataccgtacctaccgattatgcatgcatgtaaattacctttgtccacgtacaaggggaggaaccatggaataaagaaagagcaacctgagtaaatagcatc

SEQ ID NO: 436116 - DNA, 564 bp, Triticum aestivum
gggtcgaggcaaagagctgaggcacgctggcggagacggtgaagggcgtgatgcgggagtacccgaagctgcgcatgtcgcacgggcggatggtgttcgaggtgcggcccaccatcaagtgggacaagggcaacgccctcgagttcctgctcgagtcgctgggcttcgccgactgccccaacgtgctgcccgtctacatcggcgacgaccgcaccgacgaggacgccttcaaggtgctgcgccggaggggccatggcgtcgggatcctcgtctccaagcaccccaaggacaccagcgcctccttctcgctgcaggagccggccgaggtcatggagttcctgctccgcctcgtcgagtggaagcagctctccagggcgcgcctcaggctgcggcgtcaggccgacgcctgatccaacggccggactaattaattcactacgtgtagcttaattagctagttaatgaatcccctgctcatccgaacaaagccaaaggctacgtacgtggatgggaagaaggaacgtactatggcgaacctgtggctgtggagcattgttgcgccac

SEQ ID NO: 436117 - DNA, 255 bp, Triticum aestivum
cccatcaagtacccgtccgagaggagggtctttcagtccctcctcgtcttcgtgaacagcctcagatgagtggtcagagaaccggagaaccatcgttctctgcattggtaccggcggtgtctaggcactattatgtagtggtagcgagagaggatggttcagaacatcaacggaaatgttggagacagaggagtgtggggacgcggggacagcggctcaaagcccctccattataagggggcggggatttgtgtg

SEQ ID NO: 436118 - DNA, 373 bp, Triticum aestivum
tcgcaaaggtgctgttttctatggccctcctggctgtggtaaaaccttgttggccaaggcaattgcaaatgagtgccaggcgaacttcatcagtatcaagggacctgagctgctgaccatgtggtttggtgagagtgaggctaatgtgcgtgagatctttgacaaggctagggggtcagcaccatgtgtcctcttctttgatgagcttgactccattgccacccagagaggaagcagcgtcggcgatgctggaggtgcagctgatagagtgctgaaccagctgctgactgagatggatggcatgaacgccaagaaaactgtcttcatcattggtgctaccaacaggccagacatcatcgaccctgccctgctt

SEQ ID NO: 436119 - DNA, 355 bp, Triticum aestivum
  unsure (1)..(355): unsure at all n locations
tgttcgcccgttcccgcgccgcggcctgccggcctccgtgctccggaccctccccgtcgccgtctacggcggcggcgcctcgcccaagacgcccggcggccagcggaggaggagcagccgcgacgcgctcgagtgcgcggtgggcctctcggaggtggccgacggcgagaaggtgcggacgctgcccaagtgcgaccaccgcttccacgtcgactgcatcgacatgtggttccactcccacgacacctgcccgctctgccgcgcccccgtcggcgccgacgcggacgagcccgccgccgaggggctcctccgcgtgccgcgcgaggaccacgccacgncggagttccccatgttc

SEQ ID NO: 436120 - DNA, 341 bp, Triticum aestivum
ctttcgcgtccgctcttcctccggtgcgactccttcgacgtccaggtcggctcctcgccgctggggtcgtcggtcaccatcacctcgctcaagaaggccaccttctgaggcatcgccacgtgtacttagtttttcctctgcttttctcgatcgatgccagtactacactatgcatgtgatacacttgcatggagtgatgaggatttgtgtaacaaaattttcttttcctagtaaagatgagaccggtttttcccagggaccctcggtgtattgggatgtttttgccaattagtcagtgagatgaaaggggacatgttctcctactaccttactgatcaagc

SEQ ID NO: 436121 - DNA, 242 bp, Triticum aestivum
aacggacctcctccattgcgagataactatatggtcaaaacctttggatgctccaagtggacaagggtcatgtgacatcaaaatcaatgatgatttctgcgcagctacgatggtacctctttcgctacagaacggtgtcctcaggacaaactgcatagactgcttaaaccgcacaaatgtcgcacagtttgcatacggattagctgctttagggcgtcaactgcatgtgttgaagctcactg

SEQ ID NO: 436122 - DNA, 331 bp, Triticum aestivum
ttgtctacgcgtccgcccacgcgtccgcccacgcgtccgcccacgcgtccggccaagttgttgaactcagtggagaaaacatcaacatcacatacaaacatgatggcactcacatagctgttggaaataaggaggatgagctaaccatagtggatgttcggaagctaaaacccgtccacaaacagaagttcccttacgagattaatgagattgcatggaataaaactggagatttattcttcataactactgggcttggatttgttgaggtggtcaactatccttcccttgatgttgtctgcaaattaaatgcccatacagcagggtgcta

SEQ ID NO: 436123 - DNA, 339 bp, Triticum aestivum
atcacattggatgttggtacaaataatgaggagcttctgaatgatgaattttacattggcttgaggcatagaggggccactggccaggagtatgctgattttctgcatgaatttatggctgctgtgaagcaaaactatggggagaaagttctcattcagttcgaggattgtgcaaaccacaatgcctttgatctccttgcacgatacggaacaacccacctggtattcaatgatgacattcagggaacagcttcggtggtccttgctgggcttgttgcagcactgaaattagttggtggtacattagcagagcacacctacctgttcttgggagctgga

SEQ ID NO: 436124 - DNA, 407 bp, Triticum aestivum
gttgatcgctcttgggaaattgcccgaacggtctgtgtcaatgaatggatggggccttgctttccgagcctgtggtgaccggctgattgtcattggaggcccaaggacttctattggtggcatcattgagcttaattcatgggttcccgatgggcaaccgcctgtgtggaatttggttgccacacggcaatccgggaacttcgtgtataactgcgccgtgatgggttgctgagtccactgaataaagattggatgcagtggatatttatgaaggatgatagtatgcacaaaggcagcccgttcaattgctccagccctgattcttcgtagcgatttatgccttctgcccagttaactggacatctgctgagcggcagcactcatgtaacccttgagttctaatactt

SEQ ID NO: 436125 - DNA, 1814 bp, Triticum aestivum
tcgctcggcgatgcttgtccgcgtcaacaccctgctccaaggatactccggcatccgcttcgagatcctcgagaccatcgccacgctgctcaatgccaatgtgacaccgtgcctgccgctccggggcaccatcaccgcttccggcgatctcgtcccgctctcctacatcgcgggacttgtcaccggccgcccgaatgccgtggccgtggctccggatggcacaaaggttaatgctgctgaggcatttaagatcgccggcatccagcacggcttcttcgagctgcagcccaaggaaggccttgccatggtgaatggcacggcagtgggctcagggcttgcatccatggtgcttttcgaggctaacatccttggcctccttgctgaggtcttgtcagccgtcttctgcgaggtgatgaacggcaagccagagtacaccgaccacttgacccacaagttgaagcaccaccccgggcagatcgaggctgccgccatcatggagcacatccttgaaggcagctcctacatgatgctcgcgaagaagctcggtgagcttgacccattgatgaagccaaagcaagataggtatgcactccgcacatcgccgcagtggcttggccctcagattgaggtcatccgtgctgccaccaagtcgatcgagcgggagatcaactccgtcaacgacaacccactcatcgacgtctcccgtggcaaagctatccacggtggcaacttccagggcacacccatcggtgtgtccatggacaacaccaggcttgccattgctgcgatcggcaagctcatgtttgcccagttctcggagctggtgaacgacttctacaacaacggtttgccttccaacctctccggcgggcgcaacccgagtttggactatggcttcaagggtgctgagattgccatggcctcatactgctccgagctccagttcttaggcaacccggtgaccaaccatgtccaaagcgccgagcaacacaatcaagatgtcaactctctcggtctcatctcctccaggaagaccgccgaggccattgacatactcaagctcatgtcctccacattcatggtcgccttgtgccaggccatcgacctccgccatcttgaggagaatgtcaaggatgccgtcaagagctgcgtgaagatgacggccaggaagacattgagcaccaccaacaatgggcacctccacaatgcgcgattctgcgagaaagacctgctgctcacgattgaccgtgaggcggtgtttgcgtatgcagatgacccttgcagcgccaactacccattgatgcagaagatgcgtgcggttctcgtggagcacgccttggccaatggtgaggccgagcgcgacgtggagacatccgtctttgccaagcttgccgcgttcgagcaggagctccgtgcagtgctaccaaaggaggtcgaggctgcccggacctccgtggagaacggcaccgccgcgcagcagaaccgtatcattgaatgccggtcatacccgctctacaggttcgtgcgcaaggagcttgggactgagtacttgactggggagaagacacggtctcccggggaagaggtcgacaaggtgtttgtcgccatgaaccagggcaagcacatcgacgcgctgctggagtgcctaaaagagtggaacggtgagcccttgcctctctgctgaacagaggatcaagaaactgaagagaagactgtgtgcagaaggctctggatcttcttagctgataagtgataatagttttccaattgtattttcttaaatattgatgttttgtgggatggaacatcctttc

SEQ ID NO: 436126 - DNA, 361 bp, Triticum aestivum
attcgactctacaccagcccccgttgagagtcgagagagttccaccgctcccggcccgatcccttatcttctccgacggcctcgccggccggagcggacacgggagaggtgcatggcgttgccctatgtatatagaatctaggcataggttgaggtcgagtagtgcccatgtggcgtatggctgtatgccgatgtggagagcgccgccgccgcgtacgagcagcggctggtggctcacggtggctgcgtctcaggcaaggctggctggcggccagtctctcccgaggggcgtgctgctggctcatccaccaataagctcgtctggtcccctgttctggaggctctccgctacttctctagc

SEQ ID NO: 436127 - DNA, 293 bp, Triticum aestivum
ttgtttgactgaggtgaagaaggggaagaaagctgtggactacattggcggcggtggaactatgaaggcatgtggtggatcttccagggatgattacgagggtggaggatctgggaggtctcgcattaacttcgaaagacgagggcgttgaggtatttgctgtgcacatttatcttctgcaattttcatgtcctcagtgcattttcaaatatcatcctgaaggatttctttggagaatatgatccttcttacacaaggaagcaaatatcatcctgaagtattactttggagaa

SEQ ID NO: 436128 - DNA, 908 bp, Triticum aestivum
  unsure (1)..(908): unsure at all n locations
gtacagtccaaaattcncgggtccacgggaggagggcacgcggtgctcctgctgccggtgctgctgatctcggcgctgttcgcgcagatccgcgcgtcggatccgttgttccacgagtccttcaacgagagcttcgacgggagctggatcgtgtccggcaaggaggagtacaaaggtgtatggaagcacgcgaagagtgatggccatgaagactatggtctccttgttagcgagccagccaggaaatatgccataatcaaagaacttgattacccggttactatgaaggatgagacagttgtcctgcagtttgaagtgaggcttcagaatggccttgagtgtggaggtgcttatatcaagtacatccgtcctcaggctaccggatggaacgccaaggactttgacaatgatactccatacacaattatgtttggtcccgacaagtgtggttcaacgaacaaggttcacttcatcctgaagcacaagaaccctaagactggcaaatatgttgaacatcacctcaagtccccaacctctgtcccatatgacaagctctctcatgtctacacggctatcttgaagccggataacgaggtcagaattctggttgacggggaggtgaagagcaaagcacacttcctgtccgctgatgattttgagccagcacttattccatcaaagactattcctgaccctgacgacaagaagccagaggactgggacgagagagctaaaatccctgacccagctgcagtgaagcccgatgactgggatgaggatgccccaacagaaattctggatgaggaggccaccaagccagaaggatggttggatgatgagcctgaggaagttgatgacccagaggctgataagcccgaagactgggatgatgaggaggatggcgaatg

SEQ ID NO: 436129 - DNA, 655 bp, Triticum aestivum
ttccacgcgtccggtttgctgaaaaagtatctttgaggttgaacagggacatatgccggatggccaaataattaccgtgaagaaactcgcggaaaattcgccaatcgcacgcgacaaagcgtttgctaacgaggttcagaacattatggctctccaccatgaaaatgtactgaagttggtcggctactgtcacgaaggtcaaaagaaagtggtgctgaacaacggaagatatattgtggctgacattgttgaaagtttactttgccatgagtacttaccactgggaagccttcagaaacatctttttgaagtacatacaaaaatggactggaacatacgcttcaacataattaaggggatttgcaatggtttgcactttgtacacagcattcctattgtccatatggatctcaagccggaaaacatactgttggatgataacatggggccgataatcgccgatttcggtctctccagactctttggtcaagaacaaacacggatgaacacacagaatgttgttgggtcatatggatacatagctccggaatatctatacagaggtgaaatcttcacgaagtcagacatatacagtttaggcctactaatcatggagactaccacgggagagaagaattgtccaggcaaagaaccg

SEQ ID NO: 436130 - DNA, 211 bp, Triticum aestivum
tttcttgatcggcatgctctccaaggcctgacgctacgcttgcacacacttgcatatgtatgacgcagtgcgtgctaataaatcgttctggttttcggttgtttcagctacctgtagtagccacgcaatggcgtttgtaagtaaacctcagtatgaaggttgccatggaataaagcatgtatacatgctgcggaaggtaagcttttgcaac

SEQ ID NO: 436131 - DNA, 602 bp, Triticum aestivum
  unsure (1)..(602): unsure at all n locations
aatagatctgccctctctctctctctcgtccgcggcgatacgatccgagatggcgatgagggcgtggaggaggagcgcggcggcgagggccccggcgcacctgtgcctgtggctggcgctcgtcgccgccaccctggtgctcgcccagggcaagaagtccaacctgtcggaggtgacgcacaaggtctacttcgacatcgagatcgacggcaagcccgcaggtcgggttgtcatgggacttttcggcaaggctgttcctaaaaccgcagagaacttcagagcactctgcacaggagagaaaggcatgggcaacagcggcaaacctctccactacaaggggagttcgttccacagaattatccccagcttcatgatccaaggaggcgacttcactcttggcgatggaaggggcggtgaatcaatctatggcacaaagttcgccgatgagaacttcaagctcaagcacactggaccaggctacctttccatgggcaatgctgggagagatnacaatggatcccagttcttcatcnacactgtaaccatgagctggttggacggcaagcacgtcgtgttcggcaaggtgttgtctggaatggacg

SEQ ID NO: 436132 - DNA, 703 bp, Triticum aestivum
gtcttcctcctccccaactactcctctcctccgcgcatcgcatcgcaccgggggtcacctgagatcacatacacaatggtgaaggctgtggctgtgcttaccggcagtgagggtgtcaagggcaccatcttcttcacccaggagggagatggcccgaccaccgtgacgggaagcgtcactggactcaaggaagggctccacggcttccacgtgcacgctcttggtgacaccaccaacggctgcatgtcaactggaccacacttcaaccctgctggtcatgtgcatggggcaccagaagatgaaatccgccatgctggtgatcttggaaatgtgacagctggagcggatggtgttgctaacatcaatgttactgactgccatatcccccttactggaccaaattcaattgttggccgtgctgttgtcgtccacggtgacgctgatgatcttggcaagggtggacatgagctgagcaagagcactggaaacgctggtgcgcgtgttgcttgcggaatcatcgggctccagggctaagatgtcatctccaccggccaacgtcgtacagatctgggaaccttttcaggatgcagatttgcaatctctattctaaataagcacatgatctttgatcacttgttagtgtgcaccattcgtgtcaattcctatgtgctactctgaactttatcactgtcatttggctttt

SEQ ID NO: 436133 - DNA, 512 bp, Triticum aestivum
gggggcgggggagagcctgtggagctaccacgatccctagtgagtagtatattgcattggctcaagacatgatgaccggtgagctggttggtacgtgctccagtgctataccagttactaaacctagttaatccggagtacggcagtggatacatggacccccggccgttgcggggcatcgtcctctatctggtatatatgcgtgtgccataatagtggtatcactgggcgctggcctgcgatattatagccgctacctagatagtactcgccagttacgtcagattcgatattatgttagctagctgcgtacggtcattttcgcacataaagtccgctcgttgattcgcttggcttattgctcgttttactatgagagcaagcaggcgccacgtacctttttcttcctctttttttttctatatataaagtgcttagtggatcgcacatcaccgggagactaatgcattgcaacttttgtaacagtagacataaaaatatttaacggtaaa

SEQ ID NO: 436134 - DNA, 498 bp, Triticum aestivum
tacaccaactttccccgtctgtctttcttctcggcggaggcgaacgacgaaccctagccgcgcgaggaacgccaagatccccaaggccggcgacgatggcggcggttcggtgcgcggcgaggaggctcggcggctctctgctccagcgaacgcaggcggcggtcgcggaggagggacgcctgctcgcgccaagcaggctcatgcgctcccgccagctctccaccaaggtctccggcgagcgatcgcaggtggcggagcgacacctcctcgagccaggcagcctcatgcgctcccgccagctctccggcgagcatgctcgcaacatccagaagaaagaggatgactgctgggcggggttcaatgagacgctaaagaggttggacgagcttcaaaaaaagatgaaaccaagtgtctttcagcagcgcatgatatccatcgaccgtgcgttgaagagtttggtctatggatctttaaggtgacagttgtgtatgtggctgc

SEQ ID NO: 436135 - DNA, 448 bp, Triticum aestivum
cccgggtcgacggggaagaagagagagaaggaacaaaagaaagctgcaaagaaggccatgaagatgaaaaaggaggaagagaagaggatggccacactgaattcctgcaaggatgaggacagctcatgctcatcggagtccagcaacagtgagtgtgaaggggaagtcgtcggaatgagccgctgtgccaccatttctgtgcctcgaacaccacctgcaagcacagttttccccatcatagtgcctcaaatcccagactccgttgcactggatgctcagatcttttccgggtctgcaaatgcaatgcagtgcactgccaccagcattgcggttgtcgaaaaaccagtgctgaacagaatcgaggtctgcatgggcggcaagtgcaagaaggcgggctcgctcgccgtcctgcaggagtttgagacggtggttggcacgggcggcttgg

SEQ ID NO: 436136 - DNA, 346 bp, Triticum aestivum
gctcatcgaccccatgctggagtgcctcaaggagtggaacggcgagcccctgcccatcaacgtctgaagcatcgccggggccaccgtggaggagaggaggaggaggcttccagagtacatccaaaacgaagacgcttaattcgttcgtgcatgttcttcttcttcagttcctatcgccttttgcctttcgttgttcgtgcgttggtgttgatcgacgtgtggcgttgttgttgattgtgtagctgctctgccgcagctttacctaaagatattgtcgttgtattttggggtgaatcatgctaatactatctggttctttttttgcttgtattattactgtcctagt

SEQ ID NO: 436137 - DNA, 497 bp, Triticum aestivum
cgtttttcctggtttctagtacctcgtagctaagcttccatatgggatcgagagtctttctcgccgcggccgtggtggccgtggccgtggcggcggcgggggcggacgtggcggcggacgtggcggcggaccgggcggagtgctcggacaagctggtggcgctggcgacgtgcctgacgttcgtacaggggcaggggcaggcgccgacgccggactgctgcggggggctgaagacggtgctgcagaccagccccaagtgcctgtgcgtgctcgtcaaggaccgcgacgaccccggtctggacttgaagctcaacgtcaccagggcgctcggcctccccgccgcctgcggcgcgcccgccaacatctccgactgcccaaggctactgaacctgccgcccaattccaaggacgcggaggtcttcgagcagtttgccaagcagcaggcagcccagagcagcccaagtggcgcgtcgagtgcgccgagcacgggcgcacag

SEQ ID NO: 436138 - DNA, 270 bp, Triticum aestivum
ttgtctcgtggggatcacctgatcactggtggggggggcgctgctgctgctatctgtatctgtggtgcttaagtttgatgtgtggtgtgggcactgttatgttaattattatggctctgattgaaccggttgtaaagtttgtaagtggattttgcatttcatagtattatcatatcactgccatttatacaagtgatagcggtggactgtggcgcactctcgcgctgtacacgtaggatttattgtccgtgcggtcgtttttcttgcgtg

SEQ ID NO: 436139 - DNA, 538 bp, Triticum aestivum
ttattgggtggctgccattgctctccacaccatccaagctcgagctcccatttcatcaccactctgctagcccgagtctccctcttgacccaccgtcggtttcaggcctcgaaatcctcgtcccagtctctttctcctttcaagaagaatttctttgggttgagggagctgctgttcttggtaggacaggctaggccagatctggggggggggaggctgggtctgttgttccgcttgaaatctctgggttttgctgcgctggaggttcttgctggccatggtttgtccaggcatgctgaggcgcaatctctgagctttatgaagatcgccactcacctgcgccggtgctgcttcctccagtccttctccgtcgtcttcctctactacttttatgtgatttcataattggccctctcaaatccgccgttgctagcagtaaactattttctttctcttcttcttcttcttctcgcttccttttcctgcttcaacaagtgataaataagaacggtagcagcatcatcatcatcagcagtag

SEQ ID NO: 436140 - DNA, 392 bp, Triticum aestivum
tcccacgcgtccgagacagccagccaccacacgccgacgccaaactcgccgaccaatcgaaggctcggggggagcgacgatggcccgccgctgcggctgccccgtcggcgccgcgctcctcgccctctccctcgccgtcctcctcgccgccccggccgtccccggggccgccgggttccacctcggcggcgacgagagcggcctcgtgcggggcatgctcgccgccgtccgcgagcgggccgaggccgaggacgccgcgcgcttcgccgtcgccgagcacaacaggaagcaggggtctgcattggagttacacgggttgcgaacgcgaaaaggcaagcggttgctgggaccttgcatgacctgatggtggaggtagcggattctggaaagaa

SEQ ID NO: 436141 - DNA, 439 bp, Triticum aestivum
gcacaaggtgggactgcttctcggccccttctagatcagccatctgctgatccatacacagcggctttcacgaaactcagcgtgctcgctgagcaaagaggggatgcttatgcaaacgccgatgtaagggttcctcttgaagagcttgcacctaaaaagggccatgatgacgtctctcagctaaccccaactgatattgctgtcgaggccctgcaaaagattaagaattttgccactgagcattccatggccagtggcccattccacgacttataaattgccgccaggagaccaacgatgcaatccttgtaggatttcggcccaattttgtttgcaccgtgtatcttcatttttgtttcgctcaacattattgattcattctttatactgaaaaaggagctgtgctgaagcatgctctgaaacataaaaaaatagcgga

SEQ ID NO: 436142 - DNA, 379 bp, Triticum aestivum
cgcttcttgaccccgcaccaaccagcgcccagccgggggcggttaaggagacggagcagccgcagccatgggtcgcgtccgcaccaagaccgtgaagaagacctcccgccaggtcatcgagaagtactactctcggatgaccctcgacttccacaccaacaagaaggtgctcgaggaggtctccatcctccagtcgaagcgcctccgcaacaaggtggccggcttcaccacccatctgatgcgccgcatccagcgcggccccgtgcgcggcatctccctcaagctgcaggaggaggagcgtgagcgccgcatggacttcgtgccggagaagtcggcgctcgaggtcgacgagatccgcgtcgacaaggagaccatggac

SEQ ID NO: 436143 - DNA, 645 bp, Triticum aestivum
gattttatcacatgttcaattttctgtaatacaacgggatagttcatgggcacaaggggttattcgaccttgcagtaaattacacaatggtacaggtacactacatgggatacaccaacaacgggtggtaaataaaaacttctagcagaaacaccacaaaccagatctaacttattgctggcaacaaatcaaattgtctactgataagtctgatctatattaagggtttgtaatcacagatatgtagtcacacttgagcaaaaccttgtatgaaatcattccatttatcacctttgtggtcctttatactgttctatgtagccttggcatatggggcaaaaatggctttgacatcttccaaacaccttcaggaattggttttgcagcatcgatcttcttaaccttgtccttcgcgtcatagtactcaatcacaggcaaactggattcaacaaaaactttgaatctcttcctgatagtctcgatgttgtcatcaactctaccctcattgcgtcccaaaagacgcctttccatctcttcctcggaacaattgaagaatagcacaaatgcaggcgaaatttttgtaacattctcgaacgcagcacgattctcttcattccttggaaacccgtcgatgaggaacttata

SEQ ID NO: 436144 - DNA, 463 bp, Triticum aestivum
tgatgaggacgacgacgaagtcgacgaggaggaagagcccgaggaggagctaggaactgaatatctggtgcagccgcttggccgtgctgaagacgaagagcattccagtgactttgagccagaagaaaatggtgatggtgctgaggacgaggagattgaggatgatgatgctgaggatggtgaggattctgtcaaggcgcaatcctcatcgaagaggaagaggtctggtggggaggatgaagatgatgatgacggtgatgatgatggtgatgatgatgagaagcctccatcaaagcgatagtcaatttgttcttgctgatctggtatcttttctgcttgggccaagaaggaaaataatcctcatggagaggattgttggtaaatgctgtagctttaggacatctgtggtaggtgtagcagctcaaacttgagtctacccatgttagttgttagtgcatactgc

SEQ ID NO: 436145 - DNA, 840 bp, Triticum aestivum
gccatggtcagcactcaccctcccatccctccgctccggccgcaaccccaccgccgccgccatggtgaagtactcgagggatccgtccaacccgaccaagtcggccaaggcctgtggcaaggatctcagggtccacttcaagaacacacgcgagacagcgtttgctcttcgcaggatgcctttgggcaaggctaagaggtaccttgaggatgttctcgcccacaagcaagcgattcccttccggagatactgcagaggtgtgggtcgtactgcgcaagtaaagaaccgccagccaaatgggcagggtcgctggcctgcaaagtcggcccagttcgtgttggatttgctgaagaatgctgagagtaacgctgaggttaaaggcttggacgtcgacaacctctacatttcacacatccaggtgaaccaagcccaaaagcagaggcgccgtacataccgtgctcacggacgcatcaatccttacatgtccaacccctgccacattgagctgatcttgtcagagaaggaagagcctgtgaagaaggaggctgacaacgtcgtcgcaccaaggaaagctatctaagctaccggagtggctgcattcgcccaacagtcttagttgtagttcttctcaagtacctttgttggcagtgtttgttgcctccttgatgtttttgttaccaacatggagtaaggatttgttaaggttgatgttatccttgtgattgcgagtggtccttatatgctaaaacagtttcagatatttgagcagtagcccaccagaacttatttctcagagatgctggtcctttccggctgttcgagtattatatccactttttg

SEQ ID NO: 436146 - DNA, 560 bp, Triticum aestivum
gcccgacctccgagccggcgatcgggggggcctggtttaaaccctcgggagggttccaccaccggctactcgatggcctcgtcgttggagaacacgggaagctcttcctcggaggagttccagatcgacgacagcttctggtcggagacactggcgatgtcggcggacagctccggttccgggatggaatccagcgacaccttcggcgtagatagtgcagcgccgtcgtcgaccaacgatgagatggacttctgggtcacactgttcatgcaggctagtgacatacagagtttgtcacagatttaaattttaatgagaagattgggctatgttcatatttctcgatagcattcgcggcggaccaggcgagcggcctggccgaacctggaccgggacgaacaaagaggcttttggccggaagtttctgtagttcgtcggctgagttgacccttgttgctggctcagtttcacttgcgcattggctggccatagcgagagaattttctccggccaggacgtgaaactgaagagacaaatgatggggcggaaaggttgacacg

SEQ ID NO: 436147 - DNA, 771 bp, Triticum aestivum
ctaaaccctaccatcttcggattcctctccaccggcggcctcccccgtcagatcaccatggtgagtcgacggagaagaagcagctgaaccccatgcgggacatcaaggtgcagaagctcgtcctcaacatctccgtcggcgagagcggagatcgcctcacccgcgcctccaaggtgctggagcagctgagcggacagtcaccagtgttctccaaggcgaggtacactgtcaggtcgttcggtatcaggcgtaatgagaagattgcctgctacgtgactatcaggggtgagaaggcgatgcagctgctggagagtggcctgaaggtgaaggagtacgagctgctcaggaggaacttcagcgacaccggctgctttggcttcggtatccaggagcacatcgatctcggcatgaagtatgatccatctaccggcatctacggtatggacttctttgtggtgctcgagcgtgctgggtaccgcgtctcccgccgccgcaggtgcaaggcccgcgtcggtatccaccagagggtcaccaaggaggacgccatgaagtggttccaggtcaagtacgagggtgtcatcctcaacaagtcccatgcgagctaagaaggacgtagctctctttagaccttgagttaatgaagttcacctggttgctggatatgtatgttacctagaaaccgaaatgctttgtcagttttgcctgtactcaagctggatgatttctgtttgatctgcactttcgtctaagaggctcactactgttttatgc

SEQ ID NO: 436148 - DNA, 494 bp, Triticum aestivum
  unsure (1)..(494): unsure at all n locations
gtccgtcccgcctgatcagctacttgatcatttgatctgtgcttagtgatcactcggcagcaatggcaggcaaggcatccatcgcgctgttcctcgccgtgaacctggtcgtgttctccgtggccagcgcgtgcgggggaaactgcccgaccccgtccacgcccaccccatcgacgcccaccccgaccccgggctcgctcggcaggtgcccacgcgacgcgctgaaggtgggcgcgtgtgtcaacgcgctgaacctggtcaaggtccaggtgggcaggccgaccgcgttgccgtgctgcccgctgctggatgggctcgtcgacctcgaggcggccctgtgcctctgcacggtgatcaacgccagcgtcctcaacatcgtcaagctcaacctccccatcaacctcagactcatcctcaaccactgcggcaagaaagcgcccaccgggttcatgtgctaagcgatctagncaggcgtgccatgcagcccacgcatg

SEQ ID NO: 436149 - DNA, 303 bp, Triticum aestivum
cgaggagaaaggtggaatcaagaccggggcgtttttcgaaacaagtgtccggggagtgtatgccgtcggcgacgtggccaccttcccgatgaagatctacaacgacgagaggcgagtggagcacgtcgaccattccaggaagtccgcggagcaggccgtgaaggcgatcaaggggaaagaggcgggctctgccgtggaggagtacgactacctggcctacttctactcgcggtcgatcgacctgtcgtggcaggtctacagggacaacgtcggcgacgccatcctgttcggcgacaccgaccc

SEQ ID NO: 436150 - DNA, 546 bp, Triticum aestivum
agcgaaagagagagcgagaggagcctcgggcgccatgggattcatcatggagttcgcggagaacctggtcctgcggctgatggaggacccggagcagcgcgacgaggcgcagcgggcgcacgtcggccggatgaaggagcggtgcgagcgcaccaaggccgcctgggcgctcccgctccgcccctacggcttctggaccttcgaccgcttcaactcccagctctcctgggacccccagatcagccaggccgccggccgccgcgacccctacgacgacctcctcgcccgccacgccggccccgccccgccctcctcctcctgagaaccgaatccggcatcaaccgcgaggaagtgtggttgccccggatctacgcgggcagcaataaggaactcatttccctcaaaatgactgtgattgcattcccttctggttcatttttatccttgaactgccccagttggttcatctgctgagtggttactttgacaaacttcctgttcggcaagatacctgaaatgctttgtatctgttgattttcagtcttt

SEQ ID NO: 436151 - DNA, 371 bp, Triticum aestivum
cttacgcgtccggggtgctacagtgggtgatgcggctaagaagattttcatgttgggcctgttcacaagagggctaccccttcgtatcgtcatgattggtactcttaccggtgctcagtggggaatctatgacgcgttcaaggtcatggttggactcccgaccaccggcggtgctccaccagttgctccggtggaggaagcagcgaaagccagcgcttgattgatttttcctactacgacgatgacgatgtattccgggatgatgtggtattggtggatggggactgtatcaattacttgagtttagcaaccgaaatcatttgttattgtagcagatggttattgtgtcatcattttgatgagaggaactc

SEQ ID NO: 436152 - DNA, 378 bp, Triticum aestivum
tcggtacatatatcctatgttcctcccccgcagacgatagacaggcctggccggcgcagcctgcgacgttcgagctcccgccgcgcggccacgcgtcgtctccggccatggggttccccctggtgtgctactgcgttgccatccccaagccggtcatcgccttctgcaagctcgtcgccgccgtcagggacgccttcctcctgctgctctccctcgtcggcctctgccgctccccgcgccgctccgtggacgacgccccgctgcccgaggaggtcaaggagcgcctcccggccgtcgagttctccttgctggcgcgtccggcaaagcaggggtgccacgacggggacgactacatcgccgccgcggcggccacgtgca

SEQ ID NO: 436153 - DNA, 376 bp, Triticum aestivum
ttcgatgtgtttggcaccaaacgatgtacatgagatccagatccaatttgctcttgaaagggggatccctgctggtcttgctgttttgggaacaaaaaggcttccataccccagtagatcgtccgaattagcccactgttctcgttgcaggattgattggcttcagagagatggaattcttatgcttgaactggacagattactcaggcctggaggttattctgcttattcatctcctgaggcatacgcacaggatgaggaggaccgcaaaatctggaaagaaacgagttccctcgcagaaaggatgtgctggaaaattgcagagaaaaaaaaccagacagctatttggatcaagcctatgaacaatgattgctac

SEQ ID NO: 436154 - DNA, 499 bp, Triticum aestivum
ccacgggactccgcaagaggagggatggcaggctcgacgaattcgtccaggtcgatcccgtcagcaatccgagtggcggcagcaatgaaagtctccatgaatgactggaagtcgtgcctcttggtcttagcaactttaatagcctcctcctccactcccgacccggcgaccaaccccgcgatccggcgagcccgagatggggttcctggcgacctccgccatcttcttcctcgccggcttcatcgcatgcctcttctcgctcctctgctgcaaccgcggcgcctccaccaacatattccatttgaccctggtcatttccgctacagtttgttgttggatgatgtgggcaatcgtgtacctcgcccagatgaagcctttgatcaaccccatcctgagcggcgagtgagccccgatctgccccgaagacaacttaagatccactgttgatgtatcattattcggttgagaacctctattcattttgttgccataactgaaa

SEQ ID NO: 436155 - DNA, 667 bp, Triticum aestivum
tgtttgacaccaactaccacttcatcgtccctgaattggctcctagcaccaagttctcctactcttctcacaaggctatcaatgagtacaaggaggctaaggcgcttggcgttgataccgtccccgtacttgtcggaccagtctcatacttgttactctcaaaggccgccaagggcgtagagaaatcattctctcccctttcccttcttagcagcatccttcccgtctacaaggaggttattgctgagttgaaggcagctggcgcttcatggattcagtttgatgagcccacccttgttcaggaccttgaatcccaccaattgtctgcattctctgcagcttacgcagaacttgagtccgcactttctggattgaacgttcttgttgagacctacttcgctgacgttcccgcagactcgtacaagactcttacatcattgagcagtgtgactgcttatggttttgaccttgaacgtggaaccaagactcttgagcttgtcaagagtggtttccctgctggaaagtacctctttgctggtgtcgcagatggacgcaacatttgggctgatgaccttgctgcatctctcgccactcttcagtctcttgaggctgttgctgggaaggacaagcttgacgtatcgacttcctgctcactcatgcacactgc

SEQ ID NO: 436156 - DNA, 642 bp, Triticum aestivum
gttgtacatcggaatagagctgtggcaggttaagtcaggaactttgtttgacaacattctcatcactgacgatgctgccttggccaagacatttgctgaagagacctgggccaagcataaggaggctgagaaggctgcttttgacgcggctgaaaagaagaaggaagaggaggatgcttccaaggctggtgaggacgatgatgacttggatgatgaggatgccgatgatgaggacaaggatgacaaggctgggtctgatgtcgagtctgatgacgagaagcacgatgagctctagatggatggtgaggatgagaggaggccgcctgccttcgcgccggtgccatgatttattagttgtctctcattatgatgttcccctttttgtgatcagaaacttgacaagttactgtgtgtagaagaacaacatcaccgtggggtctttgtagcgcttttgtagtccaatttttaccggaagggaactttatagtcgttaaacgagcaaaaaattaaaaaaaaaaaaaaaaaaaaaaaaaaaaaaaaaaaaaaaaaaaagaaacaaaaaattaaaaaaaaaaaaaaaaaggggccgctcaaggggttcaaatcttacttaccacttaaaggcgacctcaaaactcttca

SEQ ID NO: 436157 - DNA, 498 bp, Triticum aestivum
tcttgctcaatgcaagaaggccatcccttcgcgggaagagggagggaaagtgattgtgatcgacatagttgtagactcttcttcgggaccaacgcacgaagcagagctcctgatggatgtagccatgatggtgatgaccaatggccggcagcgagatgaaactgactggagcgagatattcaccaaggcaggattcagtgactacaaacttgtgaagaaactgggagctcgaggtgtctttgacgtctacccgtgagacaggcccaaaaatacgtattataatttgtggtttggttcacaagatgtgctctatgggggctgtcttactttgtcaggtacgtttcaaggaggatacaaggtacgagcgagcatacggagtgctatgcatatgggtgtcatgcattcttggtaactttccggtccgtaaaatttccattcggttaagtactaaagcacacggtgtgcttttctgtgtatcatgttcacggttactacaac

SEQ ID NO: 436158 - DNA, 360 bp, Triticum aestivum
tgttaactttcttggtgtcagaaatgctgctcggaggatgctcctcgatgagcggggcatcccggctgaagatgtgcccgttgaccagttcacccctctcggtcggatgctttacaaggcaccatctgatgggaaatggggcgaacatgagctggactacctgctgttcatcgtgcgcgacgtgaagctggtcccgaacccggacgaagtggccgacgtgaagtacgtgagccgggagcagctgcgggagctcatccagcaggcggacgccggcgagggcggcgtgaagctgtccccctggttcaggctggtggtggacaactctctcatgggctggtgggagcacttggagaaaggcac

SEQ ID NO: 436159 - DNA, 396 bp, Triticum aestivum
tattttcctcctttggggtgctcaatgaacttttcttctctttggctgcacttagatacttgtgtcgagatatacatcgagatggacaaccctccgagtacgcaggacatgtcctactatgatcatgttcagaagcgccatgaggagaaaggctgcttatatgcatgcctgtttacactgtgctgttgcttctgctgctacgagacctgcgagtgctgcatggagtccttgtgctgctgcggctaattttagctgcacatttctgctgttgcatggagatctggcaggctgggctgtactgtggaaacccatatcgtttcgcctcggtgagatgatgaacaggcatatgtgcttgttcgaataaaaactgtagttacgtctctattgtcatgtata

SEQ ID NO: 436160 - DNA, 444 bp, Triticum aestivum
gatgtctggctggaggacatcgtgggaaggccaaatatccgagctgaagaagcggagcacggtgaaggatgcagaagagaacctatcctggggagctcagatgcgaagaagaagggccgaacaattgtgacagtgcacctcttacactcttatgtccactagccatccgtagcatctaaactgtcgatatctttgtgtagcaaaagttagaaaggttattcttaagaagcatggttaggatcggagtacagccatggcgctgcttgagtcttgcctggtgtatgctaaaccatactaccatacatggctcacaggaaacatatagttcgactaggtgccaggatgtatgttgaacccaacggcgtcgctcctccttgaatctttacctgatgaaatgtaaatataatgagacagaagtaatcaaatctagttgtactatgaact

SEQ ID NO: 436161 - DNA, 442 bp, Triticum aestivum
ttggtttatgctccagcctgagaagtttggattctacaagcagtttcctagggcatgctgtggggctcccgggtccgttgccaaagccgcttacaacttcaacgtcacagccaaatgcggggagcctggtgccactgcttgcgctgacccatcgacccattggagctgggacggtattcacttgacggaggctgcttacggtcatatcgccaggggttggctatatggccctttcgcggaccaaccgattgttcagtccccgtgagcattccacctctgctgttgcacttgtagagcgtctgagaatggcgcactaaactggagcagggaaagtagttcttccatatagttccaatggttcaatacgtgtatattttcatttgattgaattcattgcaagtggggtacaaaggtaaaataggggatgccagaagaatgactt

SEQ ID NO: 436162 - DNA, 287 bp, Triticum aestivum
ttatttattttcccctgtgctacgtcgtcataggggccacggtcgccttgtatactcctcggatttgtgttctggggagcatattcatttttacagtggaccgatgatatgataatactttactgcccctcttttggttccttgttttgagaatattggttggttaaattgtgttgtagttcctgattacagtgaggaaagaagaaaaagggtggcatccccttgcccccgatgttgtaatgtagaaaaagaatgacttgtcagtaacaatgtgaagtatttttttc

SEQ ID NO: 436163 - DNA, 423 bp, Triticum aestivum
gggcagcgcccgcctcccctcctagcgtccggcgccgacctcctggacctctcctccgccatgatggacctggatccccgcctctacgaggacgcctctgtcagcgataacgatgttcgcaacatagtgctatcttatcttatgcacaattgttttaaggagaccgcagagaccttcctatccagcactgggctaaagtgacctgttgattatactgtagatgtggataaacgtaaagcgatcttaaattttgtggtggaaggggatgccgtgaaggccatagaactgacagaagagttggcgcccaacttgctagagaatgacatggattcacattttgatcttataagtcttcacttcattgagctaattcgtgccagaaaatgcacagaagcacttgagtttggccagaaaaagttgaca

SEQ ID NO: 436164 - DNA, 499 bp, Triticum aestivum
attttctttaacgtatcgaagccgaggagagcggagcagcctacgagccgccgatcgacatgggtctcaaggaggagtttgaggagcacgcggagaaggccaagacgctgcccgacaccaccaccaacgagagcatgctctgcctctacggcctctacaagcaggccaccgtcgggcccgtcaacacagcccgccccggaatgttcgaccttaagggcaaggccaagtgggacgcctggaagtccgtcgaagcgaaatccaaggaggaggcgatggcggactacatcaccaaggtgaagcagctgctcgaggaggctgccgccgcatccgcttcttcctaggccacagaacctacttttatccatggtggtgcagacatatgtgccaataaacacaaataaatttgaagtgctatctgtctaagcttatcgtcgtattgggtgtaattacgttgaacaagccccgcctgtgatatttgaatttacgccaatgatgaatc

SEQ ID NO: 436165 - DNA, 533 bp, Triticum aestivum
ggttctaaaccctcccctctcccacttctccactcctctccctccccaagaaaaaccgccgccgccgccgccgcagcagcagcaggcgagcgagatggtgtttgggaagaaccagatgaccagggcctactccaagcggttccaagtgaagttcaagagaaggagacaggggaagaccgattacagggccaggctcaggctcactaaccaagacaagaacaagtacaacacgcccaagtaccggtttgttgtgcgatttaccaacaaagatgtcactgcccaaattgtgtacgccaccatcgctggtgatatcgtgatggctgctgcctattcccatgagcttcctcggtatggtcttgaagttggcctcaccaactatgccgcagcgtactgcactggtctgcttttggcccgacgtgtgctcaagtgccgtgatttggatcaggaatatgagggcaatgttgaggccaccggggaggacttctctgttgagccagctgatgagaggaggcctttacgcgcgctcttggatg

SEQ ID NO: 436166 - DNA, 461 bp, Triticum aestivum
gggtcggccgggcgatcgccttcggcggatacaagatgagcggtaccggtagggagaagggcatcgacagcctgaagaactacctgcaagtcaaggcggtcgtcaccgcgcttaagaaccccgcgtggttgtgagcatagcgcagctatggtcctccgtgacactccggagaacgtgaagactcgcgacaattgactgcggagaggaagaagaagatgatgatgatgatgacaccaacgaggatcactaatgagcccctgccttcatgggcagccagccaccgtctctaataaatatcatatgtgatttggattcctttgtcaaccgcggcaagacatatatgttgtagcaacattatgtttattatcgcttgttggagaagtctctgggtgcagtaaatctgttttttttttatcagttgttgaagctaatggtgttcactaccctagttaattcatgcc

SEQ ID NO: 436167 - DNA, 498 bp, Triticum aestivum
ttttcattaggagcacgatagggggcgacagcctgtgggagctgatttggctccatgtgggcaacatctagacgggcctgcagtcggaggtcttcccgagccaggagtatgagccgccgagcaatgccggtagcccgagaggggggctgaacgacgccgagattaagaactagaaaaagctcatgggtcggctcatccattgagacgtaagggtttgatattgtaacccgcatttcgccgcctccattgtatgtatatttattctgtccgagttgctgttgttgcgtaaaactgtggcagcaatgtgagcagattgacatgtttgcgctgctgacctgagtggctgcgatgcacgtttcatcatcagcactggaaatgctgttgtttcgcagaaagttcaagtttgtgtgctggtttgtataaatttggctcattttctaattgggactcgtttggaagatatgttttatgttttttgcaccggtttcacatgaaaaa

SEQ ID NO: 436168 - DNA, 351 bp, Triticum aestivum
ttttgttttcctgcttgccgctctcgctccgcaggcgccgtcgacgtcgccgccgccacggccagagctcgactcgctccctagaggtaaggatggtgagagtcagtgtgctgaacgatgctctcaagagcatgtacaacgctgagaagcgtgggaagaggcaggtcatgatcaggccttcttccaaggtcattatcaagttccttatcgtcatgcagaagcatggatacattggcgagtttgagtatgttgatgatcacaggtctggcaagatcgtggttgaattgaatggcaggctgaacaagtgtggtgtcatcagtcctcgctttgatgttggtgtcaaggagattg

SEQ ID NO: 436169 - DNA, 438 bp, Triticum aestivum
ccttatctccaaaccctagtagcgccgccgccgccaggtaagaggcgagatggtgtccggctccggtgtgtccgcgcgtcgcgtggtggtggatgcgcgccaccacatgctgggtcgccttgcgtcgatcgtggccaaggagctgctcaacgggcagcgcgtggtggtggtccggtgcgaggagatgtgcatctccggcggcctggtccgtcagaagatgaagtacctccgcttcctccgcaagcggatgaacaccaagccctcgcacggccccatccacttccgcgccccctcgcgcattttctggcgcaccgtgcgcggcatgatcccgcacaagacgccccgcggcgaggccgcgctcgccaggctcaaggcgttcgagggcgtcccgccgccttacgatcgcaccaagcgtatggtcatccccgacgcgctcaa

SEQ ID NO: 436170 - DNA, 438 bp, Triticum aestivum
tttcttttcgtccgtgaagagatgcatcgttcctagcatcctgctgatgttttcactggaggcagcgctcctcgtcgccggtcgcacctccgccgccgacgaagtgggcgccattctcctgccgagccaaggccaagaggaagcagccatggcggcggccaagaagaggccgtggaagtgctgtgaccaggcggtgtgcaccaggtccatcccgccgatctgcagctgcatggaccaggtcttcgactgcccctccacctgcaagtcctgcgggccgtccatggctgacccgtcccgccacgtctgccaagaccggtacgtcggcgaccccgggcccatctgcaggccgtgggagtgctgcgactcgcctacctgcaccaggtccaacccgccgacgtgccgctgcggggacgaggtcgacaagtgtggtccgacctg

SEQ ID NO: 436171 - DNA, 390 bp, Triticum aestivum
cgctccctatcgtccggatatttcccccgagccgaggtcaagtcgcctcgtcccgcgctgcgtttctcctcctcccccgctcctcccccattcgccgtccgcggttctctccaccgaacaagctcacacatcaagacaataaatagagcctcgtttgtttggggccgaccaaaccaaacaacaagttcatgtctgatctcgacgcccaggttccaactgctttcgatccgcttgctgaggcaaatgctgcggactccggcgctggtgctggatcaaagaactatgtgcatgtgcgtgtccagcagcgcaacggaagaaagagtctgactactgttcagggcttgaagaaagattacagctacaacaagattctcaaggatctcaaaaagg

SEQ ID NO: 436172 - DNA, 419 bp, Triticum aestivum
agattcactacgagacaactgggcctgagtccgggaaaggcacaggcggaaagatcgatggccttgtttctggcatcgggacaggcggtaccattactggatctggtaagttcctcaaagagcaaaaccctaacatcaagctctacggtgtggagcctaccgagagtgctgtcttaaatggtggaaagcctggaccacacaagatccaaggaattggagctggttttatccctggtgtcttggatgttgacatcattgatgaaaccatacaggtttcaagtgatgagtccattgagatggcaaagtctctggcattgaaagaaggattgctggttggaatctcttctggtgctgctgcagcagctgcaatcaaggttgctcagaggcctgaaaatgcagggaaactctttgttgttgta

SEQ ID NO: 436173 - DNA, 385 bp, Triticum aestivum
ccctcgcgtccgcccacgcgtccgcccacgcgtccgcgatcaatccatcaccacccccagaattcatccagatacgcatacacccgcccggcttctagcttacttgctttagcacttctttgcatatctcgatggagtgcgagaacgggcacgttgccgccaacggcgatggcctgtgcgtggcacagccggcgcgggccgacccgctcaactgggggaaggccgcggaggagctgtccggaagccacttggatgcggtgaagcggatggtccaggagtacccgaaggccggtggtgaccatggagggcgccagcctgaccattgccatggtcgccgcggtggctgccggcagcgacaccagggtggagctcgacgagtccgctc

SEQ ID NO: 436174 - DNA, 328 bp, Triticum aestivum
ttctcgcgttcgcccacgcgtccggaagtactacaaatcaacgggcgacaggggagtgatcaagcagagcgaccttggcctctatgtgtttgcgtcgaagccgtcgagcggcgcggccatactgaggctgtagatcgaccaccgccggccgtggccggtcgcttgtacatgcacacatacctattgctcgaataaacgcgtgctcgaggcgagcacgctgccattagctaatttagtccccgcccatgcgtgtctgaatgtacaatgccagtacaatgtgtagtagttatcgctgtttattatgggcgatctgactgccacgttatct

SEQ ID NO: 436175 - DNA, 507 bp, Triticum aestivum
tttttataatgattgccttgcatgacggggaagttgccacatgttcacccttcaccaattgacttggttgaaaagatgctgactttcgatcctagacagagaataacagttgaaggcgcacttgcgcatccttacctggcatcgctgcatgatataagtgatgagccagtctgcacgatgcccttcagctttgacttcgagcagcatgcgttgtcggaagaacaaatgaaggatctaatccaccaggagggcatcgcgttcaaccctgattaccagtagctggtgttcctttgatcggcttcattcatatggaaagttttcggtcctcctgccgccataaaatgtcgctagctgtaaataattgcctcacccagagaatcaaaaggagatggcgtgttaagggtagatgacaagagctgtggtggtcaaatttccgtgtagcctatggattcttgtgcttgtgtatgttgttttatgtggattttttccccttctgcttgaagatgt

SEQ ID NO: 436176 - DNA, 928 bp, Triticum aestivum
tttcccacgcgtccgttccgatcaaacgcggcggcagcagcagcagcggcagcgcaagtagagcaattggaattttcgccgacacatctcttcaattgatcgtaatcagaggtggttgggagtatcaccaccaccactcatgatacggcggccgagactttcctcttcacctctgagtctgtgaacgagggccaccctgacaagctctgcgaccaggtctctgacgctgtgcttgacgcgtgcctcgcccaagacgctgacagcaaggttgcctgtgagacatgcaccaagaccaacatggtcatggtttttggtgagatcaccaccaaggccactgttgactatgagaagattgtgcgtgacacctgccgcaacattggcttcatctctgatgatgttggccttgatgctgaccggtgcaaggtgcttgtcaacatagagcagcagtctcctgacattgcccagggtgtgcacggacattttaccaagcgccctgaggatattggtgctggtgaccagggtatcatgtttggctatgccaccgatgagacccctgagctcatgcccctcagccatgtgcttgccaccaagctgggtgcccgcctcactgaagtccgcaagaatggcacttgtgcctggctaaggcctgatggcaaaacccaggtcacggttgaatacctcaacgagggaggtgccatggttcctgtacgtgtgcacactgttctgatctccacccagcatgatgagactgtcaccaatgatgagattgctgcggacctcaaggagcatgtcatcaagccggtgatccctgagaagtacctggacgagaagaccatattccacttgaatccatcaggccgctttgtcattggtggccctcatggtgatgctggtcttactggtcgcaagatcatcatcgacacctatg

SEQ ID NO: 436177 - DNA, 333 bp, Triticum aestivum
tttcccgccgcgccgatccccccaccagcgcagcagcagccatggcgaccgcctacaacctccggtcccgcgacgagccggacgacttcgacgagttcgactccacgccctacggcggcggctacgacctcttcgtcaccttcggccgcccgctcccgccctccgacgagacctgctacccctgctccgccccctccacctcctacgacgcgccccactacgccgccgaggagccctccccctacgcccaccaccagaagccgcagcccgcctacggcttccgcccccagaacgagcagcagcagcagcctttctacggccgtgaggacgacg

SEQ ID NO: 436178 - DNA, 494 bp, Triticum aestivum
ccacctgtgctgagaaatcgacggccagcacctcacctccgccgccatcctcggccacgacggcagcgtctgggcgcagtcccccaacttcccccagttcaagcctgaggagattgctggcatcattgaagactttgacgaacctggacaccttgcaccaactggtcttttccttggaggcgcaaagttcatggtcatccaaggtgaacctggggttgtcatccgaggaaagaagggcaccggtggcatcactatcaagaagaccggcatggccctgattctcggtatctacgatgagcccatgactcctggccagtgcaatttggtcgtggagaggctcggcgactacctggtcgagcacggtttctaagcccgctctgatatgctgttattttggtcgtctgggactaagtttgctctactgtgggctttgcatccatctgcttggcgtaccgcatgatatatgcagtgaataattttagcttggggtttgt

SEQ ID NO: 436179 - DNA, 255 bp, Triticum aestivum
cgtctaacatccctgcgcatttgagagggaggagggattcattcagcggccggtaatcaatggcttccgctactgcttccgtctcgtcgcactccagcgccctgcgcgatctcaaagccgcgaggattggagccgtgaggcagcaggtggccgtggttccagcgggcctgccggcaaaggcgcccaagggccagcgcgcgagggcggtgcgcccgctgtgcgcggcggagccagcgaggaagccagtgtcggcct

SEQ ID NO: 436180 - DNA, 418 bp, Triticum aestivum
ggcctcgagaagagttatcttttctgctttcgcgtctgctacacttcctctcccggcccggctagatctcgccggcaggagatggcggacgcgaagcagcagcaggccgcggcgcccaccggcgtctggaagacgatcaagccattcgtcaatggcggtgcctccgggatgctcgccacctgcgtcatccagcccatcgacatgatcaaggtgaagatccagttgggtgagggatctgcagctcaggtcgcaaagaccatgtatgctaatgagggccttggttccttttacaagggtttgtcagctggtttactaaggcaagcgacctatacgacagctcgtcttggattcttcagggttttgacaaacaaagcaattgaggcaaatgatgggaagcccattgcacttgttcagaaag

SEQ ID NO: 436181 - DNA, 585 bp, Triticum aestivum
cttaaatacccgcagcattacattgtatgggatatgaatctggatagtcacatctattctgaatttgtagtcaccatcaaattgccatctaaagccaaagattccctcttcacacaagaagattgtcacgattcatctgatgcttcactggtcttgagtccaagttcggccgacagtgtatcacaggacatgaatcttgaggcatctccagcattgggtggtcagtatgaagcccccatgttaggaggatcaatggcaaaagctccaagtacaccttggatgcccttttccatgttatttgctgctatttcaaccaaacttcctcgcgagaaaatggacatgatcaataactgttatgaagaattcaaggccaagaaaataagcagaattgacctagtgaagaggctgcgtctcatagttggtgacagaatgctggtatccacaataattcggctccaagataagttgcctccgatggcgaagcgggaagcagcaaatgctccagccaaggcacgaggtcagtgaccatggtggattggaggaaggaactggtcgacttgttatcatgagttggaaaggaatgta

SEQ ID NO: 436182 - DNA, 361 bp, Triticum aestivum
cctacgtgtccgtaaactcgcccccaccccatctagggtttggccctgccaagagacccgcgacccccttaatccttctcccagcccttatctgtatccctctccatggccacggcggcggcggcgaagcggaagccggtgttcgtcaaggtggatcagctcaagcccgtcaccagcggccacacgctcgtcgccaaggtgctcagctccaagaccgtcctccagaaggcccgcgccgctggcggccccggcccagccgccaagcccaccaggatcgccgagtgcctcatcggcgacgagaccggctgcgtcctcttcaccgcccgcaacgaccaggttgatgttctgaagcctggcaaca

SEQ ID NO: 436183 - DNA, 434 bp, Triticum aestivum
tgcgcacccctctcgctctccgctccatctggtccgattccattcgattcgatctcggcttcctctccaagccacgcgacgcgagaccagagctccggccatggcggcgacgatccagtccgtgaaggcccgccagatcttcgacagccgcggcaaccccaccgtcgaggttgatgtgtgctgctcagatggaaccttcgccagggccgccgttcccagcggtgcatcgactggtgtctatgaagctttggagctgagggacggtggatctgactacttgggcaagggtgtttccaaggctgttaacaatgtgaactccattattgcacccgctttggtcggcaaggaccctaccgctcaaactgagctcgacaactttatggttcagcagcttgatggaaccaagaacgagtggggtttggtgcaagcaaaag

SEQ ID NO: 436184 - DNA, 365 bp, Triticum aestivum
tgtcttttgcccacgcgtccgcccacgcgtccggtgcgccattatctacagccacagctcaacacatcatttgcaccggtcgtccttgatcatcacagcaatggcctccaccgacagctggacccacgagatcgaatcgccggtggccgcggcgcgcctcttccgcgccggcgtcatggactggcacacactggcccctaagctcgcaccgcacatcgtcgccagcgcccaccctgttgagggcgaaggcggcatcggcagcgtcaggcagttcaacttcacctcagccatgcccttcagcctcatgaaagagaggctcgagttcatcgacgccgacaagtgcgagtgcaagtccaccctcatcg

SEQ ID NO: 436185 - DNA, 405 bp, Triticum aestivum
ggatcttctgggtgggcccgtccatcggcgcggcgctggcggccatctaccacgtggtggtgatcagggccatccccttcaagagccgcgactagtccaccaatcaaccagctcctgcgaatggaatcttatcgctgctcatcgccggtcgatcgatcatgtggtggtggcggtggctgctcgcgcgcgcgtaggacgtggatcatgtctcggccgcgcacgctgcgatcatctatatctaccgcgctgttcctcccctcctcggtgtgtgtgcctgtcggcagcgtcacctgttcaagtctgcgagttgcactttcccttccttgtgtattgcactacgcacgcgatttaatcgggcgtgcatatctatgcaaattattacgtattatgaaggaaggacgatcg

SEQ ID NO: 436186 - DNA, 203 bp, Triticum aestivum
ctcttaccagagtgttcacttgcaagctccggacactcaaagatctctttgtatgttgtaaacatatttgatcaattacaatacatcaaattggtaggtttgatcaaattagtcatggttggccatggaccaaattagacacctggatatgatactgatgtatcttgttcatatgcaaatcccttgcttgggttgttgagacc

SEQ ID NO: 436187 - DNA, 425 bp, Triticum aestivum
gtcgacgggtaggcaattgctctagtacttccattatatcttttagagcatggcggtggttataaatagttgcactctcatgcttcacttatatctttttgagagttgataatagtaatgacaattagtgtgggttataaatttggtcctaatgtgataggtattcaagtgggatataatacaaactttcatgtagatcactgaaaatgataagtttgattccttgcaatagtttgcgatataaatgtggtaatatgcgggttgtgctagttagtaattgtggtttagtaagaatattggtgttaaggttcgtgattcccgaagcatgcacgtatggtctctcgttatgctatgaagttgcatcatgatttattattgattgtcatccttatgagtggcggtcagggatgagcgatgggcttttt

SEQ ID NO: 436188 - DNA, 431 bp, Triticum aestivum
cgggtcgaccggacttatattattttgagagtcctaaacaacatggtaatttgctttggttatgaatttagtcctaatatgatgggcatccaagagggatataataaaaactttcatatgaagtgcattgaatactaagagaagtttgatacttgataattgttttgagatatgaagatggtcagtggcggagccaactcaagtttagagccggggcaagatctaagtgctgccaaattacttagtttctacccaaacaaacttccacttcacccaattttctctactagagcttcatggacttgcaccaagggagcccgggcaagtgccccagctcgccaggtgctgtcaccgccactgaagatggtgatattaaagttgtgctagttgagtaattgtgaatttgagaaatacctgtggtaaagtttgtg

SEQ ID NO: 436189 - DNA, 630 bp, Triticum aestivum
aagtcccgggccgacgggggcggaaaccaaaaccatcgcactaaaaaaaaatgcattattaaaattaagaaaataatacaagtatctatctaaacatacaagtaagaatatttttcctttcagaaagaagataagaacaagaggctcaccacgggtggtgccggcgatgagctcggcgcgggtgatcgacggcggtgaagacggggatggggtgtgacggaccactaaacctagacaaatattatggaaaatggagcttgggggtcaagcttggaaaggagaaagcttaagtagtgtggctcgggcattccatcgaacacgttgtgtgcataggaggtgagctagagcaccaccaagccctctccccctcggcgggccagaaagaacatagcagtgtgctgtgctcttacgcgagggggtatatataggcaccatcattggtcccggttggtggcatgaaccgggaccaaaggcatccgggaccaaaaggtccggacgaaacgggaccaatggcccacgtggcccggtcggcccctgggctcacgaaccgggccaaatagcctcattggtcctggttctggattgaactgggattaatgggctgacctggactggacaatatcccccttt

SEQ ID NO: 436190 - DNA, 862 bp, Triticum aestivum
aaacagccttagagtttgtagtagaataacactttatgacacaaatcaaccaaaaccttaatgtaacgtagatactccaatgtcacctcaagtatccgtgggcatgattatacgatatgcatcacacaatctcagattcatctattcaaccaacacataggacctcaaagagtgccccaaagtttctaccggagaatcacgacgaaaacgtgtgccaacccatatgcataggttcatgggcggaacccacaagttgatcaccaaaacatacattaagtgaatcacgtgatatcccattgtcaccatagataaccacatgcatgacatacatcaattgttctcaaatccttaaaagactcaatccgataagataacttcaaaggtaaaactcaatccattacaagagagtagagggggagaaacatcataagatccaactataatagcaaagctcgcaatacatcaagatcgtgccatagagggaacacgagagagaacacgagagagagagagagagagatcaaacacatagctactggtacataccctcagcctcgagggtgaactactccctcctcgtcatggagagcgccgggatgatgaagatggccaccggtgagggttcccctcccccggcagggtgccggaacagggtcccgattggtttttggtggctacagaggtttgcggcggcggaactcctgatctaggtttctttctggaagtttctgtatatgtaaggggttttggcaccgagaacaagtcaggtgggtctccgggctgtccacgaggcagggggcgcgccccccaccctcgtgggcagcccgggactcttctggcccaactcttttcttctgggggg

SEQ ID NO: 436191 - DNA, 535 bp, Triticum aestivum
cgggtcgacgggataaaaatatgatagattggataaatagatctcgcgagaacacgagataaaataaataacaataaattgcagtaagatatttttgtgtttttggaaatatagatctaaaaataaaagcaaaggaaaaatagatcataaaggcaaatatatgatgggaaaatagacccgggagccgtagatttcactagtggatttctctcgagaaaaatagcatacgatgggtaaacatattactgttgggcaattgataaaacatcgagtaattatgccgatatccagacaatgatcattatataggcatcatgttcaagattagtagactgactcctgcctgcatctactactattactccacacatcgaccgctatccagcatgcatctagtgtattaagttcatggagaaacagagtaatgcaataagaacaatgacatgatgtagacaagatctattcatgtagaaatagaccccatcttgttatccttaatagcaacgatacatacgtgtcatgtcccctcccgtca

SEQ ID NO: 436192 - DNA, 1145 bp, Triticum aestivum
  unsure (1)..(1145): unsure at all n locations
tgccccggatggcatcccctctttcgtcttcgttcatcggtaactttacttggagctatatttttattcgccacatgatggcatcccctgttttgcttggagcattattttattttgctagtttttgcttgctgtcagttagcataatgttttgcatctttagtttcaataaaaaaagtcaaggatagcctttgccatgcttaatttgctagtttgcatgttgctgtttgaaaacagaaagttcaccgttgttgcaaaaattccctagaaaagtcatagaatggtataacgttgaatctttttgcatattaagctctgataaatttattacagtaggaattttagttcataatttgtggattcagggaagtatttttactcctgcattctttacatactgtactgttttcgcagattgctgttatgtttgcattgtttgcatatgtttgcttgtttaatgattctatttgaggataggagtattaaatatgcagaggcattttagtatgcaattttgaataataattttagtgatttgttacagtagataatgataaggttattgcgttgatttatactaacttatctcacgagttcttgttgagttttgtgtggatgaagcttttttgagaaatagagaaaccatgatatgagaggaattaaggagacacaaaagttcaagcttgtggatgcccaaggcaccccaagataatatttcaagaagtctcaagaatctaagcttggggatgccccagtaggcatcccacctttcttcttcaacaactatcggttagtatctgttgagcctaagttttggcttcttcacatgagttgtgctaaccttgcaatgtcattttattttgttttgcttgatgtttgaatacaataccaagatctaaaattccttaaagttagagagtcttcacatagttgcataattatttagctactcattgatcttcacttatatctttcggagtagtttttgttgtttgctctagtgcttcacttatatcctttagagcatggtggtagttttattttgaagaaatatatgatctatcatgcttcacttagattattttgagagtcattaatagcatggtaatttgcttaatgtttaaatacttggtattcangatatg

SEQ ID NO: 436193 - DNA, 883 bp, Triticum aestivum
cggtcgagatagccgggtcgaccggggcggataccaaaaccatcgcactatataataataaggaataataaaagtaagaaaattagacaagtatcaatcgcaagtaagaatttttttcctttcagaaagaagataagaacaagaggctcaccacggtggtgccggcaacgaaatcggcgcgggcgatcgacggcggtgaagacggggacgagacgtgacggaccgctaaacctagaaaaatctcggcgaaaatggagctcggaggtcgagtttcgagagaagaaatattaactactgtggctcggacatttcatcgaacacctcatgtgcataggaggtgagctagagcacccaaatgtgccctcccctcgccggccagagaaaaacagagcactgtggagtgctctgcttgtcggcgagggggtatatataggcagcaccactggtcccggttcatggcatgaaccggcactaaatgggagcctttggtcccggttcttgccacgaaccgggaccaatggtggtgggccaagagccaggcccattggtcccggttcgtcccaccaaccgggaccaaagatgccagatgaaccgagaccagtgccccacgatggcccggccagccccctggggctcacgaaccgggtccaatgcccccattggtcccggttctggattgaaccgggactaatgggctggatcggcctggaccattggccccttttctactagtgttatagaatgcttcatgtgcttcacttatatcatttgaagtttggatttcttgtttctcttcacatagaaaactgatgttcgtagaatgctcttttgcttcacttatatttgttagagcatggtcttttgtagaaagaattaaaatctc

SEQ ID NO: 436194 - DNA, 1133 bp, Triticum aestivum
cgggttatttggaatttattagaatactctatgtgcttcacttatatcttttgagctagatagttttgctctagtgcttcacttatatcttttagagcacggcggtggcttgattttgtagaaattgttgatctctcatgcttcacttatattattttgagagtcttctagaacagcatgatatttgctatggttataaaattggtcctagaatgacgggcatccaagttgggtataataaaaactatcatagaaagtgaattggatgctatgatcaatttgatgcttgataattgttttgagatatgaggatggtaatattagagtcatgctagtagagtaattatgaatttaaggaatacttgtgttgaagtttgtgattctcatagcatgcacgtatggtgaactgctttgcgatgaagttggagcacaattttatttattgattgtcttcattatgagtggcggtcggggacgagcgatggtcttttcctaccaatctatcccccctaggagcatgcatgtagtgctttggtttttgatgacttctagatttttgcaacaagtacatgagttcttttgactaatgttgagtccatggattatacgcaccctttcacccttccatcattgctagactttcttgtgccgcgcaactttcgccggtaccatatacacccaccatactcctttcctcaaaacagccaccatacctacctattatggcatttccatagccattccgagatatattgccatgcaactttccaccatttcgttcatatgacacgcattacttttgtcatattgctttttgcatgatcatgtagttgacattgtatttgtggcaatgccaccttcataatttttcatacatgtcactcttgattcattgcgtatcccgggtacaccgccggaggcattcatatagagtcataccttgttctagctttgagttgtaaatccataaaagtgtgatgattttcattattagagcattgtcctcgtgaggaaaggatgatgaaggctatgattcccccacaagtcgggatgagacttcagactttacaaaaagaaacaaaagggaaaaaaaaaaaaaaaaaaaaaaaaaaaaaacgggcggcccaaaaggt

SEQ ID NO: 436195 - DNA, 689 bp, Triticum aestivum
gcccataaacatccaaaacagataatcaaatagcatgaatgcttcataaattatagatacgttggagacgtatcagggacccaacggacgggccagcgtattttgcaaaaaaaaacgttccccccgctgtcagctcggacccaccggaagtgcctccttattacgcacaaaaaaatgaatacttcccctgctagtcgggacccaccatggtgggaggctgacttgtgggcctactaagttgactgggacgggggcctttgtcaactttagtcaatatgaacgattctagctccactgaccgtacgatgtccatccaacgggccgtagtgtttcttcaacctctggtcttcttgctccagccgcccgaagcagcgtcggtcgtgccgcgtgctcctggcttcccgtggccggttgtgatgctgcggaggcctcaccgcccccatactactcccaccgctggccaggccatccctctactcacccacaccccatgttattcttgccgcgacggcagcctcacaccgtagccgaaccagtgaaccctcgtactcctctacgcgtgggcatctgatacgtctccaacgtatctataatttttgattgctccatgctactttatctactgtttggactatattgggctttattttcctcttttgtatcactttcgggtctcccgtcgacccggg

SEQ ID NO: 436196 - DNA, 1520 bp, Triticum aestivum
  unsure (1)..(1520): unsure at all n locations
attcacgggtcgacgggtcatgtcaatggctaggaaacttaaccatctttgattcaacgagctagtcaagtagaggcatacttgtgacactttgtttgtctatgtattcacttttgtactaagtttccggttaatacacttctagcatgaataataaacataggccgcctccacctctctcccactaaggcccaataaggcccatacactccccggggggttccggtaacccctccggcactccggttttatctgaaacttctccggaacacttccggtgtccgaatatagtcgtccaatatatcaatctttatgtctcgagcatttcgagactcctcgtcatgtccgtgatcacatccgggactccgaacaaccttcggtacatcaaaacatataaactcataatataactgtcatcgtaacgttaagcgtgcggaccctacgggttcgagaactatgtagacatgaccgagacacctctccggtcaataaccaatagtggaacctggatgctcatattggatcctacatattctacgaagatctttatcggtcaaactgcataacaacatatgttgttccctttgtcatcggtatgttacttgcccgagattcgatcgtcggtatcctcatacctagttcaatcttgttaccgtcaagtctctttactcgttccgtaatacttcatcccaaaactaactcattagtcacaatgcttgcaaggcttatagtgatgagtattagcgagcgggcccagagatacctctccgaaacacggagtgacaaatcctaatctcgatctatgccaacccaacaaacaccttcggagacacctatggagcatctttataatcacccatttacgttgcgacgtttgatagcacacaaggtgttcctccggtattcgggagttgcatgatctcatagtccgaggaacatgtataagtcatgaagaaagtagtagcaatgaaactgtagtgatcttaatgctaagctaacggaatgggtcaagtcaatcacatcattaattctcctaatgatgtgatcccgttaatcaaataacaactctttgttcatggttagaaaacttacccatcattgattcaccgagctagtcaagtagaggcatactagtgacactctgttttgtctatgtatccacacatgtatcaagtttccggttaatacaattctagcatgaataatagatatttatcatgatataagaaaatataaataacaactttattattgcctctagggcatatttccttcagcgcgtagttcttggtttttgatgacttgtagatttttgcaataagtatatgagttctttatgactaatgttgagtccatggattatacgcactctcacgcttccacctttgctagcctctctagtaccgtgcattgccctttctcaccttgagagttggtgcaaactttcccggtgcatccaaaccccgtgatatgaaacgctctatcacacatanacctccctatatcttcctcaaaacagc

SEQ ID NO: 436197 - DNA, 1245 bp, Triticum aestivum
aaggcgtgagtgagagaggagaatccctatctctttataaaggcggtagaaattgtgcgcctccccactcgcctgttaaaatcgcttattccccaagagccatgattgatggcgcggttgggttacccatgcccgtattgatgagaatcccgcgataaggggacacgatctctgcttcgacaagacgtgtcaaggaaaccgcctcgcactacgtgcagtagctggttgtgagaaacgtttcgaataatgaccggtccatggcagaacgtcacgctatgaaacagttgtcagcagattagatgtgtgggaatattatactctctacggtggtatgcggaatttgtttttgcagagccagacacgattcctgtgttcaaaatcttctatgaagtattcggagaaggaacctgccttgcaatgccgatgacactctgaagggcaagactcagcttcattgaatcctggttcgggggctactgagggagtcctggattaggcggtccttggacagccggaccatatcctttggccggactgttggactatgaagattcaatattgaagattttgtcccgtgtccgggtgggattctcctttgcatggaaggcaagcttggcaattcggatatgtagatctcctaccattgtaaccgactctgtgtaaccctatccggctatccctctccgatatctatataaaccggatggctatagtctgtaagacacaacaacaaccattacaatcataatcatagccagactaggcttttagggtttagtcattacgatctcgtggtagatcaactcttgtaatactcatattcatcaataataaatcaagcaagacgtagggttttacctccatcaagagggcccgaacctgggtaaaaacatcatgtcccttgtcttctgttacacatgcacctagacgcacagttcgggaccccctaccccagatccggcgattttgacaccgacgatgagaaacgtccatctctagtactggatgacgcggtcttaataggctctccggcatggtggaggatggtggcgatggatgtagtggaggacggcggcgatggatgtggtggaggacggcggcgatggatggggtggcggatggaggaggctggtgtggggatggtgttctagcacggatggtgtatgaatgggaaaatggagggagaggtatagggaacaacgtttttgggatgcgcctctctgaaatatgggaaagttacgaact

SEQ ID NO: 436198 - DNA, 1494 bp, Triticum aestivum
gggtcgacgggtcatcggtaactttacttggagctatatttttatttaccacatgatatgtgttttgcttggagcgtcaatttattttgttaggatttgcttgctgttatttagaacaatgtttttcatcttttatttcaataaaagtggcattgatagcctctactatgcctatgttacaagtatacatgttgctgtttgaacacagaaagtttaccgctgttgcaataattccctagaaaagtcagaatgtgataaaatgttgaaaccttttgcatattaagatatgataaatttaatacagtggaaattttctttcataatttttggatctagggaagtatggatgttgcagcattctttacagactatcctgtttaagcagattgctgttatgtttgaattgtttgcatatgtttgcttctttaatgattcgatttgaggataggactattaaatatgcagaggcatttagtatgcaatgttgaataacaattttagtgatttgctacagtagagtatgataaggtttttgcaatagtttatactaacttatctcacgtgtcctggttgagttttgtgtggatgaagcttttgagatttagggagaccgtgatatgagaggaattaaggagacacaaaatctcaagcttgtggattcccaaggcatcccaagataatatttcaagaagtctcaagcgtctaagcttggggattgcccgaaaaggcatcccctctttcgtcttcaataaactatcggttaatattggttgatcctaagtttttgcttattcacatgatgtttaccattcttagaatgtcattttattttgttttgttttgcttgctgtttgaataaaataccaagatactgaaattattaaatgttagagagtcttcacatagttgcataattattcgactactcattgatcttcacttatatctttcggagtagtttctcattttctctagtgcttcacttatatctctttagagcacggtggtggtcttattttgaagaaatagatgaactctcatgcttcacttacattattttgagagtcttttagaacaacatggtaattttcttgggttataaaatttagtcctcatgtgataaggtattcaagagggatataataaaaactttcatatagagtgcattaaatactatgagaagtttgatacttgatgattgttttgagatatgaagatggtgatattagagtcatgctagttgagtagttgtgaatttgagagatacttgtgttaaagttcgtgattcccgtagcatgcacgtatggtgaaccgttatgtgatgaagtcggagcatgatttatttacttttattgtcttccttatgagtggctattggggacgagcgatggtcttttcctaacaatccaaccccctaagagcatgcgcgtaatactttgccttgagaacctgtagatttttgcagtaagtatatgagttccttaagaccaatgt

SEQ ID NO: 436199 - DNA, 2949 bp, Triticum aestivum
gggtcttggggatgctatgtttaatgaagatgatatttttagcctcccaagttttgatatgcaaagttgttatgatgatagcatgcctcttacttatgattatattgatgaaagtgggtctggaagagtgtcaactttaggaagtgatgattccactatcttgggagaggtctcaatcgattatgatgagaacaaagttggtacttatgatgattattgtgatgaaacttatgctataaaaaatagtgacgattatatttataaaacttgtcatgattatgattaccctttttcttaacgttactcttttaatgtggaaacaaattttagtgttcaagtctcttatgatactcccgctgttccgaatgagaagaattttgcttatgtggagagtagtaaattttctatgcttgtagattatgaaaagaatgctttaggtgttgtttatattgttgaattcattcatgatgctactgaaaattattatgagggagtaatatatgcttgtaggaattgcaataatgtcaagtttcctctctatgtgttgaaaatcttgaagctatgcttgttttaccttccaatgctagttgattatcgttcccataagttgtttgctcacaaaatccctatgcatacgaagtgggttagacttaaaagtgctagtcatatgctttatgatgctcccgttatgtttcaattcttatcttttatgtgagaatcattgaaatcatcatgcctagctaaaaatgcattaaagaaaagcgcttgttgggaggcaacccaattttacttttgtttttgtttctcgctttttgattctgtttagtaataaataattcatctagcctctgttttggttgtgtttttttgtgtttaattagtgtttgtgccaagtagaaccgttgggaagacttgggagaaagtcaatgtgatcttgctgtaaaaaaatagaaactttagcgctcacgaggactgctgtcattttttttacagaagagtgatatttagttaattcttttttgaagatgattaatagataaattcctcacgtccagcaatttattttagaatttttggggttccagaagtttgcgttagctatagattactacagactgttctgtttttgacagattccgtttttcgtgtgttgtttgcttattttaatgaatctatggctagtaaaatagtttataaaccatagagaagttgtaataaattaggtataacaccaatataaataaataatgagttcattatagtaccttgaggtggtgttttattttcttatactaacggagctcacgagattttctactttgagttttgtgttgtgaagttttcaagttttggatgaattctttttggtggattatgaaacaaagagtggcaagagcctaagcttggggatgcccatggcacccgcaaggtaaaatccaaggataaccaaaagcctaagcttggggattccccggaaggcatcccctcttttgtcttcgtccatcggtaactttacttggagctatatttttattcaccaacatgatatgtgttttgcttggagcgtcttgtattatttgtgtctttgcttgttagtttaccacaatcatcctttctgtacacaactttttgagagagccatacatgatttgaaatttgatagaatactctattatgtgcttcacttatatcttttgagctaagtagttttgctctatgtgcttcacttatatcttttgagcgttataattttgctctatgtgcttcacttagatcttttcgtgcacggtggtggatttgttttaaataaactattgatctctcatgcttcacttagattattttgagagtcctacaaaacagcatggtaattttcttaaattgtgaaattagtcctaaatatgataggcatccaagagggatataataaaaactttcatatagagtgtattgaatactatgagaagtttgatacttgattattgttttgagatatgaagatggtaatattagagtcatgctagttgagtaattgtgaatttgagaaatacttgtgttggatgtttgcaagtcccgtagcattaacatatggtaaactttgtgtgacaaatttgaaccatgaggtgtttctttgattgtcctccttatgagtggcggtcggggacaagctatggtctttttcctacaactctagccccctacgagaatgcgcgtaatgctttggtttttgatggcttgtacatttttgcaataagtatatgagttctttatgactaatgttgagtccatggattatacgcactcttacccttccgcaatttgctagcctctatggtaccgtgcattgccctttctcaccttgagagttggtgcaaactttcaccggtgcatacaaaccccgtgataatcatagattctatcacagatttacctcgttatatcttcctcatgacagccatcatacctacctatttatggcatttccatagccattccgagatattattgccatgcaactttccaccatgcattccgtttatcatcatcatgatcatgacatacattacttttgccacattgtcattgcatggtcatgtagtgtgacatcatatttgtggcaaagttcaccatgcataatttttttaaacatgtcactcctgattcaatgcgccatccccgtacgtcgccgtgggcattcatatagagtcatatcttgttctaagtatcgagttgtaattcatatgttgtaaatcaataaaagtgtgatgatcatcattttctagagcattgtcccaagtgaggaataaaacaaagagagaaaggccataaaatgagaaggcccaaaaaaagagaaaggcccaaaaaaaggggcaatgctactatctctttttccacacttgtgcttcaaagtagcacattgttcttcatgtagtgagtctcatatattgt

SEQ ID NO: 436200 - DNA, 6047 bp, Triticum aestivum
aattccgggcgacgggaggctccaaccttcccttttcatgcaaatttaatgataatgaaaccttagcttcttatgctaatggtatctatgattactatgatgtggaacaaatagaaaaatttgttgcttttatgtgtgcttatgagattgaatctatgtttaaagagtttgatgatattgatgatgcttgttatagaacttgaaaatttagatatccttaataattgttatgagaattatgaatacaattatgatattaatgcacttattgagaaagtctccgttgtccaagaagagactaatattttgcaggaatctatggaataagaagttgatgaaactgtgagctcattggatgaaaaagatgaggaggagagcgaagaacaaaaggaggaagagcggattaatcacccgtgcccacgttctaatgagagtaactcctcaactcatacattgtttaattccccttcatgcttaccgaaggatgattgctatgatgattgctatgatcccttgaatttgtttgaaatatccctttttgatgatgctttctatgcttgtggccaagatgccaatataaattatgcttatggacatgaacttgctatagttccttatgttaaacatgaaattgttgctattgcacccacgcatgatagtcctattatctttttgaattctcccaactacactatatcggagaagtttgcacttattaaggattatattgatgggttgccttttaccattgcacatgatgatttttatgaatgtgatatgcatgtgctagctgctcctacttgcaattattatgagagaggaaccatatctccgcctctctatgtttcccaatatgataaaattgcaataaactgtttatattatgcattggcctttactatgtgtgcatgaattgttcttttatgacatgccgatgcataggaagagagttagacattcgtcattgcatgctatatgttgctttgttctcattactaaatgccaaaccaatgctaattaaaataggctttgatataccttaggatataggtggatccattacttaagcactttatgcctcgtttaatggcgttaaagaaagtgctgccaagggagaaaacccgggagttttagagagtcatttatttctgttgagtgctttcatatagtttaaaaacaaaaaataaataaagaggggaacctaaaaactttttcaaaaagaaaagtgaaagtgagaaagacaagcaatgtgtaaaatgggagagacccctgaaactgtgtacaggcacacaacaactttgagaaccgagataacagaaactttttcaacaaaaataattacccccgtgtacaattccattgtattataaaaataatgtgccagggtttgcctttaggatgtttacatttgcttgatggtttgtacggtgcaagacagaaactttgactgtagcgcgtggtttttaatttttttactggaacgtcaaacggttctgattccttttgcactgtcttcctatacaattttttttatttttcctaattttggtagaatttttgggggtagcataagcatagtgaatgttcagaattattacagaaatgttctgttttagacagattgtgtttttgatgcatagtttgctatgttttgatgaaactatcaatttatatcaatggattaagccaatgaaaaagttatattacagtagacacaatgctaaaaacaaaatatgaattggtttgcaacagaacttagagtagtgatttgctttattatactaacggatcttaacgagttttctgttgatgttctgtgtcgatgaagtgtttgacgatgcagtaggtctcgatgtgagaagaaggaagagatgcaagagctcagtcttggggatgcccgaggcaccccaagtaaatatttaaggatactcaagcgtctaagcttgggtatgccccggaaggcatcccctctttcttcaacaagtatcagtatgttttcggattcgtttcgttcatgcgatatgtgcaaatcttggagcgtcttttgcaattaggtttttacttttctttttatgcaccatgctggtatgaaaaagtccctgggttgagttaacagaatgctcattgcacttcacctaaatcttttgagtatggctttatacaatgcttcatgtgcttcacttatatcattatgaagtttggaattgcctgtttctcttcacttacacaaccgccatttgtagaatgctctttttattcgcttatatttgttacagcatggacatatcttttgtagagagaattatactctcttgcttcacttatatctatttagagagacgacaggaactagccattcatatggttagtcatataatcctacatacaacttgtaggatcactgaatatggtatgtttgattccttgcaatagttttgcgatataaagatggtgatattagagttatgctagtagattaattgtggattagtagaaatacttgcattgaggtttgtgattcccgtagcatgcacgtatggtgaaccgttatgtgacgaagtcgaagcatgaggtgtttctttgattgtcttccttatgagtggcagttggggacgagcgatggtttttttcctaccaatctacccaccctagggtcatgcgtagtagtactttgttttcaatggcttgtagatttttgcaataagtatatgagttctttatgactaatgttgagtccatggattatacgcattcttacctctttccgcaatttgctagcctctatggtaccgtgcattgccctttctcaaccccaaaatttggtgcaaacttcgccggtgcataccaaactccgtgatacgatactctctatcacacataagcctcattatatcttcctcaaaacatccaccatacctacctatcatggcatttccatagccattccgagatatattgccatgcaacttccatcatcatcatatacatgacttgagcatttattgtcatattgctttgcatgatcgtaagatagctagcatgatgttttcatggcttgtccgtttttttgatgtcattgctacgctagatcattgcacatcccggtacaccaccggtagaaattcatatagagtcatatctttgttctagatatcaagttgagttgtaattcttgagtactaacgtaaataaaagtgtgatgatcatcattattagagcattgtcccatgtgatgaaaggatgatggagactatgattcccccacaggtcgtgatgagactccggacttcacaaaagaataaaagaggccataaaaaaaggagaaaaggcccaaaagaaataaaagagaaaaaaatgatgagagaaaaagagagaaggggcaatgctactttccttttaccacacttgtgcttcaaagtagcaccatgatcttcatgttagagagtctcctatgttgtcacttacatatacttgtgggaatctttcattatagaacttggcttgtatattccaatgatgggcttcctcaaaatgccctaggtcttcgtgagtcaagcaagctggatgcacacccacttagtttcttttgttgagctttcatatatttataactctagtgcatccgttgcatggcaatccctactcactcacattgatatctattaatgggcatatccatagcccgttgatatgcctagttgatgtgagactatcttctccgcttttgtcttctccacaaaccccccatcattatattctattccacccatagtgctatatccatggctcacgctcatgtattgcgtgaaaattgaaaaaaagatagagattactaaagtatgaaacaatggcttggcttgtcttcggggttgtgcatgatttaaatactttgtgtggtgaagatagagcatagccagactatatgattttgtagggatgagctttctttggctatcttattttgagaagacaaaattgcttggttagtatgcttgaagtattattatttttatgtcaatattaaacttttgtcttgaatctttcggatctgaacattcatgccacaataaagaaaattacattgaaaattatgttaggtagcattccacatcaaaaattctgtttctttatcatttacctactcgaggacgagcaggaattaagcttggggatgcttgatacatctccgacgtatctataatttttttattgttccatgctattatattacccgttttggatgttttatatgggctttaatatgccattttatatgatttttggggactaacctattaacctagaggcccagcccagaattgctgtctttttttgcctatttcgttgtttcgaagaaaaggaatatcaaacggagtccaaacggaatgaaaccttcgggatcgtgatttttttggaacgaacgtgatccagaggacttggaccctacgtcaagacatcaaccggaggactccacgagataggggggcgccccccctccccctactgggcgcaccctcatatctcgtgggcccctcagagctccaccgacatacttcttcctcctatatatacctacgtacccccattagaccaaagagggagccaaaaaacctaattccaccgccgcaacttcctgtatccacgagatcccatcttggggcttgttccggagctccgccggaggagggccatcatcatggagggcttctacatcatcaccatagcccctccaatgaagtgtgagtagtttacttcagaccttcgggtccatagctagtagctagatagcttcttttctctttttggatctcaatgcaatgttctccccctctcttgtggagatctattcgatgtaaactctttttgtggtgtgtttgtcgagatccgatgaattgtgggtttatgatcaagtttatctatgagaaatatttgaatctcctctgaattcttttatgtatgattgagttatctttgcaagtctcttcgaattatattatttggtttggccaactagattggtagttcttgcaatgggaaggggttctttgtagtgggttcaatcttgtggtgtccttttccaattgactttagggccagcaaggcacatattgtattattgacatcaaggataaaaagatggggtttatatcatattgcttgagtttatccctctacatcatgtcattgttcttattgcattactccatttctccatgaacttattacattagatgcatgttggatagccgtcgaattgtgttggacttaatagttgttggatgccggccttgagtttgtccaactgtaaaacacgtgatacctatatacatgatcattgccttagatatcatcataactatgctcaattctgtcaattgctcaacagtactttgttcacccaccgtagaaatacttatgctatcttgagagaagccactagtgaaacctatggcccctgggtctattttccatcatataagtttccgatctattttattttgcaatctttactttttgcatctatatcataaaaataccaaaaatatatctatcttatcatactatctttattagatctcactttcgctagtggccgtgaagggattgacaacccctttattgcgttggttgcgatttctcagtttgtttgtgtaggtacgaggtgacttgtgcgtaacctcctactagattgataccttggttctcaaaaactgagggaaatacttacgctactattgctgcatcaccctttcctcttcaagggaaaaccaacgcagtgctcaagaggtagcaagaaggatttctggcgccgttgccggggaggtcttcgctcaagtcaagacataccaagtacccatcacaaacccatctcccttgcatttacattatttgccatttgcctctcattttcctctcccccacttcacccttgccgttttattcgccctctctttcccaatctcctcctctctttttgcttgccgtttttatgtttgcttgtgtgttggattacttgttgccatggcgcaagataacccgtcgacccg

SEQ ID NO: 436201 - DNA, 3328 bp, Triticum aestivum
ggggtagggtattacctccatcgagagggcccgaacctgggtaaaaacatcgtgtcccttgtctcctgttaccatccgcctagacgcacagttcgggacccctacccgagatccgccggttttcacaccgacaaagatctaaaacttattgatgtgtcccctattaaatctttgttttgcaatatgaatcttgataatgatgggactggagatgactcaactttagttaaaaggcgtcctaacgattcagagtttttagatcttgatactaaatttggtaaaagtgggattgaaaaacaataaaaacctagatgttgctaaacccactattttggatctcaaggaatttaattatgaaaattgctctttgattggttgtatttccttgttgcaatccgtgctaaattctcctcatgcttatagtcaaaataaggcttttaccaaacatatcgttgatgatttaatgtaatcttatgaagaaaagcttgaattggaagtatctatccctagaaaactttatgatgagttggaacctactattaaaattaaaattaaaattaaatatgattaatgctatgatttatgtgatttgggtgctagtgtttccacgattccaaaaactttgcgtgatgtgttaggtttccgtgaatttgatgattgctctttaaatttgcaccttgcggattttccaccattaaaaagccaattggaaggatcaatgatgttctcattgttgcaaatagaaatttggtgcccgtagattttatcgttcttgatatagattttaatccttcatgtcctattattcttggtagacctttccttagaacgattgctgcaattatttattttgaaggaaggaaatattagatttccaatttccgttaaggacagacatggaaaacttccctagaaagaaaataaaattaccatatgaatctatcatgaaagccacttatggattgcgtaccaaagatggcaatacctagatctatcttcgctttttatgcctagctaggggcgttaaaataatagccctagttgggaggcaacccaatttttctttatgttttttttgctttttgctcctgtttagtaataaatttttgcatctagcctctgcttatgattgtgtttcttatgttttaattagtgtttgtgccaagtagaacctataggataacttatgatgatagttgatttgattctgctgaaaaaacagaaattttgcgcgcatgaaattagttttgttaaatcacagaaacgtgcttttgtgttgattattttttaggctgatcaatacacaaattgtccaggacttcctaatttggtaggatttttagtgttccagaagtttgcgttagttacagattgctacagactgttctgtttttgacagattccgtttttcgtgtgttgtttgcttattttaatgcatctatggctagtattaagtggtatgaaccatagagaacttgaaatacagtaggtttaacacaaaaataaataaataaagaatgagttcattgcagtaccttatgtggtggtcttgttttctttcattaacggagcttatgagattatctgttgaagttttgtgttgtgaagttttcaagtttttgggtaaagatttgatggattttggaataaggagtggaaagagcctaatcttggggatgcccaatggcaccccaccaaggtaaaattcaaggacaaccaaaagccaaaagcctaagcttgggggatgcccccggggaaaggcatccccctcctttccgtccttccgttcaattgggtaaactttaacttgggagctatattttttattcaccacatgatatgtgttttgcttggagcgttcgtgtatgatattagtctttgcttttttagattaccacaatcatccttgctgtaacacacctttttgagagagacacaacatgattcagaatttgcttagaatactcctatgagcttcacttgtatctttttgagcttgataagtttttgctctagtgcttcacttatatctttttagagcacgatggtggtgtcttaatttttgtagaaattgctagtctctcatgacttcacttaaaatctttttgagagtgttttagaacagcatggtaatttgcttgggttataaaattagtcctactatgatgggcatccaagataggtataaaattagtcctaattttcatataaagtgcattgaatactatgagaagtttgctactttatgattgttttgagatatggaggtagtaatgttaagatccatgctagttgagtagttgtggattagtataaatacttgtgattaaagtttgtgattcccgtaacatgcaacgtatggtctcctaactatgtaacgaagtcggagcatgatttatttatttattgattgtcttccttatgagtggcggtcggggacgagcgatggaactttttcctaccaatctatccccctaggagcatgatgcacgtagtacttttgtttttgatgacttctaaattttttgcaataagtatatgagttctttatgactaactgttcactccatggattatacgcacttttccccatccttccagcattgctagcctcttcggtaccgtgcattgccctttctcaccttgagagttggtgcaaacttcgccggtgcatccaaacccccgtgatacgatacgctctatcacacataaacccaccatatactgttcctcaaaacagccaacagtacctacctatccatggcattttccatagccattccgaagattatattgccatgcaacttttccaccgttccgttcatcatcatcatgacacgcttcatcacatgtcatattgctttttgcatgatcatgtagttgacatttgtatttgtggtaaagccaccatttataattttttttcatacatgtcactcttgattcattgcaccatcccgggtacaccccccggaggtattcatagagagtcatatcttgttctaagtatcgacttgttgtaatttttatttcttttgagttataagtaaataaaaaagtgtgatcatcatcattattcatttttagagcattgtcccaaataaaataaagataaaggccaaaaaaaggccaaaaaaagaaaggccaaataaaaaataaaaaaagggacaatgctactatccttttttccacacttgtgcttcaaagtagcaccatgatctttatgatagagagtctcttgttttgtcactttcgtatactagtgggaaattttcattatagaacttggcttgtatattccaacaatgtcctcctcccggtcgacccg

SEQ ID NO: 436202 - DNA, 367 bp, Triticum aestivum
ctgttctttcattgacatccgtctgccaatgttggggtatgtttcctgagaaaagcgcccagtctatgaccacaacaagaaggctggtgcgatgaatgctctagtccgttcatctgctgtcatgtcaaatggacctttcatcctcaacctggactgtgatcattatgtctacaactcccaagctttccgtgaaggcatgtgcttcatgatggaccgtggtggtgaccgtattgcctatgtccaggtcccccaacggttcgagggcattgatccatcacatcgctacgccaaccacaacactgccttctttgatgtcaacatgcgtgcattggacggtctcatgggaccagtctatgtcggcactggc

SEQ ID NO: 436203 - DNA, 556 bp, Triticum aestivum
ggtccagatatccgggtcgacggggatctaatataaataaatatgtaactgagaaggcctttgctgaattaatgttgccatgcatcgacaggagttcgcctgaatttcgcagtatatttgctggtgaattaatcaaacagatgggaactgtcagtgaacacatcaaagcaatatcacgaaatggtgccaaacatgttggtttagttccgtcaggaaatgatgtttcatcgaacaaatccagtggtcgtaaaggaattcgaggtggaagtccaaatattggcaggcgagtcacggttggtaatgatccaactcctccttcagcatctgctctgcaggcaatagtgtggctgcgcctccaatttatcatcaggctgcttcaagtaatcctggcagataggggcatgaggcatacacttgctcctgcgatactaagcctgcttgcggcacgcataatctatgaagatgcagattcgccccttcctcctgccagtttgattgcctcgagacgggaagtggactctttgctggaacctcccatggatgtcctgcttgatcg

SEQ ID NO: 436204 - DNA, 516 bp, Triticum aestivum
ttcttgcgccgccagctctaaaggaggcggcgtcggccggcgggcgagcgcacgcccaggcccaatcgatcgatcccagctctagaggggagggagcaaccatggcgggggacggggaggacgaggtgccggcgatgggcggagacaagctgatcctgcgggggctgcagttccacggcttccacggcgtgaagcaggaggagaagaagctgggccagaagttcgtggtcgacgtggacgcctggatggacctcgccgccgccggggactccgacgacatcgcccacaccgtcagctacaccgacatctacaggatagccaagggcgtggtggaaggcccgtcgcggaacctcctggagtcggtggcgcagtcgatcgccggcaccacgctgctcgagtttccccagatctccgccgtccgggtgaaggtcgggaagccccacgtcgcggtgcatggcgtcgtcgactacctcggggtggagatactgaggaggcgcagagaggcatgagcacaag

SEQ ID NO: 436205 - DNA, 762 bp, Triticum aestivum
tctcttatctgaccggtcgcgccaaaccgagctctagcatcagctcgtcggagttcgcaccggtcgactcagaactcttcaccaatggccgccgtccaggtccaagccgcaacccacgccatgcccgtcgaggaggctccggcgccggcggcggtggaggctgtcgagacggccgcggtggcggtggaggctgtcgagccggccgtcgtcgttgtcgaggagactacggtggcagcggtggagattgtcgagccggctgtcgccacagtcgaggtggcagcggtggaggctgtcgagccggccgttgtcgctccccaggaggccgtgaaggaggaagctgctgcaccggccgtgaccgagctggcgaaagagccggaggcagctccagcggagaccaaggaggccgagacagaggccaaagagaccgagcccgaggctgtccaaccggcggcagccgccgaggaggcgcctgctgtgccggcagtgactgagaccaaagagccggaagctgcccctgccgagggaacagagaccaaagtagtggagcgtgaggcagcaccggctgaggtcgagaccaaggaatcagagcaagaagctgctccagctgagactgagaccaaagaggcagagccagccgctgccgaggccgaggccaaagagccggtggcagaggagacaccggccgaggaggaggcagttgccccggaggccgttgtggcagtgcaggaggaagcagctactgccgaggcaccagtggagcct

SEQ ID NO: 436206 - DNA, 466 bp, Triticum aestivum
ttccattcgactcactgcttcctccgccctccctccctcccgccccgatcccccgccatggtgtgcgtggcgtgcctgatcccgctcttcctcatccccttcgtcaacgcgctcccctacctcttcgacctcctcctcagcaaggtttatcgcatgcttggatgggaatacaggaggcccgagagagtcccagctgcctgcccgttcaagcctgcagcaaacaagactgaaggtgtggcgggtgaatcaaaaccagtagcaaatcctcatgttgctagtgcaaatcctctggtggaaccccagagtgctaccacagaaatgaagaaagatgattagaacatgtaacgctcgcccgatttgacttatgtgaacaactctcactatttgtatttgagattgtgtcgtaaccgagaaataattaatgtaagattgtatatttgggcaagggattgctaaaatattccca

SEQ ID NO: 436207 - DNA, 531 bp, Triticum aestivum
ttcgaccacagagcggcggcggcggcggcggcggcagcggaagagagatgttggagagagctccagccatggtgcacgtcaacttctaccgcaactatggtaagacattcaagaaaccaaggcgtccttatgagaaggagcgtcttgatgcagaactaaagctggtcggtgagtatggactgaggtgcaagcgtgagctctggagggttcagtatgcattgagcaggatccgtaatgctgcaagacacttgctcacactggatgagaaaaatccccgccgtatctttgagggcgcggcccttctccgtcgcatgaaccgctatggtctccttgctgagggccaggataagcttgattacgtccttgccctgactgctgagaacttccttgcaaggcgccttcagactcttgtcttcaaggctggcatggcaaaatccatccaccatgcccgtgtcttgatcaggcaacgccacatcaaggttggcaagcagatcgtcaatgtcccgtcgttcatggtgagggttgaatctg

SEQ ID NO: 436208 - DNA, 579 bp, Triticum aestivum
ttcacgcgtccgcccacgcgtccgatgggtcgtcaagggattccatccgatccttggggcagctctggaatttcagcctctctgatcttacagctgatttgacaagtttaggagatttggaggctcttgagaactacgaaggtacccctttcctgccctcggactcggacctcttacttgattccccagaccataatgatgacatagttgagtacttcgccgacgccatcaacgggactcaatcagatgaagagaagtcatagagaagatgaaagactcaggtagtctcattcagagtgggacctggccagagtgtcatctcatgtagtgtaatcttgtagctgcgcgcaaatcagactgggaattcacccagaggtgcggtgattggcgcgcgcccctgaagaattttgtagcgttcgatgctaattatttggaataattggttcgggcagccttaaccgggtaaagttgctgtctacaaggctgaaaagtttagaaaattgtgtcaaacctcaggaacaacccctttgtaattgctgaagaagtgggcagttcatctggtattgcaccaaaaaagaa

SEQ ID NO: 436209 - DNA, 941 bp, Triticum aestivum
ttgctgaagcttctatggcaatcgcttatgagaagaaatggccattgttccttagcacaaaagacacaatccttaagaaatatgatggcaggttcaaggacattctccaggagatctatgaagctggctggaaatccaaatatgaggctgctggaatatggtatgaacatcgtctcatcgatgacatggctgcctatgcacttaagagcgaagggggctatgtttgggcttgcaagaacctatgacggagatgtgcagagtgatttcttagctcaaggttttggctctttgggcttgatgacgtcagtattgatgtgccctgatggtaaaaccatcgaagctgaagctgcccatggcacagttacccgccatttccgtgttcaccagaaaggtggtgaaaccagcacaaacagcattgcttcaatctttgcttggacaagaggacttgcacacagggcaaagctagacgagaatgctagacttcttgaatttgcacagaaacttgaggaagcgtgcgtcggaactgtggagtctgggaagatgaccaaggaccttgcactccttgttcatggatcctcaaaagttacaagaggcgattacctgaacactgaagagttcattgacgcagttgctgctgagctcaaatcaagactgtgaaagacctctccctcttcaatgcttgaatagtcattactcatcgattcaagtcattttggttatgtcgccattattctgtcatgctttcatcctgaacagaacgagcttttactgcacaatcgcatattattgtcaaaaatgcaatcgattctgtagatgctgatgttatctaagtggggctcacaataaaggacatatagaaccgttattcccatctgatgattgtgtcatgtctaaccagcagcttttacatttgaatggagatgcttatagtttgctcgttt

SEQ ID NO: 436210 - DNA, 432 bp, Triticum aestivum
tacttcacagagcatcagccggagcacttcttcctcccctccgttcttctccggctccggtgctctcgtacgcgcgttcgtccgagaccaccacctcgaccaagaagagatggagatgaagaagatcgcctgcgccgtccttgtcgccgcctccgccaccgtggccctcgccgccgacgccccggccatggccccggcccccggcgccgccgtcgccggctccgccgccgccgccgtcccggccgtcggcgccgtgctcggggccaccgtgctctccttcttcgcctactacctgcagtaagcgcgccccggcccgagtcagttcgctgcgaggaggaggaaggcaggaagaagaagatcactaaattcgctatgtatggctctacgctacgctgattcgaggcgcgcgcgtgcgctttgatcgatgcatgc

SEQ ID NO: 436211 - DNA, 467 bp, Triticum aestivum
ggttgcttgagaagcgccagcagggacgtacactggactcgcacattgaggagcagttcagtggtggaaggctgctggcctgcatttcgtctcgccctggacagtgtggcagagctgatgggtacatcctggagggcaaggagctggagttctacatgaggaagctccagaagaagaagggcaagggtgccacagcttaggctgaagagctgctgcatgttactcgttggattttcttagatgttgcgtccatgtcatgtttgcagacatactgaacaccattttctgtaaactgttcgagtcctaggttgaactgagaatgttttgcctgttttggttgtgatctaaagctatccagattctagtatgtgttgttccacctacatcaccgtcacgttcggcaaggccttctggattaatgataaagtgatcagctcatcaccggagaaaaaatcggccgccctaaa

SEQ ID NO: 436212 - DNA, 343 bp, Triticum aestivum
ccctcgcgtccgcatggcggcgaggagcgagaacgagtcggacggcgacgtgggcaccaaccccgccgaggggggctcgtgcctgtccctgccgcctctagctgccggtccagccgtgtgcgtcctccggtccgccggggacttcgccggcggcgccttcgtcggatctatctttggatatggacaagggttgctatctaagaagggtttgaagggctcactcggcaatgcagggtcttctgccaaaagttttgcagttctttctggcgtccagagtttggttttgtgcttgttgaggaagctgcgtgggaaagatgatatcatcaattccggcattgctggt

SEQ ID NO: 436213 - DNA, 378 bp, Triticum aestivum
cgcgtgggcggacgcgtgggcggacgcgtggtgcgtcttgcgtttggcggcggctgccagcagacggagcccaggccggaggaggccccggaccccgattcctgctcccaatcgtctcggcgagagaggcaacggagccactatgcctggagcagatgagacgtttccggcagagtcgagggcgacggtgttctttggggctgtgacatctaaatcggagccgctgacctttgaagagtccctcagatttgtcaagaaagtgaaggctcgcaactacatgctgtacctgtcgctgttcgacatcctgggcaggacggagctgtcccagctggaggcctaccaaacactgcagctgctgttccgcgaccacccggacct

SEQ ID NO: 436214 - DNA, 522 bp, Triticum aestivum
gcgattgtgatgctagaggatctggtttttgcaggtgggttcggagcatatcagcagcggcagatcaggtggagctacagcgcccgctggcagccggtcttccacaccatggcgttgccccttctggccgaatggcggccgtgtatttcctcccagcctaagagcgataggggaggcagatgcatcttctatctggagttcgaagcggttccaagctgctgcgatggtctcgtcgccccaagtggtgcgtccccggcgacggcgagtctacatccaggaagaagatgttctggacccgattgcaattttcagatccagtttagggtccttcttgtcaaaatcaagggcttaggtgttattttccttttatgtgagtccttgtgtgggctttgtgttgtaaccgctgaagttttaatgaagatctaggcccttcatggcctttcctggtcaaaaaaaaagagagagagctggactcacagctggaaaggtttcatacgagaattgtttggaaacaaaaaggac

SEQ ID NO: 436215 - DNA, 435 bp, Triticum aestivum
gagcttttctgctttgctctacagaagatcggcagcaccaaggctgaataccgaagggttcaaactttggagctggcggactgcatattgaaatcctgggtcggcgacgatgtctcgagcgcatcaaaggttttgaagaagcatatggctctgctgtgcgagctgatgcaggaaatcctcacaaagatgcccgaaaacaagtcgcgtcgccaggaggtgcgtaggttctgcacgcgggctctgcaaaccgtgacgaggctcaacctgaaagagaagtttcagaagaagctaagcccggaagcctacaccctgtgtgaggcacagctgggagctgcatttgttcccttccgacagtgatgcgtgtgaatcctttcccgaagacggtgaaaggggccccaaatttaatttggggcaaatttaaaaaaaaaaaacaaa

SEQ ID NO: 436216 - DNA, 1101 bp, Triticum aestivum
tttttgcactctgtgattgagaagtacgctgagcgtgggcttcgttcgcttgctgttgcaagacaggaagttcccgagaaatccaaggattctcctggtggaccatggcaattcattggtctgttgcccctgtttgatcccccaaggcatgacagtgctgagaccatccgcaaggcacttgttcttggtgtcaacgtcaagatgatcacaggtgaccaacttgctattggaaaggagactggtaggaggcttgggatgggcacaaacatgtatccttcttctgcattgcttggccaaagcaaggatggttcacttgagtcacttcctgttgatgagctgattgagaaggctgatggatttgccggagtcttccctgagcacaagtatgagattgtgaagaggctgcaagagaagaagcacattgttggtatgactggcgatggtgtcaatgatgctcctgctcttaagaaggccgacattggtattgctgtcgatgatgctacagatgctgctccgagtgcttccgacattgtgcttaccgagccaggtctcagtgtcattatcagtgctgtcctgaccagcaggtgcattttccagaggatgaagaactacacgatctatgcagtttccatcaccatccgtattgtgcttggctttatgcttattgccctgatctggaaatttgatttcgctcccttcatggtccttatcattgccatcctcaatgatggtactatcatgacaatatccaaggacagagttaagccatctcccttgcccgacagctggaagctcaatgaaatcttcgccactggtgttgtgctcggaacctaccttgccctgatgactgtcgtcttcttctgggttatccacaagacggacttcttcacaaacaaattcggtgtcaggtcaatcagagacagtgagtttgagatgatgtctgcactgtacctccaagtcagtattgtgagccaggctcttatattcgtgactcgttcacgtagctggtcctttgttgagcgccctggtttcctcttggttaccgccttccttctcgcacaattggttgcaacactcatcgctgtctatgccaactgggag

SEQ ID NO: 436217 - DNA, 544 bp, Triticum aestivum
ctatacctggcaggcagccgcaacccgagcctggactacggtttttagggcacggagatcgtcatggcttcctactgctctgagctccagtaccttgccaacccggtgaccaaccatgtccagagtgctgagcagcacaaccaggacgtgaactctctgggccttgtctcggccaggaagaccgccgaggccgtggacatcctcaagctcatgtcctccacatacatggtggcgctgtgccaggccatcgacctccgccacctggaggagaacatcaagacctccgtgaagaactgcgtgacgcaggtgtcgaagaaggtgctgaccatgaaccccaccggcgacctctccagcgcgcgcttcagcgagaagagcctcatcaccgccatcgaccgcgaggccgtgttcagctacgccgacgacgcctgcagcgccaactacccactgatgcagaagctgcgcgccgtgctggtcgaccacgccctgaccgccggccccggcgaggccgagagcgaggccacggtgttctccaagatcaacaagt

SEQ ID NO: 436218 - DNA, 482 bp, Triticum aestivum
ttccgtgattccctcctcatagatccggcaggcgcgcatgctacggccccgagctgcgtcagaaggcgccatggggctctgggactcgctcctcaactggctccgaagcctgttctttaagcaggagatggagctctccctggttggcctacagaatgctgggaagacatctctagtcaattcaattgctaccggtggctacagcgaggacatgattccaactgtaggctttaatatgcggaaagtcaccaagggaaatgtcacaattaaactttgggatcttggagggcaacgtagattccggactatgtgggagcgctactgtcgtggagttactgctattttatacgttgtcgatgctgctgaccgggatagcgttccgattgccaaaagtgaattgcatgacctgctgacaaaacagtctttatctgggatccccttacttatccttggcaacaaaattgacaagtcagaggcacttt

SEQ ID NO: 436219 - DNA, 442 bp, Triticum aestivum
  unsure (1)..(442): unsure at all n locations
ggaaggggngcttcagtgcgcctcgcgttcggtttctgtccagaattcttggacatgataaagtttgggtcttagatggaggtttccctcagtggcaagcttctggattcaatattggaagcagctgccctgatgatgcagttctgaaatccagagctgctaatagtgctgttgaaacagcttataatggtgaattggcaaatgctgccacatttcagacagagtttcgacatcagctattgtggacactagaaaaggtcaaacacaatgtagctgctaaggctcaccaagtagttgatgcccgagtaaagggcagatttgatggtgtaatgccagaaccaagggaaggagttagaagtgggcatatacctggaactaaatgtgttccgttccctgagatgtctgatggtgcacaaacgctcctccctgcagatgagctatc

SEQ ID NO: 436220 - DNA, 626 bp, Triticum aestivum
agccacatacgctgctacgcgctcgcgctttcctggagcatgtcgctcattctcgccgacaagtacgccgacgtgatctactctatcgtgttgcaggatgattttttgccaagaacaccaacaccattggaatatattttcggctctatattctgcttgccctgcttgttattcctattttgcttgagagatacatttaaacaagacaagaaaaagtttaaagatccaagaagattgtatgctcctggtcggatgtatcatatcgtcgagaggaaattttgcagctgtgcaagatacccacctgaggtgagaactgctattccagtggaaggacggtttgagcatattgtgccatcgtgcagcaccactgctgatcatggcattattcggattgagcgagaatcagccttggctctagagctaatgaaggaaaaagagaaggcaacaactccacctgctgaacaaaagacggagagattgcaaagtttcaaggaagaacacaagaatgcgctccacagggcgaaaaccttggatgttcctcatgcgatagacatctctgaagaggaaacccatgagggcgcttcatcttccgatactcacagcgaggcgacttcatcagaaccaaa

SEQ ID NO: 436221 - DNA, 427 bp, Triticum aestivum
tcgcttgaacagtggttgcaatacaagatgagagatcacagcatcagaacaaggccaaggctctcaaagccctccgggcaagactatatgaattggaaaggcataggctccatacagaccggtcgaagctccgatcagagcagattggaagtggtgacaggtccgagcgcatcagaacatacaacttcccacaagggcgtgtcactgaccatcgtgtcggggtcacgcaccactccatagtggacgtcatggagggagagagcctggacgtcttcatcgaagcgctgctgctgcaagaagagatggatgcaattgcttcgtttgcttcgtgagccctaatttttgtggatttcttcctggagcgacaaaccgcatcataaacacactgaacactgaaccaacatagaggagaaactctaggattatg

SEQ ID NO: 436222 - DNA, 618 bp, Triticum aestivum
gctttgattttcgctgaagcttctgctcaggcatgtagcttctaagacagtggctcctaacgtggataagctggttgcccttgttcaccgtcctaatgaatcgttcttccttgctccccaggcagacaaagttacggttgtatacccaatgaggttccaggattcgattgatatcgtcttggcaacttcgtttctgcaggaatttgtagaagcaaggcggactgctgcacttaacaatgccccttcctgtatgtggtctccagtaccacctcttgagttaaaaggcgtgaatgctgatgcacttgatgcaaatgctggttttgttacttttgttgttttccctcggcatgttgagggtagaaagctagacaaaacagtttggagtttgttaaccttccatgcttatgtaagctaccatgtaaagtgttctgaaggattcatgcacaccaggatgaggcgtagagttgagtctctgatccaggctttggaccgtgctaaatccgatgcagagaagctgaagaagttggtacatggcgggtcttttaggagactgagcatgaagcacgaaggcaactctaatcactgaaggaagactcaggcaaatatatgaaagttttg

SEQ ID NO: 436223 - DNA, 367 bp, Triticum aestivum
cagacaaagtcttccaaatttatagcgatccaagaatagtaatagggatacaaaccacatacaaataatattacaagcaaaaaagtagaagaacgttaataagcaggaatagccagtaccagcctaaatacttttattaactgtacacttctgtttctggttttattttttccaataccttctcagcatcaataaagccccctaaggggcccaacggggtatattttacttgcctccaactgggtataaatggcagtgccaggcagtgaagatggaggtgatcaatactattaaatggtggctgatgaaaaccaaatctatgttcctcagatttgggagcatctcgactgagtaaatcttttcccac

SEQ ID NO: 436224 - DNA, 471 bp, Triticum aestivum
cggtctagaattaacgggtcgacgggggggtgtatcgctctctaaggaatattccgtgccaggccaccgcttcttaaaagcttctctgactctgactcgataggcggaggaggaggctacgcttataaggaggagaaggaagcaaggagggaggcagcaaagcaccatggattccctctggcacgcctccgtcattgtcctggtgctcctattcattggaggatccgatgccaacccagccgcccgtcgccacggtcagctggatgtaaaccacaagaagcagccactacagacatccaggccttacaacattgcccacaggggttccaatggcgaaatacccgaggagacagctgcggcatatttgagggctatcgacgaaggtgcagacttcattgagactgatatacttgcatcagaggacggtcatctgatatgtcttcatgatgtaacactggataacacaaccga

SEQ ID NO: 436225 - DNA, 413 bp, Triticum aestivum
  unsure (1)..(413): unsure at all n locations
ttcgctgccgcagccgccacctcctccgcaggcagcccactgcgaagcgaggtcgaataagccatggcagacgccaaggccacgacggcggtcaccctccgcacccgcaagttcatgaccaaccgcctgctcgcccgcaagcagttcgtgctcgaggtcatccaccccggccgcgccaacgtctccaaggcggagctgaaggagaggctggccaaggtgtacgaggtgaaggaccccaactgcatccttcgtgttcaaagttccgcacccaacttcggaaggcggcaagtcctccgggattcggtctcatctacgacaacctcgaaatctgccaaggaagttcgagcccaagtaccgcctcatcaggaacggccttgctaccaaggtataggaaatcactcaagcatatnaag

SEQ ID NO: 436226 - DNA, 652 bp, Triticum aestivum
ctcctcgccgccaccgccgctcccgtccgtccgtcctcgccgcccctccgccgtccccccgggtttccaggtcgccggccttcgccccgtcagccagccgtcgcgtccatggcggaggtagcgcccgtcgatcaggggaagaaggaggaggaggagttcagcacggggccgctgtccattctcatgctcagcgtcaagaacaacacccaggtgcttatcaactgcaggaacaacaagaagttgcttggtcgcgtgagggcatttgatcgtcattgcaacatggttcttgagaacgtcagggagatgtggactgaggttccaaagactggtaaaggcaagaagaaggctctcccggtgaacaaggacaggttcataagcaagatgttcctccgtggggattcggtcatcatcgtcctcaggaacccgaaatgagtttgacgactcggcgtaaaccagaagagtctgttttcgctatgctgctgttagtttgtatgccgaatgctctggatcagggagtgtgtaagagacagttatcaagcaagcattgcctgtactgattaatggtttggtgctgtagtctggatgttatgaattcacgtctttgtagtatctaatctaacaacgtgcactggtagcctctgtttggatcatc

SEQ ID NO: 436227 - DNA, 348 bp, Triticum aestivum
tccgccgccgacgacgacgagcacacccgcaggcgcagatctgagattgagtgagtgtgtgagagagaaatcggtggagatggccgggaggctgactgcgatgggatcccgcatcatgggcggccacggcgcagccgcgcgcgccgcggcctccgccctccgcaaccgcgccggcatgggcctccccgccggcaggcacatcgtccccgacaagcccctgcctgtgaacgacgagctggtgtgggacaatggcacacccttccctgagccctgcgtcgaccgcctggcgccgcacatcggcaagtacgaggctctggcgtggctgtgtggaggtctgagcttcttcgc

SEQ ID NO: 436228 - DNA, 386 bp, Triticum aestivum
cgaccgggatgaagagactgacatggtcaagctggaggaagctgtccgaagcatcaagatggagggccttctgtggggcgcttccaagctcatgccagttggatatggcatcaagaagctccagattatgatgaccatcattgatgacctcgtctctgtcgacactctgattgaagaccatctctgcgtcgagccagccaacgagtacatccagagctgtgacattgttgccttcaacaaaatctaaatcttcctgaggcaagtgatggcggtcggtggacaatgcagcagcacaaacaatatatctacagttttccgttgccgtagctaaagcagcataacatattctgccctgtgaggtttttggaccttaggttgagttgggt

SEQ ID NO: 436229 - DNA, 465 bp, Triticum aestivum
gggtccacgtagaagaagaagacgaagaagaggaagaagaagaggaagaagacggaagagaaagaagctgagacgactgggcagaagcagacatttgacactactgttgaaaattcaggggcagagcctacagagagagacacggttgacggaaaacagtctagcaagtcaaagaagagcaaacgtaagcataatgatggtgcacctgccgtagaggtttctgctggcgatcaaatcgtgacaagggaagataagaagagaaggaaggaaccagttgtgctggaagcgagcaaccaaacccaaaacacaaatgaaggtgagaatagagagattaagaagagaggaaaggaaagcagtaaagccagtccagactttagtgagaatgcatctgctgggggagaggaagctggtttaggtgttaactaatgagtagaaggacgagaagagcaaggggattggaggagg

SEQ ID NO: 436230 - DNA, 546 bp, Triticum aestivum
gtgaaaggttgacgccatcaagaagatctctgagtatgtgtcgcagctgagaagagtcggcaaaggccacggagtgtggcacttcgaccagatgctgcttgaggaggcagcttgaaggacacggataccgggtcgacgggcaatggaagatgtaggtgtgatatgtcaagtagtggacagataagccaaccactggatgtggttttcagggatttttgcagtgggatttgtagggtactatgctgcgctgtgtttgggatttgaaataaaacgatgggagatgtgccacgctcttaaatgccagtcttctgctctaatcttgctaaattaacttgttgcattttgcagcttgtctacctttacagtgactaccttcttttggctgtgctcatttggcaaaacagtttgtctaattcacatctacttcgtgtctttttagacatttcaaatagacaacaacatacggatgtatgtagacatattttatagtgtagatccattcattttgctccgtatgttgtcacttgttggaatctctagaaagac

SEQ ID NO: 436231 - DNA, 502 bp, Triticum aestivum
  unsure (1)..(502): unsure at all n locations
ggnnnnnnngnnttttnngggaactgtttacgccgcccggtaccggtccaaaattcccgggtcgacggatacggctgcnagaagacgacagaagtcgagggcaaggggactggcatggatgcatcctgtgtggatgcattcagccaaccaacttcctacggataatggtttgttaccattcccaagaattgctattttttcttctcatgttgggtagtttgctgtatcataccgcagcttgttacctagacacgcttctctggcatatattagctcggtgattcaataagaccgtctcgtttccgaaaaaaaaaagataacagataaaaaaaaagcggccgctctataggatccaagcttacgtacccgtgcatgcgacgtcataagctcttctatagtgtcacctaaattcaattcactggccgtcgttttacaacgtcgtgactgggaaaaccctggcgttacccaaacttaatccgccttgcancacatcccctttcgc

SEQ ID NO: 436232 - DNA, 504 bp, Triticum aestivum
cattcatacatcgacggccaagctagccctcggcggagcaaggagggccggagactgatcagtttgatatggcgatcaggaacgtgacggcggcgacccggtcgctggacggtgacatgacggtggacgagttcaaggagtggctccggcgggtcgacgtggaccgcgacggccgcatcagccgcgacgagctgcggtgcgcgatgcgcaccatccggacgcgcttctcggggtacaagagcaagcgcggcatcgagtacgccgacgccgacggcgacggctacgtcgacgacggcgaggtggacgggctcatcgagtacgcgcagaagagcctcgggctcaggatcgtcgcctactgtagaggagtctagctaggtctctatcaagcgaagctagctccatgtctacccatgcctgctagaataagcgctgatctatcgtttgccactgccctgtacctttgctttcttgtctacttattagctaatctgtgcaccgacgtgt

SEQ ID NO: 436233 - DNA, 512 bp, Triticum aestivum
cgccgcctcctctctcgtcccggcgcgcttggagctcgacctacccgcgcgccgcccactatgatcatctccaagaagaaccgcaatgagatctgcaagtacctcttccaagagggggtgctgtatgccaagaaagactacaacctggcgaagcacccgcagattgacgtgccgaacctccaggtgatcaagctcatgcagagcttcaagtctaaggaatacgtcagggagaccttctcgtggcagcattactattggtacctcaccaacgatggcatcgagttcctgcgcaacttcctcaacctgccatctgagatcgtgcctgccacgctcaagaagtctgccaggcctcctggccgccctctcggctctggcccacctggtgaccgcccaagggggccacctcgctttgagggtgacagacctaggtatggtgacagggatggctaccgtggcggtcctcgtggtgcacctggtgactatggtggtgagaaaggtggagcccctgcaga

SEQ ID NO: 436234 - DNA, 432 bp, Triticum aestivum
cctacgcgtccgcccacgcgtccgcaagaacgatcgtgcgctaccggtgccgtctccgtttgagcatgtgcacgccgcggcgcccttcgacgagagcatgacgctcctcgatcctgagaccgacaagctcttctatgaggccttggccgcccatgaccatatggggatcggcacggttgtgcgggaatgccgtgggctgttcaatggtctggagtcactcaccgactgctgtggtggtgacgggacgaccgccagggccatcgtcaaggccttcccgcatatcaagtgcaatgtgttggaccttccacaggtgatcgacaaagtcccgagtgatggtgttgttaactatgtcgctggcgacctcttccataccgtcccacctgctcaagccgtcatgctcaagcttgttctacacttttggagcgacgagga

SEQ ID NO: 436235 - DNA, 289 bp, Triticum aestivum
gtgttcccgcatgtgaaggcctggtggactgacctgctggcgaggccgtccgtccagaaggtcgcagcgctgatgaagccatgatcttaattgctggtgctcgttcgtcgcgaaataagccgaggtgtgtgccccccgatgtgtgcctgtacgagtgtgtgttcttgtgatgtctcctcgtgttgaatgttcaggcttgtgcttgcgatcctgtctcatcttttactgaaatgagcgttcctatgctctggtttaataataaattgtgcctagatattatctcagcttc

SEQ ID NO: 436236 - DNA, 478 bp, Triticum aestivum
gttagggttcggtcaagatgaggaagctcgacgcgctgaccgccaaggcggcgcccgggctgtcctcgcccgagcgctccgtctcgtccacgctcaccgagtcgacgtccacggcctcggcggcggcggagcagcacggcaactcgggcagctccgcgtccgcctccgcgtccgtcaaggaggagtgcttcacctcgtccgaggagtcggaggagttccagatcgacgagagcttctggtcggagacgctgtccatgccgctggacgacatcaacgacgtctgcatggagccccacgacgcgttcggcaagcccacgggcgccgccgacggcgacatggactactggctcaaagtgttcatggagggcggcgacgacgacaacaacaacaacggcgcgctagacttaccgcagatttagggagggagagagctctagtttcgtcgctgctcccgattgatcgttcttttttctctctc

SEQ ID NO: 436237 - DNA, 792 bp, Triticum aestivum
  unsure (1)..(792): unsure at all n locations
gtcaatgctggtgccggtgtgggtgccggtgctggtgcccttgatgcattgcgacagcttccacagttccaagcactgcttgcattggtccaggctaatccccaaatcctgcagccaatgcttcaagagctggggaaacaaaatccacagatcctgcggttgattcaggaaaatcaggctgagtttctccgcctggtaaatgaaacacctgagagtggtgctggcgggaatatactaggcgcgctagcagctcaaatgccacaggcagttcaagttactccagaagaacgggaggccatccagcggctcgaggggatggggttcaaccgtgagcttgtgttggaggtcttctttgcatgcaacagggatgaagaactggctgccaactatcttttggatcatggccatgagtttgaggaacaacaatagatgttagattggtcttgctgttgaaagacagaagagtcagtgacagaagcagtacagtttggtgtcgttcttatatcttgctgctgaatatcactactacttgccattagtgcgatgttgctgactttcaatttcttgtatcctggaaatgctttctaagtacataatatcatatgcaaaccttaaaaaatatgtgcaagaatgcaacgataaaaaaaaaaagcggccgccctaaaagannnnnnnnnnnnnnnnnnnnnnnnnnnnnnnnnnnnnnnnnnnnnnnnnnnnnnnnnnnnnnnnnnnnnnnnnnnnnnnnnnnnnnnnnnnnnnnnnnnnnnnnnnnnnnnnnnnnnnnnnnnn

SEQ ID NO: 436238 - DNA, 387 bp, Triticum aestivum
tgctcctgttcaacccagtaaactactgccacccatccgccggcgaaatggcccacgcccgcatcctcctcctggcgctcgccgtcctggccacggccgccgtcgccgtcgcctcctcctccttcgccgactccaacccgatccggcccgtcaccgagcgcgccgcctcgacgctcgagtccaccgtcctcgccgcgctcggccgcacccgccacgccctccgcttcgcgcgcttcgccgtcaggtacggcaagagctacgagagcgcggcggaggtgcggaggcggttccggatcttctccgagagcctcgaggaggtgcgctccaccaaccggaagggccttccctaccgccttgggattaaccgcttctcggacatgagctggg

SEQ ID NO: 436239 - DNA, 394 bp, Triticum aestivum
ggtttctggagctgatcgttcgtcgataatcttgccactttctggtttgaagcagttccatgagatggtgggacactttgtagatataatgaaggacagacttgaaggaatgacgggcgcgaacgtgcgcactgtcgagcccagccagagatgattagctcgaccttgtggcacttactgctgttatgcctcctctaggatttgtgtaagtgatgtggtgtgtggttgcgtagatcacgcagtattaattcgtctgatggggataataatgtttgatgtttagttttttctttcttctgaattccgtggcgaggattgatttgcttgggaccttttctgttgaggaataataagcagtataatgttcgtgggtgcaaaaaaaaaaagatatcag

SEQ ID NO: 436240 - DNA, 626 bp, Triticum aestivum
gggggaagataagaagtgcaaaggtgaatccagattcccagcacaggtgaggatccgcattagaaggctttgcaaggccttggaagaggatgctttcaggccagtgctgcaccactatgatggtcctaaattccgcctcgagctctccatagcagagacactgtcactgctagacctgtgcaagacagaagacgcctgatctgcttcggaacatgtttgtggttgctctgtggttctttttagtaaatatcatccctgtaagttgtggaagatgttttcacaatgatctgtcccgtccgtcgtccatgaaagcgcaagctgttggttggtggttgcatttcccccagaaaggacctggtactcggaagaagtaggcctctaaagatgtgagcctgtctgtgtcggtgccgtctgtccgtaatctcggtgatgtgtatgttcttcttcatatttatgtatttgtagtgcagtatgcccgccgccagcggggaaaccccgaaagacgggggatactgttgtgatgcatcaggaacgccccaaagtgagggtggatgatgttgggagtgtatcttgctgtctctgtaccttaccttggtttggaaagttggaaccttgcatttgacttg

SEQ ID NO: 436241 - DNA, 380 bp, Triticum aestivum
  unsure (1)..(380): unsure at all n locations
ggtccacgggaggatttcgttggcggggttgaacctggcgaagtgcgagcaccttgccgatgccatcatcgactccttccacaatgtcaactagattatgatttgcgtcgcggccacgctaccgcgattagttccttccatagtttgctgggatttttgggtccttccagctcgagtttttggtcgcgatgctgatgacgtgtccggtgattcagaggtacagtaataaataatttggcaaaactcacggatgctaggcgctaggcacttgtaccgttgtacggtccttgcaagcttgtaatgctgattaattatgtatgatggcatctccaattagccttttgagtgctatatctcaaagtttcttnnnnnnnnnnnnn

SEQ ID NO: 436242 - DNA, 383 bp, Triticum aestivum
ccacgcgtccgagtcccgtcgcggaacccaacgcgcgcgcaccctctctccccccgaatggagcggcagcctcggccgcagctggccgtggcggaggaggccatcgcgctctacgacacctactggttccaccgcctcgtcctcaacgcctactcccctcccgcgccccagccgccgccgccggcgcctgagcgcgagcagcccgagcaggcgccggcggaggagagcaagagcgagctgcggcgggccccgtccgggctgcagcggcaccgcaggacgcggagcgacgaggccaaggccgccgcgttccacggccagctggagccgctcaagatccccaacggccaccgcgcgaggctcgagaccatcctgtccgggaagga

SEQ ID NO: 436243 - DNA, 419 bp, Triticum aestivum
tttctttctctgtaaactggacgaatgcggcctccgttccctgagtattgattattatctgagagaaaaggatggaggagagccgttcctccctgctttgggttgtatccaggaggtttgtgtagatggacaagatatcagccggattagcagatggctcgcgtcacttcccaacctacacatgttgtttttcaacggtccgaagatagagcagcaggatattgagatgattggattgatacccaatctgatcgatttgttgctgcctttacacaaaacagacgacgctgggcggctcatcatcaggcgtgaaggatttcaacagttgcagagtttccgggtatacaatactcgtatgggaagtttaatgtttgaaccgggggctatgccgaggctcaaggagcttgaactccggaact

SEQ ID NO: 436244 - DNA, 289 bp, Triticum aestivum
tctctgctgggatcatggaccatgaggaggcaaggcgtaagaatgttggtggcaaggtgctaggctttttctactgaaaatggaaaatggggaattcgatgaaagtacctgagatgtgttagtaggatatttcccaaggaacacctaagttgtcttttttttgtctgactagctgccgctgcttgttgagttattctggaatccgttatgcactttcggattgggtgcctttgtttgaaaactatgagctgtgcctgtcgttaattctgaaaaatccatatgcaatatt

SEQ ID NO: 436245 - DNA, 693 bp, Triticum aestivum
tcttccacgcgtccggaacaagagcaggaatatatccatccatatacagcagcaagcataccttcctcgcctttctccttgaggttcatcgcagaaacaagaaactcgcagccatggacagatctgctgtttctcaggcccttccggtgcaccaggaagacgaggacctgttcgagacctcctcctccttctcctgcgactccgacgacgaggcccagttctcagacggcgaggaccagtttgtgccggcttccccgccggtgcggagactcaactctgacagcgtctacgatctgtcgtccatgaaggccgaactctccgccaagaaagggttgtcgaaatactacgacggaaagtcccagtcgttcgcgtgcatgtccgaggtgaggtgcctggaggacctgcccaagaagagcccctacaagaagatcaagtcgtgcaggagcaacatcgatctggacgggaaccagagagcctgccccgtacctggttctcacaacagcaaaggaatcgccaagccgagctctgcgagctcctgcgcgaatctgatgatggcccggaccagcagcgccaacatgctctacaggcctacggcgatccctgttaacaagagcgcgtgccaccagtagggctcgcagctgcctggaaatgtccgtccatggctggcctcgcgcctcttctttgttccttgat

SEQ ID NO: 436246 - DNA, 252 bp, Triticum aestivum
agatccaaacctccgtccgcctcgtcctccccggcgagctcgccaagcatgctgtctccgagggcaccaaggccgtcaccaagttcacctcgtcctaggctcctcgcgcgttggttcttgtgtttctttcctcttcctcgtctgatgaattctgtagctagctgtgtgtgttctgacagcgtcatcctgtaacaatggtgctgcctgaataaatagtcatgttgctgcttgaatggacgactgtcgccttgg

SEQ ID NO: 436247 - DNA, 349 bp, Triticum aestivum
ctcggttgtggcgactggaatagaaactgaaattggaaatgtgggtggatggcggcgtcattggcgctcattagggtggtcactatcatcatcgcggagtcaatcttcaaattggaaatgttttccttcgtttcgttcttttttttatagagggaagatctggctttaaagaagaagaattcctgcacctgtccatgcaatacaaaaagggcgtcccgtggtagtgttgttgaaccgctaatagcgaaattcactccgttactgtaattagaacccaatcgccttcagataagggctcagatagcttatgtttaagctttcacctggatatattttggtcattcatgga

SEQ ID NO: 436248 - DNA, 460 bp, Triticum aestivum
gcgttactcgtccgcccacgcgtccggaccagacaacgcatacgactacctcacttactcgaccggccaaagcaagcaggtcaccatgggcggcgggcacgacatgcacggcggccacagcggcggagtgaagggcttcgtgtccagcctcgtcggcggcggcaaaagccacgggtacggcggccaggggcacggttgcgaccagggctacggcggccacgggcagcagcagcacgggtacggcggccacgtgcagcagcacgggtacggcagccatgggcagcagcaggggtacggcggccacggccagcacgggtaccctccgcccgccgccggtgcttgccccccgtacggcggctacccggcgcaaggctacgcgccggcggcgtaccccgcgcagcccgcgccacaccacggtgggcacatgggatcgtaccacaccgggcacggcggcgggcac

SEQ ID NO: 436249 - DNA, 234 bp, Triticum aestivum
gcgtccgcccacgcgtccgatcgagcgagccaactactcgcagccaccacaatttcgaaacacctcctgcctcttgcctgcctgcagcgagcgccgagaaaagaaatggaggcggcggtcggcggcagctggacacgcgtccgcacgctcggccgcggcgcgtccggcgccgtggtgtccctcgccgccgacgacctctcgggcgcgctcttcgccgtcaagtcggcgcccgct

SEQ ID NO: 436250 - DNA, 591 bp, Triticum aestivum
ttgctcacgcgtccgattttctgcaatactaagagaaaggtggattggcttactgaaaggatgcgcaccaacaactttaccgtatcagctatgcatggtgacatgcctcaaaaggaaagggatgcgattatgagtgagttcaggagtggcacgaccggtgttctgatcacaaccgaggtgtgggctcgagggctggatgtccagcaggtctctcttgtcattaattacgatctccccaacaatcgtgagctttacatccatcgcatcggtcgctctgggcggtttgggcgcaagggtgtggcgatcaactttgtgcgcaaggatgacatccgtatcctgcgggacatcgagcagtactacagcacgcagatcgacgagatgcccatgaacgtcgccgatctgatctgagctctggaccggatcaatccctcccctctctttgtctcggtgcgatgtttggggaatttggttgcgttgcgatgtttggatgtatttctggtgctgcaacttgagatttcttttgttgcttttgggaacatgggaagtgtatatattctttctcggattgaccaccagctcatgtaaaacact

SEQ ID NO: 436251 - DNA, 491 bp, Triticum aestivum
tttcttacgcgtccggaacgccctcgcctacaaccggaacctgctggtgcggcaggtgggcaacgagggcacgccgctgcgcccccgccagcgcctcgaggtctacctcttcgcgctcttcaacgaggacatgaagcccggccccacctccgagcgcaactacggcctctaccagcccgacggccggatggtctacaacgtcggcctcgcccagcagcagaccacgtcggcggcctccctctccctcgccgcctcctccgcgccccccgccatggatgttggaaaggacttgacgagcctgtgcctcatctcagctctggccatcctgctcacctcccaggctttcttactgggatagcaaaagcacccaagagtgcggccatatgcatgcaagcaaaatggccttgacttttgtggaccaaaagccttgcagaccaaagggcagagatggtgcaccatttgaagggggcacaaggaaagcatatgcggtg

SEQ ID NO: 436252 - DNA, 579 bp, Triticum aestivum
ttttccacgcgtccggagagacggtggtgacggcgagggaatgaacatggccggcaaccggacggtgcgggagccgagggtggtcgtccagaccatgagcgacatcgacatcctcgacgacgggtaccggtggaggaagtacgggcagaaggtggtgaagggcaacccgaacccgcgcagctactacaagtgcaccaccgtggggtgccccgtgcggaagcacgtggagcgcgcgtcccacgacctgcgcgccgtgatcaccacgtacgagggcaagcacaaccacgacgtgccggccgccagggggagcgccgcgctctactcgccccgcgccccgggcggcggacagcaccgtgagcaccggccactaccttaacccgcagccgtccgccatggcgtaccaaaccagcacgggaggccccaacgtcgccgccgccgggacgcagcagtacgcgccgaggcccgacgggttcggcggccagaaccagggctcgttcggcttcaacggcagcttcggcttctccgggcccgggttcgacaacccgacggcgtcgtacatgagccagcaccagcagcagc

SEQ ID NO: 436253 - DNA, 725 bp, Triticum aestivum
tctgtcccacggccatcattactgaaattaacgagaagattggtgcggctggggtagtcagccaagagtgcaaaacaattgtttctcagtatggacaacagatcctcgacctgttgctagcagagacacagcccaaaaaggtctgctcccaggttggtctgtgcacctttgatgggactcgtggtgttagtgctggaattcggagcgtggtcgatgatgagcctgtgaaatcgaatggcctccataccgatcccatgtgcagtgcctgtgagatggctgttgtgtggatgcagaaccaacttgcacagaacaagacccaggatctcatactagattacgttaaccagctgtgcaaccgtctgccaagccccatgggagaatcagctgtggactgtgccagccttggatccatgcctgacattgagttcaccattagtggcaagaagtttgcgctgaaaccagaagagtatatcctgaaggttggcgaaggagctgctgcccagtgcatcagtggattcacagccatggacatcccgcctcctcgcggtcctctctggatcctgggagacgttttcatgggcccctaccacaccgtcttcgactacggcaagctgcgtgtcggattcgccaaggcggcctgaaagggtggtcgagcgagcgccccaccgcggaggcgaacacttgcgccgggagagagcttagcttttttactccgaatttgaccg

SEQ ID NO: 436254 - DNA, 447 bp, Triticum aestivum
ttgttcacgcgtccgcccacgcgtccgagatacatcatcaacacacaaagacctcatcacatctttccagttcaccggccgttatggagatgaagcccgccgcgcagccggtcaccggcgtccccgtcggcgcggcgccggccgcctggtcctccggcctcttcgactgcttcgacgactgcggcctctgctgcgtgacctactggtgcccgtgcatcaccttcggcaaggtggcggagatcgtggacaggggctccacgtcgtgcggcaccagcggcgcgctgtacgcgctcctgtgctcgctcacgggctgccagtggatctactcgtgcacctaccgctccaagatgcgcgcccagtacgcgctcccggacgcgccctgctgcgactgctgcgtccacttctgctgcgagccatgcgcgctcgtgcagcagtacaaggagctca

SEQ ID NO: 436255 - DNA, 745 bp, Triticum aestivum
cccggctcgacggggtgaaaagctacttcaacaagtccatcggcaggccggccggcaacaacagcagcaacaacaacttcagcggctacggcggcaagaagggcgctgccgacggcaagaagaagcacgccaagaacgagcgaggggacaacaaccatggcgcggcctcggagaagcggttcaagacgctgccggcgtccgaggcgctgccccggaacgagcccatcggcggctacatcttcgtctgcaacaacgacaccatggaggagaacctcaagaggcagctcttcgggttgccatccagatacagagattcagtgagggcgatcaggccggggctgcccctcttcctctacaactactccacccatcagctccacggcatcttcgaagctgcgagctttggcggagcgaacatcgacccggcggcgtgggaggacaagaagtgcaacggcgagtcccgcttccctgcacaggtgagggtggccacaaggaagatctgcgacccgctggaggaggacgccttccgcccgatcctgcaccactacgacgggcccaagttccggctggagctcagcatcaccgaggccctctcccttctcgatatatttgaagacaaggacgaggcctgatcgaggctgcatgcctactgctgatcagggagggactgttgaggaaggaacaacgcaataagatcgatcggagcatatatatatacatacatacatacgattaatatcattat

SEQ ID NO: 436256 - DNA, 524 bp, Triticum aestivum
tttcacgttttcgcccacgcgtccgggcggccatgaggctgtaccacggccggaggcgcggcgaaggcgaggacgccggcaagatcgagctgctgcaggcttttcaggccgtggaggcggccgtgcggaggttcttcttcgcgtaccggcaggtcgtggcggccgtgtgtggcacggcggaggcgtcgggcaaccgggcgctgtttgcgccggcggaggggacggaccccctgtcgcagatgttcctcgagccgccctacttccccagcctcgacgccgtcaagacgttcttggccgactactgggttcagcacatggccgccgcctctgttccgtcagggcgcagctgaaagtttggaacggccaaataccgccgctagatgggttgccacttgccacggcgacgacccgtgattttgctggctagaagttacagtacctatgatccccagcctgcaatcatatagtgattcatttcagtagcggtagacgagtacatatactcagacatgtgtgtgttgtga

SEQ ID NO: 436257 - DNA, 533 bp, Triticum aestivum
tttacgcgtccggaccctcgagaggcggccgaaccgagcagacgccatggaccgcgagtggggctccatgcccggcagcggcggcgccgccaccgcccagaatgaggccatcgaccggcgggagcgcctgcgccgcctcgcgctcgagaccatcgacctcgccaaggacccctacttcatgcgaaaccatctcggcagctatgagtgcaagctctgcctgacgctccacaacaacgaggggaactacctcgcgcacacgcaggggaagcggcaccagaccaacctcgccaagcgtgccgcccgcgaggccaaggacgcgcccgcgcagccccagccaaacaagcgcaagctcgcgccccgcaaatctgttaagattggcagacctggatatacagtaactaaacagtatgatcccgacacgaagcaacactcatttctctttgagattgagtatcctgaaatcgaagataatagcaagcccaggcaccgtttcatggcatcatatgaacagaaaatccaatcttgggataaga

SEQ ID NO: 436258 - DNA, 447 bp, Triticum aestivum
tcgttcacgcgtccgcccacgcgtccggacacttctcccgtcccgtcccgtccccagccaacctcccatccccgtctcgcgtcgcagcggcagttccactccctcgccatgggcaagattaagatcggaatcaacggtttcggaaggatcgggaggctcgtcgccagggtcgccctccagagcgacgatgtcgagctcgtcgccgtcaacgacccctttatcaccaccgagtacatgacctacatgttcaagtacgacaccgttcacggccactggaagcacagtgacatcaagctcaaggacgacaagactctgctctttggcgagaagccagttaccgtcttcggcgtcaggaaccctgaggagatcccgtggggtgaggctggtgccgattacgttgtggagtccaccggtgtcttcactgacaaggacaaggccgctgctcac

SEQ ID NO: 436259 - DNA, 600 bp, Triticum aestivum
tagtactctcgcctcgcttgactcctccttggaagcacacagagagaggagtgcatggcgtcgtccggcggcaagctcttcaccctggaggaggtcgccaagcacagctccaaggacgactgctggctagtcatcggcggcaaggtgtacaatgtgaccaagtttctcgatgaccaccctggaggcgacgacgtcttgctgtcttcaacagccaaggatgcgaccgacgacttcgaggacgtggggcacagcacgaccgcccgggcgatgatggacgagtactacgtgggcgagatcgacgcgaccacgatacccaccaaggtcaagtacacgccgcccaagcagccgcactacaaccaggacaagacccccgagttcgtcatcaagatcctccagttcttggtccccctcgcgatactgggcctggccgtcgccgtacggatctacaccaaggcggactctgtctagcaccggcgtcttataccagtcagtcagtcattcggaagtgtccaagagctgaataagttttagtggggatttgcatattttgtaccagcgtcaccgtcctgtcatggaatctgggaactgctctcgacccgt

SEQ ID NO: 436260 - DNA, 526 bp, Triticum aestivum
ggtgtgggggctcgccgccagcaagcggccgttcctctgggtcgtcaggcccacgctcatccgcggctacgagtccggccagctgcccgacgggctcgacgagcagatccgtgatcatggcaggctcgtcagctgggcaccgcaggtggaggtgctcgcccaccctgcggtaggcgccttcatcacgcacagcggctggaactccacggtggaagccgtgtcggagggcgtgccgatgatatgcctcccgttgcacggagaccagttcagcaacgccaggtacgtgtgcgatgtctggaaggtgggagtggagatcgaggcgtcgtcggcggctgggcagaacctggagagagggaagatcaaggctgccatcgacaagattgtgcacgacaaagggattagagagaggatggatgccttcaaattagctgcagatgaagcagttaactcccaaactgaggtgaaagctttggttgatctcataaactcgttttaattaattcagaaccttccacttcagatacct

SEQ ID NO: 436261 - DNA, 271 bp, Triticum aestivum
tctacgcgtccgcgcgcacgaaccccctccgccgccgacctcgcgcctgcgcctgcgcatctcggaggtgcttcctggtttccacgatgaagctgatcgctgcctacctcctcgcctatctgggtgggaactcttccccaagtgccgctgacgtcaagaacatcctggactcagttggtgcccaggctgatgaagaaaagcttgagttccttccggctgaactcaaaggcaaggacatcacagaagtgattgcatctggaagggagaagtt

SEQ ID NO: 436262 - DNA, 800 bp, Triticum aestivum
tcggcttactcctaccatctgtatgaagaggatgtcaaagcgctgaaggacatgggcatgaaagtgcataggctctccatctcttggtcgagaatactgccagatgggacgggggaagcaaaccaggcaggcatcgactactacaataacctgatcaactcgctgataggtcacgacatagcgccatatgttacaatttggcactgggacacccctcaagcactggaagacaagtacggcggcttcttagatcggcagattgtagatgattacaaacaattcgccgaggtgtgctttgagagcttcggcgacagggtgaagaactggtccacctttaacgagccacatacatattgttgtttctcctacggagaggggattcatgctcctgggaggtgctcgccggggatggattgtgccgtcccagaaggagactcgctcagagagccatacactgctggtcaccacatcctcttagctcatgctgaggctgttgagctgttcaaagcttgttacaacaagcatggggattccaagatagggatggcctttgatgtaatgggttacgagccattccaagactccttcctcgacgaccaggcccgggaaagatccatcgactacaacctcggatggttcctggagccagtggttcgtggtgactaccccttctccatgagatcgctgatcggagatcgtctacccaagttcactaaggaggagcaagagaagctagcgtcctcatgtgacatcatggggcttaactattacacctccagattctccaagcatattgatat

SEQ ID NO: 436263 - DNA, 1159 bp, Triticum aestivum
gacatgatctgcgaggcgctcggctccgcggtggccaaggaggacaccatgcttcgcgcggccatccccgtgcgccagcgcgtcgccgtctgcatctggcgcctcgccaccggtgaaccgctccgcctcgtctccaagcgcttcggcctcggcatctccacatgccacaagctcgtcctcgaggtctgcggtgccatcaagtccgtcctcatgccgcgtttcctccagtggcccgacgaggccgccgccggcagattcaaggagggcttcgagagatccttcggtgttccgggggtcatcggagccatgtacaccacgcacatccctatcatcgcgcccaagatctccgtcgccgcctacttcaaccgtcggcacacggagcgcaatcagaagacatcctactccatcacgctccagggggtggtcggccctgaccgcgccttcaccgacgtctgcatcggctggccgggctccatgccggacgatcaggtgctcgagaaatccatgctgcaccagcgcgccgcggcgggtatgatgcacgacgcttgcctcgtcggcggcgcaagctacccgctcatggactgggtgctcgtgccgtacacgcaccagaacctgacatggacgcagcacgccttcaacgagaaggtcggcgacatccgcaacggggccgtggaggcgttcgcgcggctcaagacgcggtgggcgtgcctccagaagcgcacggaggtgaagctccaggacctccccgtggtgctgggcgcctgctgcgtcctgcacaacatctgcgagatgcgccgcgaggagctcgagccggaggtcccgtttgcgctcgtcgacgacgacaccacgccggagacccctgttcgctccgagaccgccaagcaggagagggacagcatcgcgcacaacctcctccaccgcggtttcgccggcaccacatttttctgatcaaatcacctcctgccctctccttggcttggtacagataaaaaattaaacatgtagcgaattcttttagccgctaggatagaacattttgttaggatttgtacaccacgttcagagaaactggaaattcatgtaaacattctgtggaaaatttcggcagtacctgctgtcggttactcggtttattgtttaaagatatatatacaattta

SEQ ID NO: 436264 - DNA, 326 bp, Triticum aestivum
tcgagggaccagaggttcaagccccacgagaacaagcctgtgatgaatgactgagcgtcgcctggacagtccggtacctgcaaggcctagctgccaatcatgtgactcctatatgttacgatgactggtgtgaacatttgcttggtcgttctgagaactatccaagtatctagtactgtgttttaagttcctactagcaagatgcccgtgcgttgcacgaaacatcaagatgcatttgtatgagtagtttatcttgtgagaaaaataatgatgaacgaggaaaagccttatttgcggaaacttgggtctgaactctggtgtaaaaa

SEQ ID NO: 436265 - DNA, 315 bp, Triticum aestivum
tttgccctttagaaacgccaccaaacccaaactcgagcccccctctcccgtccgcccgtcccaacccgacccgatctcccccctcctcctccgtcgccatgggccgcaagctcttcgtcggcggcaactggaaatgcaatggaactgtcgaacaggtagagagcatcgtcaatactctgaacgctggacagatcgcctctacggatgctgtcgaggctgtcgatagcccgccctatgacttccttcccaccgtcaagggtaagctgcgcccagagatccaagttgctgctcagaactgctgggtgaagaagggcg

SEQ ID NO: 436266 - DNA, 377 bp, Triticum aestivum
ttcatcgtttcgcgcccgcaccccaggaaggtaagctcaagaggctgtcctgagaagctcaaatggctcccaaagttgctgttgccaagaagggcgatgccaaggcccaggctgccaaggttgccaaggctgtgaagtccgggtcaatcaagaagaccgcaaagaagatccgcacgtctgtgacatttcaccgtcccaagaccctgtccaaggccagggaccccaagtaccccaggatcagcacccctggcaggaacaagttagaccagtaccagatactcaagtacccgcttaccactgagtctgcgatgaagaagattgaagacaacaacacccttgtcttcatcgtcgacctgaaggcagacaaaaaaaaagat

SEQ ID NO: 436267 - DNA, 644 bp, Triticum aestivum
ttcttatcggccgagtaaaccctagctaaaccccgacctcctccgccggcgagcgagatgaacttcaagggcgccaggatgccgagcgcgccggcgggcgcgggcgcgctggtcaagctcgggctgctcggcggcgccgcgctctacctcggcaacaagaccctctacaacgtcgagggaggccaccgggccatcgtcttcaaccgcctcgaggggatcaaggacaaggtctaccccgaggggactcacatcgtcatcccgtggttcgagaggcccatcatctacgacgtccgcgcgcgacccaacctcgtcgagagcacctccgggagccgggatctccagatggtgagaattggtcttcgtgttcttacacgacccatgccagagagactaccaactatgtacaggaccctgggggagaactacaatgagagagtgctgccttcaatcattcatgaaacactcaaagctgtggttgcccaatacaatgccagtcagctaatcacacagagagaggctgtgagcagggagatcaggaagattctgacagagagggcgaagaacttcaacatcgctctggatgatgtgtccattaccagtctcagctttggtaaggagttcactcatgccattgaagccaaaca

SEQ ID NO: 436268 - DNA, 505 bp, Triticum aestivum
ttataatggcacctacaagaattcatgtaacatgttcactagttcatgggcaaaccccaactggaaggatccataaaggagtttgttctacttggatgaagaattcaactccctcggaagagagcaaagaatgcagttgggctccaattttcgtgaggcagtcaaacttcaaattgcctgctgatcctacagtgcctattataatggtgggccctgggactggccttgcacctttcaggggcttcttacaggaaagattagctttaaaagagaccggggtggaactgggccgtgccatcctgttcttcgggtgcagaaaccgccagatggacttcatatacgaggacgagctgaacaactttgccgaatccggagccctctccgagttggtcgtcgccttttctcgtgagggtcctacaaaggagtacgtccaacataaaatggcagagaaggtaacctgattgataactcaccgattatccatgtactgtcgttgattatatag

SEQ ID NO: 436269 - DNA, 463 bp, Triticum aestivum
ttcacgcgtccgcccacgcgtccggccacgtgtccgcttttgcgtccgggagagtgatagaggcatcttctcttcacaagatacgcggctgccatggcgagaaccctctttggtttcgtcgccgcccccgcgctcctcctcgccgtcttcatgccggccctcgccgccgcgcaggcccccgcgccggcgcccaccagcgacgcgtcctcggtcgaccagggcgttgcctactttctgatgatcctggcgctggtgctcacctacctcatccacccgttggacgcctcctccccgtacaagctcttctgagcctgtacatgcgcagaggcttctcattcttttgttcttctttctgttgtccgccgatcgataagctagtggattcttgagagattggttatgtgagattcgatttgaattcattaattcgttgctcttgtactctggtggattcgcacgcatg

SEQ ID NO: 436270 - DNA, 484 bp, Triticum aestivum
ctgggcctgcagatccggcgcacccacgccatggccatcgacatcgaccaggatctatccaggggggaaaagctacttggggatcttgggggtttgttttccaagaagtggatgccaaagaagaacggcgcgatcaggggccctatgctgaccagagatgattccttcatacgcaagggcagccatatggagcagaggcacaaactggggctggcagatcgtccgcgtcgatccaatgcacgccaattcctatccgaacccacatcagagcttgagaaagtcgagggggagaaggcaaagcaggatgatggcctatctgatcttagcgacatactgaccgagttggaaggaatggccattgacatgggaactgagattgaggggcaaacaaaggatctgggtcacgcagagaaggactttgacgaacttaactacagggtcaagggggcgaacactcgaacccgtcgtctgcttgggagataga

SEQ ID NO: 436271 - DNA, 344 bp, Triticum aestivum
atcggcaggaacgtcaaccatggaaacgactcagttgagagtgccaggaatgagatcgccctgtgggtccctgggggcattgccgaggggaggagctgccagcacaactggatctacgaggcctaagatgcgtcatgagtggcttgagtgcaggcttcgctaagcatctaccaaactagtctttggttgtttacagttttgagatttgtatctcgggaaccttgtttgtgtgaactgaactgatctccttgtgcttgagcacgcaagcgttatctgctgctctatatttgatatatggtattgagttgcattccacaccataaaagccatcgttcgaaaacaaa

SEQ ID NO: 436272 - DNA, 442 bp, Triticum aestivum
tttgtatgagcagatgctggtgtacgagtacatgccaaatggtactctacgtgatcatctttcagctaaagctagagagtctccaagttttcccatgaggctacgaatcgcactgggatcatcacggggcatcctgtatctgcacacggaagccgaccctccgatattccatcgcgacatcaaggccagcaacatcttactggactccaagtttgtagccaaggttgctgatttcggcctgtcgcgcctggctccgctgccggacacagaggggagcgcccctggccacgtgtccaccgtcgtcaagggcaccccgggttatcttgacccggagtatttcctgacgcacaagctcacggacaagagcgacgtgtacagcctgggcgtggtgttcctggagctgctgacggggatgcagcctatttctcatggaaagaacttg

SEQ ID NO: 436273 - DNA, 1605 bp, Triticum aestivum
  unsure (1)..(1605): unsure at all n locations
atatattcacgttcggggagaaaaaaatcagagagaaggattcatcatgtttnacgacacggagccgccgccaagcccaaatctctctcgggagggctgatctggagtccgttcggggctccggagaggggaatccgtcgccgtcgtcatcatcaaccttcctccatcaccaatttcatgatgctcaccgccgtgcgtgagtaattccatcgtaggcttgctggacggtgatgggttggatgagatttatcatgtaatcgagttagttttgttagggtttgatccctagtatccactatgttctgagattgatgttgctatgactttgctatgcttaatgcttgtcactagggcccgagtgccatgatttcagatctgaacctattatgttttcatgaatatatgtgagttcttgatcctatcttgcaagtctatagtcacctactatgtgttatgatccggcaaccccgaaagtgacaataatcgggacacttcccggtgatgaccatagtttgaggagttcatgtattcactatgtgttaatgctttggtccggtactctattaaaaggaggccttaatatcccttagtttccactaggaccccgctgccacgggagggtaggacaaaagatgtcatgcaagttcttttccataagcacgtatgactatattcggaatacatgcctacattacattgatgaattggagctagttctgtgtcaccctatgttatagctattacatgaggaaccgcatccggcataattctctatcactgatccgtgccgtgcgagctttccatatactggtcctcgcttgtttactttcccgctgctactgctataatcactacaaaataccaaaaacattatttttgctgtatttagttttgttgccgctaccgccactatcaaattactttgctactaaacactttgttgcagatattaagtttccaggtgtggttgaattgacaactcagctgctaatacttgagaatattctttggctccccttgtgtcgaatcaataaatttgggttgaatactctaccctcgaaaactgttgcgatcccctatacttgtgggttatcaagactattttctggcgctgttgccggggagcatagctctattctttgagtcacttgggatttatatctgcttatcattatgaagaatttgaaagatccaagaaccaagatttatccctcaactacgaggggaggtaaggaactgccatctagctctgcacttgattcaccatctgttttgagtaagcttgcgacacctaaacctgcttcagctattcgttctgatatgtcgcatgttattgatgatgccacttctgctatgcatgatacttatgatgaaactacttctatgcttgatactactgtgcccattagtgaattttttgatgaacaaattgctagggctagagagaaagaaattattgaaactcatcatgttgatgaaattgatgatgaaaacatgcctgatattcctgaaggttatattattgataaagaagcttttacggctatattagcttgcaaagataacgatgagtgtcggtgtcaataccgcccgtcgaccgacgaa

SEQ ID NO: 436274 - DNA, 953 bp, Triticum aestivum
  unsure (1)..(953): unsure at all n locations
gttatcaccactatatctatgttctagatctgatcttgcaagttatagtcacntactacgtgttataatccggcaaccccagagtgacaatagtcgggaccactcccggtgatgaccgtagtttgaggagttcatgtattcaccgtgtgttaatgctttgttccggctctctattaaaaggaggccttaatatcccttagtttccaattggaccccgcgtccacgggagggtaggacaaaacatgtcatgcaagttctttccataagcacgtatgactatttacggaatacatgcctacattatatcggcgaactggagctagtgccatatcgccctaggttatgaccgtctcatgatgaatatcatccaacaagtcaccgatccaatgcctacgaatttatcttatattgttcttgctaagttactactgctatcgtcactgttgcacttcctacaaaaccgctgctatcactgttaccgtttcctttgctgctgctactgttatcaaaactatcatactactttgctactgatcacgttgctgcagataattaatctccaggtgtggttgaattgacaactcagctgctaatacttcagaatattctttggctccccttgtgtcgaatctagaaatttgggttgaatactctaccctcgaaaactgttgcgatcccctatacttgtgggttatcactcctcagccaactaaatatgttcactacttttccaccgctctgtttatttctcagcatgacgccagttcagatccacctgttgtgcctgaaccatacagtgctctgctcaggctgactacagatgttgaacatatcccaattttttcccctgctattgatggtgctgacggtctagcagttttctctgacacccctcgggctaccaacctcatgctgcctccttcaggggctcataagggtaaagatccagctcc

SEQ ID NO: 436275 - DNA, 467 bp, Triticum aestivum
tttttccgttcgcctccgtccgttgtagcacaagcagaagcaccttgcgccgtcgcctccgtccgccgtcgctcgagcagaagccccttgcgccgccgcctccgtcgtcgcagcagaagcagcgatccccatcgccaacagcccaagaaattaagcatggatacgcaggtgaagctcgcagtggtggtcaaggtgatgggccgcaccgggtccaggggtcaggtgacccaggtgagagtcaagttcctggacgaccagaaccggctcatcatgaggaacgccaaggggcctgtccgggagggcgacatcctcaccctgcttgagtctgagcgggaggccaggaggctgcgctaagcactttcttttcacctgactgtcttcggaattgctcatgaaatgatgtgctgttgccttcttactctaccgctttcatcttttgtcttggctatggagatgtaatgagtttc

SEQ ID NO: 436276 - DNA, 993 bp, Triticum aestivum
tcgttttacctctcatcctcccacttctgttcctcggccattctagccaccatgccgggctccatcgccttcggtcgcttcgatgactccttcagcttggcctctttcaaggcctacatcgctgagttcatctccaccctcatcttcgtcttcgccggcgtcggctctgccatcgcctacactaaggtgagcggcggcgcgccccttgacccatccgggctgattgccgtggcgatatgccacgggttcgggctgttcgtcgcggtcgccatcggcgccaacatctccggcggccacgtgaaccctgccgtcaccttcggcctcgccctcggcggccagatcaccatcctcaccggcatcttctactgggttgcccagctcctcggcgccatcgtcggcgccttcctcgtccagttctgcaccggcgtggccacccctacacacgggctttccggcgtgggcgcctttgagggcgtcgtgatggagatcatcgtcaccttcgggctcgtctacaccgtgtacgccaccgccgccgaccccaagaagggatccctcggcaccatcgcccccatcgccatcggcttcatcgtcggcgccaacatcctcgtggccggccccttctccggcgggtccatgaaccctgcacgctccttcggccccgccgttgccagcggcgacttcaccaacatctggatctactgggccggcccgctcatcggcggtggcctcgccggcgtcgtctaccggtacctgtacatgtgcgacgaccacaccgccgtcgccggcaacgactactaagccagccatgggaagatcattcggtctttggtttccataatgtcttcggcaacataagaagtgcgtacgtggtggtcactctcaggattgtctggatgatgtgaggaacgtcatgttgtttggttccgatcgaaagcccgcgaggctgtggcacttggatgatgcatgtttctgtatctgtactgtgatggatgt

SEQ ID NO: 436277 - DNA, 485 bp, Triticum aestivum
acttagagctcaaccaagatagcgagccaagatctgcagagccacaggcgaccacacaccggcgaccatggccgtggacctcatgggctgctacacccctcgccgtgccgacgaccagctcgccatccaggaggccgccaccgccggcctccgcagcctggagctcctggtctcctccctctccggcgcggcgccgtccaaggcgccccagcagcacccgcagcagccgttcggcgagatcgccgaccaggccgtctccaagttccgcaaggtgatctccatcctcgaccgcaccggtcacgcccgcttccgccgcggccccgtccagtcggcgccgccgccgccgccttctccagcaccggtcgctccacctcctcccccacctttgaccgtcgtggcgccggtgtcggtggccgccccgctcccgcagccgcagagcctgacgctggactttaccaagccgaacctgaccatgtcgggcgcga

SEQ ID NO: 436278 - DNA, 462 bp, Triticum aestivum
tttctctccaagtccaaccccacgaccatggcgaccaagcagagcctcctcgccgtcgcagccgtttgtctcctcctcctccccgcggcctacgccgtcaccgatgtcgagtactgcaataagggctttaaacttctctcggtgaaggtgacgcggcgtggagatcgcgcctgatccggtcgagcgcggcgtgccggccaccttcaagatctccgctacaactgataaaaacatcaccgaggggaacctggttattgatgttaaatattggatcttcaatgtttactctgaaacggatgacatctgtacgaagacccaatgcccggcaacttctgatttcgagctatctcactcgcaaaccttaccatcaatcactccaccgggttcttacaccattcagatgaagatgctcggaaagcacgatgaggaattgagctgcatctccttcgggttcaacattgg

SEQ ID NO: 436279 - DNA, 277 bp, Triticum aestivum
tttccgcttacgcgtccgagaagaagaagatcatgaagaagaagagcaatatggatgtcatgtgtttgcctggacttggattagatgggtcggtcgatggggtgttgcatctgttttgctttgacgcctcgtgtcttgtgatgggcgtgcttgtagtatgaactgccaagtgttatgtagttcctttccggttgaattgttattccctgtcgaggacgaaacggagatttggttgccctcatttggccattgagctcatgtcattgtgttgttttaa

SEQ ID NO: 436280 - DNA, 479 bp, Triticum aestivum
gggtcgacgggcagtgatgaatgcattcgagttgatctctacctcccagggcctcaatcttggcacactttttgagaagcaaacggattctgttaaacgtgaaacacggtttgcgtcgaggcttccagcaaacgaaatattgtcgaaaattgaagcagcagcaggacccatgggcttcaacgtacagaagcgcaactacaagctcaagttgcaaggagagaatcctggaaggaaaggtcagctggcaattgcaacagaggtttttgaagtgacaccctcactctacatggtggagctccgcaagtcgaatggcgacaccctcgaattccacaagtttttaccatagtatctcgaatggcctgaaggacgtcatgtggaagccagagggtagcatagccgaaggcgatgagacccgccaccggaggtctccatgatcatatctaaatgttaggagatagtagaagataaaactagtcagg

SEQ ID NO: 436281 - DNA, 418 bp, Triticum aestivum
gacgggtgaccgctacgatgaagacgacagaaatccaacggttacggcggcaaaaaaacaacacccccaaccaccctttctacagggttggaggcatcgacaaagtcatcgccaaggcagagaagatcgccagcgagaatgcttgatgacgaggtgtcaccaccgccctgtacaagttaaattttttgggttttcagctgttcgcccgagacttgctcacgagcaggagtgtgccagctcctgctgagggatccttgtttttgttcgtttttactccaatttacccgtaataagcaactgcagtgacattggtttagtctgcacaacagcaacactactcttggcttggaaaacacttgtgccctttgtaatgcagatccgacagatcatgaattggtttagtttattgttgttggcg

SEQ ID NO: 436282 - DNA, 302 bp, Triticum aestivum
cattctacgagttgatcaacttcgacaaggaggcggacgtgcactgcttccccggcgggcagctcgggctgtaccgcgaccgcgacctcatcatcggcccgcacccgacccgcaacccgcgcaacctcaccatggtcgactacaaccggttcctccgccgcgccttcggcctgccgcgggacgcccccgcggtgctcggcgacaagacggccgtcaggcccaagatgctcatgatcgagcgcaagggcacgcgcaagctgctcaacctgcgcgccgtccaggccctctgcgaggagctgggg

SEQ ID NO: 436283 - DNA, 431 bp, Triticum aestivum
  unsure (1)..(431): unsure at all n locations
tgtaaatcggtggtggcaagtaagcagctgggcgtggttgcctacctgcgatacttggtatctagtgcttctgggtgtttgagatacacatacataggcatcaagatatctgttgggtgaaacaagtttgatccagatttgtgtgttttttacaccgaatgctcgaggtgctgctagtactttgttatctatctatctatctctattataataccctttggaattggaactgagtggtggctggaacttagattccggtttgctcatccgccctatctctatgaatgaattggtttgggttnnnnnnnnnnnnnnnnnnnnnnnnnnnnnnnnnnnnnnnnnnnnnnnnnnnnnnnnnnnnnnnnnnnnnnnnnnnnnnnnnnnnnnnnnnnnnnnnnnnnnnnnnnnnnnnnnnnnnnnnnnnnnnnnnn

SEQ ID NO: 436284 - DNA, 648 bp, Triticum aestivum
tgttgattggggagcgtctactgggcggtatcgcgcattcccaagatttgctaaagggagtgtgcactaacatcatccacatgcagaacaagaccctcaagttatatactggcaattatgaccagtctgtccaaactcgctctgagctcgaagagaatcaaatgaagcagtacaaatggcaacaggaacagatagctaatatgaaggagcacattgcacgatttggtcatggatctgcgaagcttgctcgtcaggctcagagcaaagagaagactcttgcaaagatggagcgtggtggtcttgctgagaaggttgtcaatgacaggattcttgtattccgctttacagatgttggcaaactcccaccaccagtgctgcagtttgctgatgtcacatttggttacactccggataatctcatctacaagaaccttgacttcggtgttgaccttgactcgagagttgcactggtcggtcccaatggggctggtaagagcacacttctgaagctcatgacaggtgacctatctccgttggatggcatggtcagacgccacaaccacctacgcattgtacaatttcatcaacatcttactgagaagctggacctggacatgcccgacctgcagtacatgatgagggagtacc

SEQ ID NO: 436285 - DNA, 624 bp, Triticum aestivum
ctccctttcctttccttcccccctcgcttcgtttgtgcgttgcctttttctttccgccgcggcaactgtgagccggcccgatcgagcgagccgccccccacgcacctcaagaaaccgccataattccatccatccatccgctgccgcgtcctacgcggccatttggggcgctcgtggggtgttcgtcacatcaaccaggccaagatcagatcggcggcgacgacggcgaccatgttcagcgggacgcagcagaagtgcaaggtgtgcaccaagacggtgtaccccatggaccagctctccaccgacggcgccgtcttccaccgcgcctgcttcaagtgccaccactgcaagtccaccctctcctttagcagctactcctccttcgaaggggtgccctactgcaagccccatttcgcgcagctgttcaaggagaccgggagctacaacaggagcttccagtcacaatcccccgcgaaatctgcgacggagaagttgactcctgagctgaccagatcgccaagcaaagctgcgggcatgttttcgggaacgcaggacaagtgcgccacttgtggtaaaacagcataccctcttgagaaggtgacagttgaagagaagtcctaccac

SEQ ID NO: 436286 - DNA, 473 bp, Triticum aestivum
gaggaataagaagaagaagaagaagccaacccatccaagcggcagcagggcagacggccggcgacgaaccaatccagccagccgaactcgtcagcgcgcagccgcccttcccgcgagataaaccatgggtggggtacttggtttgatacagattgatcaatcaacagtagccatcaaggagacttttgggaagtttgatgcgatcctgcaacctggatgccactgcttgccatggtgcctagggcagcagattgctggatatctttctctgcgtgtgcagcagcttgacgtccgatgcgaaaccaagaccaaggataatgtctttgtcaacgttgtggcatctgtgcagtaccgtgctcttgctgacaaggcatctgatgccttttacaggcttagcaacaccagggagcaaatccagtcctatgtctttgacgtgatcagggctagcgtttcaaagatgaacttggatgatg

SEQ ID NO: 436287 - DNA, 445 bp, Triticum aestivum
atctcctagagcagtttgctgagggtgtgtttaagaccatagctgtcactcctgaggagaatgaagctatacttcgtcttgaaggaatgggctttgaccgggcgcttgttctggaggtgtacttcgcctgcaacaaggacgagaccctggccgcaaactacctgttagaccacatgaacgagtttgacgacggagcgccgcagtaagacaaagcaggttgtttctgaatacatgcacaagcccatgggaacaagggtgtggggagactgatactcctgcactcgcagggcaggccttagagatctttttgagattttgtctcgtcctttagtttgtaattcttttctgccttgctattagtacatactctagattgtctttaaatgttaattcacagacttaacgacagcgtataaaagttctctgtcagtttttgctggatcaa

SEQ ID NO: 436288 - DNA, 784 bp, Triticum aestivum
  unsure (1)..(784): unsure at all n locations
gttttcgccaacctcctccccctccggcccccgcgcgccccagccgccgccgccggcgccgccggcggcgactgcagccatgtcgctgatcgcgggtgaggagttccagcacatcctgcgtgtgctcaacaccaacgtcgacggtaagcagaagatcatgttcgcgctgacctccatcaagggtgtgggccgccgcttctccaacatcgtctgcaagaaggccgacatcgacatgaacaagagggctggagagctttccgcggaggagatggaccgcctgatggcggtggtgcacaacccgcgccagttcaaggtgcccgactggttcctcaacaggaagaaggattataaggacggcaggttctcccaggtcgtgtccaacgccgtggacatgaagctcagggatgaccttgagaggctcaagaagatcaggaaccatcgtggtctgcgtcactactggggtgtgcgtgtccgcggtcagcacaccaagactaccggcaggagaggaaagactgttggtgtctccaagaagcgataagctgcttcacaaagattcctcatagctttgctactactgtgttggtccatttccagaatcttaagggagtgttcttatttagatgattaccttggatgatgttttgccctagataatgttttggttctggaacctttaatatattgtatcttgaattctttgttgaactcgtacaagagtttgttttgccatgtgcttccagtgaaaaaaaaanaaaaaaaaaaaaaaaaaaaagcggccgctcta

SEQ ID NO: 436289 - DNA, 420 bp, Triticum aestivum
tctatcacgcgtccggcctcctgcgcctccacttccatcgcctccccaagatcgcagatccgctccggtgagaatccgtcgccatgtcttccagcgaggtcgcctgcacccttgccgccctcatcctccacgatgacgggatccccatcacttctgagaagatcgcgacggtggtgaaggctgccggaatcaaggttgaggcctactggcccgcgctcttcgccaagctcctggagaagaggagcgtcgatgacctcatcctttccgtcggatctggtggagggtggtgctccagctgctgctgctgctgccccggctgctggtggtgctgctgccgctgaagagaagaaagaagagaaaaaggaggaggccaaggaagagagcgatgatgacatggacttcagcttgtttgactaagca

SEQ ID NO: 436290 - DNA, 657 bp, Triticum aestivum
tttttggagagaaatggtccggacatcagtgagtagaagtttcaaccaaattactgtggatggtgatacaagtacgaatgactgtgttattgctatggctagtggattatctggtttgtcggacatcctcactcatgatagcgttgaagctcaacagctccaagcatgcctagatgcagtaatgcaaggcctcgcaaaatccatagcatgggatggtgagggtgcaacctgcttaattgaggttactgtaactggtgcaaataatgaggcagacgcagctaagattgctcgttcagtggcagcgtcctccttggttaaagctgctgtatttggccgagacccgaactgggggcgcattgcttgctctgtcggctattcagggattcattttgatgcagatcaacttgatatttcccttggagctattccactaatgaaaaatggccaaccactcccttttgacagatctgctgctagcaagtatctcaaagatgctggtgacatccatggtacagtgaacattgatgtatcagttgggaatggaggaggcactggaaaggcgtggggctgtgacctaagttataagtatgtcgaaataaatgctgaatacacaacgtgaaattcgtattctccatgaaaactgcatttcttgataca

SEQ ID NO: 436291 - DNA, 219 bp, Triticum aestivum
tgtgctggatgatgacatctagacgggactgaagaagggtgctcgtttctgttttgtgaatggcaggcgttctatctgtcctggacatcctgaatcttggcctaaactctagtagcagcagtagtgaatgttgtggctggttgcagcctgtttatcattgttatggaatggacggaaagcacggttgatgcatacctaaattcaattcacagagaaata

SEQ ID NO: 436292 - DNA, 341 bp, Triticum aestivum
tcgttttgctgttggtgtcatcaagggcgtggagaagaaggaccccaccggcgccaaggttaccaaggctgccatcaagaagaaataggcgtgctatctagcagaatgtttttgttcacggtcattgcttttgttgcttcagactcttatcccgagcgagcaatgatctgtctgtcgtttaattactgtatttctattcctgcgtcggctaaactcctgtgcccctgagactgatttgttgtgaaatgcacgttattagattgcaacttgttagcttgtttttctgctgcttttgccaaatggttgcctgcttaagatgcttctttatatcgaactttaaa

SEQ ID NO: 436293 - DNA, 286 bp, Triticum aestivum
gactttagacaacagctaaattattcacccaaaagtatcaaccgacggcttaacaaaggggaggcacacgcacaccccgctaccccagttatatccagcactccattttaccgactaacaataacagcgcaccagcactatatccccatgtccaacgtgctggtacagattacatactgaatgacacagatttattgccaccacaagggggtatgggattgctctagctctcggcgctgactgcatcggctgtggcttccttctcttttaccttctccgagctcac

SEQ ID NO: 436294 - DNA, 448 bp, Triticum aestivum
ccttgcgtccggacggtttgcgctcgcggatgccatggctgtgaaggaggcggtgtggaccgagatcctccaggagaacgagcttgtcaccaccgagctcgaggagatcaccagttgggggttcgtcgatgccatgctcagtatcgacattgagcatttggacaacatgaacaagagcatggagcatgggttcctcggcttccgtaacaccgtcaactccttcaacgcttggatcgataagatgaaggcttccaaggttgttccgtgatgctcttattgtctagtatctattgttgtctacagcatatgctactgcatcccattttatcactcatttataaatttacttctgaaattagttacatcccatcatttgtgccaaatgttgtaatctagaataagccagaaccaaataaagctcccaagttgttaatcgattatctgtgct

SEQ ID NO: 436295 - DNA, 245 bp, Triticum aestivum
tctcttgcggctagggtttcctccgcttcgctctcgcagaatgcctcgctacgatgagcgtgatcgttacggtggcaacacaaggctgtacgtgggccgtcttccctcgcgcacccgcacaagggacctcgaagacctcttcggcagatatgggagagtgcgacatgtggatatgaagcacgagtttgcatttgttgagtttaagtgatcccagggatgctgatgaagcaaggtacaatcttgat

SEQ ID NO: 436296 - DNA, 363 bp, Triticum aestivum
cttgcgaggaggggggctgtttaacggaagcaggcggtatttaggagatcgagccagagggcggcgagcaagggcgcgatggcgtccaagaggatacagaatgagcttaaggatctgcagaaggacccccccacctcatgcagcgcaggtcctgtgggtgaagatatgttccactggcaggcaacaataatgggcccatctgacagcccatattctggtggagttttcctagttactatccacttccctcctgattatcctttcaaaccaccaaaggtggcattccgcaccaaggtgttccatccaaacattaacagcaacgggagcatttgtctggacatcctcaaggaccaatggagcccc

SEQ ID NO: 436297 - DNA, 681 bp, Triticum aestivum
  unsure (1)..(681): unsure at all n locations
gtttcgtcgtcctcacgcgaccagcagcttgactccctcccgcaccgcacgcacgagcagcaggaagatgcagatcttcgtcaagaccctcacggggaagaccatcaccctcgaggtcgagagcagcgacaccgtcgacaacgtcaaggccaaaatccaggacaaggaagggattcctccggaccagcagcgtttgatatttgctggcaagcagttggaggatggacgcacgcttgctgactacaacattcagaaggagtcgactcttcacttggtcctcaggctcaggggcggcacgatgatcaaggtcaagactctcactgggaaggagatcgaaatcgacattgagcccaccgacacgattgacaggatcaaggagcgcgttgaggagaaagaaggcattcctcctgtgcagcaaaggctgatttacgctggtaagcagcttgcagatgacaagactgccaaggactacaacatcgaaggtggctcggtcctccatcttgtccttgctctgangggtggttactagttaagctgtaatgggaacacttgcctcctgagagaagtgaccattggtggcatggaacctgtgttggtgttgcaaagagataataacaaactagctttgcttagtgggaggggctgtcttccatgttatctgcctatatgatttgacaaaac

SEQ ID NO: 436298 - DNA, 406 bp, Triticum aestivum
cggtctcgtgggcggacgcgtgggcggacgcgtgggcagctaccctggctgggtcactcttcacattgcactgctcccagatccatatcgacatgcccacgctgtctgatgaggataaagatgttatgaaaaaatggggtgctccaaacaagattgacttcctctctctttcttatacaaggcacgcagaagatgtgcggcaagcacgggagttcctctctaagttaggtgatcttagccaaactctgatttttgccaaaattgagaatgtggagggcttgaaccattttgatgagatcctggaggaagcggatggtatcattctctcaagagggaaccttggaattgatcttccacctgaaaaggtgttcttatttcagaagtctgctctgcacaagtgcaacat

SEQ ID NO: 436299 - DNA, 602 bp, Triticum aestivum
cctcgtttccgctctcccctgctctcctccacccctcccatggccgcccccagttcctgggcctccccgttccacgaaaagagagcttagcgctaccaagccctccgttctttccagttctcggctgctttctccgtcccggtcatcaatcttcgtcgagcagagagagagagaaggaggtggtcagatttgcgcgagatccatggggaagtacgtggagctgctggacatgggggtgcgcatcgccgcgcggttccactcccactgcccgcagacggcccggatgtactaccaccctcccgcctcctcctcggccgcccccggcgccggcgacgccggcgggatggtgcccggcgaaggaggcgccgtggccatggccatgatgaagaggcagcagcgggccgccatcgacgccacggagattattctctacaccgtcgtctaggccggctgctgctgcgctcatccggatgtatcccgccattgaagagagagagagagatgctatcttcttttattgtacttttggtttattttcgaatcgaggagagggagatgaaatatgggagagaatgttcaattgattgaatgaatggattgaa

SEQ ID NO: 436300 - DNA, 469 bp, Triticum aestivum
cccattcgtccgcccacgcgtccgcgaactcttagcctgaagacctcgttgagaaaacagtcgagtgcaagatggtgaagcttgcatttggaagctgcggcgactccttcagcgccacgtccgtcagggcctatgtcgcggagttcatcgccaccctcctcttcgtgttcgccggcgtcgggtccgccattgcctacgggcaactcacccagggtggcgcgctcgaccccgctggccttgtggcgatcgccatcgcccacgccttcgccctcttcgtcggtgtcgccatcgcggccaacatctccggcggccacctgaaccccgccgtcacgttcggcttcgccgtcggcggccacgtcaccatcctcactgggctcttctactgggtcgcccagctgctcggcgccaccgtggcatgcctccttctgcagtttgtcacccacggccagcctatgccgacgcacgccgt

SEQ ID NO: 436301 - DNA, 393 bp, Triticum aestivum
tttcgctcgataagccctctttgagtgtgtggtacagacagtaattttccagggtagcaagagagagtgaaagcagaatggtgaagctcgcattcgggagctgcggtgactccttcagcgccacgtccgtcagggcgtatgtggcggagttcatcgccaccctcctcttcgtgtttgccggcgttgggtccgccattgcctatgggaaactcaccgatgatggcgcgctcgacccggctggccttgtggcgatcgcgatcgcccacgccttcgccctcttcgtcggtgtcgcgatcgccgccaacatcttcggcggccaccttaaccccgctgtgaccttcggccttgccgtcggcggccacatcaccatcctcaccgggatcttctactggg

SEQ ID NO: 436302 - DNA, 1239 bp, Triticum aestivum
ccctctcgtccgccgaacccaaccctcgaccgcagcgactcacagcggcgcaaccatggtgctcgagtcgacgatgatctgcatagacaactcggagtggatgcggaacggcgactactcgccgtcccgcttccaggcgcaggccgacgccgtcaacctcatctgcggcgccaagacccagtcgaacccggagaatacggtgggcgtcatgacgatggccggcaagggcgtgcgcgtgcttgtcactcccaccagcgacctcggcaagatcctcgcctgtatgcacgggctggaaggtggagctgaagcaaacttggccgcagctattcaggttgctcagctggcgctaaagcatcgccagaataagaggcaacagcagagaattattgttttcattggaagccctgtgacatacgacaagaaggtcttggagacaatagggaagaagctgaagaagaataatgttgcccttgacgttgttgattttggtgaaactgatgatgaaaagcctgagaaactggaagcgctgatcgctgctgtgaacagcagtgatagcagccacatcgtccatgtccctccgggtgaccatgccctttctgatgttcttataagcactcctatctttactggcgaagaaggtggaagtggctttgctgcttctgcagcagctgctgcagccaccggagctactggatatgattttggcgtggacccaaatgtggacccagagttggcacttgccctacggttgtctatggaggaagagcgagctaggcaagaggctatcgcgaaaaaggctgcagaagacaacaaggatcagccctcaagctctactgatgctattatggctgaagcagaacttaccttaaatgctcctgctgatgttgacgcagatctactgaaggatgatgatgatgctcagctactacagcaagcactcgctatgtcaatggatgagggtgcttcaggagctgcagccgtggctgatgctgctatggcagaagctgctgcagatgaccaggatttggcattggctcttcaaatgtctgtccaggatgcagaggcggctggtcaatctgatatgagcaaagtgtttgaagacagatcatttgtgacatccatccttaattcgcttcctggtgttgaccccaatgacccatctgtgaaagatctactggcatctttgcatggccaaggagagcaggaggagaagaaagatacggaggacaagccagacaa

SEQ ID NO: 436303 - DNA, 411 bp, Triticum aestivum
ggccgccgacaccagcttctcttcctcctcccgcagcgcctcctcgaatccaagagatcaagtcgctgttgttgtgccactccccctccagccgccgtcatgcagaacgaggtgcgtgacatggtggacctctacgtccccaggaagtgctcggccaccaacaggatcatcacggccaaggaccacgcctctgtccagatcaacattggtcacgttgatgagaatggcctctatgatggccgcttcaccacctttgctctctctgggttcgtccgtgctcagggtgatgctgatggctccctggacaggctgtggcacaagaggaaggctgagatcaagcagctctagatgccgctagtagttttacctggaacttgtgtccttcccatgtctacctagctcttggatgtc

SEQ ID NO: 436304 - DNA, 684 bp, Triticum aestivum
ccgtcggatccaaggccgcgcacacgtccgcgggcagcaagaagatcgtgggcgtgttctaccaggccggcgagtacgccgacaagaaccccaacttcgtcggctgtgttgagggggccctcggcatacgcgactggctcgagtccaaggggcatcactacattgtcaccgacgacaaggaggggttgaacagcgagctggagaagcacattgaagacatgcatgttctgataaccaccccattccacccagcctatgttactgcagagaggatcaagaaggcaaagaacctcgagctgcttctcacagctgggattggctcggaccatattgatttgccagctgctgctgctgcaggcttgacagtggctgaggttactgggagtaacactgtctctgtggcagaagatgagctcatgcgcatcttgattctgctcaggaacttcttgcctggctatcaacaggttgttaaaggtgaatggaatgttgcaggcattgcccatagggcttatgatcttgaggggaagaccgtcggaactgtcggggcaggtcgtattggcaggctcttacttcagcgccttaagcccttcaactgcaacctgctctaccatgacagacttcagatcaacccagagcttgagaaagaaattggggcgaaatttgaagaggacctggatgctatgc

SEQ ID NO: 436305 - DNA, 466 bp, Triticum aestivum
  unsure (1)..(466): unsure at all n locations
gggtactgtaatcagaataccagagatctccaatgggacgacgacgtggatgtggacgagtcggatagaaagctcttagatgatgaaaagaaacccgatatcacgaaacgaccacacactcctattggagatgaggtggaatgcaagaagccaaagatagcagaaggctcaaggtgccaaggagaagaacctgaggctggagggataaagaattcctcctgggtctgatgacaggggaatgcagtaaacaccagaagcatcaaaactatgatctggaacagtatcctgaataaactattttctggattatgaatgaattctgaagcatggggctataagtgaattatgtaacatggatttgtaactatggtggatgttaagttaacgttctatcagtgcatcgtgaatgcgtgctgaaaaaaaaactaaaaacatcaaaaaaaaaagcggccgctctagnnnnnnn

SEQ ID NO: 436306 - DNA, 647 bp, Triticum aestivum
cccttttgtccgcccacgcgtccgcccacgcgtccgcccacgcgtccgcccacgcgtccgggaatttctgataatgatgctgggagcgcggagtctgtcgaaaagttagatctgctgaaagatacaaaagtttctctctctgccaaccatctgcagaagttacgtctatcttttcaactatctacaccacttggacgcacatttaaaccccaccaggttttcttgaagttaaagcatgaaagcaaggttgaacacttatttgtggtgccaggttctgcgaggcaattcaaaattgttctagattttcttggattggtagagaaattttactacctttctggaacatatgacctcgagctttcagttggtgatgcttcaatggaaaattcgttcctacgagtccttggccaactggagttggacttgccggaggcccctgaaaaggccccacgtcctccggcacaagctgttgaccccttagcaaagtttaggccacagaaggagatagaacacatattccgtgtgccagagaagaggccaccgcaggaagtgtcgcttgcatttactggcctcatactcctgcctttcattgggttcttgattgggcttatgcgtctgggagtcaacttgaagaacttcccttccct

SEQ ID NO: 436307 - DNA, 370 bp, Triticum aestivum
acggtcaaatattccgggtcgacgggcgtacaaggtttaccggagatcggggtgatatagattgttaggtccgcagtttgccactttgtaatgttcctccctacatagcgctgtcatgccatgtgtcgtgccttgctctcagcagggaagttgagttgttgtatgttgtgtagcagaacgatgctttctgcctgtggaagtaaaacataagattgcctatgtgtcacgactcaaatggtattgtcatctactcaaaaataaaaaatgaaagaaaggtaaaaaaaaaaatgaaaaaactaaaaaaaaaaggggcggcccaaaggattcaagcctaagttagccttgatgccaagttaaaacccctccaaaa

SEQ ID NO: 436308 - DNA, 247 bp, Triticum aestivum
ccccctccacctcctacccagcgtgggctcccgttcggaaccccaagctgcacccccgccgccggcgaaatggccccgaagcgaggcggcaaggccccggtgccggcgaagaagaaggcggcggacaaggtggtgaacccgctgttcgagaagaggccgaagcagttcggcatcggcggggcgctgccgcccaagaaggacctccaccggttcgtcaagtggcccaaggtcgtccgcattcagcgcc

SEQ ID NO: 436309 - DNA, 529 bp, Triticum aestivum
tttatggccacgtctctaggggtttcgtccagcgaatcgaagaatgaagaggagtcgccatggcgtcgcggccgacgctgaagccgaagccgaagggcacgggtgcgaagaggggctcgtccgcggccgaggacgagcagtccaccgcggcggtggcggtgcagctcgccaaggagtggagcacgtggacgatgaagacggcgaaggtggtggcgcactggggcttcatcccgctcatcatcgtcgtcggcatgactaagggagacgagcccaaacctagcttgctccagcttctgacccccgtctgatccaatccccggcgagccctagactggatcgatccatctccttttagttactactagtagatgtttttgctgtttattgaatcctggtggttgagttcttgatccctgggtggtgatcttttatctgatctgtgtctaataatgttatgtcggtcggatcgatcctggattggatcggatcttgttagatacctgagatgctacagatctgctattaatat

SEQ ID NO: 436310 - DNA, 470 bp, Triticum aestivum
gcggttttcatggaccacaggtcggacgtgcaccggccgcggcgggccggccatgaagagcgcgcccagggcgaggcggctgcaatgacgaggtcgctatcggcgtcgacgaagacggcggcgaggaagggcaggacggcggaagagcgggggagcaggctgaggaacaagtgaagcgtagtaacttgcaaggagcttagaattgatggccatggatgagctcccgaggagcgcgcatggccaacttcttgcttccgatcccttcccaatttgttggcatgcatacctgtggttcttgatcatttttcttactcgtattggtttcagtgcatcccatttttttggtgggagatgtggggtgggcgtcatggttgagagaggggtacatttttgtaattaaattaatggatggaggaataataatcaagtggctataatcatatacaatctatgggtatctcactaatcac

SEQ ID NO: 436311 - DNA, 441 bp, Triticum aestivum
ttttgcgtccgccaccatctcctacggctcggctcccctgctcctcctcctcctccgcgcagtgcgccggccaccaccaccacccaccgagagaatggcaggcaacggagccatcgtcgagaaggacccgctcaactggggcgcggcggcggccgagctcaccggcagccacctcgacgaggtgaagcggatggtggcgcacctccgcgagcccgtggtgaagatcgagggcgccagcctccgcgtcggccaggtggcggccgtggcccaggccaaggacgcgtcgggcatctccgtggagctcgacgaggaggcgcggccccgcgtcaaggccagcagcgagtggatcctcagctgcctcgccggcggcggcgacatctacggcgtcaccaccggcttcggcggcacctcccaccgtcgcaccaaggacgggcccgccct

SEQ ID NO: 436312 - DNA, 473 bp, Triticum aestivum
ttccgggtcgacgggctgccggacaatgtgggcgccgcggcggaccgggtcgtcggcgaggagatcgaaggcagggggtggtctgagatgctgcggatggaggtggacgacatgaccaaggagatatgcggggatgtcctgggcgaggtcgttgaggaggcgctgtcagagctcgccgggtgccgttgatggatgctcctctttatttgtttgccctgctcgcggtggtgtccaccggtggctttttccgcccacccggccgagaccgtttgctgaggaccggcgcatcttggctccttgtgtgtgtgtgtgtgtgtgtagtccctcttgactgtcctgtatgctccagtcaagtgtgcgtgcccactcccctctctctgtcgcgccacatgccgttacagttgatacattctattctacagtaataatgatcgtgaatgatacgaaaaaaaaaaaaaacagaaactacaaga

SEQ ID NO: 436313 - DNA, 362 bp, Triticum aestivum
cttgttcgtgtctaaattcgacccgtctcgcggccggagcaaagcagttgaatatgataactttattgagtgttgccttacagtcaagggtctgactgagaagttcaaggagaaggacacagcttattccgggtctgcaactttcagttacgaggcattcatgttgactgtgctccctttcatcatcgcatgatgactccgcagttcaatacaaagactgagctttgagtgtgttgttccatgtgtcgaaacgtttttccatcggaggtgtagtttgtctgaattcgagtgatgtcgctgcgttcctgataaggtgataccctggagattggaaactgcctatggatggtttggaactctga

SEQ ID NO: 436314 - DNA, 516 bp, Triticum aestivum
atttttgctctgatcttctctgcactgcttgtgagatgactgttgtctggatacagaatcagctccgaaaaaaccaaacgaaagagctcatcttggattatgcgaatcggctctgtgagcgtcttccgagccccaacggggaatcaaccgtcgactgccaccagatctcagagatgcctgatcttgctttcaccatagcacacaagactttcaccttgacgccagagcagtacgtcgtgaagctggagcaatcaggccaggccatttgcatcagtgggttcatggcgttcgacgtgccgccccctcgcggcccgctctggatacttggagacgtcttcatgggcgcctatcacaccgttttcgacttcggcgagagcaggattgggttcgccaaatccgcgtgaggacttggtgtatcagggctcagggccggtattgtacatactgcaagcacgtgcaagttgcaagggcaacaataaacttatacggagtattagtagaaaggaacaaatgaac

SEQ ID NO: 436315 - DNA, 485 bp, Triticum aestivum
ttcctttcgtccgatccgcagcggctttacctaccgagaagaagagagaaaaaaggttcgagtgcgttgcagagtgaggagaagagatggctccggtgaagctgtacggcgcgaccctgtcgtggaacgtcaccaggtgcgtggcggcgctggaggaggccggcgtcgagtacgagctcgtccccatcaacttcggcaccggcgagcacaagagccccgaccacctcgccaggaacccctttggccaggtgccagctttgcaggatggtgacttgtacgtcttcgaatcacgtgctatttgcaagtatgcgtgccgcaagaacaagccagagctgttgaaggagggcgacatcaaggagtcagcaatggtggatgtgtggctcgaggtggaggcccatcagtacaccgtcgcgctgagccccattctcttcgagtgccttatccatcctatgcttgggggagccactgaccagacggtcatcgat

SEQ ID NO: 436316 - DNA, 651 bp, Triticum aestivum
ttattctttgttcctggccagaagaaggatctatatgtgaagagtgtccagcggactgttatctggatgggaaagaagcaagagtctgttgaggatgttccctgtggtaacaccgttgcgttggttggtttggatcagttcatcaccaagaatgcaaccctgacaaatgagaaggaagttgatgcctgcccaatcagggcaatgaagttctctgtgtcccctgttgtgcgtgttgctgttcagtgcaaggtggcttctgatcttcctaagcttgttgagggtttgaagcgtctggccaagtctgatcctatggttctctgtaccattgaagagtctggtgagcatatcatcgctggagccggagagcttcatcttgaaatctgcttgaaggatctgcaggatgacttcatgggtggtgctgaaatcattgtttccccccctgtcgtctccttccgtgagactgttctggagaagtcctgccgtaccgttatgagcaagtcccccaacaagcataaccgtctgtacatggaagctcgcccattggaggagggattggctgaggctattgatgatggccgcattggcccgcgtgatgatcctaaggtgcgctccaagatcctgtctgaggagtttggttgggacaaggatctc

SEQ ID NO: 436317 - DNA, 634 bp, Triticum aestivum
cccacttctttcgcaagaatggaaaaatgtctcctggagcacagaatgagatgaatgagcgtgagctgtctgcactgaaagctgtcatcaagtgcatcgaggagcacaaactggaggagcaatatcccgtggatccacttcagaaaagggtgattcagctggagaaggccaaggcagacaagaggagggctgtcgaagccgccaagccacagtcgaagaggccacgtgccaacggatcgctctatgcaccccgtgtcagcagcttccctgagaagagcttctaccaggcaacaccagagaggcacccatacccttacgaaaggcagtttgtgtacggcgctgaggcccaccaccaccctacgatgatgaacgcggctccctacaccatctcacccgcccacacgccgtactacggtaatggctacccggtgcagtaccagataccttatatccactaatgggggagagctacgatggctctttcctaactagccctagcttttaaccttccgctgttgttgctagttgtaccaactcatctacctagtttgcctagctgaaaatagttggaccactcgcttgtgtgtgtgctatgagtggctattgtgagaatcctgttaatttatgtcacgac

SEQ ID NO: 436318 - DNA, 694 bp, Triticum aestivum
ttctcacgcgtccgcggacgcgtggggcgcgtcctcaacaccggctccccgatcactgttcctgttggtagggcgactcttgggcgtattatcaatgttattggtgagccaattgatcacaagggagatataaaaacaaacagttacctgcctatccatcgtgaagcccctgctttcgttgagcaagctaccgagcaacaaatccttgttactggaattaaggttgtggatctacttgcaccctatcaaagaggtggtaaaattggtctcttcggtggtgcaggggtgggcaaagacagagaaaccaccatgggccttggcaacgttgttggagaacgtacgcgtgagggtaatgacttgtacagggaaatgattgagagtggtgtcattaagcttgacgacaagcagagtgagagcaagtgtgctcttgtgtacgggcaaatgaatgagccccctggtgctcgtgctcgtgttggactgactggtttgactgtcgctgagcatttccgtgatgccgaaggacaggatgtgcttctcttcattgataacattttccgtttcactcaggcaaactctgaggtgtctgctctgcttggacacattacatttgctgagggataccaaccaacccttgctaccgacctgagagggctgcaggagcggattaccaccacaaagaagggttctattacat

SEQ ID NO: 436319 - DNA, 627 bp, Triticum aestivum
atgcacagagaaggcatcaataatgcaacgaactctgtaactgttgttgctgcgctttttgctaccgttgctttcgcagctatattcactgtacctggtggaaatgacaacaatggagttgcgattgttgtccagactgcctcctttaggagattcttcagctttaatgccatagctctgttcacatcattggcggtggtcgtggttcaaataacagttgtcaggggtgaaacaaagtccgagcgaaaggttgttgaggtgatcaacaagcttatgtggctggcatcagtttgcacaaccatttctttcattgcctcatgctacactgtgctaggccgccatttccaatgggcagcaatactggttagtttgataggtggtgttacaatgactggtgttcttggaacaatgacgtactttgtggtgaaatcaaagcgcatgaggaagattagaaaaaaagagaagatgtcaagaagaagcggctcaagctcctgggttgatactgaaatctcagagactgagcttaatcaagtgtatgccttgtaaagagacagggtgtttgaactcagccttgcctctgcaattgagaatgtacatgcttaatcaagtgtatgccttgtaagacac

SEQ ID NO: 436320 - DNA, 582 bp, Triticum aestivum
tccacgcgtccggagcacacgagtcgacgcggcgcgacagctcagctctttcgtctcgtctcgcctcgcctcgccccgccccgcccccttccagtccctccggcgcgcgcgagcgagatcgatcgccccgggccctagatcccgatggcctcgcgccgccgcaccctcctcaaggtcatcatcctcggcgacagcggggttgggaagacttccttgatgaaccaatatgtgaacaagaagttcagcaaccagtacaaggctacgattggcgccgatttcctcaccaaggaggtgcagttcgaggacaggctcttcaccctacaaatatgggatactgccggtcaggagaggtttcaaagtcttggtgttgcattctaccgcggagcagattgttgtgttctagtttacgatgttaactcgatgaaatcatttgataatctgaacaactggcgtgaagagtttctaattcaggctagcccatcagatcctgataacttcccttttgttctgctgggtaacaaagttgatgtagatggcgggaatagccgtgtggtctctgagaaaaaggcaaaggcatggtgt

SEQ ID NO: 436321 - DNA, 540 bp, Triticum aestivum
gtgctgtcgcgtgggcgccaccgccgtggaccccaagatgggcagcctgggcaccatcgcgcccatcgccatcggcttcatcgtgggcgccaacatcctggtcggcggcgccttctccggcgcgtccatgaaccccgccgtctccttcggccccgccctcgtcagctgggagtgggggtaccagtgggtgtactgggtcggccccctcatcggcggcggcctcgccggcgtcatctacgagctgctcttcatctcccgcacccacgagcagctccccaccaccgactactaagcagcgagcttaggatcggagtcgccgtccatccgtccgtgtgatgcttcagtctcccccttccttcccgtcatcagtcgttttagtttctcgcgcggtcgccgcatgccatgatgcatgtatgcggagctcgcctcgtttgctttgaatcaatcagtcctgggatccgtcgatcggtcggtcagtcgagtcagtttgtggtgcgtgcgtggagctgtaaaagcgtggatgatctcgatctgggatga

SEQ ID NO: 436322 - DNA, 428 bp, Triticum aestivum
ttcatcgcgtccgcccacgcgtccgcccacgcgtgcgcacgacgcgaccgcgagccaaaccctaccgcgaacacgtcggcgatgagctcctccaacggcaacggcgggaagaagccggcgccgtccggcgggcgcgggggcatccgcaccctcgccgacatcaaccgcggcccctccgggttcccaggcgcaggcggcagcggcagcgactccgatgagccccaggagtactacaccggcggcgagaagagtgggatgcttgttcaagatccaacaaggagaaataatgcggactcaatctttgagcaagctagagtgatgggtgctcagcaagttccactgccttcttttgaaggccaatcttccagctcaaccagctttgcaggaacgtgtcgtctgctttaggggatgcgcagacagcaccagct

SEQ ID NO: 436323 - DNA, 332 bp, Triticum aestivum
ctttgcgttcggtcttcttggaccctgcttctctgccgtcctcgccgctgcgagcgccgatcggcaatcttttctccgttcaagatgaccatcatcatcgagcagcctcagtttgatgcggcggcggagaggaaggtcgccggcgaccagggggagctcgtgctcgacggcggcttcaccgtgccggactccaacgccttcggccacaccttcagggactacgacgcggagtcggagcggaagaagacggtggaggagttctaccgcgtgaaccacatcaaccagacgtacgagtttgtgcagcggatgcgggatgcatatgggcggctgga

SEQ ID NO: 436324 - DNA, 433 bp, Triticum aestivum
cgggtcgaccgggccttcaaatacatccgggaggtgctcaagtgggaggaggacaaggacgagaactactaccaggaggagtccttctacagcaccaccgagatgagctcctcccccttcatccgagccgaatgagaccgcgtcccctgcccccgccgaaggccggttcctatactaatgatgcgccgtttcgttttcgccgccagtcgattccgttttgcgccgtacaaaaaatcattcattgattgttggtctgtaaaaagttaatctgcaggtttttgttcttctgatggatgggatgtttttcatgtttgtgtctcttggtccttgagatagagatgaagcatgattgatctgttggtgtgtatttagtgagtggtactagcagttttcctctagtcagtgcacagattgacctgttggcaccaaaatt

SEQ ID NO: 436325 - DNA, 464 bp, Triticum aestivum
ttttgtcgcgtgggagcagagcaccctcaaggcctggtccggcaagacggtgtatgaggtgacggccagggcggcgttcctggtgaggtgcaaggccaactctgaggccaccctcgggacctacaagggcgacgccacccttgccgagggcgcctcggagagcctccatgtcaaggactacaagtactgatctgccccccgctggatggtttgggcattcctgcttactacctccgtctgaaaataagtgtctgacacttatttttggacggagtagtatctggttggtttcatagtcttgatatctttaaatatcaacccttgtttttaataatataagcttctacttatagttaatttttgacgttgaatcccctgtaatacatttgctgagcagaatgtttttgctctaagcggcattgtattttttctgcttacaatgaaatgaaatggtgaaccccccc

SEQ ID NO: 436326 - DNA, 587 bp, Triticum aestivum
tttctttcccatccctgtggtctgtcctgttgccaaacgctcctttgatccccgtttgctacggcaaggcagcaaacgcgattacgcaagcttaggtttcgtctctccttcctctgtccccgccccacctcgtgccccaccctacctccggcgcgcgacgagcgcgagcaagagcgcttggtagatagatcccgatggcctcgcgacgccagacgctcctcaaggtcatcatcctcggcgacagcggggtcgggaagacgtccttgatgaaccaatatgtgaacaagaagttcagtaaccagtacaaggccaccatcggcgcggatttcctcacgaaggaggtgcaatacgaggacaggctcttcactctgcagatatgggatactgctggacaggaaaggtttcagagtcttggtgttgcattctaccgtggagcagactgttgcgttctagtttatgatgtcaattcaatgaaatcatttgataatctgaacaactggcgcgaagaatttctgatccaggctagtccgtctgatcctgataacttcccttttgttctgctgggaaacaaagttgatattgatggt

SEQ ID NO: 436327 - DNA, 455 bp, Triticum aestivum
cccgttcacaacgacccaaccgcaaccgggccagagcgctaacacacaacagagcggcagcagttcccgggccgttcccgccccggccggcgccatggactgcgtcttcgtggagaagctcctcgtgggcctcctcgcggccgtggtgggcgccatcgtcgtgtccaagatccggggccgcaagctgcggctgccgccgggccccttcccggtgcccatcttcggcaactggctgcaggtcggcgacgacctgaaccaccgcaacctggcggcgatggcgcgcaagttcggcgaggtcttcctcctccgcatgggccagcgcaacctggtggtggtctcctccccgccgctggcccgcgaggtgctccacacgcagggcgtggagttcgggtcccgcacccgcaacgtggtgttcgacatcttcaccggcgagggccaggacatggtgttcaccg

SEQ ID NO: 436328 - DNA, 433 bp, Triticum aestivum
attcccgggccgactctcccacccactcctcctcccccctctctagcaatcggcgagcgatggcgtgggcgacacggttcctgtctgcggtgtgcttcttcgcggcgggcgtcctcttcgccccagatgtcctcgtcggcgaccgctccggctccggcgccaccgccgtcacggccgccaaggtgtcccacctcctctgcttcgccacctgctggggcgctgcgctctgggctaccttcatcggcggaatcatcatgttcaagaatctgccgaggcaccagttcgggaacctgcaggggaagatgttcccggcctacttcacgctcatctccgcctgcgccgccgtctccgtcgctgccttcgcctacctccacccgtggaaggccgcctccgccgtcgagcgctaccagcttggcttcctcatctccgcgct

SEQ ID NO: 436329 - DNA, 658 bp, Triticum aestivum
ttcttaaaaaaaagatggcccggtggtcgtcgtgcatggcgctgctcgtcctcgccgtcgccgcgcagctcggcgcgtccgacctgtcgccgggctactacggcagcagctgccccagcctggagagcatcgtgcgcggcgtggtgacgcagaagatggacgacaccatccgcaccatcggctccaccatccgcctcttcttccacgactgcttcgtcgagggctgcgacgcgtcggtgctgatccggtcgacgccggggaacccgacggagatggacgccgacgacaacaagtcgctggcgttcgagggctacgagacggtgaggatcgccaaggaggccgtggaggccgcgtgccccgacctcgtctcctgcgccgacatactcaccatcgccacacgggacgccatcgccctgagcggcgggcccttctaccaagtggagctggggaggctggacggcctgagctccacggccagcagcgtggccggcaagctgccgcagcccaccagcaccctcaaccagatggtcgccatgttcagggcgcacgggctcaacatgtccgacatcgtcgctctctcagcggcgcacaccgtggggctcgcgcactgcggcaagttcaggaccggggtgtacggcagcccggcggacgcgacgct

SEQ ID NO: 436330 - DNA, 420 bp, Triticum aestivum
cctacgcgttcgtatcttccttgattagttctgtaagctcggcatcggcgttggtgtactcggcgaagctcgtggtgctgctcgtagctctcatgtcggccatggcggtcacggcccaaaactcggagcaggacttcgtggacgcccacaacgcggcgcgcgccgacgtgggccttggggaggtgacatgggacgctacggtggcagccttcgcgcaggactacgcggatcagcgccgcggcgactgccagctgatccatactcctgatggccggccgtacggggagaacctctacggaggcggcggtgggaccgagtggacggcgacggacgccgtgaattcgtgggtgtcggagaagcagtactacgaccacgacagcaacacctgctcggcgcccgagggtgagtcgtgcgggcact

SEQ ID NO: 436331 - DNA, 447 bp, Triticum aestivum
ttcttcgcgtccgcccacgcgtccgtagagagctctcctttccatacctctcccttcgctccaccaggagtctagggttagagagagagagagagagcgagacgagcaaaaacaatctctcgccccactgttataccaagttcgcatccatctcactgttatacatccttgtatcacaatgggtggcctatccatggagcacccttgggcattcgccttcggcctactaggcaacgtgatctctttctcgagcctcctggccccgataccaacattctaccggatcttcaagagcaaatccacgaaggggttccagtcggtgccctacgtcgtggccctgttcagcgcgatgctgtggatcttctacgcactggtcaagaccggtgagggcctcctcatcagcatcaacgctgtcggctgcgtcatcgagaccgtctacatcgtcat

SEQ ID NO: 436332 - DNA, 381 bp, Triticum aestivum
tcttttaacgtagggaagcacaagcacactgcaccagggcgctcaccgtcttgagctccgtcgaccaggccgtgctggacgccgagcacgagctctgggcgaccacattctcctacatcaagtccatggcgctcaagtcggcccttgacctccgcctcgccgacgccatccaccaccacggcggcgccgccaccctccctcagatagccgccagggtcgcggtgcacccgtccaagatcccctgcctgcgccgtctcatgcgcacgctcaccgtctcgggcgtcttcagcgtcgtccagcagcaggacgtcgtcgttcctgctgcccccgtgagcaacggcagctgcaacggcgccgtcgtcgccgagcccttgtacgccc

SEQ ID NO: 436333 - DNA, 704 bp, Triticum aestivum
ccgggggacgagcggcaggggctcgcgaggctcaaggactacctcagccgcttcggctacctccccgcgccgccggccaagttcaacgacatgttcgacgccgacatggagtccgccatccggacctaccagcagaacttcggcctggaggtcaccggccagctggacgcggccacggtcaccaagatgatgtccccgcggtgcggcgtcgccgacatcatcaacggcacctccgccatgggcaagacggtccacggccggaacctctactcctacttcccggggtccccctcgtggccgcgctccaagaagagcctcaggtacgccatcacggcggccaccgagacgaccatcgaccgggccacgctgagcaaggtcttcgcgagcgccttcgcgcgctggtcggcggccaccacgctcaacttcacggagacggcgtcggcgtacgacgccgacatcaccatcgggttccactcgggcgaccacggcgacggctaggcgttcgacgggccgctcggcacgctggcgcacgccttttcgccgaccgacgggcggttccacctggacgcgtcggaggcgtgggtggccggcggcgacatgtcgcgcgcgtcgctggacgcagccgtcgacctggagtcggtggcggtgcacgagatcggacacctgctggggcttggccactcgtcggtggagggcgccatgat

SEQ ID NO: 436334 - DNA, 414 bp, Triticum aestivum
cttacgcgtccgcccacgcgtccgcaagaagcagcagccatggcgacgctggctcgccttcgctgtgcggttcccgcagctggcgcggccgggcaggggccatggccagggacagccggcgacgcgggtcgcggtcagcggcggcagggccgcggcggcggcggcgcgcggggtgcggtgccgggccggcggcctgatcgagccggacgggggcaggctggtggagctggtggcccccgaggagggcggccggcgggcggcgctgcgccgggaggcggcggcgctgccgcaccgcgtgcgcctgggccgcgtggacaccgagtggctgcacgtgctcagcgagggctgggccagcccgctgcgcggcttcatgcgcgagaccgagttcctccaagcacttcatttcaacgccgt

SEQ ID NO: 436335 - DNA, 410 bp, Triticum aestivum
tcgtacagattagtttcgtcgacatccacgactccatcaggttccaccgttgttgggtctcgagcactgcatttgatcctgtcttattctgcagcaacgagtttcgaggtactggcgcggatcgcgttggtgttgccgcgcaggtcggcgcagaattcttccatggacgcggtgatcttctccaggtagtccttgatggacggatccatcgcttcaagttggagacgaacctgccgcacgccgcgggtctcgatgaattgcgccagatcgaactaggggaaggagtggtggctggtctttgataccagatgtgaggagctagatatggcggtgcctcgattactcacttgctcacgcaatatcggattcgagtctcaattacagttgctatacaagaatggagaaagggg

SEQ ID NO: 436336 - DNA, 488 bp, Triticum aestivum
tctttcggccgcacacctcatctcatctcattgcacacctcatctcatctcattgccattccctccttgcgagtagcaccggcagcagcaatggccagcctcgccgacctcgtcaacctcgacctcagcgactgcaccgacaagatcatcgtcgagtacctctggattggaggatccggtatcgacatcaggagcaaagcaaggacggtgaacggccccatcacggacgcgagccagctgcccaagtggaactacgacggctccagcaccggccaggctcccggagaggacagcgaagtcatcctctacccccaggccattttcaaggacccgttcaggaggggcgacaacctccttgttatgtgtgactgctacacaccacaaggtgtgccaatccccaccaacaagaggcacaatgccgccaagatcttcaacacccccaaggttgcagctgaggagacatggtatggaattgagcaggagtacac

SEQ ID NO: 436337 - DNA, 298 bp, Triticum aestivum
atgccccttcccttctcttcggcggcggcttgagaccgttcgagcgagctttggtttgtcgcggcggcggaaggaaggaagggagtcgggaagatgagccgcagccttgggatcccggtgaagctgctgcacgaggcggcggggcacgtggtgacggtggagctcaagaccggcgaggtctaccggggctccatgatcgagtgcgaggacaactggaactgccagatcgagaacatcaccttcaccgacaaggacggcaaggtgtcgcagctggagcacgtcttcatcaggggcagca

SEQ ID NO: 436338 - DNA, 299 bp, Triticum aestivum
gttagttaaagcgttttataacacccctgatgctgatagagggtatgtgctgtactgggaaaagatggtcaaggaaatgaagtggcttgaaaatcatgtgcttaaagattttctggagtgggagccaatgcgccggaaaggtttgtaccaatcaattaagattgccaatgggttcagcaacattcatttgggtctagcatgtcatggcttcgaggagtatgtattgaggactcgcctttatcgtctgtttgtggaaagtcttgaccgtgcctttcttgagatttggaagcgggtcaatg

SEQ ID NO: 436339 - DNA, 656 bp, Triticum aestivum
ggcaagaaggtcatcctcttcggcgtccctggcgccttcacccccacctgcagtaatcagcatgtaccaggcttcattactcaggccgaggagctcatagccaagggtgtagacgagatcctgcttgtcagcgttaatgacccctttgtcatgaaagcatgggcgaagacatacccagacaacaagcatgtgaagttccttgctgatggagcggcagcatacacaaaagcacttggtcttgagcttgatcttacggagaaaggattgggtcttcgttcgaggcggtttgctctccttgctgacgacctcaaggtcaccgtcgcaaacgtcgaggaaggtggccagttcacaatctctggtgccgaggagatcctcaaggcactgtaggagcttcagcgcttcggaatcgcagcgatcacccaaaccttgtgtcatatcgatgtagtttgaacttgtctgccgaactgctagtgggaataaattgtcgatgtgcatttcttcatgtactttatgtgcggtgcaagtgacttcagagttttccggtcaacttggtggttgcgttgcaaacattctgagattgttgaaggaaaatggtgtgggtggtatttgtgtgaatcatcattaccttgtgaaatcaacaggcaagtgtttttttt

SEQ ID NO: 436340 - DNA, 525 bp, Triticum aestivum
tctctgccttcaggaacatccttgagatcgaccccgagaggatggttgccaaggtcgagccgctcgtcaacatgggccagatatccagggccacctgccccatgaacctctccctcgccgtggtggcggagctcgacgacctcaccgtcggtggcctgatcaacggctacggcatcgaggggagctctcacatctacgggctcttctccgacacggtggttgcgctggagatcgtcctggctgacggccgggtcgtccgagccaccaaggacaacgagtactccgacctcttctacggcgtgccctggtcgcagggaactctcgggttccttggggcagccgtgatcaagctcatccccatcaaggagtacatgaggctcacctacacccctgtgaagggccctctgaaggaggtggcgcatgcgtacgccgactccgtcgcgccgagggacggcgaccctgcaaaggtccccgacttcctggaggggatggtgtacagcgcgacggagggcagcatgatgaccg

SEQ ID NO: 436341 - DNA, 407 bp, Triticum aestivum
ttccttattcatgttcgagacattcaatgccccagggatgtatgtggctattcaagctgttctttctctatatgccagtggtcgtactacaggtattgtgcttgattctggcgatggtgtgagccatactgtgccgatttatgagggatatgcacttcctcatgctattctccggctggatcttgcgggccgtgatctgaccgactccctgatgaagatcctcacggagaggggctattccttcaccacaactgctgagcgggaaatcgtaagagatataaaggagaagctcgcctacgtcgcccttgactacgagcaggagctggagaccgccaagagcagctcgtccgtcgagaagagctacgaactgcctgacgggcaggtcatcacgatcggcgccgagaggt

SEQ ID NO: 436342 - DNA, 442 bp, Triticum aestivum
gggtcgacgggcctaaacactggctcaaaggtttctttcaagaatcatgagagaacattcaaggagtggattatttggaaattagaaccttcagatttcttagaacttcacttggatttatgtgaatataagcgtaagaggtctagtggcaatgctacaaaatcactgcaggcgatataataacgttgtagatagacggagactgaatcagttgacactactttgatgtctatcgagccaatgggacaacaaagtccttgcagaatagaagaaccggaagcgggttatctatcttcacgagcaagttggcgtctgtaaaccttcaccggagccattccagctctttcagagccacaaggcaaggaagttgaggaaccaagaccccaacggtgcaaaacaatttggcaatcgaaaggactagggctgccataagggacctgta

SEQ ID NO: 436343 - DNA, 409 bp, Triticum aestivum
ttgctctcacgcgtgcgcccacgcgtccgttccatggccaagactggtgagaactacaggcttctgtatgacaccaagggtcgcttccgccttcactctgtcagggacgaggatgctaacctcaagctctgcaaggtcaggtctgtccagtttggccagaagggcatcccctacctcaacacctatgatggccgcaccatccgctacccagacccactcatcaaggccaatgacaccatcaagcttgacctggagaccaacaagattgttgacttcatcaagtttgacgtcggcaacgtggtcatggtgactggtgggcgcaacactgggcgtgttggtgtgatcaagaacagggagaagcataagggaaccttcgagaccatccacgttgaggatgcccagggccacc

SEQ ID NO: 436344 - DNA, 435 bp, Triticum aestivum
tccacgcgtccgcctccgcctcccgcgctccatttcgcacctccaacctcctgctccgacctccaccgctgctgccatggcgcggccagggcactccacggcgtggctccccctcctggtgctgctcttcgcggcgggcgcggcggcgcagagcggctgcctctccgcgaccttcacggggggccgcacgttcctcaagtgcaaccagctgcccgtgctcggcgccagcctccactggacgtaccacgccgggaacggcacggccgacatcgccttccgggcgccgtccggcgccgacgggtgggtcggctggggcatcaaccccggcagcagcggcatggccggcagcaacgtgttcatcgccttcaactccaggctgcaccgccgtaacctcacggagtgctaacggcgtgggaggggcgtgctgatcccgct

SEQ ID NO: 436345 - DNA, 362 bp, Triticum aestivum
tagaagagatcgtcatcatccgccaaaccagatcggctcggctgcttcctcttcttcaacttcgcagaatcgctggtcttctcgtcctctagttaagtccctcgacagcaatgggaggaggcaacgacggtcatgggtacccacccggtggccaggggggataccctccgcaagggtacccgccgcagcagggaggttaccctccacagcaaggatacccgcctgcacctggagcttacccacctgcacctggggcataccctcctgcacctggggcataccctcctgcacccggagcgggtggcagtgactgggagaaggtgctcctctccaacatcatgcacggtgttgccggtgctcat

SEQ ID NO: 436346 - DNA, 575 bp, Triticum aestivum
  unsure (1)..(575): unsure at all n locations
ttgctgccacgcgtgcgcgagatctccgcccgggacccgtttctccgccgccaaggcccagcgccgccgccgcccggccctccctgtcgcaggcgacgccggcgccgccatgtgcaagtctggagccctggatctcgcgtctggccttggcgggaagatcgacaaggaacaagtcaaatcggcggtcgacgagtatgagaaatatcatggatactacggagggaaggaggaatcgaggaaatccaactacaccgatgtggttaataaatattatgatcttgctactagcttctatgagtatggctggggtgaatccttccactttgctcacaggtggaatggggaatctttaagggaaagcatcaaaaggcacgagcactttctggctttacagcttgagttgaaaccagggatgaaggttttggatgtcggctgtggaataggcgggccattaagagaaatttgcagatttaacctcaacctcagttactggattgaacaacaacgactaacagataactaggggaaaagcgcttaatcggtcggtangacttggcgctacttgtgattttgtc

SEQ ID NO: 436347 - DNA, 422 bp, Triticum aestivum
tttgacgcgtggaaaaaaagttcgcacatcaactatttgaaagggcaaagcatccctttcatttagtctgttattcttatcatctgctttcctaaccacgaaactgagactatgtattttatttgtcctttttacacacccttattgtgttattcactcccttttagttgttgatttatttgaaaatgtattgcttgccagcttttgcattgtcattatcttgaaatcatcttaaatgtgtgtgtgaactgctaacttggttcttcctcccggatgtgattccttagacctttcatcatcatattcatttcattgtatattgcaagactcgcattcaaatgttgaatttgttattcgattgttcttgttctggcattttgattgaaaaactggaatcctttgaaaacatccacccaagccca

SEQ ID NO: 436348 - DNA, 550 bp, Triticum aestivum
tttttacgcgtgggtaccactggtgagaccatttgctctttacgaccaatactgcatcgcacacattatgtgtgcacgcagacagctggatcgagcattggaaatatccaacatatgatcacaaagaattactattatcccattcctccgggaattgggcgcacaactcagagcgctcaaattggatatggtaaagccactgtagcggcttatggctacaattggaatgcaaataatccaatagactggatttccgatatgtttgtcggagtccgagggtctacggttttgcatgccaatgttgtgggacaaagcggtaacacagtccaggtgaattccttttctgctgcacgtgcttatgtcccactgcccaatcttccgggaaactccaatacgatttccacttcggtttccgtcactgctggtctcattaatgacatcagtcgggacgcattatcgaatgcaccatctaccggaagtgggctcagtctcactaactgtgcaacacagtcagctctgtctgtgaatgttcctcagtttttaccacacc

SEQ ID NO: 436349 - DNA, 420 bp, Triticum aestivum
tgtccatgcaaggtattgtctcaattggagtgacagctgcaaaggtgcttgttgaagatatatcccatgaagccccccgtaggaggaaagaagagactgatgtagctcgaagtaggatagaaacatatgtaaggtcttcactccgtacagcttttgctcaaagaatggaagaagcagattcaaagcgatcatcgaggaaccctaccccagttatgtctatccttgcaaaggacattggtgacctagcaattaaggagaaaaatctgtacagtccaatattgaagacatggcatcccctcgcttcaggtgttgctgttgcaacgcttcattcatgttatggaagtgagctgaagcagttcatagctgggctttcagagttaaccccgggacagttcaagtgctcaagtctgcagacaaatt

SEQ ID NO: 436350 - DNA, 334 bp, Triticum aestivum
tccacgcgtccgcgccgtctactgagtcactcctcgctcctcactcaacggccagcatctctgtctcgctggaaagaaagccttcaacatggtggccaggaccagagaccagacagggaaggaggtgctgtgtgctctacctgtactgtaaaagattcatcccatggccgcggagtctgcctggtgctggccgtggctcagctccggcacggcgtggttcctcttcttcaacgtcttcgtcggcgccgtggccgtcctgtcctggcggcagggcagcgacccggagatgtcgaggcggaggaggctcacccggagcgcgtcgtccatggtcatg

SEQ ID NO: 436351 - DNA, 465 bp, Triticum aestivum
gggcgccattattgcagagcttttttcacaccgacctcttttccctggctcaagtgaagcagacgagatatacaaaatctgtagcattcttggcacaccaaatcagcatacttgggctggaggactgcagctggcagcatctatcaattttcagtttccgcggccggggggcataattctttcagaagtgggtcccacagcaagtgaagatgcgctgaaccttatttcgtggctttgctcatgggacccacgtaaacggccaaccgcagtggaggttttgcagcatcccttctttcagccatgcttctatgtccccccttcacttcgtttcagatcgaccggatatgcaacaacaccaccatcagttggggctaaaggagctatggaccagaagaatgctaggcgataccctgtggggactttatccaatgggagaccggcagtcaataactcgtacttgagcac

SEQ ID NO: 436352 - DNA, 490 bp, Triticum aestivum
gtggcggctttggagggggtagctcgtgaggacgcatacaaagcgtggtgaagatgtggtgcataccatgaaggtttcgttagaagacttgtacaatggtgctaccaagaagctatctttatcacggaatgttctttgtggaaaatgcaagggaaagggatccaagagcggggcaacggctacttgcagtggttgtcgtggtgcaggaatgaggatgataacaagacagatcggacctggcatgatccaacagatgaatactgtttgccctgaatgcagaggatcaggcgagatgataaatgacaaggatagatgcccaagctgcagagggaacaaagtatcccaggagaagaaggtctcggaggttcatgtggagaagggaatgcaacatggccaaaagattgtattccagggtgaagctgatgaagctcctgatacagtgacaggagacattgtttttgtcttgcaacttaaagagcacccaaaattc

SEQ ID NO: 436353 - DNA, 484 bp, Triticum aestivum
tcgtttgcattaacagttctccttcaacgatcattcaaaactactaggaccacactctcaaccccgcaaaggcgaagattttcgtctgagaggacatttcatacaagtcaaacttcaaatgctgggcttgcttatctcggcgggcaatcagttgttggagctaccggattaccccaagttgaagcaaaatatccagctttgctctttaaacagcagcttgtggatctaattgagaaggtttacggtatgataagtgacagcgtgaagaaggaactaaaccctttacttgaattgtgcatccaggatccacgaacttctcactcaaatctggcaaaaagcaatacaaatggcttgggacaacagaaccaattagcacattggttaagcatcgtgaaagtcctcgccaactatttggatgtattaaaggcgaaccatgtcccatcaattttggtgcataaattgttcgtacagatattttcactga

SEQ ID NO: 436354 - DNA, 508 bp, Triticum aestivum
ttctgcgcaacacgcgtccatctccaagaagcggaagctagtggagcagagcaaaccaagcaaggttggatggcgccggcggtgaaggtgtacgggtgggccgtgtcgccgttcgtggcgcgcccactgctgtgcctggaggaggccggcgtcgagtacgagctcgtgtccatgagccgcgcggccggcgaccaccgccagccggacttcctcgcccggaaccccttcggccaggtccccgtcctcgaggacggcgacctcaccctcttcgagtcgcgcgcgatcgcgaggcacgtgctccggaagcacaagccggagctgctgggctgcggctcgccggaggcggtggcgatggtggacgtgtggctggaggtggaggcccaccatgtacaaccccgcggccagcgccatcgtggtgcagtgcatcatcttgccgctcctgggcggcgcgcgggaccagtcggtggtggacgagaacgtggacaagcttaagaaggtgctggaggtg

SEQ ID NO: 436355 - DNA, 374 bp, Triticum aestivum
tctcgctgtctttttcttcacttccccctcgccttctcctgccctcccctcctgatcggagtctcagccgcggcagccatggcgaagacctaccccgttgtcagcgccgagtaccaggaggccgtcgagaaggccaggcaaaagctccgcgccctcatcgccgagaagaactgctccccgctcatgctccgcctcgcgtggcactccgctgggaccttcgacgtgtcgtccaagacaggcggcccgttcgggacgatgaagaagccggcggagcaggcgcacgccgccaacgcgggcctggacatcgccgtgcggatgctcgagcccatcaaggaggagatccccaccatctcctacgctgatctctaccagct

SEQ ID NO: 436356 - DNA, 770 bp, Triticum aestivum
ttttcctcccctgcctgccaacccccaatctcccgtcgcagccctcgaatctccccccgagcatcgaccatgtcggcctactgcggcaagtacaaggatgagctcatcaagaacgctgcctacattggcacccctggcaagggtatccttgctgctgatgagtccaccggcaccatcggcaagcgcttcgccagcatcaatgttgagaacgttgaggacaaccgtcgtgccctccgtgagctcctcttctgcacccctggtgccctccagtacctcagcggtgtgatcctgtttgaggagaccctgtaccagagcaccaagggtggcaagcccttcgtcgacatcctcaaggcgggcaatgtcctccccggcatcaaggtggacaagggcaccatcgagcttgctggaaccaacggtgagaccaccacccagggctttgatgaccttggcaagcgctgcgccaagtactatgaggctggtgcccgcttcgccaagtggcgtgcagtcctcaagatcggcgccaccgagccatcgcagctctccatcgaccagaacgctcagggtctggctcgctatgccatcatctgcctggagaatggtctggtgcccattgtggagcctgagatccttgttgatggacctcatgacattgaccgctgtgcttacgtcaccgagatcgtccttgctgcctgctataaggccctcaacgaccagcatgtcctcctcgagggcactctcctgaagcccaacatggtcacccctggttctga

SEQ ID NO: 436357 - DNA, 650 bp, Triticum aestivum
gggtaacacacagcagaccggcgtgaaggaggaggatcatggtggcagtggcaaccagctctccgttttccttgatcatgtcctggccggcgttgctgaaaaccctctcgccggagggcatgactttgaggcaacctccatgttgaaaaatcgcaggataaacaatactgatgcatacggaggaggcatcagcagcaggagcaggacagatgatagtcttcgtccatcacggcgggggcggcggccggtgccggagggcttgcagttcgtgctcaacactttaccggttgacccaagctgcattggggatggtgatggcttcactgctcatgtgaaggagatggcaggtgatacaaacaaccgagatccaaagcaataccgaataagaatgagagggattgatgcaccggagctgaacatggaatatgggaagaagtcaaagaaagggttggtgaagcttattggagagaaatgcgttgagattcatgtgtatgggatggaccactttgatcgatatattggcgacatctactgtgacggcgtctttatccaagaacaaatgctgaaaaggggcttggcctggcacttcaaaaaatatgacaaacgtcctgaattcgcacaatgggagagagaagcaaaaatggcacgtg

SEQ ID NO: 436358 - DNA, 423 bp, Triticum aestivum
tcgtccacgcgtccggcggaggactgccgccgcgcctgagataggatggcgatggccatggaagtgctcgctcgacttgcctgtgtcttctccgccaccattcttttgcagagcctggcatggccctgcagcaatggagagagaggcttctcctacccccagtctccaaaggccccctccattgtcagcgagaggtacaggactgcctaccacttccagcctcccaggaactggatgaacgatccatgtggaccaatgtactacaatggcgtctaccatgaattctaccagtataaccccgatggcgcctttgaccccaatgactcccttatgaacatggtttggggccattcggtttcaacagacctcatcaactggatcggtcttgaaccggcaatcaaaccagatatcccaagtgacata

SEQ ID NO: 436359 - DNA, 435 bp, Triticum aestivum
tttggccttcttcctctcgaaagctcttctgggttccagctcccttgagagtctccctcggtggaccgggctgatctgatgcccttctcggcggcgatgccggccggaagaggctaaggagaggcgccggatataggtctgtacatagtagttccaataaaagtagtttagtgatgtgtttcaggagtagtagtgcctccgtggcgactggcgtgatgtcgtcaggaagcgtgccgccggcgtcttcgagcaacgctcggtggcttcaggttgctgccctgctgtttctgctgttctggggagagctagcacatggcggtggcagagctgacgcttccccaaataagctcggtgagttccctgacccggcggaggaccctctcgtcgttcttgtctctggcggccaccacggtggtggaagcagggagaaggcga

SEQ ID NO: 436360 - DNA, 609 bp, Triticum aestivum
cctgcctctagccatgggccaacagacctcagatctcgctctcgcctccttgcgcagcccccgccgagagcagcacgaaaatggcggcgagcaacctcgagggtgtgctcctggggatgggcaaccccctgctcgacatctacgccggcgtcgacgaggccttcctcgctaagtatgatgtcaagccgaacaatgccattctcgccgaggacaagcacttgcccatgtacgatgagttgtccagcaaggaaaatgttgaatacattgctggaggagccacgcagaactctatcagggttgcccaatggatgcttcaaactcctggtgcaacaagttacatgggttgcattggaaaggacaagtatggtgaggagatgaagagcgccgctaaagctgcaggagttactgctcattactatgaggatgaggctgctcctacaggcacatgtgctgtatgtgttgttggtggcgaaaggtcattgattgcaaacttatctgctgcgaactgctacaaatctgagcatctaaagaagccagagaactgggcactagttgagaaagcaagatacatctacattgctggctttttccttacggtgtcccctgaat

SEQ ID NO: 436361 - DNA, 415 bp, Triticum aestivum
ttctcgttcttctaagttctcagaggaatcaacccctaccctttcaaggatcgagcacgtataaactacgagcaagcatctctaaaatttgttgtctcgccgccatgatttcgaggtctcccagcctcttccagatcggcgacggtgaggcccaggatcaggatcaggcggggacgccaacaatggcgaccgccggcgagctcgtcgggctccggctgatcatacagccctcgccggggcgacaacaacggccggcgctggccgtcctcaggaggtcgtcggtgaggtccccggctgccgacctccaggagaacagcggctgccggccgttcgtgggcctcgagttcttgaagtgctgcctctgctgctgcaagaagatcgacggcgacatggacgtcttcgtgtacaagggaga

SEQ ID NO: 436362 - DNA, 356 bp, Triticum aestivum
ccctcgctgccgctcttaaaccccagcccccactccccattccccattcccccctcccccgccgtctcgtcccagctcgccctccagaggttttagtcttcctccatggcggccctcatcaagctcggaagccttcttaggcagagtgctttggcgagcagtgcctcgaccggctcggctcctgccctgttcaacgctgcccgcttcatgtgcgccggccagcccgctggtggcaataagcttttcgtcggcggtctggcctgggctactgacgatcattcgctgaaggaggcgttccaaagctctggagaggtcgctgaggcacgtgtcatcactgatcgagagactggaaggtc

SEQ ID NO: 436363 - DNA, 434 bp, Triticum aestivum
aggatcctatttctgcttcattgctgattgttaagggtggctttacaaccctagacatattggctgttgagtggctccaatccgggctaatacatttcggcacaactgtttcatactatggttttgtgagtgatgtcctggaactttccgagaaataccagaagagatttggccctcttcgatattttgtggctggagtactcaaatttttgtgtctaccaagttacttctatgagttagaatatcttcctttgtccaaggacatgtccgggcatggaaaaggtacaggacaagacaaagttgaattgtctgatgtctatacagatgtaatgcgcagtcgatcaaaaagagaaggatttccacgagctgtcagcttttcaagtattgactctatcatgactccaagtaggatgtctctaggggactttgacaca

SEQ ID NO: 436364 - DNA, 493 bp, Triticum aestivum
ttattccgagaaccccccgctccaaagccctggccctagccatctcctctccccccagccctcgtcgagcgcgcgttttccaggagcttcaggtgccggcggcgccatggcttcggagaccgagaccttcgccttccaggccgagatcaaccagctgctctcgctcatcatcaacaccttctactccaacaaggagatcttcctccgcgagctcatctccaacgcctccgatgccttggacaagatcaggttcgagagcctcacggacaagagcaagctcgatgcgcagcccgagctcttcatccacatcatccccgacaaggccaccagcacgctcacgctcgtcgacagcggcattggcatgaccaagtcggacctcgtcaacaacctcgggaccatcgccaggtcggggaccaaggagttcatggaggcactcgctgcaggcgctgacgtgtccatgatgggcggtttcggtgcttgggttctactccgc

SEQ ID NO: 436365 - DNA, 455 bp, Triticum aestivum
tctttgcagtgctggtgttgaggagtcgggggagatatcttcagaaaaagttaccagcagatccaagactcaggaagacttaatcaagtcaatttataatttctcagtagtgcttctatctacttgcgatggcggttatgagttggaggaatctgaacatgcacttgttcaatctacaatacacaatctcagttctttgagttccaagataagcaaggctgcattaaaaaatgatgatgtaaatggaaactgctgccaaacaaaatcagatacaaggtgccatggaaagaatcatcagcctcagaagtttgatggacttgactgggagaacattggtgcagattttaaaacatttattttggaggatcttactaaacttccagaagagaatgtcattggtgatactaaagatgcacaaatgctgatatataagaatctatggattgaagctgaag

SEQ ID NO: 436366 - DNA, 664 bp, Triticum aestivum
tgtttcttgccgagaagcactaccatgatctcaaggagaggcctttcttcaatggactgtgcgacttcctcagctccggtcccgtgcttgccatggtatgggaaggagagggcgctatcaagcccgggaggaagctgatcggtgccactgacccatcaaaatctgagccaggaaccatcatgggtgaccttgctgttgtcgctggaaggaacatcatccacggcagcgatggcccggagacagccaaggacgagatcgcgctctggtctccagcccagggagctggtctcttacaccagcaacgaggagaagtggatctacggtgtgaactaaccgccgcatcgtcttcagaagagccaaagaagctccagtccctttccgtaatcgcctctagaccatggcagagtgcaataacaccgcgacccgggcgacctttcagccggtgtcgcccttgcccttgtctcatcctgatgcaataaggcccgaagaaatttgaagagtttgtttgtacctttgaatattatagagcgtgcaccgagcaatcgtgatgttcgaatcaaaccgtcgccttcaggcgcttgattttgatggatgctgtttgttttcatgtgttgcccaaattcaggcctacattctctgcacttttcactgtcactgtagctga

SEQ ID NO: 436367 - DNA, 644 bp, Triticum aestivum
tacacttttctccccggcgccacgtggaccgtgcccgcacggacaggacgccttccacgtacgcgcacggggcttccttccgtgccgcacccgcacataaaacaaaccagaaacaaataagaaaagggtaaagcgggtcggaaggggagaaaagtaagcgccgcgcaccgcaatcggaacggaaatcccccgaatccgtcgccggaatccatccatcgagcgatccatccggccggacggcgaggcgggagcaggaggggagcggcggagatggtgagcgccttcttcctcttctgcgggtgcgtggagcaggccaacgtggcggtggtcgagaagtggggccgcttcctccgcctcgccgagccgggcctccacttcttcaaccccttcgccggcgagctcgtcgccgggaccctctccacccgcgtccagtcgctcgacgtcaaggtcgagaccaagaccaaggataatgtgtttgttcagctgatctgtacaattcaataccgggttgttaaggagaatgcagacgatgcattctacgagttgcagaatccccaacagcaaattcagtcctacgtctttgatgtggttcgagccatagttccaagaatggagctggacagtctctttgagcaaaagaatga

SEQ ID NO: 436368 - DNA, 605 bp, Triticum aestivum
ccggaaatcgccggtcgacaccttcccaggacaatccatcgactttttcggtgctctgcgtgctcgggtgtacgacgacgaggtgcgcaagtgggtgacctctaccggtatcgagaacattggcaagaagctggtgaactcgcgggacggaccagtgacctttgagcagccaaagatgacagtggagaagctgctagagtacgggcacatgctcgtccaggagcaggacaatgtcaagcgtgtgcagcttgctgacacctacatgagccaggcagctctgggtgatgctaaccaggatgcgatgaagactggttccttctacggttagaacattctccatacacacccaccatctcttgctgcataggaggaggtaaaggggcacagcaaggtactttgcctgtaccggcaggatgcaccgaccagactgccaagaacttcgacccaacggcgaggagtgacgacggcagctgcctttacaccttttaagcatgccaatttaatatctgatgttttatcctttgtacctaagtaccgcatcgcatccaagcgattgctgggcatgttttgttaatatataaagatattgagtatacctatttggt

SEQ ID NO: 436369 - DNA, 332 bp, Triticum aestivum
tctttatggcgctcagcaacgacttcgtgacgagggcggttttcggcggcaggttcgagcagcaggactagtacctcggtgagttgcacaaggcgtttgagctgctgggtgccttctgcctcgtcgacctctttccgtcgtccaggttggtcaggtggctgaccaacgacgagcgccgcatgaaaagaagctacggccgcacccagcgcatcatcgccaaggccatcgagggtcgcaaggccaccagagctgccggcgtcggcgcttccggcgcctacgacgaggacctcctagacgtgctgctcaggctgcagctggaggactcgttagag

SEQ ID NO: 436370 - DNA, 427 bp, Triticum aestivum
tttttagcgaaggttgccgtcgcgccacacaggggagttcttaccgctgagacgagcgctcctggactcgttcaaccgtcctgtgctagcaggctacgggtcctctccaccagcatccatgctggacatcaagtacttactggtatagtagcaacataattggtgtgggatatggcaatacgctttgcgcgattgatatgatggtatgataagacttgttggatcgagattcctggaatggataaaccagagaaagttgtgtggctaccgtagtattggcactggggcacgcgtagtcatttcgggtgtatttagttgggcactgctaggcgccggccgttcggcccgagccttgcgccggtcgcctcctagctgtaccatgcacccagccgtaagtagtaaccgttgtatgtgtctttcatctcgc

SEQ ID NO: 436371 - DNA, 468 bp, Triticum aestivum
  unsure (1)..(468): unsure at all n locations
ttaagatgtctgacgctggttagagattaatcatgtgttccgtaagtgttagtttgtagtttctactactattttctcgcggttgatgagagagactcggaagtgaatttgtataccggaagatttttgtcagccgtgcaactcgttgcgcctcttgatagaaaaagtagaaattttgtcaaagtcattcttatatgcttagcagcagagatgatgtacgataccattaaaaacccttctgaatgtttgttgatgctgtgtnnnnnnnnnnnnnnnnnnnnnnnnnnnnnnnnnnnnnnnnnnnnnnnnnnnnnnnnnnnnnnnnnnnnnnnnnnnnnnnnnnnnnnnnnnnnnnnnnnnnnnnnnnnnnnnnnnnnnnnnnnnnnnnnnnnnnnnnnnnnnnnnnnnnnnnnnnnnnnnnnnnnnnnnnnnnnnnnnnnnnnnnnnnnnnnnnnnnnnnnnnnnnnn

SEQ ID NO: 436372 - DNA, 484 bp, Triticum aestivum
ttcttcctccttctcctcgggtttgcacagtcgtccaccatgccgaagcagatccacgagatcaaggacttcctgctgacggcgcgccggaaggacgcgcggtcggtgcggatcaagaggaccaaggacgccgtcaagttcaaggtgcgctgctccaggtacctctacacgctctgcgtcttcgacgccgacaaggccaacaagctcaagcagtccctcccaccaggtttgagcgtccaggaggtttaagcatcaagccagacaatgccttttctagtagcgggaatgttctatccatcttgctttagtaactgttagcaggctctccttgtttacccccattaagagagttttgatgtcccaagactggaatgtaatgttgggagctatgtggttgaacctgtgaggatttttgtgttattttcacttttgctggagaggagatcaattatcttatcctaaattggtttagtatctcactatt

SEQ ID NO: 436373 - DNA, 437 bp, Triticum aestivum
ttcttggaaaggccgggagttctcactcgattgcatttgtgagcaaggctgccaaagaagctggtgttgcatcagagtacaaactagcaaagagggtggaagctgttgttggcgtccgccatttatcgaagctggacatgaagctcaacgacgcgcttccgaaaatcaaggtcgaccccgagacctacacggttactgctgatggagaggtcctgacttgccagccagcagccacggtgccattatctcggaactactttcttttctaggccacccattgcttgagaaattcttggaaggtcaataattcactcaactagcttcgacggtaacttcaagttgcgcatgggagatgtgctgctggctcaaaataaacaattatacatttacatgaaaaaaaatcacacgtatacatattgcaatacttcagtttcttg

SEQ ID NO: 436374 - DNA, 118 bp, Triticum aestivum
ttttctgtctctctctcaaatttctgtaaccttggggggtgttttgatcagaattgcgttttgttcagggttgtgtaatattcagacttgactagttctaatcacttgttattcgttc

SEQ ID NO: 436375 - DNA, 491 bp, Triticum aestivum
ttatctcgtccgcccacgcgtccgagaaaataaaagcaaactggagagaccatctgttcctctccctaccaaccatcttccttagcgacgaggccacccagagctccacaggaaagaagcgcgaccggagaaagaaggagagcaagatgtcgtcggtgttcagcggcgatgagacggcgcccttcttcggcttcctcggcgccgccgccgccctcgtcttctcatgcatgggggcggcctacgggacggccaagagcggcgtcggggtggcgtccatgggagtcatgcggccggagctcgtcatgaagtccatcgtgcccgtcgtcatggcgggagtgctcggaatctacggcctcatcatcgccgtcatcatcagcaccgggatcaaccccaaggccaagccctacttcctcttcgacggctacgctcacctctcctccgggctcgcctgtggcctcgcggggctcgccgccggcatggccattggcatt

SEQ ID NO: 436376 - DNA, 354 bp, Triticum aestivum
tcctcccgtcccccccccgtccgccgtgatcgagcacacagctccaattccccaagtttaaccccatggccggctaccccccaccccccggctccggctacccctacggcgccgctggcggctacggagccccaccgccctccggccagaagccccccaaagaaggcaagacctcttcctcctccggccccgacccctaccacggtgctccgcccccgcagcagccttacggcggaggcggcggcggctacggagccccaccgtcctacggccagaagcctcccaaggaaggcaagacctcctactcctccggctccgacccctaccacggcgctccgcccccgcagcagcctt

SEQ ID NO: 436377 - DNA, 472 bp, Triticum aestivum
tgggtaggagccacccccctccccattcctacccacccagcatctcggcagtaactctcctccctcccacgcggcgcgcccgctcgccgcgcgcgcgaatctcggtcgcaactggtgtactgttgaaggaaggaaaaatcatcctatttgtcatggcgggaactgactcctcggcgtcatcgagacaaagcagtttcaactcattagcaaaggacctagaacttcctttggagcaagggtgcctcaccatcgttgtacttggggcttctggagatcttgccaagaagaaaacgttcccggcactctaccacctttttgagcaggggttcttacaatctggtgaagtgcatatagtggggtatgcgagaacaaatctttctgatgatgggttgagagggcgcatccgtgcataccttaaaggagcctcagaggaacatgtttcagaattcttgcaattgataaaatatgtcag

SEQ ID NO: 436378 - DNA, 214 bp, Triticum aestivum
tctatccaggcaaaggcaagtgcaagtcctcccaaatccacgcatccctcgcccgcgtctcctcccgttgccgcagcagcaagagaatgggcagcgtcgacgcctccgagacgacggtcaccgggtgggccgccagggacgccaccggccacctctccccctacagatacaccctcaggaaaacaggacctgaagacgtggtgttgaaggttaa

SEQ ID NO: 436379 - DNA, 400 bp, Triticum aestivum
gggccgacgggtgtacccgatggaggcctatcaggaggcaaaagtatacttgttcaacaatgccaccggtgccagcgtcacggcggaaaggatcgtcgtgcacgagatggactcggcacacaaccagctctccaatatggacgatcactcgtatgttcaatgaagctcttgcatctcatcagtaataagctacattggatcaaagacgcgcaccaaggaaggccaaggcatatgtaaacgattccgcacagcctcgcttgcagaattgaaacatctatccttgggtcatgttctgcattgatgtcactatgaactatattactttgttgggcgtggaatcgatatagtttgggtgggtggaattttgtttgtttacatagtgaaccgatgcggtttctgt

SEQ ID NO: 436380 - DNA, 633 bp, Triticum aestivum
ttttcggaccgtggtaacttacagtctctacaagctctaagagaggaaggatagcataggcctcaagctccagcgatgcatgtaccaccgactctactgggctatgtagatggtccacatcatgggcatgaagctggccaaccgtgggggggaatgcccccagagttggcagggatgtggattggaatcattgttctcctggtcatcaactccaccatcttcttcattggacgcgtcggcgccggcaacgccgctgctgcgctcatggccaaccttgcgcccaagacaaaggtgcttagggatggtcgatggggcgagcaggaggcatcaatcttggttcctggtgacattgtcagcatcaagctcggtgacatcgtccctgctgatgctcgtctcctcgagggtgatcctttgaagattgatcagtctggacttacaggagagtctctcccggtgaccaagaaccctggggatgaggtcttttctggatcaacgtgcaagcagggtgagattgaggctgtggtcattgccactggagtacacactttctttggcaaggctgctcatctcgttgacagcaccaaccaagtcgggcactttcagcaggtcctcactgcaatcggaaacttctgc

SEQ ID NO: 436381 - DNA, 469 bp, Triticum aestivum
ttgataaacgccggctctcccccgctccgcctccctgcctcattctcccccgctccgcgccctccgccgccagatcccttcgagccccccgcgcccccgcgtcgaagatgagggagtgcatctcgatccacatcgggcaggccggcttccaggtcggcatcgcgtgctgggaactttactgcctcgagcacggcatccagcctgacggccagacgaacggcgacaagaccatcggaggtggtgatgacgccttcaacaccttcttcagcgagaccggagccggcaagtacgtgccccgcgcggtcttcgtcgacctcgagcccaccgtgatcgacgaggtccgcaccagcgcctaccgccagctcttccaccccgagcagctcatcagcggcaaggaggacgccgccaacaacttcgcccgtggtcactacacaattggcaaggagattgtggatctctgcctcgaccg

SEQ ID NO: 436382 - DNA, 570 bp, Triticum aestivum
ttgctcacgcgtccgcccacgcgtccgggtaagggagcctgctatggcgtctgctgaaacaggtggcgacaagtaccggtcgttcatggacggtgagggcgagaagaacaccgtgtggaggcatggagtccctcccaacttcgacgtggtgaacaagctcttcgaggaagagaggactaaggaatgggcggaggggagtgtggaagagaaggtgcagcggttgctcaagacatgggagatggagatgttccacacggtgcggcccgaggaccagaagagcgtgcactcccagggattcaccagcagcaccaacgggatgaagcctctgacccgaaaggagtggaccgccatcggcggctacaacgcgttcctggcaaccaagctgccgctggagcaccgcatctacgacccggacacggagacgttcgactccggcatggagacgttcctcacggcattcccccggggcttcgccatcgaggtgctcgacgtgtactgcagcggcccgcctagggtggccttcaagttccggcactgggggtacatggaggggccgttcaagggccaccc

SEQ ID NO: 436383 - DNA, 457 bp, Triticum aestivum
gctatgaaactgacctactgcatcgcggtgtccgggttcgtgtgcgcgctcttcgcgttcgggatcccgtacctgtcggccctgtggatctggctgggcttctccaccatcttcagcctcacctacatctttgcagcctgcgtgctgtcgctcaaggacggcttccgctcgccgcctcgggactacagcatccaaggagacccgtccagcagggtgttcaccaccatcggcgcggcggcgagcctggtgttcgcctacaacaccggcatgctgccggagatccaggccaccgtccaggcgcccgtggtgaagaacatggagaaggcgctgtggttccagttcaccgccggctccctgcccctttacgccatcatagtcatcggctactgggcctacggcaaccagaccaccacctacctgcttcacaacgtcactgggcccctgtggatcaaggcag

SEQ ID NO: 436384 - DNA, 416 bp, Triticum aestivum
  unsure (1)..(416): unsure at all n locations
ttggacgcgtgggcggacgcgtgggcggacgcgtgggcgatggcgtccatccgcctccttccgctcgctctgctgctcctcctgctcgctgcggcgcacgccgggaccccacggcaggagcccgccatccggctgccgtcgcagcgcgcggcggccgggcaggaggacgatgactccgtcgggaccaagtgggccgtcctcgtcgccggctccaagggctaccagaactaccgccaccaggcagatatctgccacgcctaccagatcttgaagaaggggtggtctcaaggatgagaacatcattgtcttcatgtatgacgacattgcgcataacccggagaacccgaggccgggcgtcatcatcaaccacccccaggggggnagatgtctatgctggggtccctaaggactacact

SEQ ID NO: 436385 - DNA, 369 bp, Triticum aestivum
tcggttagcaccatcaatggcgatggcggccatgggggccttccccctccttcccctcgcgctcctgctcgccgtggcgcacgcgcggctgcagcccaccatccggctgccgtcggacgacggctccgtcgggaccaggtgggccgtcctcgtcgccggctccagcggctactacaactaccgccaccaggcggatatttgccacgcctaccagatattgaagaagggtggtctcaaggatgagaacatcatcgtcttcatgtacgatgacattgcgcacaacctggagaacccgaggccgggcgtcatcatcaaccacccccagggtggagatgtctatgctggggtccctaaggactacactgggaa

SEQ ID NO: 436386 - DNA, 495 bp, Triticum aestivum
tgtcccctgcacctccacctcccacctcttctcccgcagcctcgccgccgccaggacgctctccgccgccgccggtcactcctgctcgtccacctcctcctcctccgtcaagatggcgcgctcggcgctggacgaggtgaccgacaccggcgccttcgaccggacgccgtccaccttccggagcttcgtgtccagggacgcctccgcccgcttccccgcggtggcgggcaggtaccacctctacgtctcctacgcctgcccctgggcgtcccgctgcctcgcctacctcaagctcaagggcctcgaccacgccatcagcttctcgtcggtgaagcccatcttcgagcggaccagggagtccgacgaccacctggggggggtgttcccggccaccgccgacgaggtgcccggcgccagccccgaccccttcaacggcgccaagagcgtcagggatctgtacgagatggcgagcaccaactacaccggcaaaccgac

SEQ ID NO: 436387 - DNA, 497 bp, Triticum aestivum
tctgtgtgacgtcacaccgctctcgcaggggggggagattgccggaggtgtcatgtccgtgcttatcccaaggaacacgacaatccccaccaagaaggagcaggtcttctccacctactctgacaaccagcccggcgtgctcatccaggtgtatgagggcgagagggcgaggaccaaggacaacaacctgctcggcaagttcgagctctccgggatcccaccggcgcccaggggtgtcccccagatcaccgtgtgctttgacattgatgccaacggtatcctgaatgtctcggcggaggacaagaccaccggacagaagaacaagatcacaattaccaacgacaaggggcggctgagcaaggaggacatcgagaagatggtgcaggaggccgagaagtacaaggctgaggacgaggagcacaagaagaaggtggactccaagaacgccctggagaactacgcttacaacatgcgtaacaccatcaaggatgacaaga

SEQ ID NO: 436388 - DNA, 502 bp, Triticum aestivum
ttgttacgcgtccgctccaccctctccagcgcatcgcctacctcaacatgtcgacctacccgatcgtcacggtgttcatcctggcctacaacctcttccccgtcctctggctcttctcagagcagttctacatccagaggccgttcggcacgtacatcatgtacctcgtcgccgtcatatccatcattcacgtgatcggcatgttcgaggtgaaatgggcggggatcacgctgctcgactggtgccgcaacgagcagttctacatgatcggggccacgggcgtgtacccgacggcggtgctttacatggcgctcaagctcgtcaccgggaaggggatatacttcaggctcacgtccaagcagacggacgcctgctccaatgacaagttcgccgacctgtacaccgtgcggtgggtgccgctgctgctcccgaccatcgtggtgctcgtcgtgaacgtcgcggccgtcggggcagcgataggcaaggcggcggcatgggggtt

SEQ ID NO: 436389 - DNA, 537 bp, Triticum aestivum
cgatcccccctccctcacaagttctgctatcctggatccatccagaaaagcaggttggtccgcagcctggtcggtaaggcgctccgtccctgcccggagttgatgcgcgccgccgtccgaatctctgcgcgaggcaggccggtcaaccgatccatccggccatggcgtgcaggggcttcttcgagtgcgtcctcaagctgctcaacctcgtcctcatggctgtcgggctggccatggcgggctacggcgcctacctgctcgtgctctggctccagctgctgcctccgtcgccgccggcgccgcctccaagcggcgacctagtgcaccttggccggccgatgcttcttcttattgacgtgtctatctcagatgggacctcggagaagctcatcagcgcatggtttatttttgcatttataggtgtcggtgttatacttttcattacctccatcttcggttgtgctggagcgtcagctaggagtggatgctgcttatccacttattcattcctcatcattttgttcatactagtagagc

SEQ ID NO: 436390 - DNA, 445 bp, Triticum aestivum
tcgatcatcgcgtccgaatcactcgagcaaaatgaatcccatagccaaatgttacctgatgttcttcctccttttggcagttctcttgcccgaggcgcgcgcgaattcgtgccaccccggcgacctccgtgcgctgctggactttgccgggagcctcaatggtcgggatgtcctcctccgtgccacgtggtccggcgccgcatgctgcagctgggaaggcgtgggttgtgacgccgccaacggccgtgtcacggcactacgcctccccgggcgaggccttgagggggccatcccaggaacctcacttgcaggccttgcgcagctcgaggaactcgacctcggctccaacaactttcacaacatctcaggggtgctcaccgtgttgcatgggtgccagaacctcgccacgttgattctcacaagaattttgatggtgaagagctac

SEQ ID NO: 436391 - DNA, 386 bp, Triticum aestivum
ttccacgcgtccgcggacgcgtgggctagccagcatttgggggggcacatgctacatacatatccccttgctgggctagctaaaccgatctagaggatgtcgttggtgaggttcttcgacacgctggccctggactcgtggaaccccttcggcagcatcttcggcaccacggcgtccagcggcaccgacgcctggctggccagcgacacgacggcgttcgccgacacctacatcgagagccgggagacggcggaggcctacgtgttcagcgccaggctccccgcgggcgtcaccaaggaggaggtcaaggtggaggtggaggaggagggcaaggtgctggtcatcgccggcgagcggaacctgcggagggaggccaagagcgagac

SEQ ID NO: 436392 - DNA, 642 bp, Triticum aestivum
cgcctgcccgtaccgtacctatgctcgcgggtcgacaggtgttctcgacgatgagattgaaaaggcacatccagatgtcttcaacatgatgcttcagatcttagaagatgggaggctgacagatagcaagggacggacagttgacttcaagaacactctgctgatcatgacatcgaatgtcggaagcagtgtcatcgagaagggaggccggaagattgggtttgaccttgactctgacgagaaagataccagctataacaggatcaagagcttggtgaccgaggagttgaagcagtatttccggccagagttcttgaacagattggatgagatgattgtgttccggcagctgacaaagctggaggtgaaagaaatcgctgatattatgctcaaggaggtgtttgacaggctcaaggcaaaggaaatcgacctccaggtaacagagaagttccgggatagggttgttgatgaaggttacaacccgagctacggtgccaggcctctgcgacgcgccattatgaggcttttggaagacagtctggctgaaaagatgctggctggcgaggtcaaggaaggtgattctgctattgttgatgtggattcggatggtaaggtggtagttctcaacagcgggggtggtat

SEQ ID NO: 436393 - DNA, 458 bp, Triticum aestivum
tggctttggctactgccatagttatgcaggagccatccgctcctcagcagtctgttcaattctctgaacatgttaatatctgttctgatgaggtcaatgacgtgcctcctgaaattgatggaatattgttggacgaactgacaaagtttttggatgattctccgaaccacgacgtagtttttccagagaattctggtctccctccaatgtctgggcttgaggctcaagcttttgagataaatactgctgagctctatgaccaattggcaggacttacccagtcaggagatatgtctgctgtaaatttccctgctagcaatggcgatgttattgaaaacaatttgcagcaaacaaactctggacttgctatggatgatgattatatagggctggatgatctgcttgctcctggggaaaccttctcctatgatttttctggtgaaacctttttctatgat

SEQ ID NO: 436394 - DNA, 565 bp, Triticum aestivum
tcttgccgactgttccgtttatttaaccgagccgtcccattcttggagagcaagaagcacgccaccacctcgcccaaagaatccccacccccgccgaccccctcccctcccctccccggccgaagacagatccggcgaccgacaagccatggtgtccaacggggagctgtcgcagccgcaggcgggggagtacggcctcgccgtcatgcgccgccggcccaagaccaagatcgtctgcacgctcggcccggcctcccgctccgtcgacatgatcgagaagctgctgcgcgccggcatgtgcgtcgcccgcttcaacttctcccacggctcccacgactaccaccaggagacgctcgacaacctgcacgccgccatggaccgcaccgggatcctctgcgccgtcatgctcgacaccaagggtccagagatccgtactggatttttgaaagatgggaagcctatccagttgaggaagggccaagaaattggtgatctccacagattatagcataaagggggacggccagatgatatcgatgagctataagagctagcagttgatctg

SEQ ID NO: 436395 - DNA, 405 bp, Triticum aestivum
tcgcccacgcgtccgcaccggctcaccaccacacagacaagcaagaatggcgatcgccgtgagcgggcactggacgcggctgcggacgctcggctgcggcgcgtcgggggccgtggtgtcgctggcggccgacgccgcgtcgggggagctgttcgcggtcaagtccgtgcgcgcggcggacgcggcgcagctgagccgggagcaggggatcctctccgcgctctgctcgccgcacgtcgtcggctgcatcggcgcgcggtggcgaccgcgacggctcctaccacctcttcttcgagttcgcccccggcggctcgctcgccgacgaggccgccaggaatgggggccgcttggaggagcgcgccatctgggcgtacgcggcggacgtcctgcgcggcctggcataca

SEQ ID NO: 436396 - DNA, 580 bp, Triticum aestivum
ttccacgcgtccggcgccatcgagccgccctccccgctctccgaggtccgcgccgacccctacccgctccccgccgccttcgagtggttcacctgcgacctcgacgacgacgccctcctcgccgacctctacgccctcctcgcccacaactacgtcgaggacgacgagaacatgttccgcttcaactactccccggccttcctccgctgggcgctccgccccccctccttcttccgcgcctggcacattggcgtccgcgcccgcgtggccaagaagctcgtcgctttcatatccggctgtccccgcgcgcatccgtgcgcgcgacgacgttgtccgcatggccgagatcaacttcctctgcgtccacaagaaggctccgatccaagcgcctcgcgccagtgctcatccgggaggtcacccgtcgcgtccacctggagaacatctggcaggctgcctacactgcgggcgtcgtcctcccgacccccatcaccacctgccgctactggcatcgatccctcaacccaaagaagctcatcgacgttggcttctcccgtcttggtccccgcatgaccatgagccg

SEQ ID NO: 436397 - DNA, 861 bp, Triticum aestivum
aaagaaaaggaaaacccggtgggattccttttaacaaattccccaataacaagcaaaaggccctccgacctttcccaaaaaaccttgggaatccggtggcataaaaggaccaaggaaagcccaaaggcaatgaaacatctaaataaacttttcccgaacaaaatttccatccagcttccacaggacgaagcattacttaccagttggaagcaacaattggatcgtgatgttgaaacccttaaagcaaaatctaacatcggtagcattcgtacgtttttgaatcgcagtgcgatcgaatgcagtgaccttgaagaattattcattaaagatcagtcactgactaatgaaaatgtggacaagattgtcgggtacgctgtcagttatcatcttaagcacaataaagtcgaaacctccaaggacggtgaacttattatcacgagcggaagccttaagcatggcctcgacatgctacagagcatccatagtgataacaagagctcaaaaaaatcgctaaaggatgttgccacagagaacgagtttgagaaaaggcttctggcagatgttataccaccgaatgatattggagtcacctttgatgatattggtgcgttggagaatgtaaaggaaacattgaaggagttggtgatgctcccactgcaaaggccggaattgttctgcaaagggcagttaacgaagccttgcaagggaatattgctcttcggcccccctggcactgggaaaactatgcttgctaaagcagtagcaactgaagcaggcgccaacttcatcaatatatcaatgtcaagcattacatcgaagtggtttggcgaaggggagaaatatgtgaatgctgttttttca

SEQ ID NO: 436398 - DNA, 492 bp, Triticum aestivum
ggggccacgggtactaaaggatgtagagaaatcattcactggaatcacagaatcattttcatctttaaggaacaaacttgaattgcttccacctggtgttctgattataggatcccacacccagatggacagccgtaaagagaaggcacatcctggtggatttctttttacgaagctcgctagtagcagccagacgctcttcgaccttttcccagacagctttggtagtcggttgcatgaaaggaacaaagaaagcccgaaggcaatgaaacatctaaataaacttttcccgaacaaaatttccatccagcttccacaggacgaagcattacttaccagttggaagcaacaattggatcgtgatgttgaaacccttaaagcaaaatctaacatcggtagcattcgtacgtttttgaatcgcagtgcgatcgaatgcagtgaccttgaagaattattcataaagatcagtcactgactaatgaaaatgtggac

SEQ ID NO: 436399 - DNA, 472 bp, Triticum aestivum
ggtgctctacctcaaggacgaccagatggaataccttgtggagcgccgcatcaaggatctagttaagaagcactctgagtttatcagctaccccatctccctgtggaccgagaagaccactgctaaggcaatttctgacgatgaagacaatgaggagaagaaggatactgaggagggcaaggttgaggatgttgatgaggagaaggaagagaaggaaaagaagaaaaagaagatcaaggaagtctctcatgagtggaacttggtcaacaagcagaagcctatctggatgaggaagccagaggagatcaacatggaagagtacgctgcttgctacaagagcttgaccaatgactgggaggagcatttggctgtcaagcacttctatgttgagggtcagcttgagttcaaggctgctctgtatgtgcctaagagggccccattcgacctatgagacaacaagaagaaggccaac

SEQ ID NO: 436400 - DNA, 581 bp, Triticum aestivum
tttggttcatgtccgacgtgcaggtcgccgaggccagggccttctacggcttccagatcgccatcgagaacatccactccgagatgtactccctgctcatcgagacctacatccgcgacgacgtcgagaaggaccgcctcttccgcgccatcgacaccatacccgccgtgcgccgcaaggccgactgggccctgcgctggatcgacggtggggagcgcttcgccgagcgcatcgtcgccttcgcctgcgtggagggcatcttcttctcgggctccttctgcgccatcttctggctcaagaagcgcgggctcatgccgggcctcaccttctccaacgagctcatctcccgcgacgagggcctgcactgcgacttcgcctgcctcctctacgacatcctgcgcggcaagctggacgagtcgcgcgtcttcgagatcgtctccgaagccgtggacatcgatagggagttcgtctgcgacgcgctgccctgcgcgctcgtcagcatgaacggctacctcatgagccagtacatcaagttcgtggccgaacgcctgctcatggcgctaggctgcaataagctgtac

SEQ ID NO: 436401 - DNA, 366 bp, Triticum aestivum
tccacgcgtccgcccacgcgtccggcttgttattgaccgtgccatctctactgcgagtgtgatcgagctagtgatcaaacgcgagaagatggcgttgcactggagcggcggcctcgcggtcgccgtcgcggcggcgctggccgtgtccgcgctcttcccggcgggcgctgcgggtcacccgccgctcccaggcccgttggtcccgcagttctacgagcacacgtgcccgcagatgcaggcgttggtgggcgccatcgtggccaaggagcacgccagggacccccgcatggcggcgtccctgctccggctgcacttccacgactgcttcgtgcagggctgcgacgcgtcggtgctgctcgacgccga

SEQ ID NO: 436402 - DNA, 476 bp, Triticum aestivum
tttttctccacgcgtccgcccacgcgtccggactcgcagcagcagcagccggcggagatcgtatcatggcgatggagggctacgaccgcgagttctggcagttcggcgaccagctgcggctccagacggccagcttctccggcctctccctcggcgactccatctggtcccccgccgacgccgccccccgcgcccgcaacgccgacctcttctccccctccccggcgcccgacaacaacaacgccgccaagatgaacggcaacggcctcaacgggcccggcctcatcgggtccggcaagctcgccttcggcgccaccaccaccagcaaggccgaccgctacaacaacgtcagcctccccgccgccgccgacgccaacgccaagccctacggcaacgccaacggcctatacggtgccaagcccaacaacgccaccaacaacggctttatggctcaacaagatggctgccggcggcgg

SEQ ID NO: 436403 - DNA, 313 bp, Triticum aestivum
tctttcacgcgtccgcgcagacgcagctcgaccgaccacaactgtgcgcagcagcggcggccggcggagaccgtatcgtaccatggcgatggagggctacgaccgcgagttctggcagttcggcgaccagctccgcctccagacggccaccttctccggcctctccctcggcgactccatctggtcccccgccgacgccgtcccccgcgcccgcaacgccgaccccggcctcttctccccctcccaggcggtccacaacaacgccggaaccggattcgccgtcgccaagatgaacggcagcctcaacgggccc

SEQ ID NO: 436404 - DNA, 545 bp, Triticum aestivum
cgtgactcaggagaagccccggcagccgccgctcgagatgcagactcagccgaaaacaagctcttcttatggttccttcatgatgagggatgctccccctgcctgagctgccagcattcatccagcggcggccggcaagagggtgcgggatgcctcagtgcagtcacaggccgcacccaggcccggcttccactgcggattgcgagccagatcaacggctgaagggcttccagcccatatcccttactattcagtagagagtaacaagttgcaccggccaggctggtgtatgttgcggttgctagcacgcctgaccccttggaggggaaaggacaagaaatcagagtaaagtagcaagctgcagcgatgtgtatatttcactttgtccaccccagtttccctcccagctgggctcaatttaccatgtaatctatatgtagcttgagtgatgaattttcaagtttccatgatacccgtctctagtgggatgttgtttatgtgaattaacctatcaaatatgagcattgtgtatattgtgattcttg

SEQ ID NO: 436405 - DNA, 464 bp, Triticum aestivum
  unsure (1)..(464): unsure at all n locations
ttgtaagtagccacaaaactcatcaccagagcccagagagagacagagtactacactccagcgccggccgttccatttcgctccgccctcccgccttgtcccgttgctgagttcgcgtccgctcgtccgggaggagcagttcgccgccgttgaagcgccctcccccgtcgctcgccgccatgaagaaggttgtgctcaagctggatgtgcacgacgacaggcacaaggccaaggcgctcaaggccgtctccggcctccacggcatcgaccagctgggcgtggacatcaaggaccagaagatgaccatcgtgggcaccgtcgaccccgtagcccgtcgtcgccaagctgcgcaagctcttccccggtgggcagnatcgtcctccgtcggcccggccaaggaggagaagaaggacgacaagaagcccgccggagacaagaaagagggcgacaagaaggagggcggc

SEQ ID NO: 436406 - DNA, 433 bp, Triticum aestivum
tttcgtgatgtctgccctcttcctacgaaataactacatctctgttggtgcatccggagctttatttgggctgcttggatctatgctttctgagctacttatgaactggactatttactccaacaaggttgcagccataataactcttctcttcataatcgcgatcaacgtggcaatcgggatactaccgcatgctgataactttgctcatattggtggattcttgaccgggttccttttggggtttgttctgctggcaaggccgcaattcggttggttggaacgcagcgagctgccccacactaatcagcctcctaagtacaaaccataccaatatgtcctgtgggttgtggcactcgtcttgctgctcgtcgggttcacgctttcgttggtgatgctcttcaagggcaagaacgggaatgacggctgccac

SEQ ID NO: 436407 - DNA, 389 bp, Triticum aestivum
tgcaacccctcctcccccgttctcctcattgtcctcgcgccccgccccgctccgctccgacggccaaccgctccacacaccactagcctgcctgcctgcctgcctgcctgccgccaaggcaagatggtgaagatctgctgccttggggctggctatgtgggtggcccaacaatggcggtcattgccctcaagtgccctgacattcaggtggttgtggtagatatcaccaagtcccggattgatgcctggaacagtgacacactgccaatctatgagcctggccttgatgaagtcgtgaagcagtgccgtggaaagaacctcttcttcagcaatgacattgagaagcatgttagcgaggctgacatcatctttgtgtcggtaaacacccc

SEQ ID NO: 436408 - DNA, 367 bp, Triticum aestivum
ttcgtatccaggcatcgatcagcgcgcgcgcgcgcacagacttcgataatcatcgtcggcttccgagcgagaccggtccaatcttccaagaaaacgccggaggggatgagggaggaggggctgcggatggcggaggacgcgccgggcaccaccggccggccgcggcggctgacgcgcgtccgcacgctcggccggggcgcgtccggcgccgtcgtgtcgctcttcgcggccggcgacggcgacggcgacgagctgctcgcggtcaagtcggccggggccgtcgacgcgcaggcgctgctgcggcgggagggcggcatcctggcctcgctctgctccccgtacgtgctcccctgcctcggctctcggt

SEQ ID NO: 436409 - DNA, 390 bp, Triticum aestivum
atggaaacctagctaagaccgaaaactccaatagcagtccagcagaaaactaaatacatcaccagcatcaatggccaggtcacaggcattggctgcaacattgttgcttgtcctggtggtgtccctcgccgcaatagggagtgttcatggcgtttgcggcatgtcgaatgacgaattcaagctttgtcagcccgcggcggcagtgaataacccaacaggcagtccatctgccgagtgttgtgccgcgctaggaaaggcaaacctatcgtgcatctgccgctacaaaggcatggccggcatatggctgaaaatgtaccatattgacgcacgccgtgccatggcactgccaggcaagtgcggccttaccatgccaagcaactgcccttgatg

SEQ ID NO: 436410 - DNA, 683 bp, Triticum aestivum
ttgtccacgcgtccgcccacgcgtccgcccacgcgtccgcggacgcgtcgctccgtttggagttcgagaggacggcaagtcgaaggcgtcgatttcgagccaaattcacatgtccaaagatttgtggacggttgcaatcagatgagataccaattggtagcaaagatggcagtgcagttactgttgcggcggagaacattgtttttcacgatgcagcagtttctgaaaaagtaacactgggttcatttgctggagactacgaccaagatgatgacaatgcggcagctttaggtgaataccttaagcgaccagtgcgcttggcgagttatgcgtgggctcaaggaggaggttttgcacagagcattaccccttgggcggcatatttttccgacaccttcatccgtaggaagttggagaactacggcaaaattcggtgcaagttacatctgaagttcatggtaaacgcttcacccttccattatggaagtttgcgtgcgtgctatttccctatgggggatgcgcgctcaacattcgtgaattcagcagatttgcttccattctcgcagacaccaggtgtgtatatcgagccgcagaatatgacatctgcggagcttgttttgccttttgtttggcaacacaactggcttgagatcactaagcttagtgattttcagcgtatgggc

SEQ ID NO: 436411 - DNA, 569 bp, Triticum aestivum
cgggtccacggggggacggaaattttttctccccaaccagcaaggaagaggaagaggaagcggatcgagccggcgagagcgagggcgaggacgatggcggcgctccggctagcggggaggaggttttgcgaccgcgcgctcgggagatcagcgggcattcacgagctcaaggctgccaaggaattccccgacattgatcctgagcatctcaaggctgccaggaaattccccaaacttcgtgtcaaggatgccgatgctacggctctgaatgtctccaagattctccggggcagtccagtcgatggtcataaagatgtaacccttcgtgaagaatgtctacggctctgaatgctacggctctgaatgtccacggctctgaatgtcttcatgactctgaggaccttggctgagattcaggaagaagaagaatgaagatggcgctactaggaagcaatatcgtctcttgctctaatatgaactagctttgcagtattgtagtatttgaatctttcctatgttgtcgctctgtgtctcgatcttcaaaactgctggacggatgtgatgttttg

SEQ ID NO: 436412 - DNA, 490 bp, Triticum aestivum
tttctttcagcttgttctctgcatccaccaagaagtcgcctccgttgctttcctccagcagtgcgcgcccctcctctcgagatcttctccgagttcctgagatctggttgtaagcagccaagatggtgaagatctgctgcatcggagctggctacgtcggcggcccaaccatggctgtcattgccatcaagtgcccggcgattgaggtggcggttgtggacatctccaagccccgcattgacgcctggaacagcgacaccctcccgatctacgagcccggcctcgatggtatgttgtacaaggcctgcacggggaagaacctcttcttcagcactgatgttgagaagcatgtcgccgaggccgacatcatcttcgtctccgtgaacacccccaccaagacccgcggtctgggagccggcaaggctgccgacctcacctactgggagagcgccgcccggatgatcgccgacgtgtccaagtccgacaagat

SEQ ID NO: 436413 - DNA, 474 bp, Triticum aestivum
tggcggtttttgccggatggcccgtggtggatcacagtgggctactcaggtccccgaccccggggacaacttctccggcatgccggtcgtcgacctctccagccctggcgcgccgcgggccatcgccgacgcgtgcgagcgcttcggcttcttcaagctcgtcaaccacggggtgcccgcggacacgatggacaggctcgagtcggaggccgtcaggttcttctcgctgccgcaggccgacaaggaccgctccggcccggcctacccgttcggctacggcagcaagcgcatcgggctcaatggcgacatggggtggctcgagtacctgctcctcgccgtcgacgccgcgtcgctctccgccgcctgcgccgtcccgtcctgcgcgctcttccgggcggcgctgaacgagtacatcgcggcggtgccgaaggtggcggtgcggctgatggaggcgatggcggaggggctgggcat

SEQ ID NO: 436414 - DNA, 596 bp, Triticum aestivum
gagctgttccgcatgatggcggaggcggacgcggacggcgacggcttcatcagcctggaggagttcgcggcgctcaacgccacggcggccggcgacgacgaggaggacctgcggctggccttcaaggtggtcgacgcggacggcagcggcgacatctcggccgcggagctggcgagcgtgctccacggcctcggcgagaaggcgacggtgcagcagtgccggcgcatgatcgagggcgtggacaagaacggcgacggcctcatctccttcgacgagttcaaggtcatgatggcctccggcttggccgccaagatggcctgacccgtccatcctcttgttgattcagcgatttcgtccacgcctccctccctccttcctctcgcgtgccgtgcggtgcggtgcggattaagtgcgaattaagtgtacataattcaaggattaaagggcggccattagagtagattatttctttcgtttcttggtggtgcgagtaataactagaaatctctcgcgaataactgtgtcgcgaatatcgatctgagatcaaagagattgacgacgcttgaaggggatataaaaagcagtggttgatggtc

SEQ ID NO: 436415 - DNA, 855 bp, Triticum aestivum
ttgttcatgcgcgacgggatcaagttccccgtcgtcatgcacgcgttcaagcccaaccccaagtgccacgtgcaggagtactggcgcgtcttcgacttcctctcccaccaccccgagagcctccacaccttcttcttcctcttcgtcgacgtcggcatccccaccgactaccgccatatggacggcttcggcgtcaacacctacaccttcgtctcccgcgccggcaaggcccactacgtcaagttccactggcgccccacctgcggcgtcagctgcctcatggacgacgaggccaccctcgtcggcggcaagaaccacagccacgccacccaggacctctacgactccatcgacgccggcaacttccccgagtggaagctcttcgtgcaggtcatcgaccccgacgacgaggaccgcttcgacttcgacccgctcgacgacaccaagacttggcccgaggacctcgtccccctccagcccgtgggacgcctcgtgctcgaccgcaacgtcgacaacttcttcaacgagaacgagcagctggccttcggtccggggctcgtcgtgcccgggatctactactcggacgacaagatgctgcagtgcagggtgttcgcctacgccgacacgcagcgctaccgactggggcccaactacctgatgctccccgtcaacgcgcccaagtgcggcttcaagaacaaccactacgacggcgccatgaacttcatgcaccgtgacgaggaggtggactactacccgtcacgccacgcgccgctccggcacgccgagccggacagcttccccgtgcccacgcgggccgtcgtcggaaaaagggagaagacgaggatcaagaaggag

SEQ ID NO: 436416 - DNA, 684 bp, Triticum aestivum
ttccaccaccaccgaggagtgtttcggaggaggcgggggagcgcgtggtgcgcacacgtatatgtaataattttagtgccgcaagatagggtcttcttctttggttcttgatagagttttctatggaatccggccgcctcattttcggttcggccgcgccgtgccgcgctgccggcggcggaggaggtcagatgatgctctttggcggcagtgggagcttccttggaggctcgccggtggtggccggcgtggaggacgggcggcgtaagaggccgttcttgacaacggtggacgaggagctccagatggacgaggagatgtacgggtactacggcctcgacgagcacgcgcccgagaggaagcgccggctgacggcggagcaggtgcgcgcgctggagcggagcttcgaggaggagaagcggaagctggagccggagcggaagagcgagctggcgcggcggctgggaatcgcgccgcggcaggtggccgtgtggttccagaaccgccgcgcgcgctggaaggcgaagcagctcgagcaggacttcgatgctctcagggccgcccacgacgagctgctcgccggacgcgacgcgctcctcgccgacaaccaccgactacgatcgcaggtgacatcactgaccgagaaactgcaagccaaggagtcgtcggagctagaggagcgaa

SEQ ID NO: 436417 - DNA, 415 bp, Triticum aestivum
tgccgaagcacaccgcgactgcgccactccctgcgttccgagtgacagaggccatggcgctcgccacctcccaccgccacctcgtccgccccgccgccgcggcccctcgcgtgccgctgcgtcccctccgcttcgccgccccccgatctctcccgaggatttgttgccaatctatcaactcagctaacgtgttgggagcttcctcaatgacagctgacgacgcagttccacagccagttgtactgatagaccaagactcagaccgtgatgcaaccattgtgcaactgagttttggagcatcgtttgggggcactacttgatacgatgaaggcactcaaggacctgggccttgatgtgacgaaagggaagtgtggcaactgattcatctgtcacacacacaaagttccacatcatg

SEQ ID NO: 436418 - DNA, 827 bp, Triticum aestivum
tcgagctgctccagcctccagctaccactttcagttttctcgttagttactctaccagcaatagcaacagaggagcaagagctgattggtgtggtcggttagccatggctgtcgtgaattttgtcaagccgcccattgggcagagcccaaagctacaggggcgtactcccaggaggggcagcggcgtggtcaggagctcgctgcagggcgccgtcgtcgggaacaggacggagtggctgaccagctgcgcggtgctctccagcaaggtggccgcgctcgccccccactccaccaacagccacctcgcgctggcggtggcggcttcgaacggcgcggtgctggacttggtccctctggagaccgttgatggcagcgctcgcagcctgccggcgcccctgcggatcgcagacctgtccccggcgcccatgcacggctcggagctgcgcgtggcgtaccagggcgtgcctggggcgtacagcgagaaggcgtccggaaaagcctacccgggctccgacgccatcccgtgcgaccagttcgaggtggcgttccaggccgtggagaactggatcgcggaccgggccgtgctccccgtggagaactcgctcggtggcagcatccaccgcaactacgacctcctgctccggcaccgcctgcatatcgtgggcgaggtgcagctccccgtgcaccactgcctcctggcgctcccgggcgtgcgcaaggaggacatcacccgcgtcatcagccacccacaggcgctggcgcagtgcgagcacacgctcactcgcatggccggcctcaacgctgcccgcgaggccttcgacgacacg

SEQ ID NO: 436419 - DNA, 980 bp, Triticum aestivum
tgtgacagttgattctggaaagcccaaggacgaagcagttgcggacatggacgatgtcgctgcatgctttgagttctatgctggtctggctgaagccttagatggtaaacaacatgcgccaatctctctgcccatggaagaattcaagacctatgttcttaaagaacccatcggggtttttggactcatcactccctggaactatcctctgttgatggctacttggaaggttgcacctgccctggctgctgggtgtacagctgtgttaaaaccatctgagctggcttctctaacttgcttagagctcggcgcaatatgtgaagaggtaggactgccttcaggagttctgaacataattactggtctgggccctgatgctggtgctccaatagcttcacatccccatgtggataagattgcttttacaggaagtaccgcaactggtaagacgataatgaccgctgctgcccaaatggttaagcctgtttcattagagcttggtggcaaaagtcctcttgttatctttgatgatgttgctgacattgacaaagctgttgaatgggccgtgtttggttgttttttcaatagtggtcaagtttgcagtgcaacttctcgtctacttctccatgagaaaattgcagagcgatttttagatagactagttgaatgggcaaagaacataaaaatctcagacccactggaagaaggttgcaggctgggttcagtcatcagtaaagggcagtatgaaaagattaagaagttcatctcgacagcaagaagtgaaggtgctacaattttgcatggtggtgaccgaccaaagcatctcggaaaagggttctttattgaacctacaattataacagacgttagcacatcaatgcaaatttggagagagggaagtctttggaccagtcatctgtgtcaaagtattcaagacagagagtgaagctgtagagcttgcaaatgatacccactatggc

SEQ ID NO: 436420 - DNA, 650 bp, Triticum aestivum
cctcacgcgtcaacacaacaggaatacacaagagaaaagaagacccaaaggagctaaaatcaaatggcatcctcctcttccttccttctcctcgctgctcttcttgccttggtctcatggcaggccactgcctccgatcctagccccctccaggacttttgtgtcgccgacatgaattcaccagtgcgtgtcaatgggtttgtttgcaagaacccgatggaggtcaacgctgatgacttcttcaaggcagccgccctcgacaagcctagggtgaccaacaaggttggatccaacgtcaccttgatcaatcgtcatgcagattgctggactcaacaccctcggcatctcaattgcgcgcatcgactatgctcccttgggtcagaacccaccacatacgcaccctcgcgccactgagatcctcacggtgctcgaggggacactgtacgttggctttgtcacatccaaccagcccgccccaaacagaaacaagttcctctccaaggtgctcaacaaaggtgatgtgtttgtcttccccgtggggctcatccacttccaattcaaccccaacccacacaagcccgccgttgcaattgccgcacttagcagccagaaccctggggctatcacaattgccacgcggtgtttgggtc

SEQ ID NO: 436421 - DNA, 429 bp, Triticum aestivum
tcgtacatcggaagacgagagaacagaagagccaaggacactaaaacgaagtggcatcctcctcttcctttctcctccttgctgcacttcttgcgttagtctcatggcaggccactgcttttgatcctagcccactccaagacttttgtgtcgccgacatgaattcaccaggtactatccgttttgtcatcatgtcttcaccaaatacatatgttgaaatctatttccggaaattatatccaagtcgaaacaactttgtaaaatctgagcttacatgtgtatctcttgcgcccccagtccgtgtcaatgggtttgtctgcaagaaaccgatggaggtcaatgcagatgacttcttcaaggcggccaacctcgacaagcctaggctgcccaacaaggttggatccaacgtcacattgatcaacgtcatgc

SEQ ID NO: 436422 - DNA, 518 bp, Triticum aestivum
  unsure (1)..(518): unsure at all n locations
ggacaaccagcgacagccgccacttcgtccagctccggccccgggaggatcgcttcgctgccaaatcgctcgtcgacggcgggatgggggaggcgtcatctccggcgatcgccaaggatgtcaccgagctgatcgggaacacgccgttggtgtacctcaacaaggtgaccgacgggtgcgtggggcgcgtcgccgccaagctcgagtccatggagccctgctccagcgtcaaggacaggattggatacagcatgatcaccgacgcggaggagaaggggttcatcgtcccaggcaagagtgtcctgattgagccaaccagtggcaacacaggcattgggctggccttcatggctgctgccaagggttacagacttgtactcacaatgcccgcatccatgagtatggagaggagaatcatcttgaaggcttttggtgctgagctggtcctcaccgacccactcttgggaatgaaaggagctgtccanaaggcggaagagctggcagcaaagacacctaac

SEQ ID NO: 436423 - DNA, 417 bp, Triticum aestivum
tttcagcgctcacccagtaagctaacgaacccgaccacccccctctagctcggcagccatgaactgcggaaggggtcccgctccggcgacgatggtgcgctgcaggcagtgcagcgccagcgtcgccgcgccgcccggtgcctgtgccgtccagtgcgcgcagtgctgctgcgtgactcgcgtcggcggggctgggcgacagctcagtgtgatgcgccccatcccgaacttcggcggtggccgcggcaagaagcgcgccgtgctcgtcggtatcaagtacaccaagacgcgtgcctgcgagctgaggggtcccatcaacgacgtcaagtgcatgaggtacatcctcaccgagcgcttcggcttcgccaacgactgcgtgctcatcctcaccgatgaggagagggacccgtgcaggca

SEQ ID NO: 436424 - DNA, 498 bp, Triticum aestivum
tcttttgtagcgggaggccctgacggggagaaggggctcctctccaacatcatgcatggtgttgccggtgctcatggtggtggccccggctacccatctggtggccacgggtaccccccgcagcagcatggataccctcagcaaggctaccctcctcagcatggctacccaccgcagcagcatggctaccctccacagcagcatggctacccccctgctggctaccctggctcatctggtcacagtggtagccatggaggaggaggcatgggcatgggtggcatgctggctggaggagcagcagctgctgccgctgcttacggagcacacaagctttctcacggcggccacggtggaaggtggacacatgatgggaggcatgatgggcggccacggaggctacggcggcgggtacggccaccacggcggtaagttcaagcacgggaagcacggccacggcatgttcaagcacggcaagcatgggaagcacggcatgtt

SEQ ID NO: 436425 - DNA, 429 bp, Triticum aestivum
cccacgcgtccgcgctccctctcgcgggacggccaccaccccacactcacgccgagcggccgagccgtgcccacctcgcccccgtttgactccgacgcgcacgcgcacgcatggatgtgcggcagaggcagaggagggtggcgccgccggcagtgggccatgcgggggcgccccgggtgctgcaggcgggggacgcgctgccgctcccgatccggcacacgaacctcatcttctcggcgctcttcgcggcctcgctcgcctacctgatgcggcggtggcgcgagaagatccgctcctccacgccgctccacgtcgtcgacctcaccgagattctctccatcttcggcctcgtcgcctcgctcatctacctgctcagcttcttcggcatcgccttcgtccagtccatcgtctcgtccagcgacgaggacg

SEQ ID NO: 436426 - DNA, 420 bp, Triticum aestivum
tcgttgcgcctcgggcgtcgtctacaaggcgcgggaccgccgcacgggcgccaccgtcgccgtcaagcgcctccgcggcggcggcttcggcgaccacgacggcagccggctctccgaggacctcctccgcgaggccgcgtgcctcgaggcctgccgcggccacccgtccgtcgtcgagctgcgggccgcgcaccgtgacggcgcgggcggcgcgttcctcgtgatggagtacgtcgggcccagcgtggcgcaggtcatgcgggagcgcggccggcccttccccgaggccgacgcgcgccggctcatgcgccagctcctggacggcgccagggcgatgcacgacctcggggtcctgcaccgcgacctcaagccggacaacgtcctcgtcgacgcccacggcgacctcaagatctgcgactt

SEQ ID NO: 436427 - DNA, 438 bp, Triticum aestivum
tctagatgaccgtcgcctccgcctggatccacctccttgccggcgacctctttgctgcaagacaagtgtaccatgatggaatcaagaacaacatcgagaccaggcattcggtttcgctgggcctgctcttctgccccatcgggatcgccgctcacgcgctgaccaaggtactcgcgggttccacaggtcgatcacactgacgaccgattgcctgtaggcaggctccccttgtttagatgtctcagatcgtgagggtcagatatatgaataaaattgatttggtgcaccatttgttctatatagatttcacattgattgttcccacccattctattggaattggctcaggaaactgaatctactcgccatcatgggttcatagaagggctagtagaacaggttatttgtaccatcgagtcatgacaccaagaaatgtac

SEQ ID NO: 436428 - DNA, 224 bp, Triticum aestivum
gtccggcccccgcctcgctctcacgctgctcgcgtcactccgagctccccggttcgtcaacgagcccgcccgggaaaaccgcttgagaaatggctgaggaggatgtccagcccattgtgtgcgacagtggcaccggaatggtcaaggcggggttcgccggcgacgacgcgccgagggccgtgttccccagcattgtgggcaggccgcggcacacgggggtgatg

SEQ ID NO: 436429 - DNA, 526 bp, Triticum aestivum
gcagagcttcctcccgccctcggcccacgcggcgaggtcgtcgtcccggcaccggcccagccgcgcccgccccttccagtgcgcggccgtctccgcgccgtcgtcgtcggccgcctcgccgtcggcctcggccgtcccggcggagcggctggagcctcgcgtggagcagcgggagggcggctactgggtgctcaaggagaagtaccgcaccagcctgaacccgcaggagaaggtgaagctgggcaaggagcccatggcgctcttcacggagggcggcatcaaggacctcgccaagctccccatggagcagatcgacgccgacaagctcaccaaggaggacgtcgacgtgcggctcaagtggctcggcctcttccaccgccgcaagcagcagtatgggcggctcatgatgcgtctgaagctgcccaacggcgtgacgacgagcgagcagacgaggtacctggcgagcgtgatcgagaagtacggcaaggagggctgcgccgacgtgacgacccggcagaactggcag

SEQ ID NO: 436430 - DNA, 389 bp, Triticum aestivum
ttctcttcgtccgcccacgcgtccgcccacgtctcggtccattccagctcaggcgagcagcgaccaccttccggcgagggtagcagcgatggagggcaaggaggaggacgtgcggctcggagcgaacaagtactcggagcggcagcccatcggcacggcggcgcaggggtccgaggacaaggactacaaggagcccccgccggcgccgctgttcgagcccggcgagctcaagtcctggtccttctaccgcgccggcatcgccgagttcatggccaccttcctcttcctctacgtcaccatcctcaccgtgatgggctacagcggcgccacctccaagtgcgccaccgtcggcatccagggcatcgcctggtccttcggcggcatgatct

SEQ ID NO: 436431 - DNA, 771 bp, Triticum aestivum
tttgttcgcccacgcgtccggtcttgaaggaccagaatatcatgcctggtatcaaggttgacaagggtttggttccattgcccggatccaacaatgaatcctggtgccaaggtcttgatggtttggcctcaaggtgtgctgagtactacaagcaaggtgcacgcttcgcaaagtggcggactgttgttagcatcccttgtggtcctactgcattagctgtcaaggaagcggcatggggacttgctcgctatgctgctattgctcaggacaatggtttagtgccaattgtggagccagagatccttctggacggtgaccatggcatcgagagaactcttgaggtggcagagaaggtgtggtccgaggtgttcttctacctggccgaaaacaatgttctgtttgagggcatcctgctgaagcccagcatggttacccctggtgctgagcacaaggagaaggcttctccagaagccattgcgaagaacaccctcacaatgctgaggaggagagtaccgacctgcggtccctggaatcatgttcctttccggcgggcagtccgagctggaggcgaccatgaacctgaacgcgatgaaccagtccgccaacccgtggcacgtgtccttctcgtacgcccgggccctccagaactcggtgctgaagacatggcaggggcagcccgagaacatcgaggcggcgcagaaggccctgctggtccgcgccaaggccaactcgttggcgcagctcggcagctacacgggcgagggcgagagc

SEQ ID NO: 436432 - DNA, 611 bp, Triticum aestivum
gggtcgacggcgtctttgactgcagaaccaaagttccatgcagctcgaactgaccaaatttggccaattactaagcagttcataaaaacatcatcagtggaagggaatggtccgttggatggcaattcatcctgcatggctgatgcttgcaatgaaattagttcctgcaatgcttcacccatggaatacagtggcaattctgattctgatactgaaattttccgagtcaagcgcaggtccagcatattaggaagatctgctcctgacacgaagacaacaaacatgtctgaacagaaggttctgaagcggctgaagaatgcatccccagaaacacaacatgacaataagcgacctgaagaagactctgcgcgtacttcagttccctcagttagtatgaggcacaataagtcaaattctgcctcttctgaggaagatagagaggacatggttcccattgcctggaggatgaagcggcggcagctggaagctcaacaaggcgacgccagttatgccgcgcagcagtccaaggtgtatccatctaccagcagttgttcccagcagcagtcgaaggtgtatccatctgccagcagctgttcccagcagcagttcgc

SEQ ID NO: 436433 - DNA, 438 bp, Triticum aestivum
  unsure (1)..(438): unsure at all n locations
tctctgggctccgctcccctcctctctctcctccatcctccggtttctgatcgcgaccatgggaacccgcgggctcgccgtgctgctcctcgcggcggtgctgctgcagggcctcctcccggcctcggaggcggagggcctggtgcggatcgcgctgaagaagcgcgccatcgaccggaacagccgcgtcgccaagagcctctccgaccgcgaggaggtgcacctcctcggcggcgcctccaacaccctcccctccgaggaggagggcgacatcgtgtccctcaagaactacatgaacgcgcagtacttcggggagaatcggcgtcggcacgccgccgcagaagttcaccgtcatcttcgacaccggcagctccaacctctgggtgccctccgccaagtgctacttctcgattgcgtgctacctncacgcacgctaca

SEQ ID NO: 436434 - DNA, 333 bp, Triticum aestivum
tatcacatgttacaagcgttcaacaccggcaacctagctctctaccaagagctttgtggggttcacaatgctgctcttagtgcacagcctgcattggtgcagaatgaacagaaactgcttgagaagatcaatattctgtgtctgatggagataatcttcagccggccatcagaagatagaactatcccattaagtgttattgccaagcagactaagctttcaaccagcaaagtggaatgtcttcttatgaagagcctctcggttcatctcatagaaggaatcatcgatgaagttgacagcacggttcatgtttcgtgggtccagcctagagta

SEQ ID NO: 436435 - DNA, 309 bp, Triticum aestivum
tgtgtgagacccgaccagcgacccaacgacccagcgtcgacctacctcctaccctcatccatccacccattgatccatcgattgatttggttggattaattgatccgccaccgccaccaccaccgccgtggagaaaggagggatggcggcggcggcgggcgggggcggggggccgaggcgcacgacgcgggtgggcccctacgagctcggcaagaccgtcggcgagggcagcttcgccaaggtcaagatcgccaaggacacccgcaacgccgtcacctgcgccatcaaggtgctcgaccgcaaccacgt

SEQ ID NO: 436436 - DNA, 540 bp, Triticum aestivum
gagctcacggcgacgttcaggtccaggtcagagctgttatttataggaaggagggccggccatgtcttcctcctctccccccaatagcaacgacagcggcaagaagaacccgctggacgccatgggcgccttcttctcggcgcaggtgaaccgccgcaagctggtctccacgcagaagctggccatgtccgagcgctgcacctcctgcggcgacgacttccccggctgcgcccaccgccccgccgaccgcaaggcgtggatggcggagctcggccccgaccgcctgcgcctgcaccaggtggtctggccgggcacccacgactcggccaccaacaagatcggcatccccttcatcacccgccccttcgcgcagtgccagtcgctctccgtctaccaccagctcgccctcggctgccgcctcctcgacgtccgcgtgcaggaggagcgccgcgtctgccacggcgtgctcgccacctactccgtcgacgtcgtgctcgacgacgtcctgcgcttcctgtccgagacggagtcggaggtcct

SEQ ID NO: 436437 - DNA, 275 bp, Triticum aestivum
tcaagagctaccaaacgccctactttaattttaattatcgccgctgctcccacgcgccttccacgtacgtaccgacgaccttccgctcgcttttcttccgcctagtctgcccgccagatctgcatccgcggagatgaagatcacggtgcggggatcgacggtcgtggtgccggcggaggagacgccgcggctccggctgtggaacgccaacccggacctggtcgtgccgcggttccacacgccgagcgtctacttcttccggcgcggcgcggggg

SEQ ID NO: 436438 - DNA, 461 bp, Triticum aestivum
tttgtgtttttgaaacccaatgcccatgatagtggaaaatcatccgcagataatataagcgacctgcaagctgttttgcatagccttcctcaagccgagcttcggttgctatgttcattgcttgcgcatgatgggttatcagacaatgcatatctccttgtaccagaagttctgtaacagattgtagcttcggctcctttcatctgttgccatttcataaatgagctttcacgttcgatgcacaattcgactgtttgcgccatgaacgagcttcacttgtatgaagattctgaaaaggcaattctgagcacatcatcagccaacggcatggcagttctaagagttgtgcaggccttgagttctcttgtcacatctctgcaagagagaaaagatccagagcttcttgcagagaaggaccattcagatgcgctgtcccagatttctgatattaacacagcatt

SEQ ID NO: 436439 - DNA, 513 bp, Triticum aestivum
tcccacgcgtccgacgacacgtttctttctctggccctctccctctccctctccctctcccctcggctagcaaggcgtctctctcttctccagggaggctctcgatttgcatggacaagggccacctcggtggcggcggaggaggaggaggactgctcgccctggacgcctcgccgcggcagctcggcttcctgaacttgctatcaccggcgccgttccacaggagcatggaggcggacgacggcggcggtggcggcggcggcagggggaggaggtccatcgaggttgacttcttctccgacgagaagaagaacatgaagaagagccgcgcatcggccggtgctgacgcggaggaccacaaggatcaggcctccgccgccggactcgccatcaagaaggaggacctcaccattaacctccttaccgggaacaacacgaggagcgaccggtccatggtggtcgacgacgacggggcgtcccgggccgacgaggacaggaacggcaggaacaccg

SEQ ID NO: 436440 - DNA, 632 bp, Triticum aestivum
  unsure (1)..(632): unsure at all n locations
ttactcatgcactcccagaaccactggggcggggcgttcgacatcgacggcgcggaggacgaccagagccgcaacatggacatcgaccgcggcgcgctgcagcaccagcaccagctggacgagacgcagcagagctggctgctcggcccgccggaggccaagaagaaggaccgctacgtcgacctcggctgcgtcgtcgtcaagcgcaagctcctctggtggatgctctgggtcgtgctcggcgccttcgtcctcatcggcctccccatcatcatcgccaagaacatccccaagaagaagccccacgccccgccccccgacaagtacaccgacgccctccacaaggccctcctcttcttcaacgcccagaaatccggcaagcttcctaagaacaacggcatcccgtggcgcgggaactcgggcatgaaggacggcgcggacctgccggacgtgaagggcgggctcgtcggcgggtactacgacgccggcgacaacatcaagttccacttcccgatggccttctccatgacgctgctgagctggtcggtggtgggagtacgccgacaggtacaaggcgatcgnggagtacgaccacgtgagggagctcatcaagtggggaaccgactacctgc

SEQ ID NO: 436441 - DNA, 442 bp, Triticum aestivum
attcgcgggccgacggggctcaccaaaccccagacgaaaccctagcctgcctcccaggagcgccgagtccctccgtccccaacagatctacgcgcgcgaggttcggttcggtcttcggagctcgagacatggcggaggagaatgccccagttgaggttgctgctccggttgcggcccctaccccagttcttggagagcccatggacttgatgactgctctgcagcttgtgatgaagaagtcaagcgctcatgatggccttgtcaagggactccgtgaagctgcgaaagcgattgagaagcatgctgctcagatctgtgtgcttgctgaggactgcgaccagcctgattacgtgaagctggtgaaggcactgtgtgctgagcacaatgttcacttggtcactgtgcctagtgccaagactcttggcgagtgggctgggctttg

SEQ ID NO: 436442 - DNA, 542 bp, Triticum aestivum
ttctttatccccccccgcccctccccccacgaacccacagcgcgctcccgagatccgcagccgaagcccgtgagaacagcgaagcgcgacaggaaaggcactgaactagtttgcaacaaagaagagagaaaatgtctaccgctgaggcaacccgtgaggagaatgtgtacatggccaagctcgccgagcaggctgagcgttatgaggaaatggtcgaattcatggagaaggtggccaagaccgctgatgtaggtgagctcactgttgaggagcgcaacctgctctctgtggcttacaagaatgtgattggtgcccggagggcttcctggaggatcatctcctccattgagcagaaggaggagagccgtgggaacgaggcctatgtcgcatcaatcaaggagtaccgtaccaggattgaaaccgagctcagcaagatctgtgatggcatcctcaagcttctggactcccaccttgtcccctctgccactgcccctgagtccaaggtcttctatctgaagatgaatggtgactactacagatat

SEQ ID NO: 436443 - DNA, 520 bp, Triticum aestivum
ttttaattagcgctcgtcaccccccaccactgcctcccagcatcacatgcgtgcctcccccatcttcttcctccccgcaactcgctgctcctcccacaaccgaagctcactcccgtggccacgcagaacaaaatgcagcgagcaattcaagctatcggatcacatggcagtgtgctcaaatctgctgtcctgcaacacatcagtgttgtgaagcctgctatgctgcctgctgtgttcccgcgcttcatgtcagtatcacctgctcaaatagaggagagtggatttgagagcagcactgttgcggacattttgaagtccaaagggaagagtgctgatggatcatggctctggtgcaccactgatgacagtgtctatgatgctgtcaaatcgatgacacagcacaatgtgggagctttggtgggttgttaaacccggggaagataaatcaattgctggcatcgtcacagagagagattatctccggaaaatcatagtgcagggtcgatcctccaagtcaacc

SEQ ID NO: 436444 - DNA, 553 bp, Triticum aestivum
tattgcgccttcttcgactacgccagaggaaatgccgtcggcatggcaccgggcgcgcgcatagccgtctacaaagtgtgttggaaagggtgcgcgagctctgacatcctcgccgcgtttgatgaggccattgcggacggtgtcgacgttatctctctctccctcggctccaacggcaaggccccggacttttatagcgatacgaccgccgtgggtgcgttccgcgccgtcagcaagggcatcgtcgtctccgcctcggcgggaaactccggccccaaagagtccaccgccgtcaacgtcgcgccatggttcttgacggtcggcgcgtccactctcaaccgccaattcccggccgacgtcgttctcggcaacggcgagaccttcaagggtacttctctctacgcgggcgagccgctgggcacgaccaaggtaccactggtccacgcaggggacgtgggctcgaaaatatgcgaagaagggaagctgaactccaccgtggtagccgggaagatcgtcttctgcgaccctggcgtgtacgcccgggctgcgaaag

SEQ ID NO: 436445 - DNA, 427 bp, Triticum aestivum
tggggccacggcgccgtcgtggaggagatacacgggctcatccgcgtgtacaaggacgggcacgtggagcgcctcccggcgatccccgacgtgccctgcacgtggggctcgacggccgccgggagcggcgtcctcgcgcgcgacgtggcggtcgaccgcgccacgggggtgtgggcgcgcctgtacgcgccggccgccgcggcggggaaggtccccgtggtggtctacttccacggcggcgggttcagcgtcggctccgcggcgtggagctgctaccacgagttcgtcgcccagctccccgcgcgggcgggctgcgccgtgatgtccgtcgactaccgcctggcgccggagaaccggctgcccgcggccttcgacgacgggctcacggcgctgcggtggctgcggcagcaggcgggcagaaacaacg

SEQ ID NO: 436446 - DNA, 433 bp, Triticum aestivum
cggcatcagttaaagcaattggtgtctcagaaggcggacatcgccgagaggatgatcatccccttggtggagctacaaaaggccacaaacaatttcgacaaagctcgcgagatcggtggaggagggcatggcacggtctacaaagggatcatgtcagacctgcacgtcgtggcgatcaagaagtccaaggtcgcgatccagagggagatcgacgagttcataaatgaggtagccatcctctcgcagatcaaccatcgaaacgtggtgaagctctttgggtgttgccttgagacggaggtgccgttgctggtgtacgagttcatctccaatgggaccctttaccatcatcttcatgtccaagaacccgcgccatccctggcatgggaatatcgggtaaggatcgcaaccgaaactgcgagagctctcgcctacc

SEQ ID NO: 436447 - DNA, 382 bp, Triticum aestivum
tcgtttcacgcgtccgcttcttaaccaacaccaagccaagtaggcaacccagagtcgagtcctcgggaccccgagctcttgcggatgggttgcctgcggcgccggccggagccggcggccatcgacatcacctgggtgtcgcgccggggcgtcaggtcgtcgctcccgttccacacgccgtgcctctacgcctccgtactccgtcacgccgtcgtctgccggcaagaacgtccgccgccaccgcgtcaagacccccaccgaccgcgccggcggcgagaaccccgagtgggacgagcgcctgcggctccgccttcccgacgacgcctcgctggcgtcagagcaggaagccgcggggaaaaagaaggacgggcacgttgaccac

SEQ ID NO: 436448 - DNA, 358 bp, Triticum aestivum
tatcaatcacaccccgtccgcaagtctcagtttcaatatctaataatctccctgctccttccgtcgcgtcgatcgccatgtcctcctccacggggagcttggaccacgcagggttcacgttcacgccgccgcccttcatcacgtccttcaccgagcttctgtcagggtccggcgccggcgacgcggagcggtcgccaagggggttcaaccgagggggccgggccggggcgcccaagttcaagtccgcgcagccgcccagcctgcccatctcgtcgcccttctcctgcttctccatccctgcgggcctcagccctgctgagctgctcgactcccccgttctcctcaactactcccatat

SEQ ID NO: 436449 - DNA, 561 bp, Triticum aestivum
ttcggccggccggcaccgtcgtctagctctcacactcgccccgttgccctgtgcagcagcagcagcagcatcatggcgcggtcggagcagcaggggctgcaggtgctgagcgcgctggacgcggccaagacgcagtggtaccacttcacggccatcgtcgtcgccggcatgggcttcttcaccgacgcctacgacctcttctgcatctccctcgtcaccaagctcctcggccgcatctactacaccgacctctccaagcccgtccccggcacgctgccccccggcgtcgccgccgccggaacggcgtcgccttctgcggcacgctcgccggccagctcttcttcggctggctcggcgacaagatgggccgcaggagcgtctacggcatgacgctcattctcatggtcatctgctccatcggctccggcctctccttcgcgcacacccccaagagcgtcatggccacgctctgcttcttccgcttctggctcggcttcggcatcggcggcgactacccgctctccgccaccatcatgtccgagtacgccaacaagaagaccc

SEQ ID NO: 436450 - DNA, 319 bp, Triticum aestivum
acagcaccaaccagcaccacgcctagcttacacccaagaacggcggctgccagccagcaaacagacacgaggctcggggccggcccattcattcccatcatcccatggaccgatcggcttccggcgggagagggtactactactcggcggcgccggtgggcacgggcatgggcatgggcccgctcgcgggccagctcggcgagtggctgctccgggccgtgcagccgccggcgcccacgccgtgcgggtcgcccggcgggcccccgatcaccgagccgtgggtccggatgagggacggccggcacttggcgtacgagga

SEQ ID NO: 436451 - DNA, 420 bp, Triticum aestivum
ttgatatcgagcatatagccatggactactaccgcgagacctacggcgggtacgggatggcgacgcccgggtacgcggcgccggtgccgtacggcatgtcgcaggtgaacatcgacggcaactgcggcgggcgccccatgccgccgcagcccacggtgaagatctactgccgcgccaaccccaactacgccatgtccgtgcgcaacggcaaggtggtgctggcgccggccaaccccaaggacgactaccagcactggatcaaggacatgaggtggagcaccagcatcaaggacgaggagggctaccccgccttcgccatggtgaacaaggccaccgggcaggccatcaagcactccctcggccagtcccaccctgtgcgtctggtgccgtacaacccagactacctggacgagtcggtgc

SEQ ID NO: 436452 - DNA, 335 bp, Triticum aestivum
tgttatttcgactcgatcgagaaagttcttcgtctccctctcgcggaatacacaaagcaccggttgatcccaagcggaagagcagtgatggcgcagtccggcaacagcgacgccgccccgatcagcacccagcccgcggcggaggaggtgacggtggggaggacgcccgaggaggaggcggccaggctgaggtacctcgagttcgtgcagcaggcggcggtcgcaggccgtcgtgcttgccgccgcggcctacgcgtacgccaagcagggcgccggcccgctccgccccggcgttgaccacgtcgaggggaccgtcaaggccgtcgtcggccccg

SEQ ID NO: 436453 - DNA, 451 bp, Triticum aestivum
tgtctccgtcgtgctcttctgcgtcatggtcgtgtgcctctgcctcctcttcctctatttctcgggctccaatgggcaggctgggagcgcggcactagagtatggcaccaagttttctcgctcgcttgggtggggcagcgatggagatggcgacgatggctcagacgagtcgatttttgggactggcgatgcaaatgacgttaagctcaagagcttcccggtatgcgatgatcggcattctgagctgatcccctgcttggataggaattcgatatatcagatgaggttgaagctggatctaaacttgatggagcattatgagcggcattgccctcctcctgagaggcgatttaattgcctgattccaccgccacatggctataaggttcccataaaatggccaaaaagtcgcgatttagtgtggaaagcaaatattcctcacactcacctt

SEQ ID NO: 436454 - DNA, 475 bp, Triticum aestivum
gtaaagggtacgcgtcttgcagtcatcctcagattcagaattccatatatcagataaggaattaagcgatgtcagagaagaagaagttaagaggaagaaaaggacatgtgtcttgcagtcatcctcagagtctgaattccatgcctcagacaaggaattgggtgataacaggatagaagaggccaggaggaagaagaggttactcgtctcgcaatcatcctcagattctgaattccatgtctcagataaggatgtcagggacttgggagaggctaaatctctggtggctcagcccatgctgtctgtgtccccgaggaggctttcttttacaaggaatggatgggacaaaggaaaggagaaaaaagaactagtagatgctgggaagccctggtgtgggatatgcctctctgaggatcagaggacgactctacagggagtgctgaattgttgctcacactacttttgcttcgcgtgc

SEQ ID NO: 436455 - DNA, 334 bp, Triticum aestivum
ttttcgcgtgggtccgccgccgccgcgcctcctcctcgcccaaggttggagcttgtgaaagttctctaaggctgacaagatggttctgaagaccgagctctgccgttttagcggccagatgatttaccctgggaagggtatcaggttcattcgttcggattcgcaggttttcctctttgccaactcaaaatgcaagcgctacttccacaaccgcctcaagcctgcatagctttgctggacagcaatgtacaggaagcagcacaagaaggacatccatgctgaggctgccaagaagaggcgccgcaccaccaagaagccgtactcacggtcgatt

SEQ ID NO: 436456 - DNA, 703 bp, Triticum aestivum
acacctgaccgtatactagatcttaccaagaagggcatttgtatgctgaacgaatgttcaatgctcatcatggacgaggcagacaagctgttagctcctgagtttcagccttccgtggagcaactcattcgttaccttccagctagtcggcaactattgctgttttctgcaacctttcctgtaactgtcaaggattttaagcagaagtacctacctagaccttatgttattaatctgatggatgaactaacactgaaaggaatcacacaatactatgccttcgtagaagaaaggcaaaaggttcattgtctgaacacgcttttttcaaagcttcaaataaatcagtctattatattctgcaactctgttaatagagtcgagctactggcaaagaaaatcactgagcttggctattcgtgcttctacattcatgctaaaatgttgcaagaccaccgaaaccgggtgtttcatgattttcggaatggtgcttgcagaaaccttgtttgcacagatctttttactagaggaattgacattcaagctgttaatgttgtcatcaattttgacttccccaagactgctgaaacatatttgcatagggttgggtcgttctggaagatttggacaccttggtttggcggtgaacttaatcacttatgaggaccgtttcaacatgtataggattgagcaagaacttgggaca

SEQ ID NO: 436457 - DNA, 543 bp, Triticum aestivum
cgacgggacaaatgagctcgtgtgcggccagaaagtcctcaacaccggatcccccatcactgtgcctgttgggagggccacccttggacgtatcattaacgttattggtgagccaattgaccacaagggtgacataaagacacacgacttccttcctattcatcgtgaggcccctgcttttgttgagcaagccacagagcagcaaattcttgttactggaattaaggtcgtggatttgcttgcaccttaccaaaggggtggcaagattggtctcttcggtggtgcaggagtgggtaaaactgttcttatcatggagttgatcaacaatgttgccaaggcccacggtggtttctctgtttttgctggtgtcggagaacgtacccgtgaaggtaatgacttgtatagggaaatgattgaaagtggtgtcattaagctcgatgagaagcaggctgaaagcaagtgtgctcttgtctacgggcaaatgaacgatgccccgggtgcccgtgctcgtgttggtcttactggtttgactgttgctgaaca

SEQ ID NO: 436458 - DNA, 564 bp, Triticum aestivum
ttttccacgcgtccgcaacagctgcgccaacagcaacagcccagctaagctcagctcgcccaccaccagacgtaccacgttcagagctagcagcaccatccatggccgcggaggagcccaagaaggtggaggtggaggcggcgccggagccggaggccgcaccgccagccgtcccggccgcggagcccgaggcccccgccaaggacgtcaccgaggagaaggccgtcatccccgcgcccgcgccggccgccgaggaggagaagccgcccgccgatgactccaaggccctcgtcgtcgtcgagaaggttgcagatgaacctgttgctgagaaacccacagatgagaaggctgcacacggcggctcaaatgacagagacctcgctcttgcaagggtggaaagtgagaagaggaactctttaattaaagcatgggaggagaatgagaagacgaaggctgagaacaaggctactaaaaaggtgtccgctattctctcatgggagaacaccaagaaagcaaacatagaagctcaactgaagaagattgaggagcaattggaaaagaaga

SEQ ID NO: 436459 - DNA, 515 bp, Triticum aestivum
tcgttccaaagcccccctccccctttctcctctttccctcccaagcaaatcctctgcgctccccacgcctccttcttcttcctctgccgcttgccgtgtttgattcgggaccgaaatggcattccacgacgaggcgccgctgctgctcaggatcaacaccgccagaggcggccacatgggcggaggcgagtgcgacgaggccgagaaccagcggtggccgccgtggctcaagccgctgctggcgaccagcttcttcgggcaatgcaagatgcacgcggacgcccacaagtgcgagtgcaacatgtactgcctcgactgcgtcaacggcgccctctgctcccagtgcctcgcctaccaccacggccaccacgccatccagataaggaggtcctcctaccacgacgtgatccgcgtgtcggagatccagaaggtgctggacatcaccggcgtgcagacctacatcatcaacagcgcgcgcgtggtgttcctcaacgagcgcccgcagcccaggcccg

SEQ ID NO: 436460 - DNA, 523 bp, Triticum aestivum
cgggtcgacagggctctctatctcgcatcgtatgaccggaaggagcggagccgccgagccgggaagagccaccaccccatcttcctcgcctccgcttccgaagggtcagagatggcggaccgtgctaaccacccgtctgtcatgcagaagtttggtggacagttccaccttgcctccagcttctctgagggtgttcgtgctcgcaacatctgcccttctgtgccatcctatgagaggcgcttcaccacaagcagctacatgactcagaaccttggcatcagtgtcccaatgatgtcatcttctccattgtttgccaatgcaccccctgagaagaaaggtgtcaagaactttgcgattgacttcctcatgggaggagtgtccgctgcagtttccaagactgctgcagctcctattgagcgtgttaagctgcttatccagaaccaggatgagatgatcaaggctggcaggctctctgagccatacaagggtattggtgactgctttgggcgcaccatcaaggatg

SEQ ID NO: 436461 - DNA, 614 bp, Triticum aestivum
cttttcgttatacagatcacggccgcggtgaccgggacaggtcaaaatcaaaagcgggcgagccaaaccaacgcaaaccccaaatccccaatccgagctgccctctccccccgagatggcggcggtctggatggcgttggcggtgatgctggtcgctgctgctcaggtggcggtggctgccccggtgacggcgccggccttcctctgggcgcccaagaactacggacttagtcccaatgaggctaaagaagtagtccactatcagacaatctccccaaagagtttagctgattctgttctcgaggaaggtggctggtcgaacttggtgtgttcaaaggatggtcctcaaaagaatgttgatgttgcagttctttttcttggatcaaagctacaatcatcagacatctctaaagataaacaagtcgatcctgctttagcggacatactaaagctgtccttctcaagctctgagttttccatggcattcccttatgttgccatgtcagacgacgaagcactagagaactcattgctatctggatttactgagaattgtgaggatggttctggaggaaatcatatcacttacacagacacgtgtactgcaagcagtg

SEQ ID NO: 436462 - DNA, 418 bp, Triticum aestivum
tttttcaagacgaagaacccatctgtaaaattaatatgcgttgaaccagctgaatgtccagtgatttcaggtggcgagccagccttccacaacatcctaggaatagggcctggctttgtcccagaaatattggatagatcccagatagatgagattgtcacagtgactactcaagaagctatggacatggctagaacattggcaagggaagaaggattgcttgttggcatctcttcaggggcaaatgcagctgcctgcttaaaggttgcatcaagagaggagaacaggggaaagatgactgtgacaatgttttccagtggtgcagagaggtatctgaactcggagctctttgcgcaggttaaggaagagtgcgttaacgtcaacatgaccttctgatgtccatatcaaggcaatgaca

SEQ ID NO: 436463 - DNA, 482 bp, Triticum aestivum
ttgtttcaagccaagaaccaatacttgatctgttggttcctttagctcccggtagacttttagctgcaccgatcgatctcgatcatggaggatgagaggagcacccagtcgtaccagggaggtgaggccgccgtgcaggtggaggtgacggacaggggccttctcggcaacctcctcggcaagaagaaggctgaggaggacaaggagaaggaggaggagctggtcaccggcatggagaaggtctccgtggaagagcccgaggtcaagaaggaggagcacgaggatggcgagaagaaggagaccctcttctccaagctgcaccgatccagctccagctccagctcgtctagtgacgaggaagaggaggaggtgatcgatgacaacggcgaggtgatcaagaggaagaagaagaaggggctcaaggaaaagctccaggggaagctgcccggccacaaggacaccgagggtgagcacgtgacggg

SEQ ID NO: 436464 - DNA, 445 bp, Triticum aestivum
tcgctcctcctccgccccatttcctcaaagcctcgagccgcgcctcgactcgctcgatcccatctcccgctcacgcccggcctccgaggagatcaggccaccgtgcggtgcagagctcgccgtcctcgcgcgcgcgggatcatctagctaccttttctcggctcgtaggcgtcatggcgcagcggcacaagaaggtggaggagccgacggaggtgcacctgcacgccgcggagatcacgctctgcgcctacagctgcggcttcccgggcaacccggccaccaagaacctctgccagaactgcttcctggcgtcctccttctcgccgtcgccctccgccgcctcgccgccgtccccttcctcttcgcccgcggcgttcccgctcttcgacaagctgaggccggccgccgtcgcgtcgcccctgctgcaggcggcgcccgtctacat

SEQ ID NO: 436465 - DNA, 433 bp, Triticum aestivum
  unsure (1)..(433): unsure at all n locations
gtcctactaacaaggcaagagatacctcgattgccttcggaggcatcgtcacggtgtcatgtggccattgccaccctgatattgtcaaggccgtgcaggaccagaccaagttgcttcagcacaccaccaccatatacctgcatcatgccatcgtcgagtttgccgaggcgcttgcctccaagatgccaggcaatctcaaggttgtgtacttcgtcaattctgggaccgaagcgaatgaactagcaatgttgatggctcggctgtacagcgggaatctcggtatgattgcattgagaaatggataccacggtgggagtgctggaacaataggtctcacgggtttgcagacgtggaagtacccgattcctcagggtgagattcatcatgtcatgaatccngatccttaccgtggagcttttgggtctgatgctgc

SEQ ID NO: 436466 - DNA, 393 bp, Triticum aestivum
ttattaccaccgcaacagggagtactacctgccgtcgcccaccgacgtcgtcggtcaccacggcgatgccgccgacaacatcgtcatccataaggcgcacttctccaaggacttcatcgccggtctccgagtcaaggcgtcagaagggcgcggccggccgttcagccggttcgagaccatcctcgcccacctctggcgcaccatgacgcgcgcgcgcgacctgagccccgaggagaccaccaagatccggctgtccgtggacgggcgacaccggctcggccagccggcggagtacttcggcaacatggtgctttgggcattcccgcgctccaccgtgggtgacctcctgaaccggccgctgaagcacgcggctcatgtgatccatgacgaggt

SEQ ID NO: 436467 - DNA, 538 bp, Triticum aestivum
gcgtccatcgcgtccggcgattccaaccgctccacggcctctgatcgcgagcagaccagccaagtccgcaggaagaggggaaagatcgcccagggcatcaaagaacacgtgactctggggccaaagctgtcggagacggtcaaggggaagctcacgctgggcgccaggatcctgcaggccggcggcgtcgagaaggtgttccggcagtgggtctccgtggacaagaacgagcggctggtgagggcgtcgcagtgctacctgtccaccacggcgggtcccatcgccgggatgctcttcgtctccacggagcgcgtcgccttccgcagcgaccgctcgctggccgtggccgcccccgacggcgccaagctccgcgtgccgtacaaggtgacgataccgctgcgcaaggtgcggcgcgccgtgcccaccgagaacaagcacaagccggagcagcgctacatcgaggtggtcaccaacgacggcttcgagttctggttcatgggcttcgtcagctaccaccggtcgctgcagcacctggagc

SEQ ID NO: 436468 - DNA, 453 bp, Triticum aestivum
tttacgcgtgggaagaccatgagcgtcaaatattggaaaaggaaaaaatagaggagacaaagagattgactattcagaagaaatctgcagatgaagaaagggagaggcttttgaaggaacagagacttagggagcagcagaggatccgtaaagaaatagaggaaaaagaggcgagggaagcagcaaaaatgatagaagatttaacaggaagggggaagaataagaaaaaaattcacattgagggggatatgacaaaacaacacgccatggaggtggtgttgaatcaacaggtgaaggagcgtcacgagatggaaaaaaaactggcgaagcttgcaaagacaatggatcacttggagagggcaaaacggcaggaggaagcaccactaatcgaggaggccttccagaaacgcctcgaagaagaaaagatccttcatgagcaagagcagctgagag

SEQ ID NO: 436469 - DNA, 323 bp, Triticum aestivum
ctcgattgcacgtttctcgtgtgaccggcgtggaacatttcccatttctcatgggatgtcatcggccagactctatataaaggtctcccatccttgtatcattggtgccccgccatgaagtgcccttccgattcctcggctggtcgtgatccctgggctcctcctcccgcttctggcggtggcggctccagcgagccagccaagaagcggcagcggacctcgagctcgagccaggctgaggcatcctcctcgtcctcacagcctccgccgcagcagccgggggacgcgagagaggtgccggatctgggggaggacgtgatgtt

SEQ ID NO: 436470 - DNA, 451 bp, Triticum aestivum
tcgttcaaagctacttcatgtaagcctcctcctctccacctacaaagcaggagctcagtctcaggtgctgggatagctctgctagttcgtcgactttggaaatggccaccaactcgaggtcgaactccagggccaccttctccagcgagatccacgacatcggcacggtgcagaactccaccacgcccagcatggtgtactacaccgagcggtccatcgccgactacttccctccccacctcctcaagaaggtggtgtcggaggtggtgtccacgttcctgctggtgttcgtgacgtgcggggcggcggcgatcagcgcccacgacgtcacgcgcatatcgcagctcggccagtcggtcgccggcgggctcatcgtcgtcgtcatgatctacgccgtcggccacatctccggcgcgcacatgaaccccgccgtcaccctcgccttcgccat

SEQ ID NO: 436471 - DNA, 709 bp, Triticum aestivum
tctgggcgccgtgcacacctacgcggaggtgtcagagctctcccgccgctgcgcggcggggctgcggcggctcggcgtggggaagggcgacgtggtcatgaacctgctccgcaactgcccggagttcgccttcgtgttcctcggcgcggcccggctgggcgccgccaccaccaccgccaacccgttctgcacgccgcacgagatccaccgccaggcgagcgcggccggggcgcggctgatcgtcaccgaggcctgcgccgtcacaaggtgcgcgccttcgccgccgacgcgggatccccgtggtcaccgtcgacgggccggcctccgacgacggcggctgcctcgcgttcgacgaggccctgctgcccgcggagccgctcgccgccgacgagcaggtcgaccccgacgacgtggtggccctcccctactcgtccggcaccacggggctgcccaagggcgtcatgctcacccaccgcagcctcgtcaccagcgtcgcgcagcaggtggacggggagaacccgaacttgtatttcggcccgaatgacgtgctgctgtgcgtgctgccgctgttccacatctactcgctcaactcggtgctgctggcggggctgcgcgccgggtgcgcgatcgtgatcatgcgcaagttcgaccacggcgcgctggtgcgcctggtgcgcgcgcacgcggtcaccgtggcgcccttcgtgcc

SEQ ID NO: 436472 - DNA, 378 bp, Triticum aestivum
tcctcacgcgtccggcgcacacaaacacacccaagaaacacctgagggacggtgcagctctgctagcaagtgcgcgatggcgcctcctccccacgagaacgagacgagcaggtcggagtcggcaccggccacccctgtgaagacggtggacgtgcagacggcggcggcaccggacgtgggggtgacggcagtggacgtgcagacggcggcggcaccggccgtgggggtgacgacggtggacgtgcagacggcggcaacgccggccgtggacacgaagacggtggcgacaccggcggtggaagtgacgacggtggacgtgcagacggcggcgagggagcagcaggacggcatgatgtacctggacgtgaggacggagga

SEQ ID NO: 436473 - DNA, 816 bp, Triticum aestivum
  unsure (1)..(816): unsure at all n locations
tttaagagattcagatccatcctcgcctccctcggtccgtccccggtttgttctcccaccagccccagatccatccggcgatctctgtcgccgccatcgccaggataggccccagaaaacccagcccagtggaaggggtgtgcgagtaggagaaggccagcagataggatgttcctgtgggactggttctacggggtgctggcctcccttggcctgtggcagaaggaggccaagatcctcttcctcggcctcgacaacgccggcaagaccactctcctccacatgctcaaggacgagcggctggtgcagcaccagccgacgcagcaccccacgtccgaggagctcagcatcggcaagatcaagttcaaagccttcgacctcggcggccaccagatcgctcgacgggtctggaaggactactacgcaaaggttgatgctgtagtatacttggtagatgcatatgacaaggagcggtttactgaatcgaaaaaggagctggatgctctcctttctgatgattccttggcaaatgtcccatttctcatccttggcaataagattgacattccatatgcagcatctgaagaagagctgcggtatcacctaggccttagcaacttcacaactgggaagggcaaggtgaatcttgttgactccaatgtacggcctcttgaggtgttcatgtgcagcgttgtccgcaagatgggctatggcgatgggtttaagtgggtctcccagtacatcaagtanggctcacagacgtcaaattttcttgtcatcggttggttgtttgtcacgacagcaaatgatatcatg

SEQ ID NO: 436474 - DNA, 603 bp, Triticum aestivum
  unsure (1)..(603): unsure at all n locations
tcgttagcgcgcgaaccaccaccatgtgcccttgtcccgtatgagccagaatcgttgtcgcaagctcacgggcgcccgcaccaccaatccaccacagcacagcgcaggcggctttcagattcggctggcgctcggagcactgaagagcacagggaagaagaagaagaataagaagaagagctctgggagagcgggggcgatggtggcccagaatcagaggacgccgggagaccaggtgttctggcccaaggtggtgctcaagaaatggctcaacctcaggagcaaggacgccaagttcaacgccgacgaggacgacggcgacgacgacggggagcaagaggagagctgcggctgcgacggcgccgaggcggagcgcgaggccggaggcgtggacatcgccgaggagagcctggacgccgcgccgtacaagctgcggcggcggaactcggagacgatgcgcgcgcagtacatcagcaccaaggagctcaggatctgcattggcacgtacaacgccgccggcatagagccgccggaaggcctcgacatgncgagtggctcggcaccaccggcggcgagcaggccgactggtacgtgttcgggttc

SEQ ID NO: 436475 - DNA, 630 bp, Triticum aestivum
tctctctccctctctctcgcctcctcctctcccacgaagcgcagcccgtcgagatggcctccgaggcggcgaaggtggcggtgcccgagaaggtgatcctaaagaggaggagggaagaggtctgggccgccgagaagaagcagaaggttgccgcggagaagaagaaatccagcgagaacatcaaggtcatctacgcccgcgccaagcagtacgccgaggagtacgatgcccaggacaaggagttggttcagcttaagcgtgaggcccggatgaagggtgggttctatgtcagtcctgaggccaagctgctgtttgttgtcagaatcagaggtatcaatgccatgcacccaaagaccaagaagatcttgcagctgttgcgtttgaggcagatattcaatggagtgttcctgaaggttaacaaggccaccatcaacatgctccgcagggtcgagccatatgttgcatatgggtacccgaacctgaagagtgtgagggagttgatctacaagagaggttatggcaagctcaacaagcaaaggattcctctgaccaacaacaaagtcattgaggagggtttggggaagcacaacatcatctgcattgaggaccttgtgcacgagatcttgaccg

SEQ ID NO: 436476 - DNA, 651 bp, Triticum aestivum
tttcacgcgtccggattgggaggtcccagattgggtcattgtaccgggaggcaatcttggaaacatatatgctttctacaagggattcgagatgtgccgtgttcttggtctcgttgatcgtctgccacggcttgtctgcgcacaggccgccaatgccaacccgctgtaccgctactacaagtcagggtggacacaattccagccacaggtggctgagccaacatttgcgtcggcgattcagatcggtgaccctgtatcggtcgaccgtgcggtggtcgcactcaaggcaacaaatggcatcgtcgcagaagccacagaggaggagctcatgaacgcaatgtccctcgctgaccgcaccggcatgtttgcctgcccgcacaccggggtcgctctcgcggcgctcttcaagcttcgggaagagggcaccatcggggcaaacgaccgcacggtggtcgtcagcacggcgcacggcctcaagttctcccagtccaagatcgactaccatgattcagaagattgaggacatggcctgcaagttacgccaacccaccggtcagcgtgaaggccgacttcggcgccgtcatggacgtcctcaagaagaggctcaagggtaagctttgagcatgccctcctgctgctgctgctgaaccc

SEQ ID NO: 436477 - DNA, 251 bp, Triticum aestivum
ttccacgcgtccggcaatcttgtctacagcgagagggagatccattccaaaccaaagtaccctagctagccagctagcagtagcagtgttggatgaagcagagcggcatggagagcagcctggtggcgcggcaggtgccgggcagctacggcctgccgttcgtctcggccatccgcgaccggctcgacttctactacttccagggccaggacaagtacttcgagtcccgcgtccacaagtacggctccacc

SEQ ID NO: 436478 - DNA, 299 bp, Triticum aestivum
tttttctttctttgagcataccattgcatgaagcgactaacaaagagcagctagaagtgttccatgagaagaaagccgcactggacttggatggaaaagaagtgtctaatgaggaaattgtgagaccaacagtcccactggaggcatgcttagcaagtttttcaggccgagaggaagtgcctgatttttacagcactgcattgaattcaaaaacaacagcaattaagactgctggctttaaaacttttcctgattacctggtgcttcagatgcgtaagtttgtaatggaagcaggatgg

SEQ ID NO: 436479 - DNA, 438 bp, Triticum aestivum
tgcggacgcgtgggcggacgcgtgggtcctgctctctcgcctttccccattccccccaccctcccccccctccgctcgctcgctccgggtctccctcctccctcttcacacccacctcacctcctccccctccctcttcgcgtgcccaagaaaggaaccaccaggcgggaacggcgtgagcgcagctggggctggagccggatcgaccccgttcgtctccagaggcggcggcacgggcgcaggagctccggatcggcgctcaagaacccagagtccgcgctgatgtacacgttgctgatttcttctacctagacatactccagagcagcagctctgccctgccgccgtgatctgtaatcgccgttccaaaagacagcagtttagaaaggttgtcggcggcccaagctctgagcttcagcctgcatctagctagcgcag

SEQ ID NO: 436480 - DNA, 399 bp, Triticum aestivum
ccgggccgacggggattttacacattgctgctcgctcctacactaacccacacgcacggtcgcacccgcacctcacctcatctcaccagagagaaggagagagaagagagagagtccgaagaagaagacggcggcgggatgtttctgcggcggatcctaagcggcgggggcgggctggcggccatgcgctctgcgcgggcggtgaaggagacgacggggatcgtgggtctggacgtggtccccgaggcgcgggatgtgctcatcgggctctacacgcgcaccctcaaggagatcgaggccgtccccaaggacgagggctaccgcaaggccgtcgagtccttcacccgccaccgcctccagatctgccaggaggaggaggactggaagcgcatcgaggac

SEQ ID NO: 436481 - DNA, 317 bp, Triticum aestivum
tttttacgcgtccggatatctggagatagcctgaagaacgtatacaagtcattcgtgagcgagtaccccattgtgtcgattgaggacccgtttgaccaggatgactgggtgcactatgctaagatgactgaagaatgtggagtggaagttcagattgttggtgatgaccttctagtcaccaacccaactagagttgcaaaggcaatccaggagaagtcatgcaatgctcttctgctcaaggttaaccaaattggatccgtcactgagagtatcgaggctgtgaagatgtcaaaacatgctggctggggtgtcatgac

SEQ ID NO: 436482 - DNA, 373 bp, Triticum aestivum
tctcctcgcgtccgcccgagttcaagatcgtcctcaccatcatccgcgacgggctcaagaccgacgcccgcaagtaccgcatgatgaaggagaggctcgtcggtgtctccgaggagaccaccaccggcgtcaagaggctctaccagatgcaggagtccggcaccctcctcttccccgccatcaacgtcaacgactccgtcaccaagagcaagtttgacaacctttacggttgccgtcactcgctccctgacggtcttatgagggccactgatgttatgatcgccggcaaggttgccgtggtctgtggttatggtgatgttggcaagggctgtgccgccgcacttaagcaggctggtgcccgtgtgatcgtgac

SEQ ID NO: 436483 - DNA, 350 bp, Triticum aestivum
tacaaatcaagctcccagctcccagctcagctagttgactacctgcaaatttggtgacaaggttgctaggtggatgaacagtcactcgaccatggtggtaccgtcggtgttcgccgccttcgacaaggacggcgaccgcaaggtgtccgtgtccgagctgcgctgctgcatggcggcgtccttgggcgaggacatatccgaggaggaggcggccgtggtcctcgcggcggcggatgccgacggtgacgggctgctaaaccaagaagagttctcgaggctagccgccggtgcccatgaagaggacgacgtgaggcgaagatgcctgagggaggcgttcgggatgtacgcgt

SEQ ID NO: 436484 - DNA, 446 bp, Triticum aestivum
tatgttctctccacagcccccgttgagagtcgcctccagagttcggtcgccgcccctctccttccttcccaccggaggctctgccggccggcgtggggatggatcaggtggttggcttctcctgtatatagtagtggtaggtttagtgtttggtttccccctgtgggtgtctggccatgtgccgtatcggagcgtgccgctgatgccggcgagaggcattggtcggccttcggtgctcttcttcttggccatggtggcgtggtgctactggtggcagggaagatcggcgtcggcgtcttcgttaataatctcgcagttatctggctgttggagctatgaagctttcggtgctgggcttatttctttgctgcgccatggcggcggtgcggaggagttggtcgcagtgctcggcggtcggcgttccggcggtcctggagatgtggtgc

SEQ ID NO: 436485 - DNA, 567 bp, Triticum aestivum
ctgtcgcgtgggcaaatttgacagccagtaccacttttcatgccaattcacagctgacctgattgccatgaaccacactgatttcatcattaccagcacattccaggaaatcgctggaagcaaggatagcgtgggccaatacgagtctcacattgctttcaccctccctgatctgtaccgggttgtccatgggattgacgtgtttgatcctaagttcaacatcgtctctcctggagcagacatgactgtctacttcccatacactgagactgacaagaggctcaccgccttccactctgaaattgaggagctcctgtacagcgatgttgagaacgatgaacacatgtttgtgttgaaggacaggaacaagccaatcatcttttcaatggctcgtcttgaccgtgtgaagaacatgactggcttggttgagatgtacggcaagaatgcacatctgaaggatttggcaaaccttgtgatcgttgctggtgaccatggcaaggagtccaaggatagggtggagcaggccgagttcaagaggatgtccagtctcattgaggagtacaagct

SEQ ID NO: 436486 - DNA, 440 bp, Triticum aestivum
ttctcgcgtccgccacgcgtccgcgtccgcatggcaccgtacaccaaccaaacactcgcctgccttccttccttccttgttcgttcctcgacgcacgcacgcagatctcatccatccaagccaaggcaggtcaggtcaggtcaggtacgagatggctctcaccagaatgggtctcgctggcctcgcggtcatgggccagaaccttgccctcaacattgccgagaaaggcttccccatctctgtctacaacaggacaacgtccaaggtcgatgagactgttcagcgtgccaagctagaaggaaaccttcctctctatggtttccatgaccctgcatcctttgtcaactccattcagaagccacgtgtcgtcatcatgcttgtcaaggctggtgctccggtcgaccagaccatcgcaacgctcgcagcacacctggagcaag

SEQ ID NO: 436487 - DNA, 414 bp, Triticum aestivum
ttgtctttctccaatcgcatccgcaaaaccaacactcgtcttccccccccccgcgtccggcgcaggcggatctcatcccatccaaggcaggcaggcaggtacgagatggctctcaccagaattggtcttgctggcctcgccgtcatggggcagaacctcgccctcaacattgcggagaaagggttccccatctctgtctacaacaggaccacctccaaggtcgatgagactgttcagcgcgccaagctagaaggaaaccttcctctctacggtttccatgaccctgcatccttcgtcaactccattcagaagccacgtgtcgtcatcatgcttgtcaaggccggtgccccggttgaccagaccattgcaacgctcgcagcacacctggagcagggcgactgcatcgctgatgga

SEQ ID NO: 436488 - DNA, 405 bp, Triticum aestivum
tcggtttgaaacaacttgccagcagcgccagtgtgcagcgatccagtgaccgacacggacaagaacaagatggtcgccggctgtttcatcaccgacgagtgcgccctggcggtgtcgacggagcggatgtggaaggcggtcttctccggcgaggacacggccgtcctgcccaaggcctgcgcgggcttcatcgacgccgtggacgtcgagggcgacggcggacccggcagcgtctccaccatgacgctcagcccggcggcagcggagctcgccggctcgggcgtgatgaggagccgcctggtggcgcgcgacaaccgcggcccgtgtgatcaagacggagctgctggagggcagcaaggtgagcgcccagctcaagtcgcaggtggccgaggtgaagctcgaggc

SEQ ID NO: 436489 - DNA, 292 bp, Triticum aestivum
agcatgatatgcaagcgtgaacactcatcttggcattgaacaaagtcgaagagatgacttggaatctcttggatatgtacttatgtacttcctacggggaagccttccttggcaaggtctgaaagcaggaacgaagaagcaaaagtatgagaagatcagtgagaaaaaagttgcaacatcaattgaggctctgtgtcgtgggtatcctactgagttcacatcatatttccattattgccgctcgcttcggtttgatgacaagcctgattattcctaccttaagcgactgttc

SEQ ID NO: 436490 - DNA, 481 bp, Triticum aestivum
tgccttgttcccaaagtgctgcgacagctgcaggttcttctcgggggccgtggtctgcgacgactccggccccaagtgccgcgacggctgcgtgaactgccgcgtcgtgcatacgagccctaagaagacgttccgatgcgccgatgcacgcgtcgacgatggcacgccctgcaagccctgcaagaagtactgatcgctcatgtctcagaacatcagatgttgcgccgaaaataaaagctgggatgagttgagcagagccgttatggctgtacgtgcacgtgttccacgcccaacaacaattgttgttatcatcgtcgtcgttatgcttttctctctctctccagaaaaagctgttgtcgctgctccgtgaataaatcacataaatatgtatcacagtatcagtgtatgcgtctctgctcaatcacatatcaatcagtttatttgtgtcaacattaatcagatcgacttctagaagttaaaa

SEQ ID NO: 436491 - DNA, 449 bp, Triticum aestivum
tcttcttgtcaccatcaaggtgctcttctgcgggatctgccacaccgacctccacatcgccaagaacgagtggggaaacgccctctaccccgtcgtccccgggcatgagattgttggcgtcgtcaccgacgctggccccggcgtcaagaacttcaaggccggggacacggtgggcgtgggctacttcgtcgactcctgccgctcctgcgtgagctgcggcagcgggcacgagaaccactgccccacgctcgtgctcacctccaacgccgtggactacgacggcgccaccacccagggcggcttctccgacgtcctcgtcgtcgaccagggctacgtcgtccgcgtcccggagggcctgcccctggacggggcggcgccgctgctctgcgccggcgtcacggtgtacagccccatgatggagttcggcctcaacgcgccggggaagcacc

SEQ ID NO: 436492 - DNA, 772 bp, Triticum aestivum
tctaccgcaagcgccctccgaaccaaatcgaacaaccgagagaagccatggagcgacttcagcggatcttcggcgccggcgggatgggccagccgccgtcggactcgccgctgctcgactcctccgagcaggtctacatctcctccctcgccctcctcaagatgctcaagcacgggagggccggcgtgccgatggaggtcatgggcctcatgctcggcgagttcgtcgacgactacacggtccgggtggtcgacgtcttcgccatgccgcagagcgggacgggggtcagcgtcgaggccgtcgaccacgtcttccagaccaatatgctcgacatgctcaagcagaccggcaggccagaaatggtggtagggtggtatcactctcatcctggttttggttgctggctatcgggtgttgatatcaatactcaacagagtttcgaagctttgaaccccagggcagttgccgtcgtgattgaccccatccagagtgtcaaggggaaggtggtcatcgatgcatttcgtctcattaaccctcagaccatgatgcttgggcaggagccacgtcagacaacatccaatgttgggcacctgaataagccgtctattcaggctcttattcatgggctcaatagacactactactctattgcaataaattaccgcaaaaatgagctggaggagaagatgctgctcaaccttcacaaaaagaaatggactgatggattaattctgaagaaatttgacgcacattcagaaaccaatgagcaaac

SEQ ID NO: 436493 - DNA, 392 bp, Triticum aestivum
tggtgtgccaggtttctctgtctgggctcccggcatcggcggcggcgcggcggcgggcgggcattgggagggagctcacggcggcaagcggcggcaggcggagcgggcgcgggagctctccggcggccatgccgcgatccggggcgtgatcccgccggggattgctggcccgggagggccgcggcgatgaacggcgcgagcgccggctccggctccggcggcgaggggccgctggtgtaccaggcctggaaagggaacaatgtcgtttttcctccaggggaggtttatatttggacctgatgcgagatccttgtttgtcaccatgttcctcattatcgctccagtaacagtcttctggtgtgttcgtcgcgaaagaattgatgaatagcttc

SEQ ID NO: 436494 - DNA, 435 bp, Triticum aestivum
tttcctgccacgcgtccgcccacgcgtccgcaaacgcatgacacaagtgacagccacggcacaatcgtcaggtcctccgccatgtctctcacggtctagttcgttcgttctcgccaacgcgatggcgacgccggcccgccggccgtcggcgcagcagcagcagccgctgacggtggacttcgaggcgctgagctacatcagcaggctcgtggaggcgttccaggcgttcgactccgacaacgacggcctggtcacggcccccgagctccggggcctcctggcctccctgggcctggacaagtcggaggccgaggcgcgggacatgctggcccgccccgacgccgaccgtgacggccggctctgcgtggtaggagttcctggacgtgatgaacgccggcgagctcggcttggggcgcgctcggcgcgctcctgcag

SEQ ID NO: 436495 - DNA, 607 bp, Triticum aestivum
tcagcagccacccacctgccgagtgccgagccgcagcctcacacgcacggtgcgagtacgtggtgagagctgtgcgctcgtgcctcgatccatccctcaaccctccgtgtgtgtttgtaaggcagcgagagcagccatgggcgtggggaagaaggtgctgaacgacgtgaagccgtacatgatgatgatcctgctgcagatcgggtaccgccgggatgtacatcgtctccgtcgcctcgctcaagcgcggcatgagccactacgtcctcgtcacctaccgcaacctcgtcgccacgctcgtcatgctgcccttcgccctcttcttcgagaaggggacacggcccaagatgacactccgcatcttcatcaagatcctggggctggcgctgctcgagcctgtgcttgaccagaacctgtactacgtgggcaacaagctgacctcggccagcttctcgtcggcgctggtcaacatcctgccggccgtcaccttcatcatggccatcgtcctgcggatggagaagctccgccttcggagctcccacagccaggccaaggtcgccggcaccatctgcaccgtcatcggcgcggtgctgatgatcatgtacca

SEQ ID NO: 436496 - DNA, 414 bp, Triticum aestivum
tttttaagcgtccttccttcaacaatggctctcctcaagaacttcgccgctttcctgtgcgtgatcctggcctcgctcgccttcgtcgcgcaggatgcgctcgccgccagaggtgctttgaacaacgtgaagggatacacgggtacctacacaggcaacccaggcggtggttacggcggtggttatgggaacgggaagtatccatgataggccgcatatgatgatacttggagcacggaaatacaaaatacgtacggcagaccatgaataaattatcacccgttactggtatatcgtactctctctgatccataataagtctcgcagttttgtaccaaggtcagttcaaaccttaatacaaaactgcaacacttatcttagattggagggagtaccaaaaacatagtgaatgtt

SEQ ID NO: 436497 - DNA, 530 bp, Triticum aestivum
ttgatcgcgacacactcaccgtctcgccacgtgagaggagaagcccgcagcgccggtgcttgagcggatcgggaaaggatggccggcggcgcggacgcggacggggagcgccggatcggggtggccatggactactcggccaccagcaagcgcgcgctggagtgggccgtccgcaacctgctccgccggggcgacaccgtcgtctgtcctccacgtccagcgccacggcggggaggacgccaagcacgccgtttgggccaagtccggatccccactcatccctctgtccgagtaccgggagccggaggtgatgaagaactacggcgtgacctgcgacgccgaggtgctcgacatgctcgacaccgccgcgcgccagctcgagctgaaggtggtggcgaaggtgtactggggcgacgccagggagaagctctgcgacgcggtggaggagcagaagatcgacaccatcgtcatgggcagccgcggcctcggtaccatccagaggattcttctgggaagtgtgaccaactacg

SEQ ID NO: 436498 - DNA, 960 bp, Triticum aestivum
ttctttcgtccgccctcacagtcacggaggcgaaggcgacggtttttttctgccctttttaccatggaggcaaccacccaggagcagcgcaggggtgaggatgtggttcatcctctgaaggttagccttgaggaactgtacaacggaacatcaaagaagctctctcttgcccgcaatgtgctctgctcgaagtgcaatggcaaggggtcaaagtccggggcttcgatgaagtgtgccggctgccaaggtgctggttacaaggtgcagataaggcagctgggaccaggaatgattcagcaaatgcagcagccttgcaacgagtgcaggggaagtggggagaccatcagcgacaaggatcgctgtgggcagtgcaaaggcgagaaggtggtgcacgagaagaaagtcctggaggtggtggtcgagaagggaatgcagcatgggcagaagatcaccttccccggcgaggcggatgaagcgcctgataccgttactggagacataatcttcgtcctccagcagaaggagcaccccaaattcaagcggaagggcgatgacctcttctacgagcacaccctgaccctgaccgaggcactgtggggcttccagtatgtcctggctcatttggacggcaggcagctgctcatcaagtccaaccctggcgaagtcgtcaagcctgattcgttcaaggcgatcaacgatgagggcatgcccatgtaccagaggccgttcatgaagggcaagctgtacatccacttcacggtggatttccccgactcgctgaacctggaccagtgcaaggcgctcgagactgtcctcccgcccaagccggcgtcgcagtacacggacatggagctggacgagtgcgaggagacgatggcctatgacatcgacattgaggaggagatgcggaggcggcaacagcagcaggcacaggaggcctacgacgaggatgaggacatg

SEQ ID NO: 436499 - DNA, 270 bp, Triticum aestivum
ctccagcacccgatcaagcagagcctcccctccccactgtgacgctccaagctcgctaggcttcgagagcgtacagggcgaccgatcgatcgagcgagcgagcgagcggctagcacggcggcgacagggagcgctaagagccgacggttcgccgcagcgtgcggcgttctcagccgctgcatcaaggcggcggaggcgcggctggtggctctccccctcatgcccggagcggaagtgcccgcgctgcaagacgagcacgcggtgggtcct

SEQ ID NO: 436500 - DNA, 395 bp, Triticum aestivum
ttcttaggagatcaaggcgtactcgggcggatcagggatcggcgatggatttcgagctgcggtgcgcgcgggagaagctggagtgggagcagcgggagcggatgcagcgcgctaaggccaaagccgaccgcgagcgccgcgccaaggccgaggccgcgcgccgccgcgacgcgctcgaggcctcaaacagggggcgccgcctcgacgccgcccgggcgcaggaagaggctgaccagaaaatggaagaggtgatgcaactaggaaaggggatctctttttcacacatgtttgaagcactgcgatatgacggtccaggggataagattaagctgccaccatcttctttcaaggatttatccgatcaaggagcgcttgacaaaggtcccatgtacttc

SEQ ID NO: 436501 - DNA, 542 bp, Triticum aestivum
tgcggacgcgtgggtgcccctgaagataagatcgaggaggaggatgtttgccctatctgccttgaagaatatgatgaagataatccccgctctatcaccaaatgcgagcatcatttccatctttgttgcatactcgaatggatggagcgaagcgagacttgcccagtctgtgaccagataactttgatagatgagatgtatgaatagcatgttgaccctggtggatcctctctaggagcccgtgcgtgcctgccgaggaggtttagtactagtccttttctctatggggaagtaaaatcagcaaactactctgctcctaatatggtagtatgatctggtggaggaggtgctactggaatgcatcttgggagaacaaatgggaaataatgaaaggcacgaacccgcaagaaatatgctacctaaaaaaaccatccatccctgtgtttatactagcatttgtgtcaagtttatggtaacaggaggattagcaggctgcatctgcaatatgcacttcatactagtcgaaactctgaatctagctc

SEQ ID NO: 436502 - DNA, 454 bp, Triticum aestivum
acctcggacgcgtgggcaagctcatcgaagagattatgattggggaggacaggctgattcatttctccggggttgcgatggggcaagcatgcaccattgtcctgagaggagcaagtgagcatgtgcttgatgaggctgagaggtccttgcacgacgccctatgtgtgctttctcagacaggaactgacacgcgtgtcatatttggcgggggatggcctgagatggtgatgtccaaggaggtggatgaacttgctcggtggacccctgggaagaaatctcacgcgattgatgccttttcgcgcgccctgcaagccatcccaacaatcattgctgacagtgctgctctggatagtgccgagctgatctcccagctccgagccgagcaccacagggtgaacagcactgttggaatcgacgtcatcagcggcgggctgggagacatgcagaagcgtgg

SEQ ID NO: 436503 - DNA, 329 bp, Triticum aestivum
ttctttctctctcccaacccaaaccctaaccctggaatcgtagcaaccagccggcggcgtttggggcagggttctccaggcggcatgggcaagcagggcggtctccccggtgaccgcaagccgggcgacggtgccgccggcgacaagaaggacaagaagttcgagccccccgccgcaccgtcgcgcgtggggcgcaagcagcggaaacagaggggccccgaggcggcggcgcggctgccccccgtggcgccgctctccaagtgccgcctccgccttctcaagctggaccgcgtcaaggactaccttctcatggaggaggagttcgtcgc

SEQ ID NO: 436504 - DNA, 307 bp, Triticum aestivum
tcagcagcgagtgggtgaggtcccgcattgtcgagggcacgcaggcttctttggcggtcgactgctcgtggtttctggtcccgccctcgtcgcctcaccgccccgtcctcgctggagcggcgtactttgatgtggacgaggtggcggaccggtcggaggacaagagcccctcgccccacatgctgccctcgcccgaccagttcgccgcctggatggaccgccacaacatcacccctgatgaccacgtgctcctctacgatcactccaacggcctcctcactgcgtctgctcgcgtctggcggacctt

SEQ ID NO: 436505 - DNA, 433 bp, Triticum aestivum
tcttcacgcggtcgggcggtggggggcacgctggcctaacctccgaacccggtggggcctctttcccatccgtcctccgctgccgtggctgtaccgcactgccgcgctcgccgttcccacacaccctcactagccactcccattattcccacctgtcccagttgatcttccgatcgcctgcccgctcgccttctctttccctgcgagcagcccaggccggaggcatgtcggccaagaagatcgtggtgaagctggagctccatgacaacaaggacaagcagaaggccatgaaggccgtctccgtgctcgtcggcatcgacgccatatccatggacctggcgtcgcgcaagatgacgcgtgatcggcacggtggacccggtgcccgtggtgagcaagctgcgcaagggttgggcggcctacatcgagtccgtcg

SEQ ID NO: 436506 - DNA, 519 bp, Triticum aestivum
tgtcgttcgcaccaacaggctcgcagctgctagctcaatggcagggacgcgagcgttcttggtcgcgctcgtcgtggctctcacgtttctcttcatggagggcctggcggcagcggtgccggcgactccggagagtacagcgcagcggcggctggaggcgcgaagcctcctcaggcggctcaataagcctcctgtcgcaagcattcagagctcggatggtgatgtcatagactgtgtgcacatatccaaacagcctgcattcgatcatcctctcctcaagaaccatactattcagatgcggccttcttacaacccaagaggcatgcatcatgactccaacatcacagcccatgcaatcactcaaatatggcatcaaaatggcacgtgccctaagaacaccataccaatccgaaggaccaaggaggaggatgtcctgagggccaattctattaggaggtttggcaagaagatgcctaggagcatcccacacctcaatccaaccaatgacactgacacacc

SEQ ID NO: 436507 - DNA, 354 bp, Triticum aestivum
  unsure (1)..(354): unsure at all n locations
tgtttccacgcgtccgcctanctgtccgcacaagctagccacagctcgaccggcacgtttcagctagctaggccaggacaatcaacagcgaagatggcctccctcaccgtctcgcagacgacaccggcggccggcaacgccaacaagcagcgcgagggcgcggagatcatcaccggcgctgaggcgtgctacgagcactccaaggagctcctcaaggggctggggttcccgggcggggtgatgccgctgcgcgggctggaagagtgcgggctggtgcgggagaccgggtacgtgtggatgcggcagggaaagccctacgagcaccactttcgcgccacgggcacccgggtgcgc

SEQ ID NO: 436508 - DNA, 362 bp, Triticum aestivum
ttggaactggctctggccttggctcgcttctcctggagcgcctctctgttgactatggaaagaagtccaagcttgggttcacggtgtacccatctccccaggtctccacctctgttgttgagccatacaacagtgtcctgtccacccactccctccttgagcacactgatgtctctatccttcttgacaatgaggccatctatgacatctgccgccgctcccttgacattgagcgcccaacatacaccaacctcaacaggcttgtttctcaggtcatttcatcgctgacagcttccctgaggtttgatggcgctctgaatgttgatgtcaatgaattccagaccaacttggtgccctacccg

SEQ ID NO: 436509 - DNA, 376 bp, Triticum aestivum
cttttccgtcttcccggtgttccgctcccgcagcagcaccaacaccaacacggttgcttctcccccagcggcggaaggaatctcgagccccctcctcccccggcgccgggcggggcctcgacgggtaaatcgcgacggcgccctagaacccccgagcagccggacgatggaggaccgcggcaggcagctgcggaggcggcggcgcgcggcgggtgggggactacgtgctgctgcgcccgatcgggtcgggggcctactcgcaggtctggctggggaagcacgccgcgcggtgcaccgaggtggccgtcaaggagatcgccatggaccgcctcagcgcgaagctccgagacagcctcctttccgaggtcgacatcct

SEQ ID NO: 436510 - DNA, 441 bp, Triticum aestivum
tccctcgcgtccgaccgtgcgccacgccccgtggcgcacagacctttcgaaaaccgccgcgccaaccgccacccagccccgtccaagaaaccgcacgccaccgcggacgcgaccccccgccggcgccaagatggtgcggcttagcaacacggtgatcgggatcctgaacgcggtgaccttcctgctctcggtgcccatcctggcgggcggcatctggctgcgggcgcgcgccgacggcaccgagtgcgagcgctacctggcggcgccggtgatcgcggtgggggtgttcctcatgctcgtctccatcgcggggctcgtcggcgcctgctgccgcgtcacctgcctcctctggttctacctcgtcgccatgttcctgctcatcgtcgtcctcctcggcctcaccgtcttcgccttcgtcgtcacgcacaagggcaccgggga

SEQ ID NO: 436511 - DNA, 430 bp, Triticum aestivum
cttacgcgtccgcacgggcccacgatgcacgtgcggctcaggttctgcgacgtcgccgccaatccccgcgagtggggcgcgggcctcggcggcgcgcggcaccccggcgtgccgtacaccttcttctcccagcggcccgggtgcagggtcaccctgtaccaggacgcgcacaccccggacgcgttcgcgcccaggatcccgctctccggcggtcggacctaccagcagggccggtgctgggaggacgtgttcgacgccaccagtgacgcgcgccacctgatatacgtcaccggctggtcggtgtacaccgagatcacgctgatacgggacggctcccggccgcgccccggcggcgacgccaccctcggcgagctcctcaagcgcaaggccagcgagggcgtgcgcgtgctcatgctggtctgggatgacc

SEQ ID NO: 436512 - DNA, 405 bp, Triticum aestivum
acgtttgcgtccgggcagtcttggcaaagtatatacgccaacccgctcgatccctgcactccgtatgctacctgtgggccattcacggtctgtactggtaattcacatccttactgtgactgtatggagggattctctcagaagtcaccacagggttgggaccttgatgatcgaacaggagggtgcatcagaaatactccattgcagtgcactagcaagaagaacacgataaattcaacggacaagttccaccccattgctcgtgttacattgacctatgaaccccgaagcatgggcaatgctaccactcagagcgaatgcgcagaaactcgtctcggatcctgctcctgcactgcttacacctataacagtagcgggtgctctatctggcatggggaattgctt

SEQ ID NO: 436513 - DNA, 546 bp, Triticum aestivum
tccttttctaaccgatcagaccgtccctctcgccgctgccgtccccgtctctctctctcttctctctctccggccaaatcaatccacccgccggcggcgagcacggagacagaggggtaggagccgacagccgaggcagtccaccaccgcgccatggcgccgcccccgaccaccagcgcccccgacggcggcctggatcccagggacgtgtgcgtcgtcggcgtcgcccgcacgcccatcggcgccctgctcggctccctctcctccctccccgccaccaggctcggctccgtcgccatccagggcgctctccggcgagccagcgtcgacccggcgctggtgcaggaggtgttcatgggcaacgtcctcagcgccaacctcggccaggcccccgccaggcaggccgccctcggcgccggcctgcccaacaccgtcccctgcaccaccgtcaacaaagtctgctcctcggggatgaaggctgtcatgcttgctgtgcagtcgattcagctggggatcaacgacgtcgtggtcgccggcggcatggag

SEQ ID NO: 436514 - DNA, 448 bp, Triticum aestivum
gttcactccctcgcatcggctttccgccggtcgttcccctcgccgagccgccgcgccgccgcaccggcatccggctcctatccctccctccccgcgcggtgggcccaccgagaggcatgccgcgcggggtgtctcgttcagccgccataccacccccggcggcgctccccgtcgccgcggcacggcagcaggcggcgctccccgtcgccgcggtatggcagcaggcggatccggcgagatcgcagccgctccccttactcctcccggagaaaaagtccgtctccttctcctagatgggacaggagccagtccccgattcctaggaggcgtagaagccctgcatcaccgatgagacatagaagacggaaaagtcggagcagctcaagttctcttgtaaataactccagcccaagtcatggatctgaacagaacagtttaatagaaaaac

SEQ ID NO: 436515 - DNA, 538 bp, Triticum aestivum
tctttaatcaatttgctcaaactcgcccagttcgcggccatagggtcgcgccaatatcccgacacggatgccgccatcaccttcctcgaggggataatcacaaagcttcgtgagaccagggagctgcggatcaatgagcctatccttcacgtcaagatgcagatcgcggcaattcacgctcgacaaaggcaaccaccacgagcgcaagaacctgctggaggaagggaagaccaccctggatggcatgactgatgtggatccaacagtccacgctagcttctactgtatatcgtctcagtaccataagtcgctccaagagtttgctgagttctataagaacgcacttctctatctggcctacacaaccgtagggtccctctcagagtcattcaagctggacttggcatttgacctttcccttgcagccttgctgggggacaacatctacaacttcggggaattgttagctcaccctattatcaatagtcttattgggaccaaggtggagtgggtctatcacatgttacaagcgttcaac

SEQ ID NO: 436516 - DNA, 564 bp, Triticum aestivum
ttcgtttagacaccaagccatcacccagctagagaggagctctcaccgcatagttcagacagcagccacagaccacagtcggtcaggtctcatcccaggcctcagctcaatcagcaggagtaggaacgcccacgagcactggatgcgagacaggggtacatgattcggttcgacggccacttcgagttcgaggacccgtcgaccgccgagccgccgccgcctccgttcgcggccagggcgatctcgtctgagcaggagcatacccccatggtcgccgcgctgctgcacgtcatctcagggtataccacgccggtgccggacttcttcttcccagcgagcaaggaggtgtgcacggcgtgcgggatggatgggtgcctcgggtgcgagttcttcggcgcgggggccaggccggcgatcgcaccgaaggcgacggtgggcgggccgcagaggaggcggagaaacaaaaagacccagtaccgcggcatcaggcagcgaccgtggggcaagtgggcggcggagatccgcgacccgcgccgcgccgtgcgggtgtgactcgggaccttc

SEQ ID NO: 436517 - DNA, 320 bp, Triticum aestivum
tgtaaagggctcatgcctagcgccagccatgggtctgcaatcgaggtgctatccaggatcacgatccccacatgcgattctatccccgggaatcctgagacaaggctgctgatgcgcatcacaggtctgctcccatggctcgggttgcagctcaccaaggacgtatcttccctcgggtcagcttcgcctctacaagaacagaaccagaaggcctactatgtggcatccaatatctcaggatggtgccgtgtgaaatctcttcatgtcctagccgaggtcttcagagcatactcttatggggaaatcatctcactggaaga

SEQ ID NO: 436518 - DNA, 574 bp, Triticum aestivum
tgagcgccgccgcttccccacctctcatctctgggcgaacccgcaaggaactatattcccagtgtgatatccaaaaccagtcaagatggtgaagtttacagcggaggagctccgcggaattatggacaagaaaaataatattcgtaacatgtctgttattgctcatgtcgaccacggcaagtctacgcttacggattcccttgtggcagctgctgggattatcgcccaggaagttgctggggatgttcgcatgactgatacccgtgcagatgaggcagagcgtggtattacaatcaaatccacgggcatctctcttttctatcagatgactcctgaatcactcgagatgtacaagggcgacagggatggtgatgagtacctgatcaaccttattgattcacctggccacgttgacttttcttcggaagtcacagctgctcttcgtatcactgatggtgccttagttgttgttgactgtattgagggtgtctgtgtgcagactgaaactgtgctgcgccaagctcttggtgagaggattaagcctgtccttactgtgaacaagatggacagatgc

SEQ ID NO: 436519 - DNA, 704 bp, Triticum aestivum
  unsure (1)..(704): unsure at all n locations
tgcggcagcaacagcaatagcagcaatacctgcagctgcagcccaccaccaaccgcgccacgccatttaccaccatataatcatcacccgcccccaggcttgtcgggagcgaagccaagccagtcttgtgttggaagaacgcctcaccatccatcagagcagctcggcttgcagatcgagagtgagggagtgagaggcaatggcgacttcgttccaggggacgaccaccaagtgcaacgcctgcgacagacggtgtacctcgtcgacaagctcaccgccgacaaccgggtctaccacaaggcctgcttcaggtgccaccactgcaagggcaccctcaagctcgcgaattacaactccttcgaaggagtgctctactgcaggcctcactttgaccagctcttcaagaggaccggcagcctggacaagagcttcgaaggcactccaaaggttgtcaagccagaaaggaatgttgggaatgagaatgctactaaagtctcgagcgcatttgctggcaccagagagaaatgttttggatgcaccaagacggtctatccaattgagagggttactgtgaacaacaccatgtaccacaagagctgcttcaaatgctgccatggagggtgcaccatcagcccttcgaattacatcgcgcacgagggaaagctcctctgcaagcancaacacacccagctgatcaaagagaa

SEQ ID NO: 436520 - DNA, 789 bp, Triticum aestivum
tgctctcggagttgccttcgatttgcagctaaggcctgctttctttctcccttcccgttcttacgtttcagtccctgtagcttcttttttccttacagtctactccccgttccgttgcaaaaagcccctgagctctgtcacattctagcctcgactccttggtcttgggaggagttcgtcgcagatccgatctagagagcctccccgcaccacccatgtttaccttccccttcctctgacggccgccgtcccccgatgaagctgcgcgtccgctgccgctcccactccttctccgtcgccttcctctactggttctacgacttctcatgaactcctcgcccctcgagaacgccgcatccatccagcctctagttgattagtagatccagcctcgtttcttccacgttcttgccttactccttcccgccatccaagaaaagagaatttccttttctggttcttggatcaagaacccgaccggccatgtcgtcgccgtcgcgccggagctccagccccgagagcaacatcgacggcggcagcggcagcggctccgccggtgacgagcgcaagcgcaagaggatgctgtccaacagggagtcggcgaggcggtcccgcgcgcgcaagcagcagcggatggaggagctcatcgccgaggccagccgcctccaggccgagaacgcgcgcgtggaggcccagatcggcgcctacacgaccgagctgaccaaggtggacggcgagaacgccgtgctccgcgcgcgccacggcgagctcgccgggcggctgcaggcg

SEQ ID NO: 436521 - DNA, 574 bp, Triticum aestivum
aattctagggccgacgggagagagatgcgtgttactaatcagaatgttattacgtttatccaccttgttgccaaccatcgattaaactatcagatccgtggacaaggtaggcattttctaagaggttttcaaaaacttataccaaaggaatggattgatatgttcaatgaacatgaaattcagcttctcatatctggctctttggaaagtttggacattgatgacttgcgcttaaacaccaactattctggaggttatcatccggaccatgagattatcgatatgttgtgggaggttctaaagagcttcagttcagataatcagaaaaagtttctcaagtttgtgactggatgttctcgcgggccactccttggatttgagtaccttgatcctaaattctgcattcagagagctggtgtccccggcttggaggaacatggagaccgtttgcccacctcggctacttgcatgaaccttcttaagctccctccttacagaaccaaggagcagttgcaaaccaaactgttgtatgcaataaactctgaagccggtttcgatctgagctaattgcatt

SEQ ID NO: 436522 - DNA, 505 bp, Triticum aestivum
tttgtctcattccgtcgtctccatgctctaggacaacgagcacgcggagcccacgtctccacccccaccgccggccgcatctcagagaatttcgaggatgtcgactccttcaaggaagaggctgatgagggacttcaagcggctgatgcaggaccctcctgcgggcataagcggggcgccgcaggacaacaacataatgctgtggaatgctgtgatttttggccctgacgatagcccctgggacggaggtacgtttaagctgactctccagtttaatgaagaatatcctaataagccaccaacagttcggtttatttctcggatgtttcaccctaacatttatgctgatggaagcatatgcttagatatcctacagaatcagtggagcccaatatatgatgtagctgctatacgtacatctatccaatcgctgctgtgtgatcctaacccgaattcgcctgctaactcagaagctgcccgcatgttcagtgagaacaagcgagag

SEQ ID NO: 436523 - DNA, 443 bp, Triticum aestivum
ttctttggacaaggcattcaaatgggcagagaagtacaatctaggcgtcatcattgacctacatgcagctcctgggtcgcaaaatccctttgagcacagctcctccaaggatggctcacaggactggggcaccaccgacactaacatcgcacaaactgtgcaagtggtagatttcctcgcatccaggtacgccaaaagcccaagcctcctcgcagttgagccaatgaacgagccgttggcgcccggcgtatccctgtgagagcccataaacgtactaccgcgacgggtacactgccgtcaggaagcactcatcggatgcctacgtgatcatgtccaaccggctgtcatccccggacccaacagagttcctcgggctcgctggcgggttacccggatctgtcattgatgtgcattactacgcgttgttcaacaacatgtttgat

SEQ ID NO: 436524 - DNA, 303 bp, Triticum aestivum
tcgcttatcgcgtgggtccaaacttcaatcgaatctcaaggtgaagatttgccagacaccatgaaagagcaactgaaagcaagcaggattaagatcttggctgccttcctggtcttcgccatggttactcaaggcttcgcgattcgtgtcaaggggacagtgaggaatgacatgacagatgaggctatcagcacgaaaaccaccctcggtgcaggcagcagcacaacggtggacaaccaccatgcaatcccacgggatcagtatagtagccatggaggagaggacggatctggtggcagtggt

SEQ ID NO: 436525 - DNA, 322 bp, Triticum aestivum
gggattgtcccgtggttccagcacgcgctgccggacccctgcctcttcgagcaggcgcacggcgtggcgctgtgggagatgtccgggcacgacgcgccgctggacgcgctgatcaacagcgccatggtctcggacagccgcttcatcgtggacatcgccgtcagggagagcggcgacgttttccgggggataagctccctggtcgacgtcggcggtggcctcggcgcggcggcccaggtcatctcggaggcgttcccgcacctgcagtgcagcgtgctggagctcgagcacgtcgtcagcaaggcgcccgccggcaccagcg

SEQ ID NO: 436526 - DNA, 397 bp, Triticum aestivum
ttttcgcggacgcgtgggcgccgccgctctccaaggtcccaaggctccagatctccctctctcgcagctacctcggtggcctttggagcgcacgagatggcggaagaagccccagcaccagttgttgccccagctgaggcacctacccccggttcttggggaagccaagggactgtgatgactgctctacagcttgtcatgaagaagtcaagcgctcatgatggccttgtgaaggggctccgtgaggctgccaagtccattgagaagcatgctgctcagctttgtgtgctggctgaggattgcgaccagcctgattacgtgaagctcgttaaggcactatgcgctgagcacaatgttcacctggttactgtgccaagtgctaaaactctcggagagt

SEQ ID NO: 436527 - DNA, 409 bp, Triticum aestivum
ccctctcgtccgctccattgctcgccaggccgtccttaagccagctcaggtagcagcaactagagccgacatgatggcggaggcgtgggtggacgtgctgccgccgccggcgccctacttcgccgggcagccgtgctgggccgtgcagcaggagcgtcgcggaggcggcgcctggacgctggaggagaacaaggtgttcgaggaggcgctcgcggcgatcgacctggacgcgccggaccggtgggagatggtcgcgctgatgttgcccaggaagacggtcgccgacgtggtgaaccactaccgggccctcgagaacgacgtcgggttcatcgaggccgggctggtcccgttccctcactacgacagctcgtccccttcgtccgggttcactctggactgggacgggggc

SEQ ID NO: 436528 - DNA, 418 bp, Triticum aestivum
gccggaactcctgaaacaatcaagagtcacacagccctagcaagtctagcagatccagagccgaagatgagcggggtgaagaaggtgacggacgttgcggccaaggccgggaaggcgatcgactgggacggcctggccaagatgctcgtctccgacgaggcccggaaggagttcgccaacctccgccgcaccttcgaggacgtcaaccaccagctccagaccaagttctcccaggaaccaaagccaattgactgggaatactacaaaaagggaatcggatcgaaagttgtggatatgtacaaggaggcttatgatagcattgagatcccaaagtatgttgacactgtcactcctgagtacaagccaaagtttgatgctctgttaatcgaaatgaaggaagcagagaagacatctctga

SEQ ID NO: 436529 - DNA, 366 bp, Triticum aestivum
tgatcgcggggagaagctcttgcccgaatggtacacggaaaaaggcattgagctgatcctgagcacggaaattgtcaaggctgatcttgcctccaagacattgaccagtgcagctggagcaaccttcacctatgagaccttgctcatcgccactggctcctcgaccataaagctcactgactttggcgttcaaggagcggaatcaaacaacatattgtatctaagggaaattgatgacgccgacaagttggtcgcagctatgcaagcaaagaaggatgggaaggccgtcgttgtctgaggtggctacataggacttgagctcagcgcagcactgaaaatcaacaatttcgatgtcactatggtgta

SEQ ID NO: 436530 - DNA, 477 bp, Triticum aestivum
  unsure (1)..(477): unsure at all n locations
atcgtctccacgcgtccgcccacgcgtccgcccacgcgttcgcccacgcgtccgggaaactggccatccgatatatggtttctgtttgccgatcaaatgatgtacgtgttcccttcggctcacaagatgattctggcctgtctccaaacatcacagaaaggtaattgtgttggtaagctgatgatgcgcatgcgaggacgtgcgtattgtacaacttgatgtaccaatacattggtagggtaggacggcctttgccatgtcgggtgcgctcgcttggcaggccacaagacaataaaaagtatatttggtggtgtttgcggggtggagatcgcacgggaacaatctatttgttctattttgcccgggttctccaccctgccatggtgtctctgtccttctcctgtgttgttgattccaccgcatcatctgaagtacaccgcgatcctacatagctaatatgtgaacaagcctgngcgc

SEQ ID NO: 436531 - DNA, 283 bp, Triticum aestivum
actgacacgcgtccgggggagggtactgggcaaaggtctccaccaccatgggcttggtgaccaaggctgcggccaagaagaaatgagatggtgtcaggttctttactgcatctatggtggcggtggcggtatttggtggtggtgatagttgttctagttgttttggaaacttgttaagcttcggttatttgtgtcgagcagtgttggaactgcttattgctctgtcattgtatcgttcggttgtgttggtgaaacttcgtcagttaatgttgctactatatat

SEQ ID NO: 436532 - DNA, 393 bp, Triticum aestivum
tcggtacaatgctggctcaaccgatttgggctgacaaattgcgtgggttcatgaattatagaggtaccgcaaaaattaggttgcaagtcaatgctacgcctttccaggctggtaggcttatcctagcatatattcctcaatatgttcatgagccaaggagttatactatccatttaacttccttaacaacaattactcaattgccccatgtggaaatgtccttgcaagacactgaggcggagctggtcataccatatatagctccaaccactcattatagtgccttgtctggtttctatgattggggtacagtcttttgttatgtttattccccattagcaactgggacggctagcaatactgttcgctatactgcttggatgagctttgatg

SEQ ID NO: 436533 - DNA, 756 bp, Triticum aestivum
tccacgcgtccgctgagctcctcatcagcgtgcgacgaatctctgcccgatcgaatctccagggtgataacagggatggctaccggtagtgatgctggaaagtccgctgaggcagtgttggagtggcctaagcaggacaaaaagaggatgctgcatgctgtttaccgtgtgggagatctcgaccgcacaattaagtgttacacagaatgctttgggatgaagctgctgaggaaaagagatgtccccgaagagaagtacaccaatgcctttcttggatatggacctgaggatactaattttgcacttgagctgacttacaattatggtgttgacaagtacgacattggagcgggctttggacattttgccatcgcaaatgaggatgtgtacaagctgtctgagacaattaaatcatctgattgttgtaagatcactcgtgaacctggtcctgtcaagggagggtccactgtgattgcctttgcacaagacccagatggttacatgtttgagcttatccagaggggtccgacgcctgagcctctctgtcaagttatgcttcgtgttggtgaccttgatcgggctatcatgttctacgagaaggcccttgggatgaagcttctgaggaagaaggatgtgcctcagtataagtacactattgccatgatgggctatgctgaggaggacaagaccactgttctggagttgacatacaactatggtgtcacggaatataacaagggcaatgcatatgctcag

SEQ ID NO: 436534 - DNA, 489 bp, Triticum aestivum
gggcctggcggccggcgcggcgcgggcgtccaacgaggagggggacgcgctgtacgcgctgcggatgcggctgtcggaccccaacggcgtgctccagagctgggatcccaccctcgtcaacccctgcacctggttccacgtcacctgcgacaccgccagccgcgtcgtccgcctggatttaggcaactccaacgtctccggctccatcggccccgagctcagccgccttgtgaatcttcagtacctggagctgtacaggaacaacctcaacggcgagatcccaaaagagttgggcaagctgaagaatttgatcagcttggatctgtatgccaataagctcaccggaagaatcctcaagtccctttccaagctcagctcactgagattcatgcgtttgaacaacaacaaacttgctggatcaattccacgggagctggccaaactcttcaacctgaaagtcattgatttgtctaacaatgacttatgtgg

SEQ ID NO: 436535 - DNA, 481 bp, Triticum aestivum
tcggtatcggacgaggggcgcgtggatggcttcagcggcggcgaccgttctcagggcatgcgagagctagcgcaggcgatacggcgccttggtgaggcctacgagcgcgtggagacagcgaagctggagcaggccgccgagatggagcgccagcgtctggacttcgcacgggagcttgagtcgcaacgcgtgcagttcttcctcaatacgcagaaggagctctcacagggcaagagccacatctctcccgctgcggctgcctcccactcccaggtaggtgccgccactgttggtggctcatctaggaggatggcgtccgtaccagattccacatcgagaagaatggcaccgtttcctgatgcccggacgagcagcaatcaccatgaccggtaccgtgccagcgacggtagcagacaccatcaccgccctgccctgcgtccgcattatcagtaccatgagaacaatatggcagactctgcag

SEQ ID NO: 436536 - DNA, 602 bp, Triticum aestivum
cgggccgacaaatggacacagccacagaaattgctgcttcaaagggcgatgtccgcttggcaatcctgctaagccaggcaggtggatcgatgttaaatcgctcggatgttgctcagcagctggatctgtggaaaataaatggtctggacttcgattatattgaggaagacaggttaaagatatacgagttgcttgctggtaacatacaaggcgctttacttgattcaccaatcgactggaaaaggtaccttggtttaatcatgtggtatcagttgtcaccagatacatcacttgatattatcattcggtgttatcaccaactacttggtgagggcaaagttccaaatcctgttcctgtatacatcgatgaaggacctctcgaggaagcacttcagtggtccccaggtgaccggtttgacatatctttttatttaatgcttcttcatgcaaaccaagatgagaagtttgggcttctaaagactatgttcagtgcattctcgtcatcgtatgatcccatggactaccatatgatctggcatcaacgatctattctcgaagctattggtgctttcagtacaaatgatcttcatgtactggatttg

SEQ ID NO: 436537 - DNA, 262 bp, Triticum aestivum
tcggttaagttcaacaagctgctcctcccaggcccatttgacaaggcctcggtctgtgctcttgatgcaacttgatggatcccatgactatgttgattgcttcatatctgatgccggcagtatttacaaaaccaagattgatggtgcaaaaagtgctgctatagagcttacagataaggatgaattgattgtcattcgttcggatgaatcttctggattagatgttcttgataacgaactcgccaacttggcaacctggttg

SEQ ID NO: 436538 - DNA, 369 bp, Triticum aestivum
ttgtctggccagcttctctcgtctctggttccctgtaacctacaccatttctttctttttcaagcgtgaggcatcacagctccttacttgctgcccttcataagcagctgatcggccacttatcagcaacaaagatgaagattggaaagactacagagatcctgaagaaagcggcggcgatgtgcaagagcaagaccaccaggctcctcatcctcgcctcgctccagcgtcgcaggatggccgctgccgccgtggtctctcacaagatccacacgcgcattgtggctgaccgaaatagagtggactgccacaagcctctcgcgctgcgaaccatcgagaagagaccggtgatcgtccatgggggtgact

SEQ ID NO: 436539 - DNA, 410 bp, Triticum aestivum
tttgtgtcaacatgcagattgacccggcgaaatacaagagcatctcatctggatttggtgttctgttaaaggagcaaggagctaggggattcttcaggggatgggtgcctaccttgcttggttacagtgctcagggggcttgcaagtttgggttctacgagttctttaagaagacctactcagatatggctgggcctgagaatgctgcgaagtacaagaccctgatttaccttgcagggtcagcttctgctgaggtaattgctgatatcgctctgtgcccctttgaagctgtcaaggtccgtgtgcagacacagcctggatttgctcgtgggttgagtgatgggcttcccaagttcatcaaagctgagggtgctgctgggctctacaagggcattgttccgctctggggt

SEQ ID NO: 436540 - DNA, 400 bp, Triticum aestivum
cacacattccgtggaggattttggaattactttagtatgggtatggatgctcaagtgtcttatgggttccactctgaaaggaagaaaaatccagagaagtttaaaaaccagctaacgaatcagggtacatatgctaaacttggacttaaacaaggatggtttgctccttctctaacccattcttcttcaaggaacatttctcaacttgcaaaggtgaagatcatgaaaagacctggtgccaaatgggaagagcttaaaatccccagcagtattcgatcaattatctgtctcaatttgccaagtttctcgggaggattcaatccctggggaactcctggcacaaggaagaaacaagacagagacctgactgcgccttatgttgatgatggactcattgagg

SEQ ID NO: 436541 - DNA, 402 bp, Triticum aestivum
ttgccggcccaagaagcgtgggcgcgagcgtaagcgctgacgaggagttctcccccaatccctcgttcccctccgccctacacgttctcgcccacgtcgccgccgccagctcctccccctttcgccggagctcctttctccggcagtagagatggtgaaaggcgcagtccgctatgagcctggaccggcgtttcaggagagtggagagcagggcaagcttgagataccagcatctggctccacagaattttggctaatacagcggcctcgaaaccatgtaaatgcttctgattttaatggtcaagaagtttctcttaataagcatcatgacgatggaaacttgggaaatttggagagttcttcggggaaatcatatgaactcgttagctttgctgctcaaca

SEQ ID NO: 436542 - DNA, 540 bp, Triticum aestivum
tcgggagagggaaggcgccgcggacgatgactcgaccggcaatggagtccggcgcctgctcgccgctcctgctcggcctcgtgctgctctcgctcttctcagtgggcacagcgtcggcgcagcaaaagtgcggcatcaactacgggcagatcgccaacaacctgccggaccccacgcaggtggcgagcctgctccggtccatgaacgtgaaccgggtgaagctctacgacgcggaccccaaggtgctgacggcgttcgccaacacgggcgtggagttcatcatctccgtgggcaacgagaacctgcagaccatggccaccagccccggcgcggcgcggcagtgggtcgcgcagcacgtgcagcccttcatcccggccacacgcatcaccggcatcatcgtcggcaacgaggtgctgggcaacaacgacaccaccatggcggccagcctcgtgccggccatgcaggcggtctacgacgcgctcgccgcgctcgggctcagcggccaggtgacggtctcgtcggcgcactcggtgaacgtgc

SEQ ID NO: 436543 - DNA, 343 bp, Triticum aestivum
tccacgcgtccgcccacgcgtccgcccacgcgtccgcgcacttcctcccctgctagattcgtccctccaccgaccggcaaggcctctctcctgcacttccctcgcccaaggccgcaccagagaaggcggaaaacatcacagtttgcgaaatcgtggagcggtagagagagacggccgagacggtgttcgctccgtgcttggaagggatgaagcatgtcaggtcggacagcggggtcatgctcgccaagcccttccttgatgtctgcaagcaaatcttgcctgtcctggataaatttggtgctgctatggcaattgtgaagagtgatattggaggtaatatcac

SEQ ID NO: 436544 - DNA, 573 bp, Triticum aestivum
tttcactgccacttcaccgctccccccctttccccactcttctccaacccccggacggaggtgctgccggagcccggaagtgatcggaagcctgcagtatgggcaatctgtgctgctgtgttcaagtcgaccagtctaccgtggccatcagggagcagtttgggaagtttgacagtgtgcttgagccaggatgccactgcctgccttggatctttgggaaacgtgtagttggccatctcacactcaggttgcagcagctggatgtgcgctgtgaaactaagacaaaggacaatgtgttcgtcactgttgttgcatcgattcagtaccgacctctggctggcaaagaaagtgacgcatactacatactgaccaacacatgatcccagattcaagcctatgtctttgatgtgatcagggcaagtgttccaaagctcaacctggatgatgctttcgtgcagaagaacgatatagcaaaggctgtggaggatgaacttgaaaaagctatgtcggcatatggctttgagatcgtgcagaccctcattgtcgacatcgaaccagatgcgcatgtcaagc

SEQ ID NO: 436545 - DNA, 394 bp, Triticum aestivum
  unsure (1)..(394): unsure at all n locations
gcctcaaatgtgcagtggtcggtgtcccaaagaccatcgataatgatattgcggtgattgatanatcctttggatttgacactgctgtggaggaggctcagagagctatcaacgctgctcatgttaaacctgaaagtgcaaaaaatggcattgggttgtgaagcaaaggggccgcaacagtgggttcatcgcaatgtatgctactctagctagtcgtgacgtggattgttgcttaatcccagagtctccattctaccttgaagggaaaggaggcctccttgagttcgtcgagagacggctcaaggacagtggtcatatggtcattgcggtggccgagggtgctggccaagatctcatcgcccaaagcatgaactttgtggacactcaggatgct

SEQ ID NO: 436546 - DNA, 613 bp, Triticum aestivum
tgttgatgcagcttttgatgttctgttagggaagacaacaatgttccccccaaatatcttgttagaccacaatgttcctgtttacgtggctgtgcagaagcctggagagtttgttataacattccctcgttcgtaccattcaggtttcagccacggcttcaattgtggagaggctgtcaattttgctattggcgactggtttcctctgggctctctggctagcaaacgctacgcacttctgaacagaacaccctttcttgcacacgaggagctactttgccgttctgcaatgcttctgtcccacaaactgagtgatccagaaacaattaattctgaacatccatacactcaatattgtgtgaagtcttcctttgcgaggttgatgcgactgcagcggcgcacacgcagcttactcgctaaaatgggttctcagatatactacaagccaaaaatgtattcgaacctatcctgtagcatgtgccggcgtgattgctatgttacacatgtgtcatgcggatgcacctttgatcctatctgccttcatcatgaacaagaactgcggagctgctcttgtaaatctgaccggattgtctacgtcagagaggacatactg

SEQ ID NO: 436547 - DNA, 801 bp, Triticum aestivum
tcgtgctccaatggcgttctcctccctcgccaccccttcctcctcctccccctcctcgtctttcaccctccccaccaagccctccccgggcgcaggctccctctccttctccagggcgtccacggggaagttcaggacggcggcggtgagggcggaggcggtggacacgtccatcagcccgcgggtgagcgcgctgcggccgtccaagaccatggccatcaccgacatggccagcgcgctgcggcaggccggggtgcccgtcatcggactcgccgctggggagcccgacttcgacacgccggcggtgatcgccgaggctgggataaatgcaatcagggatgggtctactaggtacacacctaatgcagggactatggagctgaggaaagctatctgcaacaagcttcaggaggagaatggtctaacctacagcccagatcaggtgctagtgagcaatggagctaagcagtgcattacacaagctgttcttgctgtttgctcacctggtgatgaggttttgataccagcaccattttgggtcagctatcctgaaatggctaggttggctggtgcaacaccagtgatcctcccgacaagcatatcagacaatttcctgctgaagccagagtcacttgcctcagtgatcactgagaaatcaaggctcttgattctatgctctccatctaatccaacaggctctgtgtatcccaaggagctgcttgaggagattgctgctatagtcaagaagtatcctaggctcctggttctatctgatgagatctatgagcatattatctatca

SEQ ID NO: 436548 - DNA, 310 bp, Triticum aestivum
tggacgcgtgggtttcctctcccctcctctcctttcgcatccctccttccatccatccccatcgcatcgcaaccgccgcatcggcgagtgagccgcgccagcacggtgctccgagcctgcctgcctgggcgagcctcggcgcgggcggtggccgggttagagagggggaggggacgaggagatcgagggagagagggaggcgacgcgatggcgcgggagcggagggagataaagcggatagagagcgcggcggcgcggcaggtcaccttctccaagcgccgtcggggcctcttcaagaaggccgaggagc

SEQ ID NO: 436549 - DNA, 900 bp, Triticum aestivum
ttcacgcgtccggtccttgtttatgcttgggcagaagacgtcgaactgatgggtccgacaactatcggttccctacagtctgacgagtatgctgttgatcagggagtgatctctggtccagcaacagctatcgccaatgtggcctcaatggtttcaaatgtccctgtggtgggggacttcgcacgagctactgaaatgggagcccgagcgataggaggtatagccaaactttttggttattccaatccaccaatgattgacgacgtccaacctatgcagaataaggcattccatgcatttgcaaatgttgagacgcgcgttcccatagacaaactttgtctggatcccaaaaatgaagtttccatttcgcctgctattgcgggcgttgatgaggaagaccctttggtgatttcagatctctgttgtcgagagagctatatcaacgctttcaattggacaggagcacaggctgtcgataccctcctttggagtgcagtggtaaatccacattacgcttttctatctgggggttttcgaactatgccacccgtcacgtatttgacacccaacttccgtttttggaggggatcaatcgtatacaaattccgattcatcaaaacggcctttcataaaggtcgtgttttgatttcgcacgatcccaacggtgatattacgggtacatcagataccgagaccacaactttttcgcgagtagtgcatttggagcaggaaactgaactagaatttgcagtcccctacatggcaacatcgcctatgttggagattgttgattttgcctcttttccccttaccaattccacctcagcagcacctgcttacgtgtacaattcacgttggtataatggtactattaccatgcgcattcagaccaatctcaca

SEQ ID NO: 436550 - DNA, 361 bp, Triticum aestivum
ttgctacgcgtccgtgagctcgccacactccccccagcttagccgagctacctcactcaagagaggaagcatggatccctgcaagttccggccgtcgagctgcttcgacaccaagacgacgaccaccaacgccggccagccggtgtggaacgacaacgaggcgctcaccgtcggcccgcgcggccccatcctgctggaggactaccacctgctggagaagatcgcccacttcgcgcgcgagcgcatgccggagcgcgtcgtccacgccaggggcgccttcggcaagggcttcttcgagtgcacccacgacgtcaccggcctcacctgcgccgacttactccgcgcgcccggtgcgcgcacc

SEQ ID NO: 436551 - DNA, 431 bp, Triticum aestivum
tccacgcgtccgtcttgtatcaaaggtcccaactctcatcttgggaatggatgtgtcccatggatcccctggacagtctgatataccgtccattgcagcagttgttggttctcgggaatggcctcttgtctcgaaatatagggcttcagtgcgctcgcagtcaccaaagctcgaaatgatagattcattgttcaagccacaaggaactgatgatgatggccttgttcgggagtgtctcattgacttctacaccagttctggaaaaaggaaaccagatcagatcatcatcttcagggatggtgttagtgagagccagtttaatcaggtgctgaacattgaattggatcaaataattgaggcctgcaagttcttggatgaaaattggaaccccaagttcacgctgattgttgcccaaaaaaatcacaaaacaa

SEQ ID NO: 436552 - DNA, 422 bp, Triticum aestivum
ttcctcgcgtccgcccacgcgtccgcccgcgcggccggcgttcaggaagcaggcgagcaagttcaaggagcaggtcgccaagcagcagcaggctgtgataaaacaattcagcactactggttacgagcgttcagattctgttgtcattgatgaagttgaattacagcaacatcaaaggcttgagaaattgtacagttctactcgttctggaagggatttccaaaaggacatagttcgagcagctgaaggcttggtgtctattggaagcaagcatattgaagtgggaacaaaattttctgaggattgctatagatatggaggtgaaaataatgctgatggtgaagctcttacaaaagccgcatcactgtatggaggtgctttgagaaatgttgaaaaagagtatgaagatttcaatagaactt

SEQ ID NO: 436553 - DNA, 529 bp, Triticum aestivum
acggcgggaggttcatccagtacaacatcttcggcaacgtcttcgaggtcaccgccaagtacaagccccccatcctccccatcggcaagggcgcctacggcatcgtctgctccgcgctcaactccgagacgggggagcaggtggccatcaagaagatcgccaacgccttcgacaacaagatcgacgccaagcgcacgctgcgggagatcaagctgctccgccacatggaccacgagaatattgttgcaataagggatattatacctcctgcacaaaggactgcattcaatgatgtctatattgcatatgaattgatggacaccgacctgcatcaaattattcgctcaaatcaagctttatcggaggagcactgccagtatttcctttatcagatccttcgtggcttgaagtacatacattcagcaaatgttctccaccgagacttgaagcctagcaatcttcttttgaatgcaaactgtgacctaaaaatttgcgattttgggcttgctcgtaccaactcagaaactga

SEQ ID NO: 436554 - DNA, 611 bp, Triticum aestivum
ttcgttcgtccacgcgtacgccacactctaggatctgtttctgactctgttccgattcgacccgatcctgctggccgccgtcgtcgccgtcgccgtcgcgctgcagctgggctcgtccgaccacgcgtctccgaggatggaccagccgccggatggcttcgccgccggaggtcttttcgttcagcacattgatgggcaaaaagcttctccccctgctgtaattgtgattggcggagggatttcaggcattgcatctgctcgtgccttgtcaaatgcttcatttaaggtcacattgctagagtcgcgggagcgacttggtggccgtgtgcatactgactattcttttggctgcccaattgacatgggagcatcttggttgcatggtgtttgcaatgagaattctttggcgccattgattaggcttcttgggcttagattatatcgcaccagtggtgataactctgtgctttatgaccatgatttggagagctacgcgctctttgataaagatggtcgtcaaattccccaggagatagtaaccaaagttggggaaatatttgagcagattctgaaggagacggtgaaaggtagagatgaatatgcaaacgaca

SEQ ID NO: 436555 - DNA, 587 bp, Triticum aestivum
ttgtgttcatgacattactgaggaacccattttacctggccgtcatgtttgtagttttcctagtcgggaaagccatgtgggtacaactagacattgccaatgaattccgaaatggatttcttccagctctcctttcgctgtcgacaaaatttgttccgacaattatgaacactctgaagagactagctgatgagggggcagcgcccgcagccccagagaggcagagagagacggagctccaaccaaggaataatagttcaaacagcaacgtgacatcagcaggttcctccagcttaacctcttcagagaatggacctgaatattcaagcccggtagcacaatgatgagtggatccctagcttttagctgaaagctctactagctgtagctgcaacggtttgagcctaggagattgaagtgccttgcggtttttgtacgctcgcttgcccttcccaacctgatatatgaaaattatgtggaagagtccacagctgttatataaggaattttggggctgggaatcgtttgtaagaaacattgtagaacaacttccgtttcacttttatttttgtaatatcttatatgat

SEQ ID NO: 436556 - DNA, 562 bp, Triticum aestivum
  unsure (1)..(562): unsure at all n locations
ttttangtggcatgcacccatgattgacaaccctgcctacaagggaatctggaagccccaagaaatccccaaccctgaatactttgagcttgacaagcctgactttgatccgattgccgctattggaattgagatctggacaatgcaggatggcatcctttttgacaacattcttatcgccgatgatgagaaggtagccaccgccatcttggagaagacctggaagcccaagtttgatgttgagaaggaaaagcagaaggctgaggaggctgcagcagccgattcagagggcctttctgagttccagaaagaagatcttcagcgtttttgtacaagatccccgacattcaattcttggaaccttacaggatcaagatcattgatattattgagaaaggaagagaagcagcccaacattacaatttcgatcttggcctcagttgctgtcatccttgttactgtgctcttcagaaccattttcggtggcaagaagccattggcacctgtgaagcccgttgccgaggtcaagaagcccaatgccacggaagctgatgccgctgga

SEQ ID NO: 436557 - DNA, 357 bp, Triticum aestivum
ttatttacaaagaaaatggcctctacggaaaccactggcagcagcaagaagctgcgcgtgctcctcatccccttcttcgcctccagccacatcggacccttcaccgagctcgccgttagccttgcgacggccagaccacaggccgtagaggccaccgtcgcggtcacgccggcgaacgcgccgttcgtccggtcgttgctccagccgcacgagaacggcagtggcacaccggcgcaggtggcgacgtacccgttcccggccgtggacggcctccccaggggcgtcgagaacctcggtgcggcagcgcacgccgacgcatggcgcatcgacgtggctgcgctgagcgattcattgatg

SEQ ID NO: 436558 - DNA, 503 bp, Triticum aestivum
gtttgagacccgaggcggagatggatctgctggagaggagcgcagccactattaaggcggagcagcgggggggcgcccggcgcaaggaagccgagaggaaggagcaggagcaggagcaggagcaggagacccagcagcaaggccaaggactcaccggcagacccccgctcgccaacggcaggtctggaatgttgccaatgtcgagccctccagcaaatccgggacagcttaccattttttatggtgggtcagtatgtgtgtatgactcagtgccaccagagaaggctcaagcaatcatgctcattgcagcagcagcagctgcggcctcaaaaagcaatggcaccgctgctgttaagcctccagcgatgtctgcgaccaatgctatccaagccatgcttacgcggtcgctctcactccagagcacttctgtagcaaatggacaacctcaggctgtcgcggattcgggctcgatttgcaagcttcaggctgatcttcccatcccc

SEQ ID NO: 436559 - DNA, 185 bp, Triticum aestivum
ctactgcacccggaagggctggcccaacagtgtgggttttggcacctaccagagagcccgcatcacagattttggacgaagctgtggcattgggcggatcatcaagaattgcttctacgtgcctttatggcggtgctcctaaagggccccagttaagagatttagaaagaggggttgatgttgtt

SEQ ID NO: 436560 - DNA, 446 bp, Triticum aestivum
ttcgctcgagaagatcggattcgatttggatttctagggtttgctcatcctcatccccatcccctcctccgtcgccggccgtcgtcttccccacctccgatcaaatttgggatttttcatcgatttccataagatatgatccccaactccttcgacaccttcctctgatctgtccccccaggaaatcccacatccagattccacatactatggtgcgccgccgcccgtcttcctcctcctcctcctcgtcgccgatgctccacaagaacctccgcgcgctcggccccggcctcaatccgtttgcccccttcggcatgggcaactactcccgctaatcccccctcccctcccctctcctctgctctgatttgcttttctccccggatccgatttgcttctccccccttctcgttcttgatttgattggattggattgctcctctctc

SEQ ID NO: 436561 - DNA, 439 bp, Triticum aestivum
tcgtcgcccacgcgtccgctctcccctgctccctcccctgctcccccactggttttgtgtcctgagccatggctgccaagctgactcgcctccacagcctcagggagcgcctgggtgccaccttctcctcccaccccaatgagctcattgcactcttctccaggtatgttcaccagggcaaaggcatgctccagcgccaccagctgctcgctgagtttgacgaactgttcgaatccgacaaggagaagtatgcgccctttgaagacatcctccgtgctgctcaggaagcaattgtgctgcccccatgggttgcacttgccatcaggcccaggcctggtgtctgggactacattcgggtgaatgttagtgaactcgctgttgaagagctgactgtttctgagtacttggcattcaaggaacagcttgttgatgagcatgc

SEQ ID NO: 436562 - DNA, 374 bp, Triticum aestivum
gcgtccgctaatttctttcctaccagaaaaaaaacacagtctcgatctgcatcggcgccattccggcgacgccatgcgcgccgatgaggagccccatgccgtgtgcgtgccgtacccggcgcaggggcacgccaccccgatgatgaagctggccaaggtcctccactccaggggcttccacgtcaccttcgtctacaccgagcacaaccaccggcgcctcgtccgttcccgcggcccaggtgctgtcgctggcctcccggactttcgcttcgccaccatccccgacggcctgccgtcgtacgaccccgatgccacccaggaccaggcgtccatttgccactccaccacgaccacctgccttccccacctgaaga

SEQ ID NO: 436563 - DNA, 266 bp, Triticum aestivum
ttgtagtactagctagcactgagcaatggcttccaatgcgagcttgttggcggcgatcatggcgtgcacactcctcggaggccacacgtgccacggcgcacgccacttggccgacaccaccccggcggctgccccacccgctgcggctgctgtccctggcctcccggccctgcctaccatgccgaccctgccaccgatgccggctgtgccaacggttccggccgtgacagtgccagcaatgccgtcggtgcccacggggatcgtgc

SEQ ID NO: 436564 - DNA, 355 bp, Triticum aestivum
ttgagtcccaagtttccaacttccaacagaacggagatggcgagcagacagttgccggcaatgctgctgctcaccgcggtgacaatggccggactggccgccggagcgcgcgcgggcggcatcgcgatctactggggccagaacggcaacgagggcacgctggcgcaggcgtgcgcgacgggaaactacaagttcgtcaacgtggccttcctcttcaccttcggcaagggccagaagccgctgctgaacctggccgggcactgcgacccggcgaccagcggctcgtgcaccttcgtgggcgccgacgtcaagtcctgccagagccgcggcatcaaggtcctgctctccatcggcg

SEQ ID NO: 436565 - DNA, 432 bp, Triticum aestivum
ttgttctcaacaactggctatcttggagctgggtatcaagaagctatggaatcgtcattctcacccattactccaagtgaaacacaaagtccagctcatggaaatcggcaacaaccatatatggaatctccagttgccttgagaccacattttccagctgataggaaatgggctcttgggcttcagtctcgagcacatccaagagaagttatgactgaagtgctgaaggctctgcaagaactgaatgtatactggaaaaaaattggacactataacatgaaatgtagatggagtcctcctggctttcccggtcaggagaatatgaatcataccaattataacttcagtgcagagcctattgaaaccgacgacctgggtgacatgttaaatttaattaagttcgaacttcagctttacaaaacaagagatgag

SEQ ID NO: 436566 - DNA, 327 bp, Triticum aestivum
tgctccggggccctgttccagtcgcaggcgccctgcctctgcgccgccgtgtccgccgtgcccgcccagctcgggtccgtggtcggcggccggctccccaccgcgtgcaacctgccccccaacgcctgctctgccgtgacagggacctcgggctctgctccggccggtggcgcagcggcgccgtcgtcgtcggggacgcctactgatgctgctgcggctgcgccggcgaccggtcccgctgatgcgaacccggctggcacgccttccggtggtggggtgaagtcggttccggggacggttgattcggccgccgagtgcaaggggacc

SEQ ID NO: 436567 - DNA, 517 bp, Triticum aestivum
ttttcgcccacgcgtccgcggacgcgtggcggagctgcgggcgccggagatcacgctctgcgccaacagctgcggcttccccggcagttgaccgcgctccggcgacggaggcgaagccggcgaggacgtcggtgaaccggtgctccagctgccggaagcgcgtggggctgacggggtcccggtgccggtgcggcgacatgttctgcggcgagcaccggtactcggaccggcacgggtgcagctacgactacaaggccgccgccagggacgccatcgccagggacaaccccgtcgtgcgcgccgccaagatcgtcaggttctgaagctgaaaccaaggggaaagaagaattcagaattccagccgaggcaaagcaaagaatcatctcatcgaggcagtgggccgccgtgcgagccgctagtattatgctgttgttctccggagtgtttccctttttaattaaaaaaatctttatttattggaaggaaaaaaatgggaagtaaagatgtggatgaaaaa

SEQ ID NO: 436568 - DNA, 355 bp, Triticum aestivum
tttttttcggacgcgtgggcggacgcgtgggaaagcatgcttagaacacaaattaaagtccatagctcacgtacccgtgtaagaaactaagaactaatgcaggtacgatggtaagtagtaggaaggttgcaaagatgaagagtattagaagattggaatttggaagatggagctcatactgattgaagccacgcagctggctcctccttgtcgttgatccgattacacacataaacgtttgcagaactaatgctaggagcactaagtttgacaaggtgtaaagctatacaccccatttgagatttacagattgtttcctgaggttctgtcttcaaatacgttctgatattttttt

SEQ ID NO: 436569 - DNA, 412 bp, Triticum aestivum
ttgttttcagaagtggcgttaactagctatcttgcagctctgtctatagaagagagcggtatttcagaaggattagctgcaattaaagcagaccgagcagcagagagcatatctcacagaagtgcccaacttcatgggggcacagaagatgaactctcactgaaagactctctggcggccgtgagaaatgcacctcaagcagcggctcggattcagaatgccttccgtgccttttctttcaggaggagacaacacatggacgctcgacttaaggatgaatatgggatgacacacgacgatatagatgaacttgcagctgcatcaaggttatactaccaacatcatgtttcgaaacggcagttttgtgataaagcagctgtttcaattcagaagaaatacagaggttggaaag

SEQ ID NO: 436570 - DNA, 534 bp, Triticum aestivum
gtcgatggggaaccctaggttgcgtcgtatgagtgcgggaggggagaagaggagcggggatggcgcaggcggtggaggagtggtaccggcagatgcccatcatcacgcgctcctacctcaccgccgccgtcctcaccaccgtcggctgcaccctcgagatcatctcgccctaccacctctacctcaaccccaagctggtggtgcagcactacgagatctggcgcctcgtcaccaacttcctctacttccgcaagatggatttggatttcctgttccacatgttttttcttgcgcgctactgcaaacttctcgaggagaactcattcaggggaagaacggctgactttttctacatgctcttgtttggtgctactgtcctgactagcatcgttctgattggtgggacaataccttacatttctgagacattcgccaggattcttttcctcaacaattcattgacgtttatgatggtttatgtctggagcaagcacaatcccttcattcacatgagcttcttgggtctgttcacct

SEQ ID NO: 436571 - DNA, 464 bp, Triticum aestivum
tttctcgatcctacatttcgggaagagcttcttaattttacacaaagggggaggattctgcagctctcgaacttcaaggatgactccagtccaattgcctgggactgttctgcgtgggttcgcacatatggtcagtttttggaggaaagactggaatgcttcaggatcctgaaatatgatgttgaggctgagcgtttatccaaacaaggccaaggtcctgaaaagggacacagtagaaccagagacctagattcccaggacctgttagagcagttgccagctttgcagcagttactgtatcggcttgttggatgtcggccagaaggagctgcaaataacaactacttggtgcaatatgctctagctttggtgctaaaagagagtttcaaaatttattgtgcgataaatgatggaattattaaccttgtcgataagttttttgagatggcaagacatgaagcact

SEQ ID NO: 436572 - DNA, 484 bp, Triticum aestivum
cccatacgtggtcagggtgcagctcgcgctccacctcaagggcgtgagctacgagtacgtcgaggaggacctcgccagcaagagcgagctcttcctccgctccaacccggtgcacaagacagtcccgatcctcatccacaacggcaagcccgtctgcgagtcccaggtcatcctccagtacatcgacgaggccttcgccggcgtcggcccgcccctcctccccgccgacccctacgagcgcgccgtcgcgcgcttctgggccgcctacgtcgaagacaagctgctggcgccgtgggggaaggtgttcagggtgacgaccgacgaggagagggcggagtggacgaggcagacggtggcggccgtgggtcatctggaggaaggcctgagggagtgctccaaggggaagggcttcttcggcggcgactgtgtcgggtacgtcgacgtcctgctcggtagcatggtgccgtgggtgcgcgccaccgag

SEQ ID NO: 436573 - DNA, 420 bp, Triticum aestivum
ttttctctcctgctgcccgttgctcgccgccgtccccctccgcctccgcgcacccaggatagatggcgtcccacattgtcggatacccgcgcatgggccccaagagggagctcaagtttgccctggagtctttctgggatggcacgagcagcgccgaggatttggagaaggttgccaccgacctcagggccagcatctggaagcagatggctgatgctgggatcaagtacatccccagcaacaccttctcctactatgatcaggttcttgacaccaccgccatgctcggtgccgtcccagaccgttactcatggaccggcggggtgatcaatttgagcacctacttctcgatggctaggggcaacgccaccgtccctgctatggagatgaccaagtggttcgacaccaactaccacttta

SEQ ID NO: 436574 - DNA, 367 bp, Triticum aestivum
tcccacgcgtccgaattaaaattgatcactgagctgataggatcaccagatgattcgagcctaggatttcttcggagtgataatgcacgaagatacatgaagcaattaccacagtacccaaggcaggacttccgcctgcgcttccgcaacatgtctgatggtgcagctgatctattagagagaatgctggtgtttgacccaagcagacgcatcactgctgatgaggctctgcatcacccatacttggcttctcttcatgacatcaacgaagaacccacttgcccggcacctttcagctttgattttgagcaaccatcttttacagaagaacatatgaaagagctcatctggagggaaactttagcat

SEQ ID NO: 436575 - DNA, 376 bp, Triticum aestivum
taccgcccacacgtgcgcccacgcgtccgacacaattcaacactagctagctgcacaggacacgagccgatccatccatccagaaaaaaaagagtgcccgtcgaaaatgccggtgagcaggatcgccatcggcgccccgggggagctgtcccacccggacaccttccgcgccggcgtcgccgagttcatctccatgctcatcttcgtcttcgccggctcaggctccggcatggccttcggcaagctgactgacggcggcgcgacgactccggcggggctgatcgcggcggcgctggcgcacgcgttcgcgctcttcgtggccgtctccgtgggcgccaacatctcgggcgggcacgtgaacccggccgtcacattc

SEQ ID NO: 436576 - DNA, 328 bp, Triticum aestivum
ttcgttcgcggacgcgtgggcggacgcgtgggcaagcctctgttcgcatcccacccacgaccggccggcaatccatggcgctgcgcaacctggccaagaagttgcggatccccacctctgctgctgcccggctcccgtccgcccccaaccctgctgttttccggttcccatcggaccctggcgcttggcgggcgtccgtttctcggctcgagagcgctagagactggtttgagggtcagcgagcacgttatgatgatgtgacaacagagttaaaaaacttcaggcgtgaggttgtgtggactgaaagggcggcttacctgtttgattt

SEQ ID NO: 436577 - DNA, 366 bp, Triticum aestivum
ctctgctatggggtaatctggaaaggggacgagctgattcaatgggtccccgagacgctcgagtcgctgcgaaaattgggcaagaaatcagttttttgtaacaaacaattctaggaagccgagaaggccgtattcacagaaattcaaaacacttggccttgaagttcccgaggaagagatcttcacgtcatcatttgcagcagccatgttcttgaagttaaataatttttctccagaaaagaaggtttatgttgttggtgaggatggcattttggacgagctcaagttagctggctttgaatgttttggtggtccggaggatggcaagaaaaacatactgttggaggcaaacttctactttgacca

SEQ ID NO: 436578 - DNA, 349 bp, Triticum aestivum
tcggtcgctgccgagccgaaggaggagctgatctggtgcgtgccgctggtgggcggcgacgcgcgctcgcccacggtgctcctcaagttcctccgcgcgcgcgagttcaaggtcaaggaggccatggcgatgctcaaggcggccgtgctgtggcgcaagagcttcggcatcgacgcgctcctcggcgccgacctcggagtgccggagctggagaacgtggtgttctaccgcggcgccgaccgcgagggccaccccgtctgctacaacgtctacagcgagttccaggacaaggacctctatgagaaggccttcggcgacgacaagaagcgggagcgcttcctcaagtggc

SEQ ID NO: 436579 - DNA, 289 bp, Triticum aestivum
ttcgttcgcccacgcgtgcgaagtgcatcatctatcgtttgttttccctcaatctctaagccgatagaaaggtgagagttgaggggtaggtcggccgaccggagggctgtggaccatgtctggcgtgtgggtgttcaagaacggtgtggcgcgcctggtggagaacccggggagcgagcggacgtctacagtgcgacagaaggcgctgctgcacacgcctagcgggcaggtggtgtcgtcgtacgcgacgctggaggcgaagctgacggcgctggggtgggagcgctac

SEQ ID NO: 436580 - DNA, 302 bp, Triticum aestivum
tcgcttctcgccacgcccaaacccaaagccaggtcgcactcctcctcctcctatcctcttcctcgccgaggcggcgaccggccagcgccgccaccgtcaccgcccgcgcatctccgttcaattcggcgaatttggggctgaggaaagaggaggaacgacttctcgctggtggcctgaaattcaggacaagatgcacttccttgcatcatttcacggccctgcaggttttgagcttctgtctgtttcgctgggatggatgccaagaagttcctgcagatggtcgaagacaagaagaagagact

SEQ ID NO: 436581 - DNA, 349 bp, Triticum aestivum
ttgttcagcgtccgcccacgcgtccgtccatgtttgctagatctgccgtgcttctccccttgctgcccgtaccgactcccggttcttttctccggttcctcggcgatggtcgtctgcaaatgccgcaaggcgacgagggtttattgcttcgtccaccaggttccggtctgcggcgagtgcatctgcttcccagaacatcaattatgcgtggtgaaaaactatgctgaatgggctgttaattctgattatgactggccacaacactgctctttgtgtaatttagttctagaagctgcaagcgaagaaactacacgattgggttgcctccatgtgatgcacacaaaatgct

SEQ ID NO: 436582 - DNA, 431 bp, Triticum aestivum
ctctcgcgtgcggtgcctatggctggcgccgggtgcgattctctctctgcgccttcctcccccgccgggcccttcaaaccctaggcgccgtcggccaggaagcccatttaccagccatgtttggacgcatgccaaggaagaccagcaacaacaccaagtactacgaggtgcttggtgtatccaagacagcaaccccggatgagttgaagaaagcttaccggaaagctgctataaaaaaccatcctgataagggcggagaccctgagaagtttaaagaattggcacaagcttatgatgttctcaatgaccctgaaaagagggagatttatgaccaatatggagaagatgcaatcaaagaagggatgggaggcaccggcggcgctgatatgcatagcccctttgacataattcaacaggtatatgggggtggc

SEQ ID NO: 436583 - DNA, 322 bp, Triticum aestivum
acccccgcagccaatcccaccggacgcttgcctgccagccaaccccaatctcgactcctccgacgtcgaatccggttccgagtccatatttgaggtgccaccatgttcaacaggttatttgggaagcccaaggagcaggccaacgccggcgcgttggccactttggataagttaaacgagactcttgatatgctggagaagaaagagaaagcgctagagaaaaaagcaggcgctgagcttgagagggccaaggagttctcaaaagcaaagaatataagagcggctatccaatcattgaagaggaaaaaactctatgagcagc

SEQ ID NO: 436584 - DNA, 475 bp, Triticum aestivum
  unsure (1)..(475): unsure at all n locations
tccacgcgtccgagctcgctcgcatcagcaaggtggggattattttgcccagagagctccggggccatgaggccgatgcatctcttgggggtcacttgcctatggatcctctcatgcgccttgctgctcggcggcgcttgctccgatgggttgctgaggatcaacctgagcaagaagaggctggacaaggaaaccctagcagccgcgaaatcggcgaggcaggagaccaacctgctgaggcccggcgatggatctcgccactctctcggcctgtcagacgatgacatagttcctctggacaacttccttgacacccagtacttcggagagatcggcgtcggcacgccgccgcagaacttcacggtcatatttgacaccgggagctcaaacttgtgggttccgtcgtcgaaatgctacttttcgatagcatgctacttgcaccacanatacaagtcgaccaaatcgaccacttaca

SEQ ID NO: 436585 - DNA, 327 bp, Triticum aestivum
gcaggcgagcgatggcgagcgggagtgttccttcggtgctcacgcccccacgcgatgacgccgtcgttctccacaaggccttcaaagggttcggctgcgacagcacgacggtgaccaacatacttgctcaccgcgactcggcgcagcgcgcgctcatcctgcacgagtacaaagccatgtaccatcaggatctttaccatcgcctagcaaccgagctgagtggaaaccacatgaatgctatgctgctttgggtcctcgaccctgctgggcgtgatgcgaccatactgaaccaagctctaaacgggcgacatcaccgacctgagagcc

SEQ ID NO: 436586 - DNA, 322 bp, Triticum aestivum
tgattgtattaagcattcgaccaagccatcgatcgacctcctcgatctgcatttggcatcggtggtcaacttgcattgctcgatcgcgccgacgtctagctcaagcaaccttaagttagcaagctagctaggctcagaaatcttctagggctatagtacacacactttgcactacgtactcacgtgtggtgtgatcacgtcgtcgtcgtcgtcgtcgacatggtcggaagcagccccatgcaggctgtgctggtggcgccgggggtgaagggcaagcaggtgctcccctacaagcgggacgcgctcaaggagaagcacgcca

SEQ ID NO: 436587 - DNA, 373 bp, Triticum aestivum
tttaccgactgctcgcacccctcgcatgaagacagactgggacgagtcggtgatccagcctccgtggcatggttcaaacagcccttgcgtggtgaactccaccccgccaagccccgggcgtcaaatggttcctgacccggcatggctggccggcatccagatctcgtcaacgagcccttcatcgcccacattcagtctcatgtcctccaacccattcagcgtcttcaaagaagccatccctggcggcggttcatcaaggatgtgcacgcccgggcagagcggcacgtgctcgccggtgatccctggcatggcgcggcacccggacgttcacatgatggacgtggtctccgacgagttcgcgtttggaagcagc

SEQ ID NO: 436588 - DNA, 357 bp, Triticum aestivum
ttctcttgacgagatccatccaccctagaggccaagaagagatgggaggagagagagaggccggcggcggcggcggagcaggcgatcggagatggtgcggaaggccaaggtcgagttcgacgagaggccgccggatgacttcgacccgaagaacccgtacggggacccggtggcgatgctggagtacagggagcacctggtgcgggagaagtggatccagatcgagaccgccaagatcatccgcgaccgcctccgctggtgctaccggatcgagggcgtcaaccaccaccagaagtgccgtcacctcgtcgaccagtacctctagttcacccgcggcgtcgggtggggcaaggacca

SEQ ID NO: 436589 - DNA, 667 bp, Triticum aestivum
ttgttttcgcgttctcctctgtggcacgcaacctttgtcccctctagatatagaacaacacgcctcgtccacccatacctctagaagtctagatctaggcctgacccgtagttttctgatcgtgttcgcttcgatctcggggtaagctgagttcggcgtccatgatttgttcctatcacccgtttgttatctgattctcaggtttctccttctgatcggcgagttggggcttgcggcgatcttggagcatagacgggaggcaagctggatctgcgcacggaagcttccgatctgaccggctggcgtctcagatctgctgctggtctgatgctaaacggcggatctagatgttcccggcggtctcggtatgttgcagcggcgggcccggaggggctctctccggcgagtacgtgggatcccgtctgctcctccacctcgtgcgacgacggccgacggctctttgtgttgataattattcgatgctatgtcgataattattagatctaagagatcggaggtgacgtaaggtaagaagatgtagcaagcgaggtgcttgtggagaggtcggaggagagtgaaaaaaaagagatgtgaacatctagaggcctttgccatgttgggtgcgctcgcatggcaggccgccaccataataaagatgtttttttgt

SEQ ID NO: 436590 - DNA, 397 bp, Triticum aestivum
tttctgatgttacaaccactgggcaggctgccaccgccctcaggatgctcagggtgaacaaggtccagtctgacctcgcgatcagcgatgtccacatgccggacatggatggtttcaagctcctcgagcttgtcggtctggagatggacctcccagtcattactaaggctaacctgcttaatcctctgctgctctttgtaaacgatgctctaaaaggtatcactgccggggaatgattgtcgagtgaatctactcgtttcatgtcatgtcatttggtgctccagaactttggagatgaattatgtctgctaacctacaaacatcgcaaatagttcctcgatgtgctactgctagttttgttagggaagatggaaaatctttgttcatttgtgtggtt

SEQ ID NO: 436591 - DNA, 538 bp, Triticum aestivum
ggccagttggttgtgcctgccacaagtcagacctcgtcgtcgactcatcctgtgacactatcgtccaccactgctgcaagtattatgccaagagctgatcctcaagcacgtaaggcatcccttgcccgattcttggagaaaaggaaagaaagagtgacgactacggcgccatatccatcagccaagagcccgatggagagcggcgacacggtcggaagcgccaacgacaacaacagcaagtcctcgtcgtgcacggagatcgccttctcaagcaaccatgaagagtcgctgcgcctaggccggcccaggaacatcagctttagcggggagtccccgagtacaaaactacacatctgatccgatatgatcttccggttgtccatagattcaaccacgatggctgatgcaaaaccgcaataagaagattttgcatccaggcaggcaggcaggcaggcaggcaggaggagggaagggatattgggaaaaggcaggcagcatgatatatgttattgatgatgttgttattcttgtttatgat

SEQ ID NO: 436592 - DNA, 394 bp, Triticum aestivum
ttttctagaggcagaacaagccgctggccagtggccatggagtgcggccagtgcagcgcgcgcttggctgtcacgcggggcgcgagctccgttcactgcgcgcactgccgcagggcgacgcgcgtcgaacggcacggcgccgtcgtgcacggggccgccggcttcgtcaggagcgtgttcacgaacattggccgggcgaggccgcacccggggtacccgccggtgcacggcaacaagcgcgctctcttggtcggcatcaactacaccggaacggcggccgagctgcccggccccatcaacgatgtcaagtgcatgagcttcctgctcaccctcaagtacggctttccaggcgattgcatccttgtccttaccgatgaagagcgcgacccctaca

SEQ ID NO: 436593 - DNA, 518 bp, Triticum aestivum
cggggtagccaagggcgacagccagtactccttctccctcaccaccttcagcccatcggggaagctggtgcagattgaacatgcactcacagcggtcggatcaggccaaacctcccttggcatcaaagctgccaatggtgtagttatcgccaccgagaagaaactgccttctattttagtggacgaaacatctgtgcaaaagattcagtcgttaactccaaatattggagttgtctacagtgggatgggtccagattttcgtgttcttgtcagaaaaagtcggaagcaggcacagcagtattatcggttgtacaaggaaaccatccctgttacccagcttgtccgagagactgctgctgttatgcaggagttcactcaatctggtggcgtaagaccatttggtgtatcactgttgattgctggctatgatgacaatggcccgcagttgtatcaggttgacccatcagggtcttacttctcctggaaagcatcagctatgggaaaaaatgtgtcaaatg

SEQ ID NO: 436594 - DNA, 468 bp, Triticum aestivum
tttcttgatcgagccatccgcatagcccacaccctcgatcgtcttgcctttcgtgcctcggttccacacaactgccagggcctgctgctgaaacctgcttgttattcttcttcattcttcgccgtggcctagcatgctgtggatctatccaacggggggagatcgaccagatgactggctgcaacggcaacggcaacggcaactcgcccgcatctcaccatgggacagcagacggtcactgagaagaagttcggaggaattgcaccaaagaagcctctgatttcaaaggaccatgagcgcgcctacttcgactccgcggactgggtcctcggcaagcaagctgcaagcaacaacgcacaggcggccgcaatcgagtccttgaagccaaagctaaagaggacgccccatcaccagctcccacctcgcaagccggcctgcgcgtcgggctgatcgaccgcgacgcgacaa

SEQ ID NO: 436595 - DNA, 519 bp, Triticum aestivum
tctgtttaggccgactgaaggcggcataagtggaacagaggatgcggcggaggctttgatttcttctctgccgatgggacgagctggtggccgcatggattatgaagggggcgaaggagctggtatggggggtgcgcgtcgtatgatcttggcgatgaagggatggcgattcctgcgagataggcagtgcaaatatagtccctgatgctgcggaccaggatccagacgaagatggcatgggagtgtcaagtgcaaaccaatcttcttggatcaggagggtcaaagttggtgtgtcacagccaaaaactatcttaacagctcgcgcgatggaaattgcaataggcgacgtcatgccgcggactgcacatcggtggtgcaaatggcacgtcctgaagaaggcaaaagagagccttggggcactgctttgcaagggaagtgaattcaagccagaattcacatgctagtccaccacatagttagtattgatgaatttgagaagggctgggcatgcatgattga

SEQ ID NO: 436596 - DNA, 472 bp, Triticum aestivum
tctgtttttctctcctcccctcccttcctagctctcccaggtcatggcaaaggtgaaaagcggataaaactagcaagtgggagatcgacgcaggtgaacaccaccacagctacaagtagtagaggaagtggaatttcatcttgtggagaaaagggagagctgcttgagtggccatgatgggaggtgggctgctcatggatcagggcatggccttctccggcgtgcacaacttcgtggatctgctccagcagaacggcgccgacaagaacctcggcttcggctcccttatgccgcagacttcctccggcgaccagtgcgtcatgggcgagggcgacctcgtggaccccccgacggacaacttcccggacgccggggaggacgacagcgacgacgatgtggatgacatcgaggagctggagcgccgcatgtggcgcgaccgcatgaagctcaagcgcctcaaggagctgcagca

SEQ ID NO: 436597 - DNA, 590 bp, Triticum aestivum
ccgggtcgatggtgaatctcaactgttgacccttatggatgggcttaagtcccgtgcgcatgttattgttatgggtgctacaaaccgcccaaacagtattgatcccgctctcagaagatttggtaggtttgatcgtgagattgacattggagtccctgatgaagttggccgccttgaagttctcaggattcacgccaaaaacatgaagttagctgaagatgttgaactggaacacatttctcgagatactcatgggtatgttggggctggtctaactgcacttgggaccgaggctgctctccaatgcattcgtgagaagatggatattattgatcttgaggacgagacaatagatgctgagatactcaactctatggctgtgacaaatgaccatttcaagaccgccctgacgacaagcaacccgtctgctctccgtgaaactgttgttgaagttcccaatgtttcttgggaagatattggtgggcttgagaatgtcaaaagggagttgcaggagactgttcaataccctgtggagcatccggagaaatctgagaagtttggcatgtctccttcaagggtgttttgttcta

SEQ ID NO: 436598 - DNA, 389 bp, Triticum aestivum
cttcgcgctcggcatccaccgatcggttcctcctgccttggccatccgctgacaagatcatcggcaggcgcctccccccagggatcgatcgaagatgccgaagatagcgctgggccaccgccgcgaggcgtccgaccccggctgcctccgggccgtgctcggcgagctcgtcctcaccttcctcttcgtcttcgtcggcgtcggctccgccatcgtcggaggacaagcagtcgcagccggaggcgacacgtcggcggcgttgatcgcggtggcgctgggccatgcgctggtggtggcggtgttcgcgaccgcagggttccacatctccggcgcccacatgaacccagccgtcacgctcagcctcgccgtcggcggccacatcaccctca

SEQ ID NO: 436599 - DNA, 477 bp, Triticum aestivum
ctttacgcgtccggcgcaaatggggtccggatctgtcctcattgaaactcggcaggggcctggacattctcgccgggcccatagtttcactcgcttatcctctgtatgcgtctgttcgagcaatagaaacaaaatctcctattgatgatcagcaatggctcacttactgggtgctgtactcgtttatcactctgtttgagctcacttttgctgcagtaattgaatggctccctttctggtcttatggaaagctgtttttcaattgctggttggtcttgccctactttaacggtgctgcgcatgtttatgagcattttgtgcggccaatgattgtgaaccagcaggttgtaaacatctggtatcttccaaaaaaggaaggttcagacaaacctgacgatgtaatttcagctgcacagaaatacattgaacaaaatggatcaaaagcatttgagactctcgttaacaagtttaagacta

SEQ ID NO: 436600 - DNA, 540 bp, Triticum aestivum
tcgcctcgcgtccgctcaacttacatccacgagcccgggtactttaaggacatgaccatgtccccgcctggcccacacgcggtgaagaacgcctactgcctgctcaactttggagacagcattaccacggatcatatttcacccgcaggcagcatccacagggacagtcctgctgccaagtatttgctcgagcgtggcgtggaccggaaagacttcaactcgtatggtagccggcgcggtaacgacgaggtgatggcaagaggaacatttgcaaacatcaggattgtgaacaagtttctgggtggagaggtcgggcccaagactattcatgtgcccacaggggagaagctctctgttttcgatgcggccacgaaatacaagtctgaaggtcatgatacgatcattcttgctggcgccgagtatgggagtggcagctctcgtgattgggccgccaaggggccgatgcttctcggtgtgaaagcggtgattgccaagagctttgagcggatccaccgaagcaacttggtcgggatggggatc

SEQ ID NO: 436601 - DNA, 419 bp, Triticum aestivum
tttcgatttgagtgctcgctgctccctcctcgggggcccggtagattctccttcggcccctcccgatctccaacgcgacagtcgccgtcgccgtcgccacgcgccagatctcctccacgcgctcgcggtgcgccttcgccgcctgcgcgatctccccggctaagatggcgacctatgagcccaagaacatcctcataactggtgctgcgggtttcattgcatcccatgtggcgaaccgtctaattaggagctatcctcactacaagattgtcgtcctcgacaagattgactactgctccaacctgaaaaatctcaacccctcccggccatcgacaaatttcaagtttgtcaagggcgacatcgcaagtgctgacctggtgaactatcttctcatcactgagtcgatcgacaccatcatg

SEQ ID NO: 436602 - DNA, 623 bp, Triticum aestivum
ccttggcctacccgcaggccgaagcgcgaggcccaccggagccccggtcggaggccctggtggagcccgtgcgggtcaacggctctgcggcggaggccacgctctccagcgccgagctggcgtggcgccccaccgcggccggccgcgacagcggtggaaggcggaagctggagctggagtccgacgtgctcgggttccaggtggagggcagggctctcaaactcgcgacctttacgaggggggacgtgacgggcgcggggaggccgccgtctccggtgggctgcggcggaggtgcagaggacaggaagagaggggaggtggcggtggagatggagagcgaggaggccgcggagaggtgggggcacgccatcagagatcgcttcgcctcgcttggtcgtccgtggtctccgccaaagagatgattgggacaaagcaataaaagtgccactagggatcattccagcaggtactggaaatggaatggtgcaaggtctattgcattctgctggtgaacccttctcaatgtcaaatgctgtgtttgcaatcatcagaggtcacagacgtgccctcgatgtcacttctgttgtgcagggaaagacaaggtttttcagtgtcatgatgct

SEQ ID NO: 436603 - DNA, 349 bp, Triticum aestivum
ccggtcttctgtctgcctcgtactccttaattaccatggcctgcaccaagcattgcgtgatctccgccgcgcctctctgagcacgctcggtcagcttcagttccctccgcgcgcggatcatggcggcggcgagatcctgcgtgtccgtcaagccggccgctggccctgccaggtacagatccgccagggtcggggcggccagcttggagccgacaagcctgcgaatatccgcttattcttcttcttcattgggctcaggcgcagatggctgcggcagaagtgtcggctgcgccgccagtatcagcggcaggggcgttgccgttgctcgtttggttggcgatggctggag

SEQ ID NO: 436604 - DNA, 397 bp, Triticum aestivum
cttattaagcgcattctcgatcccaatcctcacactcggatgacaatcgcccaacttttggcgatgaatggttcaaaaaggactatcaaccaccacattctgagcacaatgaagatgtgagccttgaacacgtcgatgctgcattcgatcgttcagaggaacaccttgtggcggtgaggtgagtgaaaccagaatccatgaatgcatttgctcttatttcaaggtctgagggattcaacctcggaaatttgtttgagaaagagatgatggggatggtaaagcggtaaacattctttgcgtcgcaacgtacaccacaagagatcatgtctaaaatagaggaagcctgtggccctcttggttcaatgtgcggaaacaaaattataagatgaaactgaaa

SEQ ID NO: 436605 - DNA, 640 bp, Triticum aestivum
ccttttcgtccgcggacgcgtgggcgacatcaggtcttgatgcaagagcagcagcaattgtcatgagaacagtgaggaacactgttgacactggacggacagtggtttgcacaatccaccagccaagcattgacatctttgaagcttttgatgagttactattactgaaaagaggaggccaggtaatatactctgggaaactgggtcgcaactcgcagaaattgactgaatacttcgaggcgattcctggagtgcctaaaatcaaagataagtacaaccctgcaacgtggatgcttgaggtcagttcagttgctgcagaagtacgcctgagtatggattttgctgactactacaggacttcagatctgtacaagcaaaacagggtattggtgagccagctaagtcgaccagaaccaggaacatcagatctgtattttcctacagaatactcgcaatccattatagggcagttcaaagcctgcctctggaagcattggctgacctattggcgcagcccagattacaaccttgtcagattttccttcactttgttcacagccttgctgctgggctccatcttttggaagattggcaccaatatgggggatgccaatactcttagaatggtcattggagcaat

SEQ ID NO: 436606 - DNA, 386 bp, Triticum aestivum
ttttcgcgtgggcggacgcgtgggcttgggcacaaagatccaggacgatatatatgctctatgcatgcaaatctacctagcgagcttgaaacgaagattttggagacaaagagagggataaatttaaaccctatatgatcaaggcacaaagatccagaagtagaaatgtgccaaagctggggcgtcccatggtccctagcgagctaggatgcccacgaaatgaatctgagggtgcgaatagctcagctcgggcagatataatgttgtaatgtccagactagagcagcagcacaagatgatgtgtaattgtaatacggaattacttgtcacaaaaatggatgtatctacaactaaaatacatctagatacattcatttcttgacgag

SEQ ID NO: 436607 - DNA, 238 bp, Triticum aestivum
ttgttaaaggaggaggccaaggaagagagcgatgatgacatgggcttcagcttgtttgactaagcagttcaattccagctctcctgtggaatctgctatgctaaagattacctatcttatgtgcttttaggttgaattttgcggatttgatatgtaattctgttgagacctaagtatctgtgcaatgagtactgcaaaccaccttgggatggtctttttagaatgaaaatggttctac

SEQ ID NO: 436608 - DNA, 371 bp, Triticum aestivum
tgcgttcgtttcaaaatggtgcaaagatatatttgtagcatttgtcgcgttattggacaaacatatagcaactggtacttttgatgaggaaattataccaattggccgtccagtgaaatctttgatggtggtcctgtcttggtcatgtctcctcctatatggtgctcatagattcttacagtggacccagctcttgtcgacgtggaaaggagtgatcctctttgcttctggattggcaatggtaacctgccgttatgcatgtattcatcatgttctcgcaggccgagcgctcaagctctgccaaagcagcatgggaccgagtgaagaaggattgatagctcgtgtgaatttcagtctataggggaactgcc

SEQ ID NO: 436609 - DNA, 366 bp, Triticum aestivum
gttggttccctccccaacacgcgttccccacaagtgctcccaccgaatccccaaatcgcgcgagctcctccacgaatccccctccccgatcgattcggttcggcccgactgatcgtccgccggagaagaggatcaccgccaccatgtgggccgcgtcgtgcctggcgtcctgctgcgccgcgtgcgcctgcgaggcgtgccgcaccgccgtcggcagcatcggccgccgctccgcgcggatcgcctactgcggcctcttcgcgctctccctcctcgcctcctgggtgctccgcgaggtcgccgcgccgctcctccagtccatgccatggatcaaccacttccacaagacgccggaccgcgagtggt

SEQ ID NO: 436610 - DNA, 367 bp, Triticum aestivum
tttgtttgagtgagactacctagagcactcagcaccgtcgttggctcgtcgccatccgttcagtgtctcagagtctcagcgtgcgtgtctgatctgatggcggcaccagcaggagattcctccggcggcgacaagtacaggtctcacctggccggcgagggcgagaagaacaccgtttggcggcacggcgcgccgcccacctacgacgccgtgaacagcctcttcgaggccgggaggactcacgagtgggcgaaggggtcgctggaggagacggtgcagaacgcgatcaagacgtgggagatggagctgtcgcacaaggcccgcatcggggacttcaagtcggtgagccctggccggttcaccctgt

SEQ ID NO: 436611 - DNA, 697 bp, Triticum aestivum
  unsure (1)..(697): unsure at all n locations
ttgtcggcaacctgcagggaatacatcggaggagccatatatgtttgtggatttgaatgctgaggccccagaatctggcgacgacgaggaagatgagattgactgggaagaaggttaaagtacagcaacaagttgctctctcttgaattcatgaagtcagttcaaagtgggatgttaaatgataataatattgccagacgtatgcatatcaaggcttgcctgcaaaaaacatttttctcccagatttgtgagacgtcactataaggtgcagcatcataccccctccgttcctaaatatttgtctttctagagatttcaacaagtgactacatacggagcaaaatgagtgaatctacactctaaaatatgtctacatacatccgtatgtggtagtccatctgaaatctctaaaaagacttgtatttaggaacggagggggtgtatatcatcaaaagatcgaacgaataccaacttcatgattacttataacaagacttctcccatgtcctcaagaacaaaagtaactactcacaaatcatattcatgttcaagatcagaggggtattgaatatcattaaggatcttaacatataatcttccaccanataaaccaactagtatcaactacaagatgtaattaacactactagcaaccaataggtaacaatctgaggttttgggacaaagattgaataca

SEQ ID NO: 436612 - DNA, 650 bp, Triticum aestivum
tgagcttttaaaggtgtgtaatgcagcattgtgctttacttgtagtccttcggaatatcaaaatcatctggcatgaccaatgttgctctagaatatcttagtctagaatgaaaaaattatcagtacaaaccctctgtttcaaaacagatgaccttataggctatccaactattctcaaatacttgtccttctgcacttcaattactacttgaatcattgtgcttgttgctggtcatgtactccctccgttcccaaatatatgtctttctagagattccaacatgtgactacatacggagcaaaatgagtgaatctacactctaaactacgtctacatacatccgtatgttgtcccccttttgaaatgcctagaaagacaagtatttcggaacggagggaataatcatttgttgaaatctttagaaagacaaatatttaggaacgaagggagtagtatgataatatatttttttttaccctatgagcaccttcgagatgggtcggcacaacatcttaagattttattttaatttttttttgaaaaaacttcagatctattcatcaactatcaaggtagtataaagcacatcagaaataaaaaatgcaatcatgtccgcagaccacctagcgacgtctactgacactgcccc

SEQ ID NO: 436613 - DNA, 437 bp, Triticum aestivum
gatgccacatggcaacccttttgggtgttacgacaaccagcagtttcaacataacattattggaggaacagatatgttccccctggtgacaaatggacatgttcaggactccctgatacttcctgaagtcgagaggcccacggaaccaaacgccgagaactttgttgcccccgcgagccagatttggatcagtgcagcgtctcgcgaaccttcacagagtggatcatctaatgccctgacggctcaatcagccggttttgaagtatgtgatgagctacgtcctatggggcaatcattgtctatgtgtgagagcactaggaaaaatgttgcaaatggaacagctgactgcagatcaaacggcaaagattacagagagaaggtactaaaagataatttgaaggatgaaagaaagagagtggccctgacacgaatgggat

SEQ ID NO: 436614 - DNA, 459 bp, Triticum aestivum
ctataaatcaatttgtcttcttcagctctggaggcttggtgtcattgtctatgattggctggacattccttggctgaagaattactataatttcggttttgatcactttgaaatgtcttggaggaaagttggtttttctggtttagttgatcttctgctagggaatactgggccgttttcctcaggagactggattctccctgacctcacaattcaaggatctctaaaaattaactctaccctcaagacctttcccaatacattctacttcagttacgctacaaagagaactcgaaagctatttggaattacagtaccatcaagcgtccttggagttcatccaatgctctttctcagagttctccagatgtgtatgtggcggcaccctcaaaacgcacctctaccttacaaaggatacagggatgaagattgggaagataatgatggggctttgaacac

SEQ ID NO: 436615 - DNA, 421 bp, Triticum aestivum
cctctgtataatcaaaactggtgtatagattgttggtttgtctctatgtgcacagggttatgattgggtaatcgaaatgttattcacattgtcaattgactaatatgtgctacttggtacccttgctacagagaaaccagcgacaatggtgatccctccaccagacagggcagctagaatcgtcggttttctcaagcccaaccttttgaggatggatttctcgaacaagtttgtgaccgcccaggtgatccacaccccaacaacaaccgtcccgtgttctgtgagctcacgggagaagctgctgagatcgcacatgtagtcgaccggcgacgtctctgccgtcgcaaagattggaaagttgttgggcgagcgcctgctgctcaagtagatacctgccgtgtccatccacatgaagagagag

SEQ ID NO: 436616 - DNA, 634 bp, Triticum aestivum
tatattcccaggttaagtcaatctgaattcatcgggccctactggaagttcaccaaaagctttagtcaaccattttctgttggatcgaggttcaaaatgagatatgaaagtgaggatgctgctgaaagaaggtacacagggataattactggaactggtgatgcagaccctatgtggcgtggttcaaagtggaaatgcctgctggtaaggtgggatgatgatggtgagtttcgtcgaccaaacagggtatctccttgggagattgagctgaccagttcagcttcaggatcccatctggccgcaccaacttcaaagcggatgaagccataccttccccatgctaatccggaattcacagttccacatggaggtggtcgccctgattttgctgagtctgcacaagtccgcaaggtcttgcaaggtcaagaattattgggttatagaactcatgatggtactgctgttgctacttcacagccatgtgaagcaagaaacttgcagtacatcgatgaacgaggttgctctaacaatgggagtaacaatgtcctaaggggggtcccaagccatggtgtgaaaacaccacttggaattccctaccattgctctggctttggggagtctcagagattccaaa

SEQ ID NO: 436617 - DNA, 431 bp, Triticum aestivum
tgttgccaatgtggcctgagggtgttcccgagagtgcatctgtgcaagcatttctggactggccacggagaacaatggagaggatgtacactgacatcacacaagctctcgcggcaatgggaattgaagcaaaccccaaggaatacctcactttcttctgcctaggtaaccggcaggtgaagcaggatggggaatatgaaccccaggagcaaccagaacctgatactgattacgtccgtgctcaagaggctaggaggttcatgatctacgttcataccaaaatgatgatagttgatgacgagcacatcatcattgggtctgcaaacatcaaccaaaggtcaatggacggtgcccgggactccgagattgccatgggcgcttaccagccataccatctagccaacagggagccagcccggggccagatccac

SEQ ID NO: 436618 - DNA, 549 bp, Triticum aestivum
ttctgcccacgcgtccgcggacgcgtgggaccgttgacgctttaccgcacgcgctgcacgggcacccaacacaagcccttctccgatcgtgctcgctcgccgccggtactagtctagtagagcagcggggaggagctccgagatgagggcgccgcggcggccgctcggcggtggtgctgagcgtgggtgcggcggcagccgcccaaggtcaaggccttcctcgccgtcgtcgccggcatggccgcgctcgtcttcatccgcttcatcgtccacgaccacgacaacctcttcgtcgccgccgaggccgtgcacgcgctcggcatcgccgtgctcatctacaagctcaccaaggagaggacctgcgccggactatcccttaagacccaggatttaactgcattgtttctagctgttagactatactgcagctttgtcatggaatatgacatccatacagtgttagatactgctacacttgtggctacactttttgttatctacatgattcggttcaaacttaggtcaacttatatgctggacaaggacaac

SEQ ID NO: 436619 - DNA, 365 bp, Triticum aestivum
tttcgaaccccgaccccgatctcaccaatcccccggaactgtaaaccctagccagcggtggcggcggcgatgggcaacccggagaagctgatggcgcagatcttcgacctcaagttcacgtccaagtcgctgcagcggcaggcgcgcaagtgcgagaaggaggagaaggagcagaagctcaaggtgaagaaggccatcgagaagggcaacgtggacggcgcccggatctacgccgagaacgccatccgcaagcgcaccgagcacatgaactaccttcgtctcgtcttccgcctcgacgccgtcggcgcgcgcctcgacacgcaggccaagatgcaggccatcggcaagtccatgggcagcatcgt

SEQ ID NO: 436620 - DNA, 554 bp, Triticum aestivum
  unsure (1)..(554): unsure at all n locations
tcccacgcgtncgcggacgcgtggcggacgcgtgggcgcctacaagcgccgctccgactgcatctacatcatcaatctgggcaagacgtgggagaagctccagctcgcggcgagggtcatcgtcgccatcgagaacccccaggacatcatcgtccagtccgcccgcccctacggccagcgcgccgtcctcaagttcgcgcagcacaccggcgccaacgccatcgccgggaggcacacccctggtaccttcaccaaccagatgcagacctccttcagcgagccccggctgctcatcctcaccgacccaaggaccgaccaccagcccatcaaggagtctgctctggggaacatccctaccattgccttctgtgacaccgactctcccatgcgatacgtcgatatcggcatcccagcaaacaacaaggggaggaacagcattggctgcctctactggctcttggccaggatggttctgcagatgaggggcactatcctgccagggcacaagtgggatgtcatggttgatctgttcttctacagggaccctgaggaag

SEQ ID NO: 436621 - DNA, 363 bp, Triticum aestivum
tcaccgacccgaccatgtccctcaagatcaagcgcggtctgcgcgagagaatcgtggagtccgtctccgaggccatggcccagctcgagatcgaggactcctccgccgcggacctcaagaagaaggagctcgccctcaagagactcatcaccaaggccatgtcctcccgataaatgtatcgcttccttcccttttttgctggctctggcgtctttctttgagattcctttgtttttcggaaaagcaagaaaatatcttccgggggaaaaaaaaggggccttctgtttctccagcccagatctcggtaccatgatctggcacatgacttgatgcccttttttgatacacacttacgatagacac

SEQ ID NO: 436622 - DNA, 288 bp, Triticum aestivum
gcccacgcgtccggcgagagatcgcatgaatggtgtttatccagaggacctcagttgtctatagaaatatgtaggttatctacggtggttgtttcgcgatcattttgctatattgatcagcctgatgctctctgggcccgtgagattttgttgccacagatcagttgatcttggttctgaactctgctgttgtaacttgtaagtcttccatcaaactggcaatgtactcattttcacccattggtgtattatatttcttgcattctttttgacctcatgagacccatg

SEQ ID NO: 436623 - DNA, 419 bp, Triticum aestivum
tctgtacgaatgagctccatatgctccccttgggcatgctcgtcctcctgatatcgatgaccatagccgattgcttcaacaaaggtgtgtatgaccagatcgtggtgatgaaaggcttgccattcatggaggctcatgctgaaccggacatgaggcacttggtagctagtgatgttgtgtctgggccactcatctccttttcgggtgttgagaaggtgggcaacatcgttcatgcgttaaggatcaccggccacaacgggtttccggtggtcgatgagccgcctgtatcagaagctccggagctggttgggctggtgcttaggtcacatgtgttggttcttctgagtggaaggaacttcatgaaggagaaggtgaaaacaagtggtagctctgtgctcagaaagtttggtgcatttgac

SEQ ID NO: 436624 - DNA, 436 bp, Triticum aestivum
tcgtcggaagaccttatatccaatgtacacttatcccaaattctttacggaagtggaagaaaataccatttatagttcagagaaacttcagaacctagggtggaccttcaggcctttagagaagaccctgggggacagcgtggaatcctacaaagcatctggcgtcctgaactgagcatccaaccagggaaagtttggctgttaatgcttgcaaactccttgcggttcatgtaagcagtgaaacaaaataagttggtgacacaatcgtcacgagagtctgtgtgaacatgaacaaagcatgaatcgtatgcgcgcctttcttttggtgtgtcttgacttgaggtgtatgcagcacctttcttttggtgtgtcttgacttgaggtgtttcgaggcatagtggaatgtcctggtggttctatgagtgggtgcttgcac

SEQ ID NO: 436625 - DNA, 350 bp, Triticum aestivum
ttgtttctgttgggcgtcgaccaatcactggcctgaggctgtgcttggaaggaacaaaacagaaccgtctggctattcatttgcagcaccttggctcgttaccaaagatatttctacctcactgggactcgcatatcacgatcgggccaccaaaatggcaagggcctgaagagcaggatagccgatggttcgaaccaatcaagtggaagaattttgctcatgtcagcactgcgcccatagagtacaccgaaacaaatatcacggatctgtctggcgtttatattgtcacgggagcacagttaggagtgtgggattttggtgcaaagagcgtgctccaccttaaacttttg

SEQ ID NO: 436626 - DNA, 424 bp, Triticum aestivum
tcgtttccctccctcggttcatcggcctcccgatcgagcagtagaagcagcgcaagagcaccgctagcactaaagaaatggcggccgagacgttcctcttcacgtccgagtctgtgaacgagggccatcccgacaagctctgtgaccaggtctccgacgccgtcttggatgcctgcttggcccaggatgccgacagcaaggtcgcctgcgagaccgtcaccaagaccaacatggtcatggtcttgggcgagatcaccaccaaggccaccgtcgactatgagaagatcgtgcgcgacacctgccgcaacatcggtttcatctctgatgacgttggtctcgacgccgaccgttgcaaggtgctcgtcaacatcgagcagcagtcccctgacattgcccagggtgttcacggacacttcaccaagcg

SEQ ID NO: 436627 - DNA, 440 bp, Triticum aestivum
tctttcacgcgtccgggaatctcttgatgagacggatgcacgtcggctggtcatacacaaaatgagcaaggatatttatcagtcagtatcgggcgtacaccgtctccgctctgttatcgcattggacatcaatattccatcatccactctactgcctctaatagcaaagaggtccagatatatgtcggtgctggagttaagtggcctacccattgggaaggttccagatggtattggagatcttttcaatctccgctatctgggtctgcgtggttcaaaagtgaagctccttcccaggtctctcgagaaactctcaagtttgttgacactggacctttcagggtctggcatgaacgagctgcctagaggcattggtgaactataaaagcttaggcagttattcactgacaaagctattgatcgatttacgacagatttcg

SEQ ID NO: 436628 - DNA, 258 bp, Triticum aestivum
cggacgcgtgggctgttctcgtgggccctcctcctcccgcacagagcacacacatggggagcggccatgccacggcgacgagggaaggccatgatggggcgacgtcggagaggtggcaggcggcggcgaagacgaggagcaggaatatcgccgtctcacatctccaccgggaccaacatcgcggtgttgaggcggtggagtggaggcctggggagagttgcctagaagaggaggaggttgccggaggaagaggggaag

SEQ ID NO: 436629 - DNA, 379 bp, Triticum aestivum
tcgttccgaaccgccaaagcgtcactctcgacatccctcggttccttcacccttccctcttcggcttctcaccgagtaattttggcagccggctcgatccctccaaggccgcagagactcgatactttgttgaacgatcggtggctggtgttgcgtttgcgagtggtgtacgattcttcgttgtgccatgaggaatcacaagaagttgctgcagttcctgcggccggacccggcggtggcggcggccaacgacgacgggtgctccccgctgccttcgcccacgaccagcgggagcgcgagcacgtcggccacggcgtccccgtcgccgtacgtcgcgtcgtcgtgggtcaacctcccggggctcggcgccggggcggcg

SEQ ID NO: 436630 - DNA, 572 bp, Triticum aestivum
ggtctaaataccgggtcgacctcatcaagaaggctgcagtcttccactatggatcaataagcttgattgccgagccttgccggacagcgcatctgcacgccatgaacgttgccaaagacgccggcgcgcttctctcgtatgacccgaacctgagggaggcgttgtggccatcccttgacgaggctcgcaccaagatcttgagcatctgggaccaggcagacattgtcaaggtcagcgaggtcgagcttgagtttttgactggcatcaactcggtggaggacgatgttgccatgaagctgtggcgccctaccttcaagctcatgcttgtcactcttggagatcaaggatgcaagtactataccaaggatttccgtggaactgtcccatcctacaaggtacagcaagtcgatacgacaggtgctggtgatgcatttattggttctctgctccgaaaaattgtccaagatccatcggcattgcaagataaaacaaagcttgagggggcgatcaaatttgccaatgcatgtggagcaatcacccgcacgaagaaaggggcaatcccttcattgccc

SEQ ID NO: 436631 - DNA, 354 bp, Triticum aestivum
cttttgtgaatccaggagcagattatgctgcgcaggttttcagaatgccagaattcaatgttcattcacaagtcctcccttctgcatctgaggcccttagttcacagcttgcgagcagtagccctattgcaatgtctacacagcagcaacatatgtcccagcatcaacaggcagcgcatatgtaccctccaatgcacgtgcacgcattatccgaatttcatgccatatcgacatcctctctattctccaggatatgtcccacccatggctatgccaaattattcagcacatgttccttatccggcaaatggaaataattatcttcagatggccggtgggggttcacatttaact

SEQ ID NO: 436632 - DNA, 375 bp, Triticum aestivum
ccctctgccctgatctgctctcggcgcgcgttctaagctcagatcatgccgacggccatccgcaagcgcccggcggcgggacaagaaccgcgcgtccatggcggcaagaggccccgatacgcgttcgggagcatcaccgactacgagaagcttgaggtgctcggagaaggcacctatggcgaggtgttcaaggcgcgcgaccgccgcaccggcaagaaggtcgccgtgaagtgggtccgtggcaacggggccggcggacacggcccgcccgacatccgcgcgatcacccgcgaggccggctgcctcggcgcgtgtcggggtcacgagtctattatcgagatcttggatgtggcgacggatgccgagacaggggac

SEQ ID NO: 436633 - DNA, 519 bp, Triticum aestivum
gggatggccaaatatactatgatatatcttttgagaatgggacccagggtgtattagatggatttatgattcagtttaacacgaacacatttggtcttgcagccggtggaccacttcaggttcctccactccaacctgggtcctcagccaggacgctcctagctatggttttctcccagaatgtctcccctggagcaccaaacttgctactgcaggttgcagtgaagaataatcagcaacctgtgtggtatttcagtgacaaaggttcgctccatgtcttctttggtgaagatggcaaaatggagcgaacgggttttctcgaggcctggaaatctttacctgatgacaatgaattttcaaaagaataccccaattctgtcatcagcagcatagatgccaccgttgaacaccttgcagcatcaaatgtgttctttattgccaagcggaaaaatgcaaacatggatgtgctgtatctgtctgcgaagatcccccgtgggattccatttctgatagagctta

SEQ ID NO: 436634 - DNA, 386 bp, Triticum aestivum
ttgatttctagtgacgacggtcattcagcccatagcaaatatatgccgaagctcatctgttagtgatcatgtatacacaatggcaactcttaccgaccaagactcaagaatattgttcttcaaggaagctttccaagacgatgaaccactgcagcatgtggatgacctcggctctgcagcgctcaagaaatgtgacggtcttccccttgctcttgttaccaccgccaggttcttgcaaagcgcaggtaatccaacacccatgatatgggcaaaattatgcgccgacctgggtacacatctgaagagtgatgatctatttgcaagaatgaggcgtgtgcttgtccagagctacaccagccttgatagccaggttgccaggacattct

SEQ ID NO: 436635 - DNA, 461 bp, Triticum aestivum
aaatgatgctttcggcactgcacatttttctcatgcttcaaccgttggtgtaaccaagtttttgatgccttctgttgctggcttcctcatgcagaaggaacttgactatcttgtcggagctgttgccaacccaaagaagccctttgctgccattgttggcagctccaaggactcatctaagattgttgtgatcgagtctctgctggccaaggttgatatcctcatccttggtggtggtatgatcttcacattctacaaggcccacggattagctgttggaaagtctcttgtggaggaagacaaacttgaactggcaacttcactgatcgaaacggcaaagtccaagggtgttaagctcttgcttccgactgatgttcgttgtggctgacaagtttgcagcagatgccgaaagcaagattgttcctgccactgctatccctgatggttggatgggtctggat

SEQ ID NO: 436636 - DNA, 409 bp, Triticum aestivum
gttgttcacatgaaaggagttaccatcggatacgtggcctgcaacaaggaattgattggggtattcagcctctcggattcttgccgaactgggtcagccgaggccatcaaggagttgagatcactgggcatcaagtcagtgatgcttactggcgatagtactgccgctgccacacatgcacagaaccagctggggaacatactagctgaggttcatgctgaacttctgccagaagacaaagtgagaattgttgatgaactgaaggcaagagatggccctacactgatgattggcgacggcatgaatgatgccccggcactggctaaggctgatgttggagtctccatgggcgtgtccggttcagccgtcgcaatggagacgagtcacattactctgatgtcaaacgaca

SEQ ID NO: 436637 - DNA, 440 bp, Triticum aestivum
cgggtcgaccggggacgccaagcaccaacaacaccggtgatcccctcctccggcgtgggcgaccttcctcggctatcgtccccgcgtcgccctccacatccaccttttcttctgttccgacgcagccatgaattacatcatcggcgccttcaagccgccctgcgacatcttcgtgaccttttccgatgagaggagccggaagcaggttgcagtcaagaaggataatgggaagacaaccatggtgccggcgttccagagcctggagaccatagccggagaggtatcaatagcgcctgttcctggtaaaaggattgagcacatgggtgttaagattgagctgcttggacagatagagttgtatttcgacagaggcaacttctatgacttcacttcactggggcgtgagttagatgttcctggtgaaatatatgaaagaaaga

SEQ ID NO: 436638 - DNA, 367 bp, Triticum aestivum
ttgttattttccccacctctgtccggggcggctgcattgccatctgcgcgctatacctgctggatcggcgacatcatcgtgacatacactcgtcccgggatgctcaatgccattggtctcgctggagtcttcggcatatatgccatcgcttgtgtactagcctttgtattcgtctacatgaaggtccctgagacaaagggcatgcccctggaggtcatcaccgagttcttctctgtcggggcaaagcagggcaaggtagccacggactagttgctctgatccggtgatccgcgtcgctgggggtaattttgtggtgtcataactactactacactggttaacctgcgatgttttggtgaagaaactt

SEQ ID NO: 436639 - DNA, 327 bp, Triticum aestivum
tcctacgcgtccgcaggagcgagtcccttcgagagagctcccttgagagtcgcctgtagcttccccgatcccgcccgatccccaatctccgacgacggcgatgccggccggacgagagatgggagaggtgtgtggagatctgtaaatagcaggtctaggattagatcgagtcttgcccaagtggtgtctggcgctatgccgaggaggagcgcgccgccggcgcacgcgagctgcgcctgggggctagcgtcggcgtttctgatggttgcggaggcgaggtgctgcgtgcaaccggaggaaatgacggcggcgactccttcaataagc

SEQ ID NO: 436640 - DNA, 386 bp, Triticum aestivum
ttcttcgagcagcttatccaggaaggcagcagcgccttgatccagcaacaaaacccttgcctgcgtaggagaagggaggagaagagagaacctattctccccccactcccactcctcgcctcacttggagagtcgatcgatcgatccgcgggcacaatgttccaagggtgcggcctgttcgcgtgcgtgagccggcgcggcgcggacgtcaggaagcgcggggaggcgggcgcggccagctcgcgggtcgcggcggagccggcggtgtgggaggaggaaggaggccgactgcgccgccaggcagatggcgtgggcggaggtagagtccgccacgggggccttctcgtcccgggtcatcggccacggcggcttcagcaccgtctacc

SEQ ID NO: 436641 - DNA, 468 bp, Triticum aestivum
ttattatgaacttactgacctgagttctgattatgaagtcctgggaaaagacactacatcgtgaaggagggagcactggccgctaacgaggctgtcgtgcagaagctgagaagatgggttcaacatcctgcccttctactaaatcagatcatagacacaaagctggcaactcgaatgaagccggcatagaagctcctatgcccaacaagtcctacatagtgccccaagctgggccctcagctcgtgcttttgggctcggctcgcgctcgttgcaactcggcccgagctaggctcggcccgtcaagtaaaaaggccgagccgagctgtacttttaggcttgtttcgacctcggaccgagccaggctcggctggcccaactagcgagctaaaagctcgcagcccagcgaaggcccaatgaacaccacacaccacaatttagcccatctagcccagcaaaatgactacaga

SEQ ID NO: 436642 - DNA, 396 bp, Triticum aestivum
tctttgacacaaaagtgaactaagaaggccttgagagcttgggcaacgcagacatgtcggccgctgtcactgcaactgtatcggcggtctgtgcgaccgtggcagtagtgataaccatcgtgatgatcagaggatgccgccgttggaggtggaaagtttacaagaagttcatggccaagatctccgacgaggtcaacagaaggaaccgagagctggaagcatgcgctgccgtgaacgatgtggtgatcgagatcggccccgtggagaagttcctccacgagatcctcatcgagaagccgatgaggttcagctcggagcagctggcgtcgtgcaccggggactactccaccgagctcggctccggcggcttcggggtggtctacaagggggagctcc

SEQ ID NO: 436643 - DNA, 400 bp, Triticum aestivum
ttcttcgacagacctcacgtagagtgacccaacaggtgattcatagactgagcacctagaagacctcgcaacgatgaggtctctcggccgcacttcgttgtgctttcacctggccctgcttctcctccttgccgtggtcagggcagatgatcctagcctcgccgatggagggaggctcatagaccccaagcctaccccaaaacccattccataactgatgcctcaacccaaccctaaaatgccggacccgaacccaagcccagacccaaacccaaagcccacgacttctgcaatgccggaacccaacccaataccggacccagatgccaagccacaaccaaaaccaatgccttagtctgacccgaagccaactgctgaaaagccaaagcctgaacctcag

SEQ ID NO: 436644 - DNA, 446 bp, Triticum aestivum
tcttcgagggaaagggactatctcaagacaatactccatcgaatatatggtaaattcatggtgcatcgcccattcatcaggaaagcaatcaacaacatcttctacagatttatatttgaaacggaaaagcataacggtattgcagagctgctggagatcttgggcagtataattaatggttttgccctgccacttaaagaagagcacaaattgttccttctccgtgcactgatcccacttcacaagccaaagtgtgtagcaatgtaccatcagcagctatcgcattgcatcacacagtttgttgagaaggactgcaaacttgctgacactgttattaggggcttgctcaagttttggcctataaccaacagttcaaggaggtgatgttcttgggtgagcagaagaggttttagaggcaacacagcttgcagagttccaaagatgca

SEQ ID NO: 436645 - DNA, 282 bp, Triticum aestivum
tctgtccgcccacgcgtccgcccgcactcgagccgccgcccgcactctctgctctcttccccgatcccctcccatgaaccctagcatcctggtgcagccacccctgccttcccccgtccatccccacccctcccccgcgccgcgagcccttccctcctcttcgtcgccactgctgtctctcctcttcctccccgctctagcccctccaggtcgtcgctcgcggtggttccagatcctgcgctggtcgtccccatgggtgaggaggggagggatgggtcttca

SEQ ID NO: 436646 - DNA, 391 bp, Triticum aestivum
gctgctcacgcgtccgaaagacatgtatgagagggttgactaatactggaaagattgcaaccttgtgttagctgttgctgttgtgatggatccacgttttaagatgaagcttgttgagttcagttactcaaagatttacggcgttgaggctgcaaagtttgttaaggtggtaaatgattcggtgcatgacctttttaaggattatgtggcacagccgctccccttaacaccggcctatgctgaacaagggaaaactgataatgctactgccaatgggaacaacacccaagcaactcaaccttcaactggtgatggccttcaagactttgatatatatctttctgagattgctacaacccagccctcaaaatctgagctagagcagtacctg

SEQ ID NO: 436647 - DNA, 371 bp, Triticum aestivum
tcctgccgatatgaatagagcttgatcaagaaggggtcatttgcatcactgaattgatttttccatcttccaacgcgtttgattttgcttgacctcgtcgttgacgaatatttattgatgcaagtcattgctcagctttttatgcgtctcaccaagggttatttcatcttcatcttttcatcaatattgttgaaataccgcgtgggtggattttgtatggctctctcacaatttccttctgatgtcccttgatcttccttttgctggtagataattcccatatgaatagagcttgagttttaccatggactttacacgagtttcaaagccacagttccaatcttttttaaaagttttctcataccttaatt

SEQ ID NO: 436648 - DNA, 404 bp, Triticum aestivum
tcttataactacagaggaaaacaagtctaccaaggagatgctgttctatgaatcgtctgtgccggcatcaggtgatgaagacaatgtggttcaggaaaagagagaagaaggtgatgtttctgtagagaattcaggccaaccaccatttcaatcaaaaatttggaatgaaaaagaagaggatgacaaaagtacagaggaaaacaagtctaccaaggagacgcattcgcgaggttcctattttcccgaatcgagtgtgccagcatcaggtgatgaagacaaaaagggagaagatcaattctctgtacacaatttaggccaacattcacttttatcggacatcggagataagaaagagcatggcataacaatggagaaaaagaagtctgccgaggacatgccaccag

SEQ ID NO: 436649 - DNA, 396 bp, Triticum aestivum
tcggctaacgcctcctccccccaaactcccaactacccgcttactcctgagttctgagcccggtcgatccccgccgcagccaccgacgccgcctccgtcaactcgcacggggaacctcgccatggccgccgcgtcgtccgccacctccgtccacgacttcaccgtcaaggatgcaagcggcaaggacgtcgacctcagcgtctacaaggggaaggttcttctcattgttaacgtcgcatcccagtgtggcttgaccaactgcaactacaccgagctgagccagctgtacccgaagtacaaggaccaaggctttgagatcttggctttcccatgcaatcagtttggtgggcaggagcctggcaccaatgatgagatcgttcagtttgcctgcacccg

SEQ ID NO: 436650 - DNA, 374 bp, Triticum aestivum
  unsure (1)..(374): unsure at all n locations
aaacaagacagcgcgaagtggagaggggagaactcaagccgtagctccggtaaagcttcagctacgatgaggacgccgccggagatgccgctgggtctccccttcaccgtcgacacatggggcccatcccgccgccaccggtgccaccgcttcatcacccacgcgcacacggaccacattgccggtgcctgggccggccccggcgacaccgtctacgccacgcagctcaccatgcgcctcgccctcgaacgctatccccagctggagcgggttaagtttgtggaaatggaggtgggaaagaggtnngttggtgggacgaccctgacggcgccttttccgtcaccgcctacgatgccaatcactgtgctggagcg

SEQ ID NO: 436651 - DNA, 423 bp, Triticum aestivum
gaagaaaactgcggttcataaaacgccaattatggatatggatccatcttgctgcgctggatgaagggctggatatggatccatcttgctgatttggaagaaaactgcagttcatacaatgctaattatggatatggatccatctaatacagttcttcacaaagcccaggaatcgcaagggttcaattgctttcggggtcgtacttttcttggtccttattggttggcctgtcttcggcatgatggcggactcgtatggctttgccctgctattctggttatcctctattgtgcattaatatgatcatctgatgtctgtttttcagtgtgcattaagaaatggtagaaacttttgggtattgtatctgactggtactgaatttcctcacaacagcttctagcccgctgctgctgtttacctgc

SEQ ID NO: 436652 - DNA, 410 bp, Triticum aestivum
tctttataatggcaggaccaacggcatactttcgaagtgctgaaatgtctccccaagaattcatagagattgtacatgcttactggaacactaagctacatacaacactggttcacgcattggagccatattccaaacaagtaaagagatgcatagaaatagctttaaattgtgtggatgcagatcgacacaaaagaccaagtataggggaaatcattaatgttttgaatgagatggagactgcaatacaagtccctggcgcttcaatgaatcacacagggtcatcgatgaacaagataaatagcgaccaggaaagagagttcctaattagggatgcacaggaaacgctggattatgtacatcgaggacaagggaacacatcattcgaggactgccgacaaactcacata

SEQ ID NO: 436653 - DNA, 361 bp, Triticum aestivum
gcgtccacgcgtgcgcccacgcgtccgcccacgcgtgcgggttgcactaggatccccgttcacctttgctaccactctagaacaggagtacaagagtgatatctttggggagcgaggaattttgctgggtgctgttcatggcatcgcggaggctctgtttaggagatacacagagcaaggaatggacgaggagctggcatacaaaagcactgtggagggcatcactggaattatctccaagaccatctcaaagaaggggatgcttgaagtatacaactccttgagcgaggaaggcaaaaaggagttcaacaaggcatacagtgcatcattttacccttgcatggacatactctacgaatgc

SEQ ID NO: 436654 - DNA, 478 bp, Triticum aestivum
tcccgggcagaaagcactagatcgtcttctgccttacctgaggtccgactttgatggcattttccgtgccatggatgggctcccggtgactatccggctgttggaccctccacttcatgagttccttccagaagggcatgtggaggatattgtgcgtgagctatgtgctgaaagtggagccgctgaggatgatgtccttgcaagaatggagaaactttcagaagtaaatccaatgcttggtttccgtggttgcaggcttggtatttcgtatcctgaattaacagaaatgcaagcccgggccatctttgaagctgctatatccatgaccaaccagggtattcaagtatttccagagataatggttcctcttgttggaacacctcaggaattgggacatcaggtggctcttatccgccaaattgctaacaatgttttcaccaatatggggaaaaccattgattacaaagctgggactatg

SEQ ID NO: 436655 - DNA, 606 bp, Triticum aestivum
tcctcgtccgggaaggaaggcagcgagagcagggcgcgggagactgcgagaggctgtcgccatggagaacgagttccaggatggcaaggatgaggtcatacaagcatggtacatggatgacagtgaagaggatcagaggcttcctcaccaccgtgaccccaaagagttcattcctgttgccaaactttcagaattgggtgttgtaagctggaacctgaatgctgatgactgggagaaagacgagaatctcaagaaaatccgtgaggccaggggatactcttatgtggacatttgcgacgtatgtccagagaagttgccaaactatgaggccaagctgaagaacttctttgaagagcacttgcatactgatgaagagatacgctattgtctcgagggcagtggatactttgatgtgagggaccaaaacgaacagtggatccgtatagcagttaagaaaggtggcatgattgttttgcctgcaggaatgtatcaccgctttacattggatagtgacaactacatcaaggcaatgcggctctttgtgggagagcctatctggacgccatacaatcgtccccatgaccatctcccagccagaaaggagta

SEQ ID NO: 436656 - DNA, 376 bp, Triticum aestivum
gctgctcacgcgtccgcgcgctgctcatcgggcgcgggtcacttcctctacctcaccaatgaagtggcaaaagaagtcgacgtggatgtacctggcggtgccgatggtgatgtacgcgtgcgagcggctgacgcgggcgctgcgggcgagcgtgcggccggtgaagatactcaaggtggcggtgtgccccggcaacgtgctgtcgctgcacttgtccaagccgcaggggttccggtacaagagcgggcagtacatcttcgtcaactgcgccgccgtctggccgttccaatggcacccgttctccatcacgtcggcgccgcaggacgactacgtgagcgtgcacatcaggacgctgggggactggacccgggagctc

SEQ ID NO: 436657 - DNA, 344 bp, Triticum aestivum
tgctgacgcgtgggctatgatccaaagtaggcgctggatcataggaaactactaatgagagggcgccgcctccaccggcatcaggctggtccacatccacgcgctgctcggcgtcactaggtcaccggcgcaactcctcacacctaggtcgttcaacattttcttccgcttttggtgcgtcacatttagagtctttctttctcattgtaccgtgtttgcatggttagatgtttggtcggatttgaaggttcgctaccttggctccaaaggcttcaagctcttatagaaattagaaccgatggccttttaaaatgagtcctgcataatagtgttgttcagtggga

SEQ ID NO: 436658 - DNA, 395 bp, Triticum aestivum
  unsure (1)..(395): unsure at all n locations
tgnctccccacgcgtccgccacgcgtccggagactgtcgtgaaagacactgtgaagtatacacagtatcaaagagcaattgctaaggctttggttgataaggtctcacaggatgaagtttccacaactaggacggtcttgatggttgttggagcaggccgagggcctctcgtaagagcatcattgcaagctgcagaagaaactggtcggaagctaaaagtatatgcagtggagaaaaatcctaacgcagttattactcttcatagtttgatcaaattggaagggtgggaaagcatggttactattatttctagtgacatgcggtgctgggatgctcctgaaaaagctgatattttggtcagcgagttgcttgggtcctttggtgataatgagtta

SEQ ID NO: 436659 - DNA, 338 bp, Triticum aestivum
cccacgcgtccgcccacgcgtccgcccacgcgtgcgaagccctccgccatggctcccacggcgccttcgccggcgaagtccgcctgcccgtcccaaccatccggcaagagcgaggtgtcggatctgaagcagcagctgcggcagctggcggggagccgtgcgccagacgctgatgatcagcgccgggatgtcttcaagcgggtgatctcttgcatgaccgcaggtatcgacgtgtcggcggcgttcggggagatggtgctctgctccgccacctccgacgttgtgctcaagaagatgtgctacctctacgtcggtgtccatgcgcgcgcccacccgga

SEQ ID NO: 436660 - DNA, 472 bp, Triticum aestivum
ccacgcgtgcgatgcactccactggggggagttctatctttgaaacttctttatgctttgtaaagcagtacattgtgttattgttagttacttttgggtagttcgaaatattgcacatttgaatgaaataagacattgtgcatgcctaataacataaggtacatgagctgtcttaactccagtttatgcaaaaggaaaaataattagtgcattgcagaaatatcacattgccagcgctaaatggctgaatgtcgataagaactgcctagttcgacgtttcaccacatgagagttgcacaaataaattatattattctacctaccccttttgagttcttgaatgtttcaatgttgaaacatcgaagcactacttttttcattccgtagctgcttatattttctctggaagtttgcttcaaatttgatgtcaatttctcgtcgtttttattcataatctgtgcagaaaacggag

SEQ ID NO: 436661 - DNA, 207 bp, Triticum aestivum
ttctcacactccaccgagctctcagtcacaagtcacaatggctactagcactaagcttgtagctcttggctttgttggcctcgtgagcattgggttcaccaatgcttgaaggatgctggctagctcaagtgctggaggtggaggcgggggaagcgggggtggtggcagctcgtcgggtggggttgggagtggatgggggcatggagc

SEQ ID NO: 436662 - DNA, 321 bp, Triticum aestivum
ccgacttgccagttccgatcgctgaacaccaaccactttcctaagtagaggggcgccgcggaaatgtcggcgacgtgcgcggcggacctggcgccgctgctgggcgcggcggcgatgaacgccacggactacctgtgcaacaggttcgccgacaccacgtcggcggtggactcgacctacctgctcttctcggcctacctcgtcttcgccatgcagctcggcttcgccatgctctgcgccggctccgtccgggccaagaacaccatgaacatcatgctcacaaacgtgctcgacgccgccgccggcgcgctcttctactac

SEQ ID NO: 436663 - DNA, 388 bp, Triticum aestivum
tcgagctcctcctactcctctgttttggctgcgcgcgcgcggggacggaggcatcgcagattcctcggttgccgctgcggtccaagaaccgggattcggcccttggttccactccccaaggtgcatttgtgtggaccaagatgacaatataataattgcctagcagaagccacccaacctgtaaattcagtcttctctgcttccagcaaaatgtcagtccggcgacggtcggagagcatggagggtctgttcttattcgatgagcgaaatgaccggaggtcggacgtggagaactcagaggatgagaggagaaggctgtccattggcgggtcactcaagaagaaagcgctgaatgcatcaagcaagctcacacattcgctcaagaagc

SEQ ID NO: 436664 - DNA, 355 bp, Triticum aestivum
ttcttacgcgtccgggcgcgtggtcctggtacagggtgtccaccgccctggaggccgccggccaccgcgtcaccgcgccggacatggccgggtgcggcgaggaggtggcgtccttcgaggagtacagccggccgctgctggacgcggtggcggcgctgccggagggcgagcaggcggtcctcgtcgcccacagcttcggcgggcagagcctcgcgctggccatggagaggcacccggaaaaggtctccgtggccgtgttcgtcacggccaccatgcccgccgccgggaagcccatgacctacgccttcaaccagctatcgcaagggaaagggccggatttcttatggattgcgcg

SEQ ID NO: 436665 - DNA, 415 bp, Triticum aestivum
ttctgtctcctctcgcaaaggcactcacctcgaccccaagcggatcaagccagccgtccccgccggcgatgggcaacaccggaccagcaggactatggccttcctctccctcctcccctctgtttttcctcgtgctccccggctctctctcacgatctccctctctctctgtttttcatcagctgcaggtcgctgtcgccttggtcaaccctcgccggagctccgtcgacgccccgttggccggatccggcccggaaacaagcagatcccttcatcctcggtgagctccacctcccgttcccgtcgctccgccgtgcgccaagttccctatcgtcgtgccctgcttctacatcctcccgcttgtctctgtgcgcgctaaaaatgaatgagccgccgcctgcgttgacccgctgct

SEQ ID NO: 436666 - DNA, 375 bp, Triticum aestivum
tcgtcggccggtttgttgttgtatgcggagatggggaatacataatctatactgcactggcttggaggaacagatcatttggatccgcgttagagttcgcttggtcatcagaaggagagtacgcaatcagagaaagtacatccagaataaagattttcaataaatcatcccaggagaagaaaactatccgtcctacattctctgcagagcgtatctttggtggggtacttttggcaatgtgttccggtgactttatttgcttttatgactgggctgattgtagactaattcgcagaattgatgtgactgtcaagaatgtctactgggctgatagtggtgacctagttgcaatcgcaagtgatacatcattctaca

SEQ ID NO: 436667 - DNA, 331 bp, Triticum aestivum
tcctagacacgctcaatggcacatatgaggcaatcaccaaaggaaagcctatgtggaatgagctgccagtatcagcaagcactctctacccatgggatccagaatcaacatacatgcacgagcctccttatttcaaggatatgacaatgacccctcctggcgcacggcctgtgaaggatgcgtattgtcttcttaacttcggtgacagtatcacaactgatcacatatccccagctggaagcatccacccagacagcccagctgccaaatatctaaaggagcgcaatgttgaaaggaaggacttcaactcatatggcagtcgacgagggaa

SEQ ID NO: 436668 - DNA, 340 bp, Triticum aestivum
gcctcctcacgcgtccgaaatctcaccgtctccgccccctcccccctcccctcacccccagatcgcaccaaccgccgccgatggccgccgccgccccgccgctcgccgcggcgctcctggccgtcctgctggcgctcgcggccccggcggcggccgagatccgctccacggcgatccgggccgacccgcgcaccatcatcccgctcgacgagttcggcttctccaaccagggcgtgctggagctcaacgtcaccggcatcgccttcgacccgccggcctccccggacctcgacctctcccagttcggcttcttcctttccacgctcgacgcctgggtgca

SEQ ID NO: 436669 - DNA, 332 bp, Triticum aestivum
ttgaggcctcgccaagaaagacagacggacgcactgagtgacgacaacactcaccaccgtgacgaacagacggagaggcaggcagccgtcagagatgaagaagtgcgcgtcggagctggagttcgaggccttcattcggcagcacatcgccgccgccgaggccgtggcccagcggggcaggcccgggcatggaaacgacgacggcgggttcggcggtgatcctggcgccagagcggacgtgttctcccccggcggtggcctgccgggcctctgcttcggcgactcgaacgccctggagctggaagggagcaacgccggccacctgtggtggt

SEQ ID NO: 436670 - DNA, 463 bp, Triticum aestivum
acctcccacgcggccgggtccacgggggcgcggcaccagccactgaagccggggcgtctcagccggctccaggcgaggacttggaagccgctctgccaggcccgccgccaggaactccacctccgtctgcgatcacccagcaggagactccagcttctccggctgcggctccagaagatgatctgcctctgcctcctccccctccactgacccagcatgaggaggatggaacgccagaagatgatctgcctctgcctcctcctcctccactgccccagcaggaggctggagcgccaggttcagcgccagaggcaggagccgtcgatgacaagtgggcaggaggtggcgatgacaagtgggcgggaggcccggatgacaagtgggtctagtggttgcttaaggcgtggaactgaactgaactgaactggttgtacatagatgctcgtaacgtcccctgctgaaa

SEQ ID NO: 436671 - DNA, 822 bp, Triticum aestivum
  unsure (1)..(822): unsure at all n locations
cctggcacctatggcgtatgccgcatggtatggacactgggctgagatgctcatccttgccgtgccctccttggctggccctgctctcgtcccatgccatgttaccacgctgtggatttggtttgctgcacgtttggttgagagcctcaacatacatagcggatttaagttgccattcaacgctgagaagtatataccgttctatggaggggcggagcaccatgactaccatcactacataggaggacagagcaagagcaacttcgctcctgttttcacctactgtgattatatntatggaacggacaagggctacagatatcacaaggcaactctggcaaagctgaaggagttggcaggcagcgacgttcagaaaggagtcgacaatggattcaacggatggaaagcaggactagagagaggttggcttcagaggactcatggtcatacaaatcctatcattaattcaagtggtctccggatatatatccccatgatggagtacactagtataaataattgttctatgccaatcaacaacgttgagtggctcgtgaaccaccggcagagtcgttccaagtgttaattatttccagttctccctccattcgcacacatagctccactacttctctattatcggatgtaataatgatgcttagttcgtgatatgcttgatagtgtgcgtctttgcatactacgtgacatgtctctagcangcaggcatgttggaacatgacaatatggagacatagtccagagcatttgcctttgtacttcaatatcagacgttgtcaataattgggcatctacctttttccc

SEQ ID NO: 436672 - DNA, 429 bp, Triticum aestivum
cacaaaaccctagccgtcgcctcacagctcgccgccgacgcagcgagctcttcctccaccgccgcaaccatggcgacccagatcagcaagaagaagaagtttgtgagcgatggcgttttctacgccgagctgaacgagatgctgacccgggagcttgccgaggacggctactccggcgtggaggtacgcgtgacgccgatgcgcacggagatcatcatcagggccacgcggacgcagaacgtgcttggtgagaagggccgcaggatcagggagctcacctccgtcgtccagaagcgcttcaacttcccggagaacggcgttgagctttacgccgagaaggtcgtcaaccgtggcctctgcgccatcgcccaggccgagtcactccgctacaagctcctcggtggccttgccgtccgcagggcatgctat

SEQ ID NO: 436673 - DNA, 420 bp, Triticum aestivum
ttcacgcgtccgcgactccttcgccgacatcctcaagctctacgagggtggcatcaagctgcccgacatcccggccctccaggagatgcgcaagcgcttcccgctccagctcgtcaaggacctcatccccatgggcggcgactacctcctcaagccccccaagccacaagtcatcaaacaggacgagaaagcatggatgaccgacgccgagttcgcaagggagattctcgccggcgtcaacccgatgatgatcacccgtgtcacggagttcccccccaagagtactctggatcccagccagtacggcgaccacaccagcaccatcaccgaggcgcacatcgggttgagcctggagggcctcaccgtgcagcaggcagtcgctagcaacaggctctacatcctcgaccaccacgaccacat

SEQ ID NO: 436674 - DNA, 517 bp, Triticum aestivum
gttatttccgcaaaacggatccgcaacttcgggaaaaggattggctctgaggactgggctctggggtcccggccccgaacccgtcggctgtcgatcggtgagtacgaccacgtgagggagctcatcaagtggggaaccgactacctgctgctcaccttcaactcctccgcctccaccatcaacaagctctacagtcaggtgggtaccgccaagatcaacggcagcacgccggacgaccacttctgctggaaccggccggaggacatggcgtacccgcggccggtccagcaggcgagcgcggccccggacctcggctgcgaggtggcggcggcgctggcctcagcctccatcgtgttccgcgacaacgccgcctactccaagaagctggtgaagggcgcggcgacggtgtacaagttcgcgcgcgccaacgggaagcgcacccgctactcccggggcaaccctgccatcgagtacttctacaactccaccagctactgggacgagttcatgtggagcg

SEQ ID NO: 436675 - DNA, 434 bp, Triticum aestivum
gggtccatcgccgtcgaggtcggcggcgtggagatcgggcaggggttatataccaaggtgaagcagatgacggcgttcgggctggctgagctctgctccgacgccgacgggctcctcgacaaggtgcgtgtcatccaggccgacacgctgagcatgatccagggcggcttcaccggcgggagcaccacctccgagaccagctgcgaggcggtccggctgtcgtgcgccacgctcgtggagcggctcaagcccatcacggagagcctcgagtccaagtccggcgcccctgcgccatggaaggccttgattacccaggcgaccatggcgagcgtgaacctgtcggcgcaggcgtactggacgcctgacccagccttcgtgaagtacatcaactacggacccgccgtcagcgaggtggaaatcgacgtgctgaccgg

SEQ ID NO: 436676 - DNA, 447 bp, Triticum aestivum
gaaacatttacggtgcaccctaaccctccatgtagtgatcatctaggcaagaatgatgcactatctgcactaggtggaaagttatgctatatccactctcccactccgtgggagattgccatttggttagcggaagatgggccaaatctgacttggtcactatgccgccgtgtcagtctgccgataccaagaaatcttcttgcctttgcatgtgcgtcaactgacccggacaagatattcctctccattgatgcgcgctaccttctcaggtgtgacctccataatgaatctcttgaagaaataatcaacatgcgtgacatgttgtatgatctccagaagggcagaaaattcaccattggttcactctttgttgcccactatatggtgccatttgtggaatcactgttgcgcatcagatcttcatagcaacaagccatcatatcgtat

SEQ ID NO: 436677 - DNA, 648 bp, Triticum aestivum
tcacgcgtccgacgaatcattgatgatgacatgcccctggcccaatttgctgttgccttcaatggagcatcctggacagatcctgattctattgcattaatggttatgcaaactatgcttggttcgtggaacaagagtgctggaggagggaagcacatgggttcggagcttgtacagagagtagcaatcaatgaaatagctgagagtataatggcattcaatacaaactacaaggacactggcctgtttggtgtctatgctgtcgctaaggctgattgcttggatgatttggcttttgcaattatgcaagagatgagcaaattatcatacagggttaccgaagaggatgttattcgtgcacgcaatcagctgaaatcctccatccaactccaccttgatggctccactgctgttgttgaggatattggacgccagcaactcatctatggccgtagaattcccattcctgagctttttgctagaatagatacagttgatcccagcactattaggcgtgttgcaaaccgcttcatctttgaccaggatattgccatcgctgccatgggaccaattcagtctcttccagactacaactggttcagacgcaggacctacatgctccgttactagatgattcgaccagcggtg

SEQ ID NO: 436678 - DNA, 601 bp, Triticum aestivum
gtaggtgtccccgcggctcgctcctcccccacccccccgcccccgcccccgcacacgccaccccatggaggcgccgccggggccggagcccatggtgctggacgcgccgcccccgctcgccgccgccgtcgtcccggcccacgcggccaccgagaagacgaggacggaggggggcgaccctgtcaccggccacatcatctccacaaccatcggcgggaagaacggcgagccgaggaggacaattagctacatggctgagcgggtggtaggaactggttcatttgggattgtcttccaggctaagtgcttggagactggagagactgtggccatcaagaaggtgctgcaggatcgccgttacaagaaccgtgagctgcagcttatgcgctccatggaccaccccaatgtcgtctctctgaagcactgcttcttctcgaccacaagcagggatgagctgttcctgaaccttgtcatggagtatgtccctgagactctataccgtgtgctcaagcactacagcaatgccaaccagcggatgccgcttatctatgtcaagctttacatgtatcagctttttagagggctagcttatgttcatact

SEQ ID NO: 436679 - DNA, 525 bp, Triticum aestivum
tgaaatggggagcacctgccaccagctggctccgcttctaatccggcgatgaatggggctgtggtttatcactccaacgagccgctgccagcgttcaaggacgtgccggtctcggagaagcagaatctgtttgtcagaaaggccaccctgtgctgtgctgtgtacgactttgccgatccgaccaagaacctgaaggagaaggaaatgaagcggcagacgcttatggagcttgttgattatgtcacttctgcaaatggaaagttctcggaaatcatcatgttagagatcagcaagatggttgcaattaacttgttccggagctcgaatcccactcctcgtgagaacaaggccatcgaaggagttgatatggaggaagaagagcctctcatggatccagcatggtcacacctgcagatcgtttatgaggttttcttgagatttgtagcgtcgcaggagacagatgcatagctggccaagaggtacatagaccattccttcattctcaagctactagatctttttgac

SEQ ID NO: 436680 - DNA, 470 bp, Triticum aestivum
cctggataaggaaacaagtgctaatgtctcgtataagcaagctgcgatttctgatattggtgtctatcatggtccatcagttgggactaaccaggacataagcaacagtgaagcaaacttgctagaagcaaatgctgctgacggtggaaagagctctcctgcaacttcaacgttgacatcttttgcacatcgtgatgggtctctgcctgcagaaccaaaggtccatgcagctcgaaccgaccaaatttggtcaattactaagctgtccgtaaaaacatcgtcagtggatggaaatggtggcaattcatcctgcatggctgatgcttgcaatgaaattagttcctgcaatgcttcacccatggaatatagtggcaattctgattctgattctgaaatcttccgagtcaagcgcagatccagcatattaggaagacctgctcctgacacagagacaacaaacttctctgaac

SEQ ID NO: 436681 - DNA, 279 bp, Triticum aestivum
ttggacgcgtgggatcagctagctgatgggggtgcttcactggcgtgagaaggccacagaccggggataaaatttgtcatatagtttgtagtttgtgttttgttctcgagtttttctcttcattctcgtctccggttctgcaacagtgtaaattaccaaagtggttccgtcgctgtctttacaatgactgattaagctagcattgcggaaacataatgtatggaataaatcatcttattgagcatgttcttgcactcaaccatacatatagaagaaact

SEQ ID NO: 436682 - DNA, 693 bp, Triticum aestivum
ttcggtttgtgacagagaagtgggtagatgggtgggatgatcctcgtttgatgactttggctggactgaggcgaccaggagtatcagcaactgcgatcaattcatttatccgtggaattgggataacgagaagtgacaatagcttaattcgtgttgaccgtcttgaatatcatatcagagaagaactgaataaaacagcttctcgaaccatggttgttttgcatcctctaaaggttgtaataactaacttggaagatggaaaagtcatagaccttgatggaaaaaagtggcctgatgctcctgctgatgaagcttcgtcctactacaaggttcctttctcaaaaaccgtctacattgaaaaaactgattttcgcgtgaaggactccaaagattactatggattggctcctggtaaatctgccctgctgaggtatgcattcccgataaaatgcacagaggttatttatggtgataatccagatgatattgttgaaattcgagccgagtatgacccttcaaagacctctaaacctaagggtgttctgcactgggttgccgagccagcacctggagttgagccgttaaaggttgaaataagaatatttgagaaattattcctctcggagaatcccgccgaattgaaaaactggctgggtgaaattaacccgcactcaaaggaagtaatcaagggcg

SEQ ID NO: 436683 - DNA, 422 bp, Triticum aestivum
tccacgcgtccgagttgggctaactatatttactttgctgaactccctttgtgatggttcttcttgaagtgaagaattgacctctagactggcataattcagttcctggatgaaaaaatttacatgtccttttagtctgaaaatcatagtgggccttggagcatgatgcagaaaattgtcggtctgccctgcacttcccatacatgaaggcaaatgatttctttttggatgccactgtcgtccggcacatggggtttatcaatgagtaaatggtacaaagttcgaattatcagttcacgttcgtcctgatggatcgatagcttcgtcgcggtcatcaggagaaatatcaccaatctagcggacggccaaaccgagcggtcgatacaggaaactagcccctgccattccccatctctgtattt

SEQ ID NO: 436684 - DNA, 476 bp, Triticum aestivum
tttctcattcccccacctcccctcccgtcccgataaggcggacagcgaccgagagaagctcccggctcccctcctctcccctctcatcgcctgggagaatccgacaagctccatccatccagaggagagggcaggaggcggaggagggacgagcggccgtgcctacctatctatctacgccgccggaatggactcggagcactggatctcgcgcctggccgccgccaagcggttctacgccgcgcagctcggccacgccgatcgggcggggatggacgagctggacatggacggcgacgagaacgcgggcaggcccgacttcgcctgcccctactgctacgaggaccacgacgtcgcctccctcgtcgcccacctcgaggaggaccaccccttcgagccccacgccgcgccttgccctgtctgctccgaaaaggtttctaaagatatgcttaaccatatcaccatgcaacatgggt

SEQ ID NO: 436685 - DNA, 286 bp, Triticum aestivum
  unsure (1)..(286): unsure at all n locations
tttcttacgcgtgggcgaggttattgaccgggcaaaggttctgtttgatgaagtatcacgtactttacacctgatctccgagaaaaaggctcactgcagttctctcaatgtggaatgtaccaattacattgctgaacttgaaagcatgtttcggaaggaaaagttagaatttgaggtgcgctgccttttgataccgcattcttgtaacatatccattaaagtagagcttaattgtaattccaacacatggnnnnnnnnnnnnnnnnnnnnnnnnnnnnnnnnnnnn

SEQ ID NO: 436686 - DNA, 226 bp, Triticum aestivum
tcgtacgccgcccgatccgacgcgccggcgacccgccgccgtgctcgagcggcgctgatccgcggcgcacatcccgtacgaggtttgctcaccttatcagctcgagggtgcacggttgacgcgcctagccggctcttgaatttcagcgcacgcggatctggtgggaggagccccgtgggcgccgctgcctgggccatgtcgagggtccgggacaggacggaggact

SEQ ID NO: 436687 - DNA, 431 bp, Triticum aestivum
tcttcacttgggcatctttttcacctcagtcagtcagagttgccagtcaattggtcagtcagttgggcattcagtcagtcagtcaattcgcgcagtgcggtcagtctcagtctcagttcaaaggcgagttgcgcgtgcgtcggatcgtcgacctagtgcttcacctcctggtgccaatcgcgcatcctttcgagctcgagccctcggacagccgtttgagcggcggcttgacgaggtgctaggtgccagtcccatctgcctgcagcagcaccagcatcgcgccttccctcacaagccgcttcttagtgagctccacgtgcctcgactgccgcctggtccctttgcgcgatagcgtgccggcgcatgtgatcacgcctctcaactgagcaatctatcttcttcgcgtctttcaccacattgctgacggacgt

SEQ ID NO: 436688 - DNA, 440 bp, Triticum aestivum
ggcgaaggcgagagaaggggacagcagcgggcgagacagagagaggcgaggagacgacagcaccgcccccatgagcgccctcaagctctgcagcaaatgcgacaacatgctgtacccgcaggaggacaaggagatgcacaccctcctctacgcctgctcgaatcgccagcaccaggagattgctactgattcttgtgtgtacaaaagggttcttcggaaatctgctgatgaacctaaagacaccctaaaagacgcagctgctgacgcgtctctgccacgcaccagaagtgttaaatgctacaactgtagctatccagaagctgcttatttccaggccccgacgacaggagaggttggcctgacgctatacttcatctgctgcagccctacctgtggccacaggtgggtggactgactgactgacaagggggaaccctcca

SEQ ID NO: 436689 - DNA, 416 bp, Triticum aestivum
ttttcgctcgacggcgatcctcgagaggaagaagtcccccaaccgcctcgtggccgacgaggccaccaatgacgacaactccgtcgacgccctccaccccgacaccatggataggctgcagctcttccgcggcgacaccgtcctcctcaagggtaaaaagaggaaggacaccatctgcattggtcttgctgatgacacatgtgaggagccgaaggtcacaatgaacaaaactgtcaggaagaacttgagagtgtgactcggtgatgtggcgtctgcgcatcaatgcccccatgtgtaatacgggaagcgcgtgcacatacttcccattgaggagacactttaaaggggatcacgggacatttgttacaccctttctaaaacatacattcctttaacccaaagccccttttgaaaag

SEQ ID NO: 436690 - DNA, 749 bp, Triticum aestivum
cccttctccccgacgggatgccagcaccggggcgatcgcccacggcattcgtttatggttgaggtattgtcaggcaggggtatttgctgctagttgacccggcttaaaatcacagcaaaccattgttggtcatcggtccacacttggagtggctctaggccatggtccgccaattgccggggaatggcgttgggattgttagcatggagggaaaatttgcgggatatttccgtcagaatggtttctccagcttgcagatccaccgttaaatcaagattttccaaccgcaccgtttgcttcgtgccactgcggaaatacatttcaatttgggatttttgctgattaaatacagcccgatgggaaaagttatccaacgcaaaattaccttgaaaacgccaatttaaatggcgcaacatatttaaattaaattccgccgttaccccttgggcatcgttataggcggcttctaaaatatcagcaggtttgcataaatccacccctaataaaaagtaatcccctgggtctaacgcttgacctacttgttcaaagaatacttgacaatcttcaggggaaaaattaccgagagaactgcctaaaaatgccatcaaacgatggggataattatgatcgggcaatgatgccaacgccaactgataagtacttactaaaccttgcaccgttaagtggagataggtagctaaaatagcctccgcattttctcttaaaatcgcttcactgatatcaacggg

SEQ ID NO: 436691 - DNA, 838 bp, Triticum aestivum
agtggtttatgtttttctgaaatagagatttaaattttgtctaaatccaagttatgtcaatgaaaaaataaaggatttcagacagttcttagttagcttttttggcactctcggtttaaagtgtaatcaagctatcattcggtgtgaattatgattcaaactaagagtattgaccatcatcaacaagtgggaggtagcagtcatcattaggggcaaaatattcttgcccttgattagattctctataatcagcatataatcgagcgtcttcttcttgatagtctgacattaagtatttttcatatagaccatcgaatactttgggtgaaatataaatattggtctttcttaactctctaaggcgttctcggcatacattgaattcactttctatggtcaccattagtttgttttcacagagctccttgatatattcatcactttttttctttacatacaaaaattttatgctttctccgattgaatgcatttggtgaaataaacttgccatgctattcattatatacatttcacctaccttactgtatttatagttgtatttgtacctctgctcattctgctcattagagtcatacctgggtgatgaaaattctttataaactttctctgaatactcttcatcactcattaatgaatcattgatagactcaaattttggcatgaacattctgcaaaaatcctcaatcgtgtttatgtatttttctaactgattatgttgttcttcagttattttttgcgcggtaagaatactacgaaatatattatctatactatctacgctaacaaagcattttgtgtaatagattcttcagatcct

SEQ ID NO: 436692 - DNA, 478 bp, Triticum aestivum
cgccaatggcaatgcagttagtctgggggccccgccgatgaaaccggggacagctactaaacccattgccagtggtggtggtagctctggccctagtctgggctccggccaacccagagcagaacggcccggtgccggcaatgcaggggcaaatgttggtcccattgcggccaatcccgttgctagtagtgctccccctaaaccgaaaccaactcccagttcccccgctaagccagaccccttaaagtgcgttagccaatgtaaacccagttatccctccatcctccagggggaagaaggtagtgctacagtattaatttcagtaaatgatagtggtggtgtgaccagcgtaaccatcaccaatgcccacggcaacagcgaggtcaaccgccaggccctattggcagccagaaaaatgcagtttacggcccccgccagtggtcaatccaaatcagtccctgtggtgattcacttcacc

SEQ ID NO: 436693 - DNA, 714 bp, Triticum aestivum
agcccagaacccgttagtgatagcttcccaatggattacgaaggcgaaggcttaccagagcaaccagaaccatggtccactggcggcctaggggatagggatgaatgggagctggccccaccggccggggaagcttgttatcggcaaccggagctggaagggctactccattccctttattccgctcggtcagtgttggtgacatcgggggaaggcatgggcaaaacctatctggtgcggcaggtgtgggaacgactgttatccgatggggtgacgtgccaatactttgaaccagctacccccaaaaccctcctgatggcgatggcttagtattagcaacggaaaaaatttggtcgttaaggctgaaagctttatccagtaatgcttccagacatcaaattttataatttatctgaatcattactgtcccattcatgactataagtaggacaacttcaccgcctaattaccggaaaaccttgatttcttgttagacagactcgtaaagccaaaaatcgtaaatgggactgtttagatgagcgaccaaaaattttccactactaaaactaagcctattttagatatatgtgaaggtttttacacgtatctcggcatgacccctggtattgtgctcagctataagtgattttgcattatgtgcgaaacgtgagttttaatgagacagaacccaaaatctcgatgattgcggatcct

SEQ ID NO: 436694 - DNA, 216 bp, Triticum aestivum
cgagctcggtacccggggatcgccgtttcgatgggggcatggtcgagggtgacaaatcctccggcattgcggatgggggcaaaggcaatggcggactgttccaggcggagcatagtggggtcatcaatggtgagctggccactgataaaagtcatggggttgatgtaaccctccaggcgatcgggcggttcatcgtcgaggtaaatggtttcggta

SEQ ID NO: 436695 - DNA, 596 bp, Triticum aestivum
gttttctaaatggttaaccaattgggttccggtggttaaactgttgtagtcgttaaaatcctctgtgagagcctgccgttgtaattttttttgctgttgcaatgcttgcactaatagttgcaaacggttagtgttaggaatgcgtcttttgcctagcaccatttgtcctaaatctaagcaaacttcccccagagcattaaacgcatcttccattaggatttccactgtttgtaattggggtagattgtggaaattaacaatttcattgagcaacattaggcatttatttaatctttccgtatgctcgattaaaactaataataattcccttaatttactttgtccccataatcctcgctggctggccaccagagtttgccgagatttaagcaagttttgacgcagtttgaccaccaattgctgagcttgggggtcatcgggactaaagttagcggcggccatggcccggagataattgcctaaaatgctgtaattgttggcaaccatttgccgcaaaggttgattgggacggaagggccaaatgaaaatagctaatatcaagctccacattcccccgatcctctagagtcgacctg

SEQ ID NO: 436696 - DNA, 184 bp, Triticum aestivum
cgagctcggtacccggggatctggccgaaaaagttggggagctaaaaaactggaagcaaatcggtctaactcttggaggtgcaatcatcgggggaataatcacctacctagcaaggaatgccaacccttaagaataggttttatttcattggccttgattgctaaatatgttcacacaacagcg

SEQ ID NO: 436697 - DNA, 500 bp, Triticum aestivum
gggcactttttgcgcccccaatcggaggcggtgaaccaagcatcgtggttaccaaataccgttgccttgggaatgggtaaggaggcaatcaagctgaccaccggcaatgattcgttgccaaaatcccccacaaatagtgccaagtctacgccgatcgcctggagagcttggtggtccgccaattcccattgttcatggatatcccccacaacggccagggtagtggttgcggtaggttggggggccatcagctctcttcgctttccgacatttctgccaattcttcttccccagaaggaggcactagggccacagcggcgatcgcatcatcggcatctaacctttgtacccgcaccccagtggcactacgggattggggggaaatatcgttcacggactggcggataataatgccccggttggtgacaatcatcaactcgtcatcggcgttgaccacatggagggccactagctggtcatctttggatttaacggatcct

SEQ ID NO: 436698 - DNA, 341 bp, Triticum aestivum
cgagctcggtacccggggatcaagttcctggccacggaggacattcaacagttggctagtttaccccgggctacttccgccgacctggcccgtgcccaaacccataatctcaatccccgcctgaggcaaaacttacaagctttaatcactagggcctacagccagatttaccaaggcgatcgccgacaggaatggggcaaagtaaaagaattttacctgtggcagttgccgttagtgttgcgacaaacggggatttacaccatggcggcctttggtattttttgcttcgccagtgccattgcctggtggtatagctggcgggatcctcagagtcgacctgc

SEQ ID NO: 436699 - DNA, 920 bp, Triticum aestivum
taactacgggtgaaatgaaaaagcgtgcaacttccgtgtcaaagtcccggaaatttccccccccctcataagccgcatttaatcgataaagagctgttcgttgtgagtttaacggccctgacaagtcaatggttggacgcaccagaccaaaattacctgcctgcatagcaacttcataaaaaggttctgaaaggggctgtttggtaatgtaattaataacgccgccaggatctaaattgccgtagagtacggaagccggccctttgaggacttctatccgttgtagatttgccgtgtccggaatagaaaaattatctctgaacttaaagccgtcccggagagttccgccaaattgttgaaaaccgcgaatattaaatatttcggatgtaccaccaacagtatttcctctctgcacaccactgacattttgcagtgcttccgaagcacgaattatttgcctgtcctccaacacctgttggggtaccacttgaatcgattggggaatgtcccgtaagggagtatcggttagagtcgccgttgtggcatcgtccaccgcatagccttcatcctgttcaccggtcaccactacctggatagcatcattgccatcctcttcatctgccacccctttccctggacttaaccccagtaccagggattggtctgtggcattaacttcaaccgtcggcggcacattgaccccggtaatggcaatgcgaacaatattatcaggtaatgctgtaacgctcactagggcaatttcttcggtggggttttcctgttgcagtccgtcactatccggcaaggctaggatggcattgggaatatctacaattagtgcattgcccacaacggaagtggttggtgttgataagcggcccgtggtagccagggtcagttccagtccagcttcggtcaaa

SEQ ID NO: 436700 - DNA, 643 bp, Triticum aestivum
tgccaacatggaatcggtttctgcattcacggcaacccgattaatgcctccctcggcttgaaactcgtcaccgtgacccacatgggctgttacgagattgggagttcctagggtcaaacccagtgccagaaaggaacttgctaattgaattgttttcatcacaccacctcaaattgggaatttgtccaagattttcccagtctgccaaagggggtatgaaattcaggtgaaaatctccttcccccgctaagatcagaccgttataaaaaaggcagaggcgatgcgaattttgctggtggaagatgagacggatttgggaatggctattaagaaagtgctagttagtgaaaagtatgtggtggattgggtgacggatggctcccaagcttgggattatttggaaaatcaatggacggaatacacccttgccattgtggattggttactgccgggattatcgggtttggaactctgtcaaaaactgagaacccagggtaattccttgccggtgttgatgttaacagcgttaggagaaccggaaaaccgtgtcgaaggactagatgccggggcagatgactatctaacaaaaccgtttgtgatggcagagctattagcaagactgcgggcactacaacggcgatcc

SEQ ID NO: 436701 - DNA, 550 bp, Triticum aestivum
tgcctactgtgatttgagcagcgtcgtattgccccagggttgccaaaccaagcactgttgctcctagtccaaggatgctgttaacgctcagatggcgaaccgcaggagagaagaaaccgttgttggtgggggcagattgaaccaagaacttatcttcaccacgagtgaaatcggtaatcacgtcaaccttggacaaattaacgttgaaccaggagaggccgagctgggaatccttaagattggtgtagtcaaataggtcattacccataccaccagtcaaaatatccttatcggcaccaccgataatcagatcattgccagcacggccattcaaagtgtcattgccgtgaccgcccatcaaagtgtcatttttttggaagccaactatgctgtcatcgcctttaccgccatcaagaatgttctcttgatcatcaccaataatgatgtcattcccaatggtaccgataacgttgtcaaagttgaccaccttgaccaaactttgaggagagcatgcaccagaaatcaagatactttgcatgcctaggtctac

SEQ ID NO: 436702 - DNA, 617 bp, Triticum aestivum
ctggggcttgttgttgaggagattgagaattttatcgccccgttccaaagagcggtcttctaaaaaggaaacttctggggtgcgccgtaaacgcatccgttgccccagttctcgacggacaaagggagcggcggagtgcagtccagccatggtggaggctttggcttcaggggagccgtaaatgctaacgaaaattttggcgtgctgtaggtcgccggaaacttccacttccgtgacgctaaccatgcctgtgcccacccggtcatctttgatttcgtggagaagcatttgactgacctcccgcttaattagggacgacacccgggaaactcgacgactggtagccatagacctgctcctcggcaacaaaaaagtccgagcctggacagattagcccaaactccctctacacggtcaatcctaacatggcccgcagagtgaaatagagaaaaatgaatccactgaccagcagtcccatcagggcgatcgccccgacacgattttttaataggggctggagccaagtgaaaacggagaaaaagatgcccagggtaaaactgatcagataccggggataacgggaaacgtagagctaaaaaatcacccatggttattgg

SEQ ID NO: 436703 - DNA, 800 bp, Triticum aestivum
cctccggttatcacttggacgtcggagaccgcggtgattcatggtatgccccccgattactccccccccgatgtgggcacggcagttcagttttatgcgcccgaatttcgtgaattcatcatggaagtttttgaacgttgtgttcagcagggcgagccttttgatgttatctgccaacttcaagtgcctgacggacgcagaccttggatacgggccattggcgaggccgaacgggacgcccaaggtaaggtaattgttgtccagggggcgtttcaggatatttcaaccctacgggaggcccaagagcgtttccagttaatatccaaagccgccaatgatgtgatctgggactggaattttgctaccaatcaagtctggtggaatgactccataacagatctgtttggctatgctttgttagatatggagccgggactagaatcctggacgctacgcattcacccggatgacaaagagcgtgttctccacagtatttatcaagttatcgacggtgaagaaaattactgggaatgcgattatcgatttatgaaaagcgatggccagtacgcgaatgtcatagaccgtggttttgtgactcgcgatggacaaggcaaagccacccgtatggttgggagtatgctggacataactgagcgtatggcaatggaacaaaggctacgggaatctcaaaaaatggaagcggtggggcacctgaccggcggtgtggcccatgatttcaacaatttattagcggttatcctgggtaacgctgaaatgttggcagaactggtgactgatcc

SEQ ID NO: 436704 - DNA, 335 bp, Triticum aestivum
cgagctcggtacccggggatccttttgaccgtatgattattgcccaggctcagcaacataatttttccgtcattagcaaagacgaaaatttcaaaaaatacaacgttaatttaatctgggaatgagaacaataacctgtttgtatgagtcattttcattccttgaaccttattgcttagaacgtgtttagcagttttgttcagccccctaaatctcttcactaaagctccggcaatactgggggactttcactcagtttccccccaaattggaggccaggaggacatttaaaacaggctcttaaatgcctttaacaattgccccgaagtctccga

SEQ ID NO: 436705 - DNA, 813 bp, Triticum aestivum
ctttaaataagagccgtccgtaaatctgagttaatttttggtgcacatttggacacattactccaagaagtgaatgacatttaccaaaatgatgccgagctaacaaagttgctgggttctctgtatcaacaaacccaagattatgcgacagagtttggtgctttatctggtggtaagaagaaggcaaagtcttaggttgttgaatgtttgttgagggttatggctagtacttgatggcgtaagttcatcaattatttagaggttttaagatatcagatatcaataactgggtaatgaatttatgccaagctctactagtgcgtagctctctttttttttctttttaggtaaacttatgacaaaaatttatcgctgtaaattaactctccatgacaatgttttttttgccagtcgagagatgggaattctctatgaaacagaaaagtatttccataattgggcattaagttatgctttttttaaaggaacaattattccccatccttatggcttagtcggacagaatgcccaaacacctgcttatttagaccgagatcgtgagcaaaatttactccaccttaatgattcaggaatttatgtttttcctgctcaacctatccattggtcttatcaaattaatacctttaaagctgctcaatctgcctattatggtcgttctgttcaatttggtgggaaaggtgcaaccaaaaactatccgattaactatggtcgtgccaaagaattagcagtaggtagtgagtttctgacttatatcgtgagtcaaaaagagctagatcctctaaagtcaacctg

SEQ ID NO: 436706 - DNA, 712 bp, Triticum aestivum
tttactccactggtcatgctccttgtgatgacgtttatgtctattatttggatgctccattgaccaaaaaagtctctgctaatgaatgcggtattgtgcaaatttcccttggctcaataccccatactggttcaacagaagtaacgttgataggggtggggccagcaacggtgagctcctttcctttaatggctaaagcagatgcaccaaaatgttccaatggtgtggcgaccaacattcctgcggagggaaaagcacgatatgttcccaatgcggaaacgggtaatcaatctttagtgtggacggggcaaacccctttcacccagtacgacatcacgtttcccataccaaaggaaagaaagctgaaatccaatgcttgcggtgttgccaccatatcatccagtagttcttatccttccaccggaacctttcgcatgggagcgagcccaactgttcataactttgccacggtgactggagttaatgcacctcctggttgcaaaaacaatacgttgcttttgcctgttggttttcccaactaaggttggggtagataatcaattggcaaagataagagaaggacagggtaaaggttagatataagcaaaccaattattcagcgtcctgaccaccgagcaccagcaatttaaccgtaatcacatgactcctcagccgtgaccattcccgaaaagttgcggcttttgacgatcct

SEQ ID NO: 436707 - DNA, 580 bp, Triticum aestivum
aatcccatcgcccatgcggaaatgttagccatccaaactgcttgccgtcggctaggccattggcgattgaatgaatgcaccctttacgttacgttggaaccttgtcccatgtgtaccggcgccattatccaagcccgtttaggtttattagtttatggcacccccgacccgaaaaccggcaccatcgacagcgtgttcgatttggccgccagcgctgcctctaaccatcacttacaaagcttaggaggagtgtgccaagaacagtgccgtgaacagttacaggattggtttgcccaacatcgggctaggaaaaaacaacaatcccttgtttcctgaaggttggtattaccccgttgggactttgcaactacagcctttgatgggtatgggaatgttgcttaacgttatcttcagctttaaccactttgctgtcgttgagaatgcgttttttctccaaagaaaagttaaatttgtcccatttttccccaatggctaaatgttccttagcttgaggccgaacttggtaagtacgggccgccgctgtaaaccgttccgcaaaatcgtcacagaattgggcact

SEQ ID NO: 436708 - DNA, 859 bp, Triticum aestivum
cccggtgcggaaatccctattgccaaaccacttcccggctttggggtttgcccctcctacgcctggatatggggcgggtctacgacggttccatggtggggcgatcggaagctaatctccgcaacgccttgaaaaccgccgagtccatttctccagctattttgttcattgatgaattggacaaagcctttgccgggggagccggttccggggattccgacggcggtacctccagccgcatctttggtagtttcctcacctggatgcaggaaaaaacttcccctgtattcgttatggctacggccaaccgggtcgatcgcctgccaggggaatttctccgcaagggacggtttgatgagatttttttcgttgacctaccttcttccgaagagcgggaagccattttccgcattcacctccataaacggcgcaaagacacttcccgttttgacctgggggaattggcccgcacctccgacggtttttccggagcagagattgagcaggcgatcgtagcggctatgtacgaagcctttgcccaagaaagagaatttaaccagctcgacattatcgcagcgatcaaatcgacgttgcccctgtcgcgcactatggtagagcaggtcaccgcgcttcgtgactgggcccgacaaagggctcggcctgcctccgcttctgtggctgaatatcagcgactggagttctaacaagctttctcctgttcccgcaggagcaaagactaaccgttgggttagtagtttaagataagccgttttgatggcggcatttcccacttctcaattgttgttgttgacatttttctctggaggaaatccaccatgtctcatttcagcactctccg

SEQ ID NO: 436709 - DNA, 542 bp, Triticum aestivum
caatgctcccagcatctgtcttgggcaggacttttccataggttgcatggaatttaatcaatggtaagtgattatactcacaattattccagtgatttttgatatttattctgaacagataatgctaacttaatagttgagaattatttgcagttttgggaaaaccatgacgttattggatttatcggtgggtcagttggcttttgtggagaaaattttactaggaaaccacggtcaggggttagttaatcgcctagaagcaatgggaataattcctgataagccaattcaattgctccgcaaggctggtttggggggaccactccacctccgcattggtagcaccaccgaagtggccatgcgccgtagtgaagcccaattggtgcagattaccttaggagagtagggcggagatggtgagtcattgccaaagggggtcagtccagtccagtcgtccagatgtgcaaggaaagaaagcttttattggtcagcccaatacaggtaaatccactttcttcaaccggatcctcagagtcgacctg

SEQ ID NO: 436710 - DNA, 667 bp, Triticum aestivum
tttcttaatctctggtcgggctggggtatcaacgacgatgtgctcataattacgggccgcttttaatccttcccgctcatcaacaactgggaaatctagcttttcatgggatgcccaaagcagtgccgaacggttcaagtccccatcaatcaggattgttggagctttgttattgaggtaggcggccaggtgaatagagcttgtggttttacctaccccacctttaaaagcagtatcggtgataatcattacatggttcaatatttaaaagtttagacgtttaactgtgtaaactttcgaatggctaaaagggcagacgcttggaagtttaaaatgttgctaagatttttggcagcaatgtgcaataaaaattactaggggttaatgagtctgattgtcaggagcttgtcgaagttcgattcagacagagtgccaaagtttttattaggggtttcaagtgatgactaaaaaaatactaggggtttgggatgaaagatacccgttattctcctgactggcctcagttggccctacaaaaaaagcaagctgttggttgggtctgtgaacggtgaggggtgcaatgcctcaagcctggcgaggggaaggggtaattaaaggaggaacggtatcggctcaggatggcggttcatcactgcgattatgatcc

SEQ ID NO: 436711 - DNA, 515 bp, Triticum aestivum
tgtagtaaatttaaccgcattagctagaatgttaaccaatacctgtcgcacccgtgttaaatcccccaatatcgccataggtacctggggctcgatttgataaaccaaatccaatttttttgcaaaggcttggggcgcaactaaatccaggcattcttcgacacattgctgaatttcaaagggatggatttctaacttaaattgtcccgactcaattttagaaaagtcaagaatatcgttaattaaactaagtaaggcttcgccactactgcggatggtttcggtaaattgttgctgttgggtatttagatgcgtatctagcaataacccggtcatgccaatcactgcattcatgggggtgcgaatttcgtgactcatggtggccagaaaatcacttttggctcggttggcatcttctgcggcttttgtggccgtcattaaagctttattttgctctattaattgttgacgaatttccctttcttgttctaataatttggcttgagctagggcaa

SEQ ID NO: 436712 - DNA, 500 bp, Triticum aestivum
ccggtattgggagatttagggggcaaattaaaacttggcaaacaggctctaggaaaaggcaataggtatggtggaaggtttttcacgtcgttcagaattcactctggcccggggaggggatattacccaagggaattccctcaccaatggtttggactggggctttaaacagttgacccgtctctgttccctcgcagtagtggtgattctcggctggatcgcctgggtggtttttaccgatgcccgaccggcgatcgccaagtttggttgggaattcatcgtcagtcaacaatgggacagcagtgggcaactgtttggcggcttaccctatattttcggctcggtggttagttccttcatcgccctaatttttgccctgcccttggggctggccgtggcggttatgaccagcgaaaaccttctacctgcaccggagcgggtgcccattgcctttctggtggaactgattgcttccattcccagcgtgatcctctagagtc

SEQ ID NO: 436713 - DNA, 897 bp, Triticum aestivum
cctccacacccccaaggatgctgccattattcaggccatgctgctgttgggcaatggttttaatttaaacattattgctgaaggtatagaggaggagccccaagctcgttgtctctacgatttaggttgccgagaaatgcaaggttattggtttagtcatcccctttcagaagcagaaattacggctttcctagcagaaggcaatttccaaagattttgcctcggttagggagctttttcgacgaatttagtatagctaagttcattgattgcattccaactaaacatttgactgcggaatgtttgccattgttgataaatttccttaaattgggcatctttactggcaaattctgctagcaatgctcgggaagtttcctgggccactgttaaaatttctggagaaaaggatttcagaattgtgcctccatccagtaatgttttcagggcaatgctattaaaagtttcataacgggatagcatcaatagattggcactacgggccgcttcctggaaaatagcttggtattccggcggcaatttcgcccattggctttggtttaccaatacgtccaagctggggcctggctcccaccaaccgggatagtaatagtatttggccgccttatttagccctaacttttcgtcgtcgtagggccctacccattccgctgcgtcaatggtgccccggtctagagctaggaatagttctcccccaggaatcacctggacgttgacccctagttgagccattacctgccctcccaagccgggaatccgcatttttaaaccccgcaaatccgctagggattccactggctttttaaaccaaccagccatctgagcaacggtgttaccggcggtgaagttaatgatattaaagtcgctgtaaacttg

SEQ ID NO: 436714 - DNA, 504 bp, Triticum aestivum
gcgtaattatttcgggtcttgaaaagcccgttcatagacataataaactaccgttttggaagcgttgtgggggccgccctgggtcatgatatacacctcttcaaaaactttgagggcggaaatggaagataaaactcctactaagaaacaatagggccgcatgaggggaatggtaatatcccaatgttgtcgccaaccgtccgctccgtcgatcgccccggcttcatagagttcctggggaatggcttggagtccggccaggtaaatgaccatgtaataacccaaccctttccacactgtcaccaccatcacactccacagggctaaattgggactggtgagccaaggaataccatcgctaaatcccagtagggcaagaatttgattcaggatgccattggaagcgtagagggctttccaggcaatgcctgccaccacaatagaggtaattaccggagtgtaataggccatgcgaaaccagatgatgccccgcagtttttggtt

SEQ ID NO: 436715 - DNA, 637 bp, Triticum aestivum
cggtaattagttccggcaacaccttaccgaccgctgcgaatattaccctgcccactgccggttccaccgagagtcaggggggaacgccccagcccgatctggaagcttttgaagggatgttggtgaaattcactgataccctgacgattacggaaatgtttaatctcgatcgctttaatgaaatcaaactcagccaaggcggtcgtccccaacaattcacccagtttaatgatgctaatgtggcaggctatggggcataccgagaggaaatcggtgctcgcaccattacctacgatgatggcctgagtgtgcagaacgcagaaattagcaatctggatggttttggttccagcttcagcaccgctagtgatattcgcatgggcgacacaatcaataacctcactggcgttctcagctaccagtgggcaggtaacgcttccagtggagctacttggcgggtgcgctctgctgtagatgggacaaatcagtttactaaggtgaacgatcgccctgtcacaccagaaaatgttggcggttccctgaaggtaacgggcttcaatgtcctcaactacttcaagaccatcgacctgtaaagtgaaagcacggccattggtcaagatccccgtggggcagacac

SEQ ID NO: 436716 - DNA, 491 bp, Triticum aestivum
attttcattcccaccgctgacattttgcgagaattggcccagtttgccccctgggaggtggatgtaattaccctaagcggcagcggagagccgacgttagccaaaaatttaggggaaattctcgaaggcattaaaaagttgactgggaaattaaccctggtactcaccaatgcgactttgttaaatgatgctcaggtaagagaagagctctccttagcagacaagatttctgtcaaattagacggattgtggccagaccagttacaaagaattaaccgaccgatcgccggcattgagttggagcaaattttgactggtattcaaacctttcagcaggagtttacaggggaattatcagtgcaaaccatggtgctgcagccctgggaccagacggctgagagccgttatttggagcttttatccctaattaagcccaccgaagtgcaactcaacaggcccaccaggcccaaacccctccagcgggaattgga

SEQ ID NO: 436717 - DNA, 612 bp, Triticum aestivum
tgatgacctccgttatttttgtcggttgaggtttgtgaccttggttcccattctagtttgcatccccaatatagacaatatagtattttaagcacagattgcatccaaaatagggacaataggaatatcaatggacaaacttgaaagtatttacgcctttacccaagttgtgcgggagggcagttttgcggcggcggcgcggaaaatgaatctggggcgatcaacggtgaataagatggtgattgccctagaaaatgagcttaaagtacagcttctccaccgcagtacccgtaaagtgacccccacccccacagggatagccttttatgaaaaatcggtgcaaattttggcagatttagaggaagcagaattgtcagtgtcccaactccatggggaaccgaagggtctgttgcgagttaatgcacccatgacctttggcaccatgtacattgcgccgctggtggcgaagtttatggctttacattcccaagtggaagtgcagttaactctgcaggatcgatttgtggacgcgatcgccgagggttacgatttattgattcgcattgcccaaccgctggaatcggctagtttgatcctctagagtcgacctgc

SEQ ID NO: 436718 - DNA, 505 bp, Triticum aestivum
cgagctcggtacccggggatcaatgctttcctgcccccagggaagaatttttacgaacatggtgtcatcaatcggggcaccaggcgatcgcctaccaagaagatgggattttacggggttatggcgttctacgcccctgccgagtaggttacaaaattggccctctgtttgctgatactccagaggtagcggaaattatctttttagctctaaaagcaattcctacagcggaaaataccatttacctagatgtgccagaacccaaccaagcggcgatcactctagcaacgaaatatagcctgcaggtagtttttgaaactgctcgaatgtacactgggcaagccccctccatcgccctagataaaatttacggagttacatcctttgagttaggttaacttttaagtccgggtaaaatccaagttttagaaaaagattgtgacaaaatcccgcaaaactgcaaaaattcgtggggaaaagtggtcctctagagtcgacctgcagg

SEQ ID NO: 436719 - DNA, 209 bp, Triticum aestivum
cgagctcggtacccggggatcgccagggtccagagggaaaagccccagtcccttggccgatggcagttcgtagtccggactggcattctagttgctacttttatcctcgctttggggagcctcgcaagccctagcctagccctagactataaccggggtaacttagtgggggcagatttttcccatcagggtcctctagagtcgacctg

SEQ ID NO: 436720 - DNA, 899 bp, Triticum aestivum
ctcttcgatcgccagttccgccgcttcaccacggtggtttcactgatggccatggtgccactgagggagtggtgcaaaccaactttaatcggttccccggtgggagcagtaccggtggtgggggactcagtcggttcagcagtgggttcggtggtaggttccgtgccgccgccacaggctttgagcaatagactggcgcctagggttgctgatccatacagcaaaaatttacgtcttccaaaagggttagtcatacgcgaaaaattattacctcgtaaggattctaaatatgcttgttggctggtggggaggagtttattgggcggaaacagtgctcttaaaaagtttttatccgcagtttattttggtcaacaaggcagtggatttccagggtaaatccgccggaaacaaataagaccccatactacgagtaggttaagaaaaaattatgtagcataggataccgttttgtccgactaagccccttttgcgcctgttttgtccccattgtcaggcaggcttagcattggaaccgttcagcaagaacaatcttggggctagttattggggaattatcggcgatcgccagagttttctaaacgataaagggcgaggaaagtcgtttcccacactagccgaggttgaacgtaggcggccaggtatttacgggctttttccagaatttctaaccatggccgttggtggtggccatgccaatagtgatactggagatagtccactaaccagagttgggcactgttatccaagttgccatccaccatcttggccaaatcaaaggctgctagaggactagttggtggttgcattaacttttgccgcagttccgctgtaaagctaagcatttgctcccgagcatgaaataacagaccgggactccc

SEQ ID NO: 436721 - DNA, 535 bp, Triticum aestivum
cgccattcggaaaagcaaaaaagcagaaaccgggtggaagaaaaatccgcagaatacgcttcccagtctagcggaaaattacctcggctccatcccaactgacctaatattgaccctcccctctatcgacatatcgacagtgcatccattaaccatggacgaaaatatcggcctaagcctaggcatcgaacaatttaaccggcaagatttttacgcctgccataacaccctcgaagcagtgtggctagaggctaacccgtcggagaaaaatttctaccaaggtattttgcaaattgccgtagcccactatcatcttggcaatcacaattggcggggagcagtgactttactggggcagggtatccgccgcttgaagggttttcgccctgaccatcgggaagtggatatagagagtttatttcggtccagcgttttgctgttagagaatctacaaactattacgccagaaaatctcccccaatggttagaatccgctgaaacaaaacaactaaccccccaaattgagattaagtcg

SEQ ID NO: 436722 - DNA, 496 bp, Triticum aestivum
cttttgtggagaccacgggggaaacccctgggcaactgcgcctggcctatgctttttccctacctccctttatcagttcttctgagattcaaggggctgtggccaaggtgatcgccgtttgcgaaaatctagggcatcaattggaggaagcctgttttgatgtcactagtttaattgaaccctttgcccaaatttggaaagctggggtgggggcttccggcattcctttacccctgttggaatcggttaatcagtggttaggggaaaccagtggcactgcgggggactatctgcggggggtaaggaatatgcaggtgatttcccgccaaattgtcggctttatggaacagtatgacgccctaattttgcccgtttttaatcatcggcccccaaaaatcggggaatggacccatctatcgccccccgacgtggtgcaaaaaaatattgaatggattgccccctgcccccccgccaatgcggccggcctaccggcgat

SEQ ID NO: 436723 - DNA, 677 bp, Triticum aestivum
ggaattgggagcgttttctaaccatgggagtgtaaaagccgaaaaacgacgcaacggaaatagttaattgactcaggtgaacaagatggccgagaaaagccagcaaggaaggtaatctaaggttattgtatccactagttcagggattgatgggcgcacaattcttaatatttttgaccattgttgctgatttccaggctgattgactgtggatttgtgtggccagttccagaacaggtggagtagttcaagggatagtggtcggttaactggggggcactatggggacatttacctatgaaaggcaagtttacctggcggacacgcacggagctggggtggtttatttcaaccaatttttgcaaatgtgccatgaagcctatgaaagttggctgtcatcagaacatttatccctacaaaatatcattagtgtcggggattttgccttgcccttagtccatgccagcattgattttttcgcccctgcccactgcggcgatcgcctgttggtgaacttgaccattacccaggctagtgcccatcgtttttgctgtgattatgagattagccaagccgagtctgcccaactgctggcccgggcccaaacccaccatgtctgcattgccctaccggaaaggaaaaaagcgcccttaccccaaccctggcaaacggcgatt

SEQ ID NO: 436724 - DNA, 631 bp, Triticum aestivum
aagctcccttagctccttctgattaagcacttggtagtattcatcaagttctcgtccaacaaatattattcgtccccagtaatccttagaattgtgccagcgtttccagtactctgacactaatgccaggcgagtttggcggttttgtgaggtcaagatgccgatttgggcaatcccgaccacgactagtagtcctgtagcaattgcagtgattgtcgcgttgtccatttaaaattgggatagttagaaaatttgagccagacttaaggactacacagaaaatcttcagtctccccaatacagtgattgtgtctatgctttggagaagctttgtttcaagacgaaataaaatcctttcctggtaataaaatattctgcttcggtgatgataaggggtgaattaaatgaatagtcaaaattaaggtgagccataaaaggcccaccataattttacggcttacttagctcccactggcattcccaaaatatcctcaatcttgggcatttggtctaggggaatgactcggccgaagtcctcgaaattatcaatctcattgaaattaaggtagcggtaaagttcgccttcaaacggagcaactttttggagacgatcctctagagtcgacctgca

SEQ ID NO: 436725 - DNA, 593 bp, Triticum aestivum
tgggggctccgggggggaaaactcccaggcttggggacggatttccctctagccttgggtttagccagtagtttctcttttgagcgctgacattgccccccagtcggcaataatgtatctgtcgttaaccttgtctttgccaggcccatgctgatttcccgtgcccctgtccgcattagtttttttggtgggggaaccgattatcctgagtattttctccagcatggtggtgcggttctagctacggcaatcgacaaattttcctacgttactgctagtccttttctgagtcatttatttgactattccattcgcgtttcctaccgcaaagtggaattggttaaaaatcctagcgaaatggagcacgtggtttttcgggaatgcttgaaattctgtggtttagaaaaagatattgagcttcataacgtggcggatttaccagcttttaccggtctggggtcttcctctgcttttacggtttccttgctccaggctctgcactcttttaaaggggaatttatccgtcctttggatttagcctatgaagccatttatgtcgaaaggcatttggtcaaagacaaggtgggttgtca

SEQ ID NO: 436726 - DNA, 630 bp, Triticum aestivum
taataatcctagggacttagccaagttggcctcttgggaagattacctactttattacgaggcggaattgtcaccagcttgtgaacatatcttggttgataatactcttaataaagaaatcaagaaataaagaattctgatatgggcacaaatagcttaatctagggtcatagcaataaataacgaaaacaagaaaacacgaaatgaagataatcgccgtgactggctacaaggggggagttgggaaaaccatcacctcgattcacattgcccgttacttagccgacaagggaaaagtgttgctaatcgactctgaccctaaccgttcggtggagaaatgggccgcccgtggggaaaaacaacccttatttaaggtcaaaaatgaaaagtctgctccagcccatattgccgggaatgattttttggttttggacacccccgcccggcccgatagtaatgaactcaaagaaattagccaagaggcccatctaacaattctgccctgcgtgccggatgccattagtcttgaccccatgctccagatgtttcatgatttgttccccggtaccgtttaccgagttttgattacgattgcccctccttaccctagtaaatcagcagatgagttac

SEQ ID NO: 436727 - DNA, 437 bp, Triticum aestivum
aaattgattagcctgtcgtgcttgagcgtagttgccaactccagttcttgggtttgttctttttcccttttgctatcccagaccattaatttcaccgcaaccttggcgatcgccccatcgtggccgactgtttttgacagaaacactgcgccgaacccaccaatcccaagcaaggtttcaagtaagtacttgtccttcaaatgggttccctctaagcttttccaggactgtaaaaacataaactctataatcaagttgggatcttggtaaaacaatgatagttccaccaactcaggaaaactgtaaagattaataaagttgtttagtattgaaattttattttgagtttggacctgtctgtcgtcattgactgtggcgatcgcctttttttgctgtagcctaagcaaaattacgacgtgggaagttataaagaagat

SEQ ID NO: 436728 - DNA, 581 bp, Triticum aestivum
aatttagcagcatatgaaatcacagtaagtaatctggctgtaacagaccctgaaaatcccaacttctccattccatccggagagcaaagaagtaagggggttgaattcgatatcgcgggggaaatcctaccgggctggaatattattgcttcctatgcttataccgatgccagggtcaccaaggatgacaatctggagcctggtaatttgcttgagggggttccctttaactcggccagtttgtggtcaacttacgaaattcaagccggtgatttacagggtttgggatttggcctgggattgttttatgtgggggaacgccaaggtgatttaaataattcttttcaaataccgagctatctacgtactgatataagcgtattttaccgccgcaataactggagggccgccattaacgttaacaatcttttcaatatagattacatcgaagcgacccaacgccggactcgcgttgatcctgcggcgcccctaacggtaaggggaacaatttcggtggaattttaaacttttccgtaattttgtcaaaatcaaaacaacattttagaatgcacagatcctct

SEQ ID NO: 436729 - DNA, 679 bp, Triticum aestivum
cggaaagggaagttggctttatggtgctagcgggagcaggggcagaaatcgataccagtaccgccaatggaagactattcttcgccgtgttcgccgccctagcggaatacgaggcagagttaatctcagaacggaccagagcaggactacaggcagcgagggcgaggggaaggatgggaggtagaccaaggaagatggatagggtaatgctccagatgttaatggaagcgatgaagaacccagaagcctgtgccaaggcagtagcccagaagctcaatatcagcaccgccaccctctactcctacgtcaatggggacggcaccccgaaagaagccggactaaggttattgagaaaagcccatggggaacagcaagaatcagagggaccccgataatctcattgtctgctccccttccccccgactgcaaagtagggatagggaaacatcgccctctgctctgaaagggagcattagcatttcacagggtatgggggaatagtgccagcatgatgagattaccctgtggagtatattcctctgctcaccccctcaaggctcaatctcgatgcgagggaagagagccctcatcaccttagcaaaggaactagttcctcttaagcttctgcgaagcttattctagtgtagtacaaacatggaaacggtggtaattttagtta

SEQ ID NO: 436730 - DNA, 642 bp, Triticum aestivum
cccacgacattgatgaagccctcttcctggccgatcgccttgtgatgatgaccaatggcccccacgccaacattggcgaaattatgaccatacccttttctcgcccccgggaccgggacaggattatggaagaccccacctattaccagctacgtaactacgccctcgacttcctctataaccgctttgcccatgacgacgtggcttagaaagttatagccaagatactactcccaaattgtttaggctaattccctgctttttgggagaaattgattccaacagtgcgctaggagtagttcttgagacgaatagttgctcgtactacatccaagaactttccgggggaacatggggaacatatagttcatttaagggtatgctaatcggcgtaacacacttttgcggatgatatacggaaaagctctggcgatcagggaattattgctcttctatcattgtgggttaaactcacttcggtttgctggagccctacacttcccccaattccttgacttcaatttcgatgcggggcggggctggcacactgactaaatctgggtgccctgtcaacaaaaccgccgtttggggctcactccactgggttaaccaatggggttgaatgcccaaagcaatgatgac

SEQ ID NO: 436731 - DNA, 508 bp, Triticum aestivum
tcattgctctgcgccaggatagtttgggggaagaccaactgcgaattttaagtttgtttaaacggagccaacaacgatggattactttgtttgggggaataattagtctgggtctattgtggctggtgtattactacgctccgatcgcctatccttgggtgacggatttgccccagattcgtttggcaggggttgggctagcggcgatcgcctatttgatggccaatttatttttgcaggtgcccctgagtgtgttgggggtgttatccacaagccagtccaagtttactgagacgattcccctagagccaaatcagatcgaacaacagttcaccattcccggcattaagttgcggcagattcccctggtgccaaggattagctcttgataacaaaggatttgcgctctctgctggggtagaatcggtaacgggcgatttttcctaggtttagaagatgttggccttgaccatggccgaggaaagaccaattatcccctgttgatcct

SEQ ID NO: 436732 - DNA, 474 bp, Triticum aestivum
tacccggggatcagctatgatcaacagacaaaatcacaaaaagcgacgtttgagcaaaggttggattaataacaatactaaaccatcaaacaaaactaacacccccaatacctgggcgaaattcaaactgaaccaaggggcagtcaaaaccgtactatccaaaccccagttgccattcaggtaaatgtaacggattggttcgatggcataggttaatggatttaaactggccaccacctgcaaccaatgggccatgaagtccaaaggagcaagggcagtactggcgaagagtaggggtaaattagtgacaaaaattaccgcaatcaattcaatgtggcccggcagggcaaaggctaaacctaaacttagggccgttacccccaacacgattaggaaaaccctcagggcaatcattcccaaaccaaagctattgggtaaaccagctcccagcagagcactggccccgacaatcac

SEQ ID NO: 436733 - DNA, 743 bp, Triticum aestivum
ttttgggacagaatcaagtctttactcaactttgccaaaacaagcctgcagataagattaatcaactgttacaagaccgctaccatggcattattcccccagaagaattacaagataaaatcactgctggagaaagggaggcattggcacaacaactaagtgaaggcggggaaatgaatttggatgccatccgaaccgaagggtcaggggcagaactagatgctaaacttaaccagattgtcgccattggtggggaaaatttagacggaagtggtagtggtactttaaatttcagtagtccctatgtttttggcggtggattagtcggcttgctggtgttggtatggtgcctgcaatctctgaatacttggtcaaatttacgggaaaaattgatggggcaagagggagtctattatcaaattttagaaaagtttggcaaagctaaacctaaggtttctgaaagtgatttatttctctataacaaagctttggtggagttagaaaagcaggctaaaaaagctatcagtattgacaacgacaaatttagcagtaatgaatttcttgtttttgctaaaatccgctattcattcaacaatgatgtaggggattaccaaggcttaaaaacttacttacaaactttacaatccgctattaaagctcaggctagcaatttaactttggggcaggtggaaagcagttgtaggggaaagaaacagcaacagttttatgatttttgccatcaa

SEQ ID NO: 436734 - DNA, 422 bp, Triticum aestivum
tcgctgtcgcgtggctggacctgaaggcccttttgatgtcgatgtctttgactctgctacagattacatcaagctaatgaagacaatctttgacttcgagtctattaaaaagcttctggcatctccaaagttctcgttctgctttgatggccttcacggcgttgctggagcttatgcaaagcgcatgtttgtggatgagctcggcgccagtgaaagctcactgttgaactgtgttccacaggaagactttggaggtggtcatccagaccctaacctcacctacgcaaaagaactggttgatcggatgggtcttgggaaaacctcaaatgttgaaccccctgaatttggtgccgcagctgatggggatgctgaccgcaacatggctcttggtaaaagattcttcgtgacaccatcagattcgg

SEQ ID NO: 436735 - DNA, 326 bp, Triticum aestivum
tcgcccacgcgtccgtttcactgcaaagaccaaaggatcttatggggttgacactggcaacctattctttgctgaagtcgcatatacgcgaggagatgatggattaacggtgaacagttgctgcatacttgaaccttcttctgatcatggcctctgctatggttgttgtggtgatgtgaagcaccccaacgatggtaatgcatatgcttgtggtcggcggaacatatcgtattgttttcagaacggtgcacctgatctacctctggactatttcgtggaccgctattacgaggactctgatgaagaggcggaaagactgagatctc

SEQ ID NO: 436736 - DNA, 271 bp, Triticum aestivum
tcgcgcgtcccagagcgggggcctctcggcgcaggtgatcaagagggccttcggcgccacggaggaggcgttcatgggcatggcggagaagtcgcggccgtcgcagccgcggctcctgtccgtcggctcctgctgcctggtgggcgccatcgaggacggcacgctccacgtcgccaacctcggcgactcgcgcgccgtgctcggccgcctcgccagcacgggcgggaagaagcggagggcggcggtggccgagcggctgtcacgggaccac

SEQ ID NO: 436737 - DNA, 374 bp, Triticum aestivum
tcgagtccgccgcgttctgcagagtcttcaaggatgggcatggcaagcctctcgtccccatgtgcagtgaccccaccaagtcatctctcaccccgggtctatacacgccgtcttttgccgggtttgtcgacaccgacatttcgtccgggacgatctctctgagaagcttgatcgaccgaccggcggctgcgagctccggcgccggggggaagacctgcatcctatcgagagtgtacccatccatggcgatcggtaaagacgcacacctttatgtgttcaacaacggggtgaccgatatcaaggcgtccaaactaacggcgtgggagatgaaaaaaccaatgatgaatggtgcctaagtagtatataccgtatat

SEQ ID NO: 436738 - DNA, 498 bp, Triticum aestivum
  unsure (1)..(498): unsure at all n locations
nnnnnnnnnnnnnnnnnnnnnnnnnnnnnnnnnnnnnnnnnnnnnnnnnnnnnnngggggaaggctttattttccaattgtatttattttccaatttttatttgggttttttttgtttctatggcgataacatggtgtattatgaaacaaagtaatgtacttaagctcccatcatacaagttacaacaacacaagtttgagaagctgcctgcctcgcctgctcatggcatggcggcagcgagaaaaaacaacagtaacatcaacttaactaagtacaatgaaacgtagatataccaggaacctcccgcttcacagtcttgaacacttctatattcactttgtgtgtacgtgttttcttttcctttggtgttaccttctctcgtcggctgctcagcagagcggcaggggctcgccgttccactccttgaggcactccggcagcgggtcgatgtgcttgcgctcgttcatggccaccagcaccttgttcagctcctcccc

SEQ ID NO: 436739 - DNA, 438 bp, Triticum aestivum
gaatttgggggacacttttgaagggctatgaagttgcatgcaaggctaagtaaggctggaaccttttgggcggccgctttttttttttctctgctcttggtgtttttcgaaacaaagttatgttcttaagctcccatcatacaagttacaacaacacaagtttgagaagctgcctgcctcgcctgctcatggcatggcggcagcgagaaaaaacaacagtaacatcaacttaactaagtacaatgaaacgtagatataccaggaacctcccgcttcacagtcttgaacacttctatattcactttctgtgtacgtgttttcttttcctttggtgttaccttctctcgtcgactgctcagcagagcggcagcggcgcgtgctcgaccagcaccgcccgcagcttctgcatcagcgggtagttggggctgcaggggtcgt

SEQ ID NO: 436740 - DNA, 331 bp, Triticum aestivum
cgctcgccgtcatgggacgcatgcacagcaacgggaagggcatgtcgtcctcggtgatcccctacaagcgggaggccccggcctgggtcaagacgtccgcgccggacgtggaggagatcatcgtccgcgccgccaagaagggccagctgccgtcgcagatcggcgccctgctccgcgacggctacggcatcccgctctccaaggccgtcaccggcgccaagatcgtgcgcctgctcaaggcgcgcgggctggcgccggagatgcccgaggacctctacttcctcatcaagaaggccgttgcgatccggaagcacctggagaggaacaggtc

SEQ ID NO: 436741 - DNA, 459 bp, Triticum aestivum
atcttgagaattgaacattgaatctgaaatcttgcttttattttttgcgacaaaaagttccacaatatatcatgttaaaactcatatgtacattaccatatcacaccagcagcgcgcagaggcgccggcgattttgagcagaaaatctgaagacgaaagaactgaagaaataccaagagcgtacaaaagaactgtgctgctgcatatcttatcctcccaaccatctagaaatcgaagccaccgccgtcgtcgaacccgccgtcgtaccctccggcggagtcggagatcatgtcgccgatgaggagcccgccgagcgcgcctccgaggagccccgcgccgaggcccatccccatgccgctcttcttcggcggcttcacggcctgctgctggtacccgtacccggccggctgctgcggcgggtagccgtagccgccgtaccctccttgcggaggcgggggc

SEQ ID NO: 436742 - DNA, 542 bp, Triticum aestivum
gaggggaagcatgctagcttcgaatacgggaggtatgggaacccgaccactgaggctttggagaagaagatgagtgcactggagaaagccgagtccactgtctttgtggcgtcagggatgtatgcaagcgtcgctatgctcagcacacttgtcccagcaggtgggcacattgtttcaaccacagatttgtaccgcaagacaagaatttacatggagactgagctccccaagaggggaattacgatgactgttattaggcctgctgacatggatgctcttcaagatgcacttgataataataatgtatctttattcttcactgagactcctactaatccatttctcagatgcattgatattgagcttgtctccaatatgtgccataacaagggagcattgctatgcattgatagcacctttgcctcccctatcaatcagaaagcactgactttaggtgctgacatagttgttcattctgcaacgaagtatattgctgggcacaatgatgttattggaggctgtatcagtggcagggacgagct

SEQ ID NO: 436743 - DNA, 385 bp, Triticum aestivum
cattaagcagttctccgaaatttcatcaataaaccagcgaattttattatctggtccatcgggttctgagatttatcaggaaacattgataaaggcacttgccaaacattttggtgctagactacttgttgttgattcactcctgttgcctggggtgccttcaaaggacccagaaacccagaaagatgttggcaaggctgataagtcaggggacaaggcaggtggtgagaaattgacaattcttcataagcatcgctcttccttggcagacacaatgcacttcagaagaccagctgcaccaacttccagtgtgaatgctgatattgtgggtacatccactctacattctgcaactttgcccaaacaggagtcctcaacagctaca

SEQ ID NO: 436744 - DNA, 675 bp, Triticum aestivum
agcagagagagaaacggaatctgatttttagaagacttgcagaggatagtgagcaagccgcggaggaggcagcggcaagggaggaggggtcgccggaagggggacatgctccctccacatctcacatctcgcagcttgaactgagagcaagagtagaaacccataagatgagacgcaagcaaaatatgcatgaaaatggcacaatcatgattcagtttggtcagcaagtgcctaactgcgagtcctcagctagcgattctcctcaagaagtgtccgggatgagtgaaggaagctttaatgagcagaatgatcaatctggtaatcgcgatggctacaccaagagtagtgatgaaggcaagatgatgtcggctttgtctctgggcaattcagaaatggcatacacaccgccaaaacctgaccgcactcatccctttgccatatcatacccatatgctgatccttactatggtggtgcagtggcagcctatggcgcacatgctattatgcacccccagatggtgggcatggtaccatcctctcgagtgccgctaccgattgaaccagctgccgccgaagagcccatttatgtgaatgcgaagcaataccatgccattctccgaaggagacagctccgcgcaaaattagaggctgaaaataagctggtcaaaagccgta

SEQ ID NO: 436745 - DNA, 662 bp, Triticum aestivum
cggtccaaaatatccgggtcgacgcggagatggaaatgaaagagaagtttgaaaagaaccttcaagaggcagcagataagtaccaaaacaccaacttgtatctgaagaacttagatgatactgttgatgatgaaaagttgcgagaactttttgctgagttcggaactattacttcctgcaaggttatgcgtgattcaaatggcgcaagcagaggttctggatttgttgcttttaaatccgctgatgatgcttcccgagctcttgctgaaatgaacaacaagatggttggcaataaaccactttatgttgcactcgcacagcgcaaggaagacaggaaagctaggctgcaggcacagttttcacaaatgcgtcccgttccaatggctccaaccgttggtcctcgtatgcaaatgttacctcctggtgttccagttggtcagcaaatgttctatggccagccaccagcgtttattaacccacagcctggatttggcttccagcaacctttcatgcctggaatgaggccaggtggtgctccaatgccaaactttatgatgcctatggttcagcaaggacaacaaccacaacgcccagctggtaagcgagctggtgctggaggaatgcagcaatccatgcagatgggtcagcagcagatgatgggt

SEQ ID NO: 436746 - DNA, 809 bp, Triticum aestivum
ccatcctggcgtcggagacgatggagatcccggaggaggtgaccgtgaaggtgtccgcgaagatgatctcggtgacggggccgcggggcacgctgacccgcaacttcaagcacctcaacctcgacttccagctgcaggagggcgggcgcaggctcaaggtggacgcctggttcggcacccgcaagaccatggccgccatccgcaccgccatctcccacgtccagaacctcatcacggggtcaccaagggcttccgctacaagatgcgcttcgtgtacgcccacttccccatcaacgcctccatcaccgccgccaaccgcggcatcgagatcaggaacttcctcggcgagaagaaggtgaggaaggtggacatgctcgacggggtcaccatcctgcggtccgagaaggtcaaggacgagatcgtcctcgacggcaacgacatcgagctcgtctcccgctccgccgccctcatcaaccagaaatgccatgtcaagaacaaggatatcaggaagttcttggacggcatctacgtcagcgacaagggcgccatcaaggaggagtagagagccggaaaccgtcccgcccaccagaagccgtgtttctgcctgccgtgtttgtttcatcgtgtttgtgtctgtctgtcgtcgtcgtcttcgtgattttgaactttctctagactgaattttgtagcggagttaaatttttagggatgtgccgtggaacatgctatctttattgttatcctgcatatcgtcgccgccgcgagaaccggtgcgacgcttatctagccctaaaggctgaagacatgga

SEQ ID NO: 436747 - DNA, 460 bp, Triticum aestivum
attcccggagcgacggggtcaccatcttgcggtccgagaaggtcaaggatgagatcgtcctcgacggcaacgacatcgagctcgtctcccgctccgccgccctcatcaaccagaaatgccacgtcaagaacaaggatatcaggaagttcttggacggtatctacgtcagcgacaagggcgccatcaaggaggagtagagtgcgaaaaccgtcccagaagccgtgtttctgcctgccgtgtttcatcgtctttgtgtcgtggttgtgattttgaactttctctagactgaattttgtagtggagttaattagggatgcgctatgcaacatgttatctttattatcctacatattgtcaccgtgagaattggtacgatgcttatcttcccctaaaggttgatgacttcaggtatttgaagttaaaacaggacatgaatgcgctgcgtgtgctgtactgttaa

SEQ ID NO: 436748 - DNA, 389 bp, Triticum aestivum
cccgaaacccagcagcgaccgccggcgcatctcaccccgggccgaggccggcgaactccgaagggaagcggagatgcagcagggcgatggcacggaggcgcaggcgacgcgggatgaccagcagaacaccaaccggttcggccgcctcaacaaccgcctccacgagctcgccgacgagatcaggctcgccaaggaagcaaaggaaaacctcgaggacgcggggaatgaactcatcttgcctgatgaagacggggtgcgactccaaatcggggaagtgtttgcccacatgccagtggacgatgtggaagctaggctagagcagatgaaagaggacgcagctaagaagctggagaagctggaggaagagaaggaatccatccttgcccaga

SEQ ID NO: 436749 - DNA, 431 bp, Triticum aestivum
gttgaagggctatctaacctctcattggttgacattgctgctggaggttggcattcagccgcgttaactaaagaaggagaggtatatgcttggggaagaggagaacatgggaggctcggctttggggatgataagagcagtcacatggtgccgctaaaggttcagcttctagcaggagaggatattgttcaggtatcatgtggagggacccattcagttgtgctaaccagtgatggccgaatattctcttatgggaggggcgatcatggccgtctaggcgacggtagggaggtgactacgggtcacccaatggaagtgcccataaacttgccgccaccgaagaccagcaccagctccgaagggctatggcaagcgaactacgttgcctgtggcggacgacacacactcgccatcgtgacatggactgatat

SEQ ID NO: 436750 - DNA, 421 bp, Triticum aestivum
gtagctaacgtaggacaaatttgctgagacgaaacaaaccgctatccattggcaatcaacgtcgggtggtcaatcagtgggagccaaactgttcatttgtgctgatgcatgtatagcgtggtctgctattgctgatgagcccggcctgtgtttctttctttcgctgtctgtgcgtcgttggctttgctctggagtggttaccagaggatgtcagatgatgatggatgcaccataaagttctgcccaatcaaatactaggcaccttgtcactgcttcatcttgcacaaaaacttatcccgttaccttgtgtcaatattttttcaccctaccaaaactactttttgcaacttgtagtgttttttctaaagaagatagtacaatcgtggataaataatgagccaacatgctgagctggcatttt

SEQ ID NO: 436751 - DNA, 425 bp, Triticum aestivum
tctcgggtaagtcaaatatctcgagacaaagggaatggaatacgggatggtttcaatccacgagattgtggtttaaaccgatgaagatctttgtcgaatatgggagagtcattatggtcatccaggtccggctagtgattattgattggaaaggtgtctcgatcttggccgcatgttctcgaacccgtagggtcacacacttaatgttcggtaacgttagggtcgtaatggggtattcataatggtgaggccgaatatagttcagagtctcgtatggggtccgaaatatcacgaggatctttagaatggtccggagatgaagattcatataaggaaagtggttttcagggttccagaaaatgtttgggatttttcagtactgtacagggaaggcttcagaaggttccgaaataggggcacctgca

SEQ ID NO: 436752 - DNA, 441 bp, Triticum aestivum
cgggtcgacggggtaatctaaaccccccataccctaccttgcatccaaacccctctatggtcggtcgtccgctccgatctactatggtcgtcgcctgcatctgctgtcttaagtttactatatgctaccgctgatgctgctgctgctgctgctctaaaatattgatgctgttgctgctgctgatgcgtgtggtgtgtcgtgtgctagacgcgtgatttttttttacctgtacacatgaggccgtgtggcctcattgccatgtttaattacctgtcgctactctaagatgctggcaaattgtttgctgatgttaatgtctagtggcgctcgagagatctgaaagatctgctgtcgatccagttcctccaattggcggctaaagtgcatgaatcggggatttgcgcttgagtttcttatcccgccgtaagaagtattttacct

SEQ ID NO: 436753 - DNA, 414 bp, Triticum aestivum
ggtggcgtccagcgattgacccaagaagtccgggcaatcagggaatgttccagcaaagaaggcaatgacttttccatatcacccatatcatgaattttttgacttcaaaatgtatgatatcatggactctgcataagttgataagacatgataattaaccgcaaaaagcatgggtatggataacacattgaaagtaataccagagagcaaatttaacgcttacaataaagcatgggcacagataacttattggttcatctgccactgcttattatctaccaagaaactacacatgaaatgtataactaaattaggaataagaactccataaaacattggctttggtctgcaaaccattaatctgattggagatggaaactaaaccaagatcgggtaaagtttgaacataagata

SEQ ID NO: 436754 - DNA, 678 bp, Triticum aestivum
aatcctgaacacggaggacgtgtacgaggcatggggcacattccgtggaaaatagggttcccccagaacgatgacccgtacggttacagaagccgaaagagaaagatggatcgggaagcagatgttgtggcgcggttggcatcggaaatggatgtgatgaagaaaaccgtgagtgtactagtagccgaacgagatgcagctcgggcgcagcatgaagatcatccagcggatctcagaagccagcagcggagaagcagtgtggcttccacggaggccccaccggctggtgcagatgcaccgacgatcgaaattactgcaccggagcctctggtggtcgaaattactgcaccggagcctctggtggtcgaaattactgcaccggagcctcctcgctaccccgtggacgatataaaggagatgaaagaatgtcatctgtattatcctatcgggaacatgtccatgaaggtagccatcggcagtgctttaccatgtttacctggagcactccaccacaacaaccccattcaagatggctatgctcgtgtcacggtggaggacatagtccaagggtttgaggacctggagattgacattgctacacctgaaggggagaaaagacttggagatgtcaagcgccatttcattctatggcaaaagaagtttatcaagtttccaggc

SEQ ID NO: 436755 - DNA, 420 bp, Triticum aestivum
tgcataccattcaggtatagagctgatgaaacttctggtgatgaacagaaaaaagttgttgaagttctcatgataaactcccaaagcggaccaggtttattattccccaaggtacttattctttgaattgtcataccaagttgttttggaacattgcgctgctggcaacacagattggtatcccagttagctccaacgtgttccttttcccggcatttatatatttatgaatcctctgagacaaattgagatgcacgcaggaatagtgtgtatggttgatgcataaatcacccctacctaaattttggagagcccaagtttggccaaggattaaagggaatggccaaatgaccatggtcatgcaacaaagttgtcaatcatccaaagaaagcccaatagtttggtgttacctaattagtc

SEQ ID NO: 436756 - DNA, 431 bp, Triticum aestivum
gctgcataccattcaagtatagagctgatgaaacttctggtgatgaacagaaaaaagttgttgaagttctcatgataaactcccaaagcggaccaggtttattattccccaagggaggatgggagaacgatgaaacggttgaacaagcagctgctcgagaagctatagaagaagctggagttcgaggagatatagtgcaatttctaggtttctacgatttcaagagcaagacgcatcaggacgcgtgctgccccgagggcatgtgcagagcggcagtgtttgcgctgcacgtgaaggaggagctggcctcatggcccgagcagagcacccgccggaggacctggctgacggtccccgaagccacgtcacaatgtcggtaccagtggatgcaagaggccttgctgacgggcttctctgagtggcatgacaac

SEQ ID NO: 436757 - DNA, 420 bp, Triticum aestivum
aatggacagattcatccaggtgtttctaccgtgaggtgcacctgaaagtaggtttcctggaagacaggcgatgcgaggcgaaacggggaacaaacctggtctctgtgtgcttaggatggagtcccgcatttgctttgagaactgtaagcgtgtttaacctgacagcgcctgtaattgtaggccctttccgcatacttcacagcttgttgtcttatgaggtgctgcagggcagcaggctggtttatgccgcctcggtcattattatcatttgtaacttgttagagtgcacattaatctcaggaggacatacacataatacttatgctgctgttgttgtaacctgacgacctttatgcctctgccttgtgttgttattcacagtcttaggtcaaaaggtcacttaaaaaaagcgggcgctct

SEQ ID NO: 436758 - DNA, 405 bp, Triticum aestivum
  unsure (1)..(405): unsure at all n locations
cggggaacaaacttggtctctgtgtgcttaggatggagtcccgcatttgctttgagaactgtaagcgtgtttaacctgacagcgcctgtaattgtaggccctttccgcatacttcacagcttgttgtcttatgaggtgctgcagggcagcaggctggtttatgccgcctcggtcattattatcatttgtaacttgttagagtgcacattaatctcaggaggacatagacataatacttatgctgctgttgttgtaacctgacgacctttatgcctctgccttgtgttgctattcatcaataatccttgtaagcttgatcatgggttgggttgctagctggggtacatttgagattatcacttctgcatattgttttnnnnnnnnnnnnnnnnnnnnnnnnnnnnn

SEQ ID NO: 436759 - DNA, 382 bp, Triticum aestivum
cgggtcgacggggaacagacatggtctctgtgtgctgacgatggactcgcacatttgctttgagaagtgtcaacgtgtttaacctgacagcgcctgtaattgtaggccctttccgcatacttcagaacgtgttggcctatgaggtgatgcacggccgtatgctgattaaggtcgactccgtcactcgcaacaattgtcacattgttagactgcagattaatcgcaagtagacatctacctactacataagccgcggttgttagtagcaaattgagatctggtgtgctcttagctgattaaaacttggccgctctagaagatacaacgctatattacgcgttactacaacttcatacctcttcgatactgtcacctatcttca

SEQ ID NO: 436760 - DNA, 425 bp, Triticum aestivum
ctcatttcacacactataggcttcttttccagcagcactgtctcatagaaatcttgctgttcctttgtgtggaacctgtaatcaacaacagttcttcttcttgtagcatatgggtctatctctctccatttccttagtccagagtccctcctgatctgcatgttctcagccacaggatgagcatcattgtggtctggaatcttgggtttgagcttcctcaggacttgtccttcatcatcttcatcagtagcaacttcaggcactggggcattgttcttctcagcagctggtatactcctggtattcctcttaggtgcactcttgggcttggaggctgctttgggtgcttctttgggctttgatgaagcagcccctgtcctgatagcatcacccataagcttctatgccttgggtgctggtgcaac

SEQ ID NO: 436761 - DNA, 361 bp, Triticum aestivum
cgcgctacaacttttggaaccgagccttcacacactgcgcacccgagattaagcagctgtttgagtcagtcgcaaagtcatgcggtggaggcgctggaaaagcagtggatgatggctctgatgtcagccactaatgtagttagtttcttgtaaatggtatatggctgcttgtcatggtctgatgggttgacgtgcggttgacttgctcacagatatttcttttctagtatcatatagtattgcgtctcttctgtaactggatattgcgtggtgaaaccctttaccattatacgcttcacagtgaatgcaaatattagcccgttggggtactgcccgtaaaaaaaagtgagtgtgtgagaat

SEQ ID NO: 436762 - DNA, 747 bp, Triticum aestivum
ctcacaacttctccattaatgggttaattaaagcacctggatgcagggtgtttgcttgtgatttcaactcgtattccgccctaatttaaattgccacatagggcaacggataatacgaccacaaataaactagcaacggataatacgacgacaaatttacaatggcacggataataattgtcttacatattccggataatttaaaatgccacatgcggcaaagccgggaagacatgggggcaagagaagaaggaaattgcagacaacgatctgggtcgctaccgtctctactcgtcgatggatcaccgggcggcgaaatcctccagctccttcttcaattcctcacaactttgcttgaaagcagccacggattcctccacctcctgctcgcgctcgatccggagcttcctcaagccacccatcagttcctcgacgaccgctgtcagcgtcatccccgaggcactgctctgctcatgcagcatcttccagccggcggcctcctcctccttctcggcgactaacttgaggatcttcgcattgtcacccatgagttgctcgacgaggccggtcgccttgtcaaccgaggcatcgctgatcttgagcagcttcatcaagccgtcgaccagctcctgctgcttagtgacgccagcgagaatgtcatcgtccccggccaaagacttccggaatgccagctcatcgcgatggccgacgtcgcgagtgcgcttgtgagagccctcgcgtgcccgt

SEQ ID NO: 436763 - DNA, 360 bp, Triticum aestivum
gacccaatgaactacaagtccacacgatgtggcacgatgaagacgccagttcactgctacaaactgacggcgaaggtcgaacacgccacaggcacatcggacctcatcatcgtctccgatgtggctgttgagttggtcagtgtctctgctcaagaccttgtcgataacattgatcatgacgacgagtggtacgccctgccagacgaaatcgaggatcttcttggctcgacgcacaccttccaggttttcgacaagtacgtgaattggagcttcacggtgacgtcgatcatggacgatgctagcgtcccagccccagctgcatccgctaaccaatgctcggataacgctgaccctgatggg

SEQ ID NO: 436764 - DNA, 416 bp, Triticum aestivum
ggtgactttcccaaaataaagaaatattgaggatttaataaaaaaatcaaataagattttatttcggagttttcggtgttttatttgaatttaggaaaaacgtgcgtttatcaaaattgcatgttagggcccgagtaaatgttcaccttgtgcggcttgattttagaagcccgtgaaaatttattttggaatttttggagtccgtttagtatttctttttatttttcttccgagcggaataataaaaaaaacgaaccgacttcgggccgtacccgagcgggacaccgcccggggtagcctttaaatagcgccgccccgagccgccccatcccatcagccccgcctcgatccgtgcgcgtcaacagagccatcaccgtcgccaccgatgatcccgccgcccgacgttcgtcgcgcct

SEQ ID NO: 436765 - DNA, 412 bp, Triticum aestivum
gcaggcaatgatgacacggggcaagatgaagagatgatcgataatggcggcggggaagaggccagacatggcggcggagaaggggccggacatggtggaggagaaggggacggacacggcggaggagagaacgacatggactccacgcagcagagttcgtcggtactaagttcaatcgtgcgggaccctcatgttcaagcattgcttcgcaaggagacgagtactgagagagctgcttctagagaggaggctaagctggagcaactagtggtagattcgaacactccattgtatgatggttgcaaacctgatgtgacccgcttgagtttcacgctccaactcgtgaagacgaaggctaaaaataaatggaccgacactagcctcgatgagcatctcaggtacctaaaggatg

SEQ ID NO: 436766 - DNA, 423 bp, Triticum aestivum
aatttcttgcccatctggccccgtcggtccgacttcggccatatggttcgggtccagcttagtgtagcgcgtcttcaccatagcccaggcttctcttgcaccttgctggcaggctaacatcttccataattggaagcgccgccgtgctccttgaagcatatccacaagctcccccatgccattcggcaggaagcttgatggccacaaggcctgagcaatgccctgcatcacctgccgagctcgctcgtgtagttgtgagaggtcttgcagtaaatcgcctgcagacaagggcatctccttctcagggcggcccgttaacattcctgcaagtaaaattctttcaatatgcttcctcgccgagttgtactacagttcgtctaggcacttaacataaaaggcggtgttgaaacccttttgttcccc

SEQ ID NO: 436767 - DNA, 426 bp, Triticum aestivum
aattccggtcgacgggccactgcaagaggtgtgctatgacagcgtcgactaccgcggaggtgccgcgaggctgcggtgatgcttcaatttccgtggctacactcggtggtgagctgcgctccaaggggggccgccggtcctacgacgacctgccggtggctgcgctgctacgaggccggcctgatgatttcccatctctattttcttgattgctccgatctgcaccgacatgcggtcctgccgacgtcgtccgatgtacatgctaatctgaggccactggagctgcaggactggcatgggactcactgctgctgccgggacggcaacaatcggggcagcgacgcctgggcctcggccttgattttggttccttcctcgctggtaccaggataccagctgtgtcttagtgtctcgcttctcctgagc

SEQ ID NO: 436768 - DNA, 419 bp, Triticum aestivum
gtctggggcgccatgattgccacccagagcttcgctagctaggcctagctcgcagtgatcgcaccatggcgaagcgaacgtacaggagttagtatgtgcgtggtgaggtaatgcggcgacggcagggccggcgctgctagctgctgccggcgcggcagcacgcaggacatgatgcagttaatggaagaacgaaggggagctacaaccagctaggaaggggagctgcagccagctaggacatgatgcagtgaaggaagacatgcatgcagcggcagtgaactaaagagctctggaggcaggcacagaacgggcagcccggccgggagaagtaaagggcggagggggaacagacaggcacgccggccgtcgcgtccgtacttgcagccactcaccatggctgcatcgggagtctggacttg

SEQ ID NO: 436769 - DNA, 420 bp, Triticum aestivum
gccttaaaaccagtgacttataagtcatgcctgtttggttgtcacctgacttataagtcatctgagcataccttctcaccttgtttttttatgtaaatgttgtgggactcatgtaaaagggggtgacttataagttttaagttggggtggagcaacttatgacttataagttggggtgacttataagttactccctccgttcggaattacttgtctcggatatggatgtatctagaactaaaatacatgtagatacattcatttctgcgataagtaattccgaacggagggagtaggtccgtttgacaaaataagtcacttttacacttttcaacttataagttggtgacttatttggaaccaaacagggcctaacatacactagtaacatacacgtatttgtagactatgttactaccg

SEQ ID NO: 436770 - DNA, 420 bp, Triticum aestivum
gaggcaaggactatatgtggaagtggccatcgacaagggtctcgggagcctatttgtgtgatgagagcaagcagcgatccgattgtggcatgtgtgcgtgacgtgctgttgtattcagccggccggcgacgagtttgctagcgaggtaacctacgtcgctgagtacatgcggtacaggccagccgaaaacatgaagtaagaccgtcagctccgcttcatcgtcttggtcgtccatcgtcgcatgtcaccgaagagtactagcaacgtggcctgagccaacagatgatatgaaggaaaggttggccatggcacggaaggaaccttggtgcgtgattgataattattgaagtacctaaaatgcccttaactagtcaatatactgcccaaaacctccagtagtatcgactcatctggggcctc

SEQ ID NO: 436771 - DNA, 308 bp, Triticum aestivum
ggctcgcaacttcttggacggcgacctgatcgagtcgttcctcgacctcaacaggtccaagatggacgaggtggccaaggccatggcagtccctgttgaggagctgtccaagcgggtagaggagctgatgagactgcactaggtggtagcgccgggccatgtatatcctgttttatttgttcgttttcgctgtgttgtaaaccgtcggctgctcgagaatgatcctctgcaagtgtttgtagcaacatcccttctctgtgataagattgtaactttatctgtgctaaaaaaaaataagtccgtttgac

SEQ ID NO: 436772 - DNA, 433 bp, Triticum aestivum
cgggtcgaccggtgggaacaatggtagtgagataatgtgatgcaacactagaggtgccacgtggagcgtttaactggtcaactagtcatgtcatgagcaaatacagagttgtacggtgagcccgtgactgtataataaccactaaacgtaaatggtgaccgtaatgagtggatcctgaagtccaatgtgcgtatcgtgctttcgcttcaaatacaatgatcgtcattgcatatatcgtgagagaaagatgaaacatgcgtgaattttctgggggcttacttttagaggacctggagatagttttgtgtgcatacgtgaaaggggcgtacagggggtatgcgatggagagagagatgctcttcgtttctcgttattatgactaactttgtatatagtatatacatatacaaattcacagtgcggaaaaaatatc

SEQ ID NO: 436773 - DNA, 420 bp, Triticum aestivum
aattccatggatatgtccggatcttcttcaagtccggggtcgagagctcggccgggatcctctggctgcggagaggggctgttgaactctttcacagcctttcttagttcctgttttttaaacagcaaggtaaataattgtggtcaagaaggtaaggacgagtagagtcgaataacaaataacaatttacccagcttcgggggttgtacatggcaaatccatcctgcggtttaatgtggaggaactcctcttcttctcccttgtacaattcagatagtatcctcgccaaagatgtggcggagtctggacctttgcgaccgcagcgggaggcatcgtcttatccattgaagtgccacatgggtttcccttagattgaagtggttgcactccccttataatacatattgacatgacttcaat

SEQ ID NO: 436774 - DNA, 409 bp, Triticum aestivum
atgatctactcacatgtcttcgaggcgttccaccagatcaatttccactagcgcaaggtcaacacatgcagcagaaaatgaggtgtcaccggtggccatgacgcagtggtgggcttggtgatgacatccgccttgccgaactcgtggtcttggtctcgttgcatcggaatggaaacctttgagaggatccctccgcgctggtccttgcctccttagcacaaaggaggaaattgttccctctatgcccattggtgcccgcctggccttggttatcatgactcacgtcatcgtgagcctcgtgaggcggggtacccgcatagaagtcttcactcctcggtaggcagtctcggggaaccactcctcgtgaggtcttggcgtagtccgcctcgcgaggccggggggccctcgc

SEQ ID NO: 436775 - DNA, 402 bp, Triticum aestivum
  unsure (1)..(402): unsure at all n locations
ccgcttgccaccaaaatcccagccgagaagaggaagatggatgccaggaagaagagcctgaagaggctgtaacagcgcaccccgccgggatagcgtcgaagtgtggctgttgtagtagttaggagattcaatcccctacccttgataagcgacgccagattcagcaggtgcacagtgggaccgaatgaataaataaacccaagggacatctgatgaatctggtggttgattggtagaagtatgcctgtagtcagaactgtagtgatgtgagatgagatgcatgtgagttgcacccctgttggaataaactctagtgatgtgcaatgacgaactatttggaagaacaaactgtcgccttttcagaaaaaanaaagannngcaaaaaaaaaaaaagcggccgct

SEQ ID NO: 436776 - DNA, 261 bp, Triticum aestivum
ttcatgctggagctggacaggatccgggagaaaatggcgacgatggcgatggcgaatgatcacgtttagacggtaagtgctgagtttgggctacagtggacgtgttcagcagcagaagtctctaggtactcgggttggggagttgatgttgctcgtgtgcacaatgtagagtagctggtaaggcttgtttttcctgtgtaacttgagagacgagtgctacgtagtctattgttgcattcatgattcatgcattgttaactg

SEQ ID NO: 436777 - DNA, 805 bp, Triticum aestivum
cgggtcgacctccaccaaagcgatatccatcatctcatcgaaagattgggaacctcgcctctatcaaaactgaacaacgatttacacatttacaatatcctatggcgggtcgacttccaccaaagcgatatccatcatctcatcgaaagacgggacacctttgcctctatcaagtggtatcagatttccaggttgctcggtgagattttacagtttttcgtagtttagatcgagtctgttcttcatacctacagtccacgaaaaagccacaaaaaaaaattagggttagttcatcatatccgaaccaatctgagcctttgcataatctttttagggttttgctttgttgaatttgcggttgcatcgtcgtgtctagttgctggtcttagagtctagtcttttagagtttcgagttctggtcataagttgtcacgccgccgccgcaccatcatcatcgcccctgccatctaccaccaccgttcttatccgccaccgcttcgaatccgtatccatataccaccaccaatccgttccatataccaccaccgatccgtatccatataccaccaccgctaccagctaccaccaccgctgccatataccaccaccatatatccaccaccaatccgagttccttgcatattaagtttgttttcaggatccatctactttcccattcgtgtttccttgtctgagtacgtttctgattccagcaatcttttgcagtccatagaataagttggtttccaaaatcaaatacgaatccggaaacccccctccgtttaagcccaaaattttccgaaaa

SEQ ID NO: 436778 - DNA, 1499 bp, Triticum aestivum
gggtgcacggggtgcctgtattcttgtatcaggactggaggaggcacctgattgaggtgctggtgcagttgaagtagaagatgcatgcggtgtccatgatgaaggtcggtgatgaggacatgactaccttggatacgaccaaaaatattgcatacatgcatatttgtcaggtgatttctagtgcacactattcaataatctatttatgttatccagaacaaaaatacttcacacacttttgtgttttgtctaattgcaggtgtatgggacatttgtacaatccacatatgaagataaggaagaaagagatgtttatttgctgtccaaaaagttctctcacgtcacttttggcccaagagaagatagagtccaagtctctcacgttctggattcagattcggactgcacagacatacctgactcaaaacgcacacaagtttttcatacggactccgaattgggtgattctttttttgttggaaactagatttcgtgcactttccaacccaattggaatcaccttcaaattcgtccggagcgttgagttgtggacgaaacaatctgatgctgcagcagaatccgagtcaaactacaagtccaaaggtgttacatcacctccacttgggcccattggccttgtacgacctagatttagttttaggctgccttgggacgtcctcccacctccttggccgccaccccttgctcctatataagtagatccatctagtagcttttccttgggatttgtttagttaaaagttagccattgcaacttcgtgtacttcgtttgtgtccaacgaccagaccaagaccgcttacggatccccaccattatcaatacttcatatatattcgcaatattcagattgctttatcatattcttgctcgttcttcgattgcttgcaggaatagaccttcgtggtcaggttgatcgtgctccggcgtggtcaataacctctggagattggtttagcgattgctaaggcgcaacgtcgtgcacgtttgtagtcggatcgtcaaagtcgtctccaccaaatcgatagttatcatctcatcgaaagatcgggacaccctcgcctctatcaagtggtatcagttttcaggttgctcggtgagaatttccagttttcctagattagatttattttcttacctattgtccaagaaaaagccacaaaaaagagttagatctattcatccttggtccaagccagtctgagcctttgcaattttcttttcattgtttgcattgttgaattatcggttgcatcgtcgtgtcgagttgctggtcttagtgtctagttcctttagagtttcgagttctgttcacattagtcacgccgccgctgcatcattatcccttccgctgtccaccatcccatccatcaatttccaccacgtgctacccaccgttcattgtcataatcatagttgaggtcgttcacatcttcacttgatccaatctgcatcttatctagtttgttttggaaagagg

SEQ ID NO: 436779 - DNA, 1538 bp, Triticum aestivum
  unsure (1)..(1538): unsure at all n locations
ggnnnnnngnnntttaggnacctgtttacgcctgcccggtaccggtccagaattcccggtcgacggacctgctgctatacatactggaccaattactagagctcgtgcacgccaactaaattaccaggtactttcgtttcttggtaatggttctaatgttcatgagaatatgatgctgcctaaattggatacatttgttttgcttacaaatgaagggcctagcttggagaaggatgaacattggagcaagaacaagcatggagatgatggcatgtgcaaggggaacaagaacggagttacaagtgatgatttcaggactttgaagccaccataatgggtgcatgaagccttggacgaaatatacaagatgccacttcataaatttcgttccgaggctattttaggtgctgcgtcaccttattattgggccaggcccatgtaatttcgaaatacataagtataggctatttttagagtccgtatgtgtggggaaacaagagatagggttgatttcggacccctccaccaagggccacgaaattcccccctcttcctccatatatacagcccttagggcatcgtttagactttgggttttgtttagattaaaagttcgccatagctgcaacttcgcgtacttcgtttgtgttcaacgaccagacaaaggcgtcacagaaccccaccttgatcaataaagctttcatcttatattcgcaatatccagattgcaatcttagtttcttgcttgttcttcgtttgctcgcaggaaacagaccctcgtggtcaggttgatcgtgctccggcgtggtcaataacctctcggagttggtttagcgattgctaaggcgcgacgtcctcgcacgttcgtagtcggatcgtcaaagtcgacttccaccaaagacgatatccaccatctcatcgaaagacgggacacctttgcctctatcaagtggtatcagatttccaggttgctcggtgagattttacagtttttcgtagtttagatcgagtctgttcttcatacctacagtccacgaaaaagccacaaaaaaaaattagggttagttcatcatatccgaaccaatctgagcctttgcataatctttttagggttttgctttgttgaatttgcggttgcatcgtcgtgtctagttgctggtcttagagtctagtcttttagagtttcgagttctggtcataagttgtcacgccgccgccgcaccatcatcatcgcccctgccatctaccaccaccgctccgaatccgtatccatataccaccaccaatccgtgtccatataccaccaccgatccatatccatatactaccaccgctaccagctcaccgctgccatataccaccaccatatatccaccaccaatccgagttccttgctttactagggttgttttcgggatccatctagttttcaattcgtgtttccttgccggagtcaggtagccacgctccgtttaggcccaaaatttttcgaaaacgcatttttcgaaaaattttccagctatcctacttttaagtgt

SEQ ID NO: 436780 - DNA, 975 bp, Triticum aestivum
ctctatgaatgcctatggcggtgtaccgggatatgcaatgatgtagcgaccgcgacctcgaatcgatcaagtgctctgtgctcaggtgtcatccctggatcagtaatgctgacacacacagtactgaaggatttataacagagtagcaatcacacacttattacatcgatgtctcaaagagaacttattacaataaatatggcttaaggccatctaataagataacagcggaaggcttggaagataagtgagtccatcaactccaacggcatactgagtatagaccacgacctagcgcaccttactcgtcgtctgaaaagtctgcaacatgaaacgttgcagcccgaaaacgggtcagcacatggaatatgctggcaatgtaacacatagagagaatgaacagtgaatatgctataactatatgcatatatggctggtggaggctctatggttatatattttgcgaaaagccaatttttccctacaataaaggaatatattttatttaactatcatgttagttgataaacattgagaaggtagaccccctctcaatcccaattaagtcatcattaaacccaacaaattaattagagtaacatgatgagattcacatgataatccaagtactagatactcaagatgtccataaccggggacacggctaaccatgattagtttatacactctgcagaggtttgcgcacttttccccacaagactcgatctcctccgttggatttctcgcactacatggtgtttgagaaacggatgaccgagacatagtctttcagaagcgctagcaccttacgatcgggtagacagtaccaacctacatcccctacatctgctagtctaccactgtaagagttcgcacgacttagtcaactatgctagagcccataatagcttgtggctgcacacggaagtttctagcatgaataatctcatgatccctttgagcctgggtggcggt

SEQ ID NO: 436781 - DNA, 573 bp, Triticum aestivum
ttgaaaggactcgacgctaggacgagcaactcgacacgatggtgcaaccgcatattcagaaaggcttatgcaaaggctcagattggttcggctaggatgaactaaccgtagccgttcgctttttcgtggactataggtacgaagaatagactcgatctaaagatacgaaaaactgtaaaatctcaccgagcggcctgaatatccgagacctcttgatagaggcgaagggtgtcccgaatctttcgatgagatgataactatcgatttggtggagacgactttgatgatccgactacaaacgtgcacgacgttgcgccttagcaatcgctaaaccaatctcctgaggttactgacgatgccggaagcacggtcagcctgaccacgaaggtctattctgatgaggacatgactaccttggatatgaccaaaaatattgcatatatgcatatttgtcaggtgatttctagtgcaaactattcaataatctatttatgttatccagaacaaaaatacttcacacacttttgtgttttgtctaattgcaggtgtatgggacatttgtacaatccacat

SEQ ID NO: 436782 - DNA, 442 bp, Triticum aestivum
ccgggtcgacgggaggggttgttttcttctctaagtcctttttcctcataacatatgcccttgttcaccgcatcgtaactttgcacccgtagctccgttttgggcgtgtagcatatcaaattgttcatctggatatgcacttcatttcattccattgtaccatattcatttgaggtcatcttgatgccctaaatgctgttgcaagagtgctatgtaatgttagtttcagattcttaccagattatcgacatttgtcatttttgccatgtttaatgatgaggacatgactaccttggatatgaccaaaaatattgcatatatgcatatttgtcaggtgatttctagtgcaaactattcaataatctatttatgttatccagaacaaaaatacttcacacacttttgtgttttgtctaattgcaggtgtatgggacatttgtac

SEQ ID NO: 436783 - DNA, 510 bp, Triticum aestivum
cggtgttgttatatgaacacggattggtggtggtatatggatacggattctgagcggtggtggtagatggcaggggcgatgatgatggtgcggcgacggcgtgacaacttgtgaacagaactcgaaactctaaaagactagacgctaagaccagcaactgaacacgacgatgcaaccgcaaattcaacaaagcaaatacagaaaagattatgcaaggctcagattggttcggatgggatgaactaaccctaatttttttttggctttttcgtggactataggtatgaagaacagactcgatctaaactacgaaaaactgtaaaatctcaccgagcaacctggaaatctgataccacttgatagaggcaaaggtgtcccgtctttcgatgagatggtggatttcgctttggtggagtagactttcacgatccgactacgaacgtgcgaggacgtcgcgccttagcaatcgctaaaccaactccgagaggttattgaccacgccggagcacg

SEQ ID NO: 436784 - DNA, 1106 bp, Triticum aestivum
agctttcgggacgaagcgccgccgtcttgaggcggaacctgggtgggacgaatctagggctctggcgaagctgttctgcaggggaaacatccctctgggagggggaaatcaccgccatcgtcatcaccatcgctcctctcatcgggagggggtcaatctccatcaacatcttcaccagcaccatctcatctccaaaccctagttcatctcttgtatccaattcttgtctcaaagtccgggattggtgctagtaggttgctagtagtgttgattactccttgtagttgatgctagttggtttatttggtggaagatcatatgttcagatcctttatgcatattattacccctctgattatgaacatgaatatgctttgtgagtagttacgtttgttcctgaggacaagggagaagtcttgctatgagtagtcatgtgaatttggcattcgttcgatattttgatcagatgtatgttgtctatcctctagtggtgttatgtgaacgtcgactacataacacttcaccattatttgggcctagaggaaggcattgggaagtaataagtagatgatgggttgctagagtgacagaagcttaaaccctagtttatgcgttgcttcgtaaggggctgatttggatccatatgtttcatgctgtggttaggtttaccttaatacttcttttgtagttgcggatgcttgcaataggggttaatcataagtgggatgcttgtccaaggaagggcagtacccaagcaccggtccacccacatatcaaattatcaaagtaacgaacgcgaatcatatgagcgtgatgaaaactagcttgacgataattcccatgtgtcctcgggagcgctttcctctatataagagtttgtccaggcttgtcctttgctacaaaaaagattgggccaccttgctgcaccttgtttacttttgttacttgttacccgttacgaattaccttatcacaaaactatctgttaccgataatttcagtgcttgcagagaataccttactgaaaaccgcttgtcatttccttctgctcctcgttgggttcgacactcttacttatcgaaaaggctacgatagatcccctacac

SEQ ID NO: 436785 - DNA, 475 bp, Triticum aestivum
aaacggcgtgtcttcatctggttgcatgaacttgctccttgcatccgccattcctaaaagagtagaaaagatggagaggggtcagacatgagaagagtgagtagctgatctagggctttagcttagtggtcgtgtcctacagtcagcgtgtgctctgataccaacttgtagcgaccagacctcaactcggtcgatctctgtgctaagtgtcatccctggatcgataatgctgacaccacagtacctcgaaggatttataacagagtagcaatcacacacttattacatcgaatgtctcaaaagagcactattacaataaatatggcttaaggccatcttaataagataacagcggaaggcttggaagataagtgagtccatcaactccaacggcatagctgagtgcacgaccaccgacctagggcaaccttactcgtcgtctgaaaagtctgcaacatgacatgttgttacccga

SEQ ID NO: 436786 - DNA, 537 bp, Triticum aestivum
  unsure (1)..(537): unsure at all n locations
actcggactggtggcggagataaatctggtggaacacggacaggtggcgaatatatgttgcaggtgaactcggattggcgtgatggcggcggatatgtggtggcgtatatggattcggattggcggtgaatatgtggtggtggtatatggcaacagcgacgatgatgatgcggtggtgatatatggcagcggcgacgtgacaacctgtgaacagaactcgaaactctaaaagactagacgctaagaccagcaactggacacgacgatgcaaccgcaaattcaacaaagcaaatacagaaaagattatgcaaggctcagattggttcggatgggatgaactaaccctaattttttttggctttttcgtggactataggtatgaagaacagactcgatctaaactacgaaaaactgtaaaatctcaccgagcaacctggaaatctgataccacttgatagaggcaaaggtgtcccgtctttcgatgagatgatggatatcgctttggtggaagtcgaccccgggaatngtaggaccggt

SEQ ID NO: 436787 - DNA, 657 bp, Triticum aestivum
gccaccaaaacgatatccatcatctcatcgaaagacgggacacctttgcctctatcaaatagctatcactacatgcatatttggctggtggaaaagctttatggtcatagtattttgcgaaaagccaatttttcctactacaaaggaatataatttatttaactacaaagttggttgaaaatattgagaaggttcctccaactcaatcccaaattaacatcaataacccaacaaaacgggttatagtaacggtgatgagatccactatgataatccaacaaccagatacccaagatcgtccataaccggggacacggctaaccatgattagtttgtacactctgcagaggtttgcgcacttttccccacaggactctatttacatccatggtcaaagaaacgagacacagtgtttctgagacaataactctttactctgggtggacagctacacctactttcccctacatctgctagcccacctctaatagaggtctcaaaatgtactcaactatgctagagcccataatagcttgtggatgctcacggaagtttctagcatgaacaatcttatgatccgtttgagcctgggttgcggtccatatgagaatcacacagtattccaggatttccacaggcacaggcatcactgggttc

SEQ ID NO: 436788 - DNA, 735 bp, Triticum aestivum
tcgtcatccggttgagtgaacttgtttctggggtccgccatctatagagtagaattagaggagaattagaaatgagcaaagaagaaaattcatgcggcttattctagtggtcgtgtcctacagtcagcgtaagctctgataccatcttgtagcgaccacgatcccaatgaaccgaagtctctgtgcttaagtgtcatccctggatcgataatgctgacacacacagtactcgaggaattatagaagagttcaatcacacacttattacatcgagtcctgataaagaacacgattacacaaaaataatatggctgaaggccatctaaactaagactaactgcggaagacttgcaagaggtaaagcgagcccatcaactccaaccgcatagctgagtgcatgacaacagacctatgcgcaccttactcttcgtctgaaaagtctgcaacatgatatgttgcagcccgaaatgggtcagcacatggaatatgctggccagataatgttggcattacacataacaggtaggcccacgaagggtcgaaatatcatgaagcatggggtccacacaacatgtcggtctaggtaaatttcatagagatatactatccactcggacaagcagcatactatccactcgaccaagcagcataccatccactcggatgacagttcaccacttgaccatacgactcactcagatatacaaagaccatgcatgcagcaaagtggtcgac

SEQ ID NO: 436789 - DNA, 569 bp, Triticum aestivum
cgggtgcacgggtccgtatgagtggggaaacaagagatagtgttgatttcggacccctccaccaagggccacgaaattcccccctcttcctccatatatacagcccttagggcatcgtttagaccttgggatttgtttagttaaaagttagccattgcaacttcgtgtgcgtcgtttgtgtccaacgaccagaccaagaccgcttttcggatccccaccattatcaatacctcatacatattcgcgatattcagattgcttttatcatattcttgctcgttcttcgattgcttgcaggaatagaccttcgtggtcaggctgaccgtgctccggcgtggtcaataacctctcggagttggtttagcgattgctaaggcacaacgtcgttgcacgtttgtagtcggatcgtcaaagtcgtctccaccaaatcgatggttatcatctcatcgaaagatcgggacaccccgcctctatcacactaggtacaggcaaaggcatatataaaccatgattattgagtcgtgacttagctttttgacatgtagtgcatcgagcaataaaacgttcaa

SEQ ID NO: 436790 - DNA, 522 bp, Triticum aestivum
ttccaccaaaacgatatccatcatctcatcgaaagacgggacacctttgcctctatcactttcaaaatggaatcaggagtcataggaagcaaagtaatatttttgtccttatgaacaggagtatactgattgtttctaccatggtgtacagaatttttatcaaatggccatggtctaccaagtattaaggaacatgcttgcataggtaccacatcacaatcaacataatcagcattatgtagagatactaaaatgcacacgaacagtacgtgttaccttaaccttgccgctgtcgttgaaccattggatgtagtaaggatgtggatgtggtcttgtggtgagagatagcttctcaaccatctccatgctagccaagttgttgtagctccctccatctatgatgacgtgaacagaacgttccttcacaactcccttcgtatgaaacaaattatgcctctgattttgctcagcttgtgtaacttgcacactcaaaacacgttgagcaactaaacattcataccc

SEQ ID NO: 436791 - DNA, 445 bp, Triticum aestivum
accggtcgagccattcccgggccgacggggaagagtatccgtcagcacgacggcgtggtgacgatcttgatgtactacagcagcagggcttcgcctaagcaccgctacaatattatcgaggaatatggtggcagggggcaccgcacacggctaaggaatagatcacgtggatcaacttgtgtgtctttagggtgcccctacctcagtatataaaggagccaaggggggagggggcgggccggccaagagagagaggcgcaggaggagtcctactccttccgggagtaggacctccccccaatcctattccaactaggattccccggagggggaaaagggagagaggggggccggccaccttctcctagtcctaataggactaggggaaggggaaggcggcgcggcccatgttgagctgcctcttctcttttccactagggaccac

SEQ ID NO: 436792 - DNA, 455 bp, Triticum aestivum
cgggaagagatccgtcagcacgacggcgtggtgacgatcttgatgttctaccgtcgcagggcttcgcctaagcaccgctacaatattatcgaggattatggtggaggggggcaccgcacacggctaagagaacgatcacgaagatcaacttgtgtgtctagaggtgcccccctgcccccgtatataaaggagcaaggggggaggaggccggccctaggaggggcgcgccagggagtaggagtcctactcctacttggagtaggtctcctcctttcctagtccaactaggagaaggggggaaaggggggaaggggaagaaggaaaagggggctgcgccccttgtccaattcagaccagaaggggggcgcaggcctccttccttttggcctctctcctctattcccgtatggcccaataaggctcatataccccccgtggacccggtattacggacc

SEQ ID NO: 436793 - DNA, 307 bp, Triticum aestivum
acggggaaaagtaccgtcagcatgacggcgtcgtgacgatcttgatgttctaccgtcgcagcgcttcgcctaagcaccgctacattattatccaggattatgctggagggggaaccgcacacggctcagagaacattgatcaattgttgcgtctctggggtgcccccctgccctcgtatataaaggaccatgggggacgccgccggcccacgaggagggcgcgccacgggggaactcctactcccactgcgactaggactcctccctcccttgttggcgtaggagacacggaacgatgcggggaatt

SEQ ID NO: 436794 - DNA, 218 bp, Triticum aestivum
cgggtcgacgcggcaagcactatatacaccattcatctatgctaatatagcccgtcttttaaagccaatgtatgctatcaccaattgatcggaatattttctttcaagcatagctttcatgtaatggaatataagtatctttataagttgattctaaatcaatatcatacacatactttgaatgctaaatataagaaagaaccaaagggggaaggggc

SEQ ID NO: 436795 - DNA, 965 bp, Triticum aestivum
ccgggccgacggaggccgggaaagaaatgaggaagggcaccaagacaaccaccgcggctcgggggggcgagaagacgaagaatccccaggagatgatcacgacggtgatgctgtacacagtcatcatgtagaagatgcaggacatgatgatgatgccggcggagcagacgacgctggaccatcgatgggctgggtgcaggaccctcatattcaagagctgcttctcaagcagacggataacgcaagagctgccgcccgagagaaagccaagatggatcaacttgagttagacgcggttactccattgtatgaaggatgcaggcccgaggatacccgcctgaaagtaacgctcatggctctggagatgaaggtaaaacacaaaatgaccgacgcatgcttcgacgagaacatgtcattctggcacgaacgtcttcccaaggggaacaagtgcccgactagtttggaggaggcgaagaaaatcgtgtgtcctctggatttaccgcacgtgaaataccatgtgtgcatgaacaattgcatcatttatcgggacgagcacgcggagtctaccatatgtccggtgtgcggtgtcactcgatacaagatgaggaggaaagctcctcgaaaagcggtgtggtactttccgatcactcttcgtctgcagcggtatttcgcgggccctaaggtagcaaagctcatgcgttggcacacggataggaaggagaagaagcgggaagatgacggaaatgatccggagataaattaaaaagacaagatgctgagtcaccctaaggatgcgagccagtggcaagtgttgaacttcgaataccccgaatttgggaaggaaccaagggacctcatggttggcgcaagcaccggttgggtcaaaccgttttgccacccggggagcgacgtttgccgagtgatctggaacgatcgagctcttctcccttcgtcgacccgggagt

SEQ ID NO: 436796 - DNA, 439 bp, Triticum aestivum
cgagaagacgaagaatccccaggagatgatcacgacggtgatgctgtacacagtcatcatgtagaagatgccggacatgatgatgaggaagatgcgggagcagacgaagggcatgatcatgaagatgaagatgccggcggagcagacgacgatggaccatcgatgggctgggtgcaggaccctcatattcaagagctgcttctcaagcagacggataacgcaagagctgccgcccgagagaaagccaagctggatcaactggagatagacgcggttactccattgtatgaaggatgcaggcccgaggatacccgcctgaaagtaacgctcatggctctggagatgaaggtaaaacacaaaatgaccgacgcatgcttcgacgagaacatgtcattctggcacgaacgtcttcccaaggggaacaagtgcccgaccagtt

SEQ ID NO: 436797 - DNA, 490 bp, Triticum aestivum
aattcgcgggccgacgggcaagctcacaccaatgaggttagcaagggcaaaccactagattgggtttcaggacaaccagtcacagatgagcatggacgccttcagattataaagaatgatgacctcgaagagctccaagaactcggttctggaacttttggaactgtatatcatgggaaatggaggggctctgatgttgcaataaaaagaatcaatgacagatgttttgctgggaagccatctgagcaagaaaaaatgcggaatgacttctggaatgaagcatctaaccttgctgatctgcaccaccccaatgttgtggccttttatggcgttgttctagatgggcctgggggatccattgcaacggttacagaatacatggttaatggctcacttaggacggctttgctgaagaattccaagagcctggatcgacgcaaacggctaattattgccatggacacagcttttggaatggagtatctgcata

SEQ ID NO: 436798 - DNA, 444 bp, Triticum aestivum
tggtcctacattcacgggtccacgggacaaccgtaacgcgacgtcatctatagtgtaccgtgtcccctgggtactgatttataaagtatcctaggggacaagcatgacatgcacttggtctgtaggctacccaaggtagcttacaaccaacgctagcaccacccatgcctacctcacactatagaagctagctccatccatccatcaagggatcggctcacacactctcacgcacatactcattcggccagaggtcacggccaacacgccactagctagctagctcattgctactactctcagtccaatacagctccaggagcactttgtactgcccgatgtacaccccagatatatactcagacatgtaggagtaggggtattatctccccggagagccccgaacctgcgtaaactagcgcgtgctacgcgcatatccgtctc

SEQ ID NO: 436799 - DNA, 416 bp, Triticum aestivum
tcaacctcgatcccgatgatgtggtggccaggctcgagcgcatccttggcagatttgacatccccgacgaagtcgaacatcaccaacgtgatattttgaggatgcaggtgatcgatggaatttgcttccaggccagagacatggaaatggagtggttccgcggagttggcatgcgcgcgattgcacgctgtcaagctcttctggaagaagcccaacagccccaagagcctcccagcgccagcagctccgtacgcggaggcgggtcgggacacttggagtgaatggccgcaagggtgctatgctgatcatggagtgcgagaagaccatcgtcggaaggccgccagctcagccttttagcttatattttagtataattgtatgcatatgtaggtcgtgagtgttctgggccttgccgc

SEQ ID NO: 436800 - DNA, 388 bp, Triticum aestivum
cctcgcccctccttgctcaccaattctcatctgcggagccgcctaaagagaacgagcggccgctccggccaccggctagatctgcagcaccatcactccaccagcccacccccgtgatctacctgctgtcgccggccctctctccctctgcagcaccaccaactgaggtggggttcaacagctcacattcctacatctttggaaatgcatccccatctaaccctacacaggcatcctatgtgtgctgagattattgaagaattccagaagtgccatgtggatcaccccatcaaaaaattctttggtgaatgcacggatcttaagattaagcttgatcgatgcttccggcaggagaaagctgtgaagagaaaggcaaactttggagaga

SEQ ID NO: 436801 - DNA, 1296 bp, Triticum aestivum
gcgtgtctaatgctgccgctttttatagggcccagaagggaagctcgacgaaaaaggtataatggtctcagtatgctgaggccgatcatccggtgccccttagcgaccagctgaagcagctggtcgagctccacaaggcggccgaacaggccatgaagggcctcatagttcggctgtggcctaaggaggccatgcctgggagctacttcggcctggtgcggcggctggtggatgcgtgcccgtgggttgaagtcatcaagcactccgcctgtattgaaggtgcccgtcgggcccttgcccgcgcaaaggtgcactggggcaagatggatgcccagaagctcgtgacggacccgccaccagagggcaaggagtatcgcacgcccgagatgtattataagagtgtgctgaagggcgcccgcactattgcgggtgagtgctccaaagatgtaatatttgagtagactcgcattttgttatcctgtgcgctgaaaacttggttcatatgcgctaagcaacgcttgttaatttaaaatattaccttctgtgcggctgtttatcaaatctgagagatggcaagtcgtcggcttcagcccccatgccacgagtgctggggtgttcgggataaactcgagcgctcttgttcccatttttgggtccatctagggaggcgctcaacacaacgaacaaggcaaccggacttataatgcttgaacactctcacttagccatagaattctataattttaaatttcggcgaagcccctagtcttcggaaggccgaattcggggcgctatccacgcctgggccggacaatatccggctcctcgctctaagcggcataagtctttagggactcgcaaaaaacctctcgaacagcgaccggtctctcgcctcatcatgacagtcagttttagctttctccactgaggtgctcgcccagctcaaccggggcacaatcgcagtggttctcccagtgctaccttagccgatataacggaacgtaaggtaccaaaacatgggagccgggcaaacccaactattgacccaaaacatgattcggagccgatgcatataatgctataagttcggggtgccgcacttgtgaaagtgttcggacttctcacaccatattgaggggtactgaagcccctggcgtatttgccgtaccaaagtgtacgggtgcaacatgtcattaatgaacatatatatataaagagggtaatgcaaaaaataggcaaaaagcgatgcattgtttattcaagagattctgccatgagtgcagaacgatacaatag

SEQ ID NO: 436802 - DNA, 732 bp, Triticum aestivum
accaggagactcagggaaatcgatccttggcatctttgctaagggaaaacttccgctacacttcatctctaaccttccacttgggtaaccaacgaggggcgagaagccatcagcattcgacgctgccgcattctaccgagctcaagagggcagctcggtagagagtgtgttctggtctcaatattctaaggccggacaccctatgcccttaagcgatcagctgaagcagctggtcgagctccacaaggcggccgaacaggccgtaaatggtcttctagttcggctgtggcctgtggaggccgtgcctgggagctacttcgggcttgtgcggccgctggtggaggcctgtccgcggcttgaggtcatcaagcgctccgcctgcatcgaaggtgcccgtcggtcccttgctcgtgcaaaggtgcactggggcaagatggatgctcagaagctttgtcttgttgcttctgatcttcacttttggtggtggcagctttgttgagctttgactgatcgagcaagtgctgaccagttgatggtcatctatgggtttagtaatctttaaaggaacttcaaaaaaaataacttcctcctctcttatagcttcaaaaccttcataagcgatggtttcaaattccgcatcagatgatggttcaaccaaagtttcttcctctctaggtattttctgtcttgtgcctctaattatcctagagctgggtcaaacagaaataagct

SEQ ID NO: 436803 - DNA, 608 bp, Triticum aestivum
taccggtcaagcaattcccggagcgacgggaacctgaagattggcaaggccatgaggtggtgggagaaggtgacgcaccccaacatgagggaggtcgagtccgcgcacgagctcgcctactccctgctcaacgccggcgacaagctcgtccgggtcgacttcttctcccccggctgcggtggctgccgcgctctccaccccaagattgcgcagttcgctgagcggaatccggacgtgctgttcctgcaagtcaactacgagaagcacaagtccatgtgctacagcctccatgtccatgtcctccctttcttcaggttctacaggggagcccagggcagggtcagcagcttcagctgcacaaatgcaaccatcaagaagttcaaggacgccctcgcaaagcactcgccggacaggtgcagcctcggcccggcgcgggggctcgaggaggcggagctcttggctctggcggcaaacagggacctggaattcacctacaacgagaagccgacgctggtgccgatcgccgaggctatccagatggaagctgcctccattggcggcccatggatgccattgcccgcggccgcgacgcagccgctcactctggg

SEQ ID NO: 436804 - DNA, 419 bp, Triticum aestivum
tacggtcgaaaatacggggccaagtcctactggcaacggtaccggcgccggccgcgctctcaaccccaaggttccccagttcgctaaccggaacccggacttgcggtcccggcagttcacctacaagaaccacagttccatgtgctacaccctcaaggtcaaggtcctccctttcttcaggttctacaggggagcccagggcagggtcagcagcttcagctgcaccattgcacccatcacgaagttcaaggacgccctcgcaaagcactcgccggacaggtgcagcctcggcccggcgcgggggctcgaggaggcggagctctgtggctctggcggcaaacagggacctggaattcacctacaacgagaagccgacgctggtgccgatcgccgaggccatccaaatggaagctgcctcc

SEQ ID NO: 436805 - DNA, 422 bp, Triticum aestivum
gtcgacttcttcaccccaggctgcggtggctgccgcgctctccaccccaaggtaggagttcttggccgaagccccctgttccgttccggcaatctgattctgaaactgcgacgtatactcaagcgaattccggtgttccgatgtgcagattgcccagttcgctgagcggaatccggacgtgctgttcctgcaagtcaactacgagaagcacaagtccatgtgccacagcctccatgtccatgtcctccctttcctcaggttctacaggggagcccagggcagggtcagcagcttcagctgcacaaatgcaaccgtaagcctcactgattatgtttcctcttttgtccactacaaaaatatgttcttcagacacgtttaagatgaatgctgacatgcttgctgcaattcgttctgattacaga

SEQ ID NO: 436806 - DNA, 432 bp, Triticum aestivum
aattcccgggtcgacgggcgatgaacagaaatgaggcctccacagcttcaagcgcctcttctaagtctctgtttgccgtcgcaatggattgttatgactactgtctcgtttgatcggttgatcgttttaagatatttggttgtcttgtaatcggatatattatgcgctccagaacatctgagatgtactaaacttgagcctaaataactggttgctgtcaatttgcttggtttcgtcttatagtgtggcaactgatgttgggggataatcacctcaactgaacgctgccctttataacaatgaatagtctggttttgtcgatgcacttttgttattgcattgccccactgaacaggcattgcaatgatgtgatattatgatatgcttgacacaaaacaaatcaattcaaataaaaaaaaaaagcggccgctc

SEQ ID NO: 436807 - DNA, 421 bp, Triticum aestivum
gggtcgactaaaccacatacatcctggtcctccgacctctggctcgacgaatctgaagctgacgactcacaatgtgatctaattctgtcccatggaattttgggtgctacaatctggttagtgacattaggtgttacagccttcagggtacattccgtgtagaacaacacccatgggtgacaaagaacttgatcagcagtcattctagaagagacatctcgatccaacattcgacttataagatcccgtccaagaactgacattgattcccatggaccgctgttgaaatcaagctcaactgtctttatagcttcaaagacagcttccagagagcccccttgaaatggaagtgaaccaagcagtagtacatggaggagcaccccagcaccccatatgtctactttctcagaatagcttcctg

SEQ ID NO: 436808 - DNA, 669 bp, Triticum aestivum
  unsure (1)..(669): unsure at all n locations
atcgcaggaaatcaataccaaacggagtccaaacgtagtgaaactttttgtggatttttttggaccaaaagacatccaatgggccgaagaagcacctgggggatgctccaaggggagcacaacccaccagggcgcgcctggaggcccaggcgcgccttggtgggttgtgcccacctcggatgccccccggactgcctctttactctataaataccccaatattccagaaaccataggggaatcgatgaaaatcaattccagctggcgcagagtccagaaccagcagatccaatctagacaccatcatggaggggttcaccacttccattggtgcctctccgattatgcgtgggtagttctttgtagacctacgggtccatagttagtaaccagatggcttcctctctctctctcttggttatcaatataatggtctcttggagatccatatgttgtaagtacttttgcggtgtgtttgttgggatccaatgaactttgagtgtatgatcagatctatgtttttatccatggaagttacttgagtcttcttgatctcttatatgcatgattgcttatagcctcgtatttcttctccgatatttgggttttgtttggccaacttgatctatttatcttgcaatgggaagatgtgctttgtantgggttcga

SEQ ID NO: 436809 - DNA, 1077 bp, Triticum aestivum
tgacccacaagtattgggatcaattgtagctcttctaggataagtaagagtgtcgaacccaacgaggagcagaaggtaatgacaagtggttttcagcaaggtaatgtctgcaagtgctgaaattgtaggtagcagagtagtttgatagcaagatattttgtaacgagcaagtaatgatagtagtaacaaaagtgcagcaaggtagcccaatccttttgaggcaaaggacaggccaaaacggtctcttatgataagcaaagtgttcttgagggtacacgggaatttcatctagtcactttcatcatgttggtttgatttgtgttcgctactttgataatttgatatgtgggtggaccggtgcttaggtgttgttcttacttgaacaaacctcctacttatgattaaccccctcgcaagcatccgcaactacgagaaaagtattaagaataaattctaaccatagcattaaacttttggatccaatcggtcccttacggaatagcgcataaactagggtttaagcttctgtcactctcgcaacccatcatctaattactactccacaatgcattcccttaggcccaaatatggtgaagtgtcatgtagtcgatgttcacatgacaccactaagggaatcacaacatacatactatcaaaatatcgaacacatatcaagttcacatgattacttgcaacatgatttcccccgtgacctcaagaactaaagtaactacccacaagtgataatcatgctcaagatcagaggggtattaaatagcatatcggatctgaacatataatcttccaccaaataaaccatatagtaatcaattacaagatgtaatcaacactactagtcacccacaagcaccaatctatagttccagtaacaagattgaacacaagatattaactagggtttgagaggagatggtgttgttgaagatgttgatggagattgccctccccaagatgggagagttgtcggtgatgatgatgacgatgatttccccctctgggagggaagttcccttggcggaatcgctccgccagagggcaaaagtgctcctgcccaag

SEQ ID NO: 436810 - DNA, 1571 bp, Triticum aestivum
  unsure (1)..(1571): unsure at all n locations
ttgncgngacctgtgtacgcagggaaggnacnggtccanaaattcccgggtcnacggggggagccataataataaaactcggatgacaacactttctcaaaataatcataacatgatattacaaaatggtatctcgctagccctttctgagaccgcaaaacataaatgcagagcacctttaaagatcaaggactgactaaacattgtaattcatggtaaaagagatccagtcaagtcatacccaatataaactaaaagtaatgaatgcaaatgacagtggtgctctccagctggtgctttttaataagagggtgatgactcaacataaaagtaaatagataggcccttcgcagagggaagcagggatttgtagaggtgccagagctcgattttgaaatagagataaataatattttgagcggcatactttcattgtcaacataacaaccaagagatggcgatatcttccatgctacacacattataggcggttcccaaacagaatggtaaagtttatactccccctccaccaacaagcatcaatccatggcttgctcgaaacaacgagtgcctccaactaacaacaagtcccagggggagttttgtttgcaattattttgatttgatttggcataaagcatgggactgggcatcccggtgaccagccattttctcgtgagtgaggagcggagtccactcctcttgagaataacccgcctaacatggaagatacagacaaccctagttgatacatgagctattcgagcatacaaaacaggatatttatttgaaggtttagagtttggcacatacaaatttacttggaacggcaggtagataccgtatataggaaggtatggtggactcatatggaataactttggggtttatgggagttggatgcacaagcagtattcccgcttagtacaggtgaaggctagcaaaagactgggaagcgaccaactagagagcgacaacagtcatgaacatgcattaaaattaatcaacaccgaatgcaagcatgagtaggatataatccaccatgaacataaatatcgtgaaggctatgttgattttgtttcaactacatgcgtgaacatgtgccaagtcaagtcactcaaatcattcaaaggaggataccaccctatcataccacatcataaccattttaatagcatgttggcacgcaaggtaaaccattataactcatagctaatcaagcatggcacaagcaactataatctctaattgtcattgcaaacatgtttcattcataataggctgaatcaggaacgatgaactcatcatatttacaaaaacaagagaggtcgagttcataccagcttttctcatctcaataagtccatcatatatcgtcattattgcctttcacttgcacgaccgaacggtgtgtataataataatagtgcacgtgcattggactaagctggaatctgcaagcattcaactcaagggagaagacaaggtaatatgggctcttagttaaataaacaatcatgcatataagagccactaagcattttcaatatggtcttctcgaccccacccac

SEQ ID NO: 436811 - DNA, 579 bp, Triticum aestivum
tcgtaaaatgcgatgaaacttcctctctgatttttttctccgtgagacggaatatatggagttggagttgaggtcggcggagcctcaggggggccacgagacagggggcgcgcccaggggggtaggtgcgcccccaccctcgtggactgggtgtgggccccctattattgattatttcgccagtatttcttattattttccaaaaagtgcctccgtggatttccaggtcattccgagaacttttcttttctacacataaaacaacatcatggcagttctgctgaaaacagcgtcagtccgggttagtttcattcaaatcatgctagttagagtccaaaacaagggcaaaagtgtttggaaaagtagatacgttggagacgtatcaacgtctcacacaccaatgccgcgaagcggttggctgctttaaacgacagttcgtggtgttctcttgagaccaccctcggtgccttcgacgaagtccacgagctgttttctcagtgtgcacgtgcttacctcaactcgagagccagaaggttggtgctcggagcggctcaggcaattcacgactccgtcggcccg

SEQ ID NO: 436812 - DNA, 494 bp, Triticum aestivum
cggtcaggccattccgggtcgaccgggtaaaacgcgatgaatccttctctctgatttttttctccccgaacacgaatatatggagttgcagttgaggtcggtggagcgtcagggggcccacgaggcaggggggcgcgcccaggggggcaagcgcgcccccaccctcgcggacagggggtggcccccctagcgtggatccttcttccagtatttttttgtattttccaaaaataagctccgtggagtttcaggtcattccgggaacttttgtttctgcacataaattaacaccatggcaattctgctgaaaacagcgtcagtccgggttagttccattcaaatcatgcaagtcagagtccaaaacaagggcaaaagtgtttggaaaagtagatacgacggacacccatcaactcccccaagcttaaacctttgcctgtcctcaagcaattcagttgataaactgaaagtgataaagaaaaacttttacaaactcc

SEQ ID NO: 436813 - DNA, 444 bp, Triticum aestivum
ctccgtatcataaaacgcaatgaatccttgtctctgatttttttctcccgaacacgaatatatggagttggagttgaggtcggtggagcgtcagggggcccacgagccagggggagcgcccccaccctcgtggacagggtgtgggccccctgacgtggattcttcttccagtattttttatatattccaaaaataatctccgttgattttcaggtcattccgagaacttttatttctgcacaaaaataacaccatggcaattctgctgaaaacagcgccagtccgtgttagttccattcaaatcatgcaagttagagtccaaaacaagggcaaaagtgtttggaaaagtagatacgatggagacgtatcacggtgcggcgagcgggccggccgggccttcggcccagttcggtccgaattttttaaaataatttcaccatagag

SEQ ID NO: 436814 - DNA, 1530 bp, Triticum aestivum
tcccgggtcgatgggcaaccctatagtgtgtcatttgacgtcggagggcatccagggggcccatgaggtaggggggcgcgtcctagggggtgcgccccccaccctcgtgagacgggggggggcccccctggtcttcatctttggcgaggatttttctttattttttctaaggtgttccgtggagtttcaggtcattccgagaatctctgttttctgcacataaaacaacaccatggcaattctgctgaaaacagcgtcagtccgggttagttccattcaaatcatacaagttagagtccaaaacaagggcaaaagtgtttggaaaagtagatacgatggagacgtatcaactcccccaagcttaaacctttgcttgtcctcaagcaattcagttgacaaactgaaagtgataaagaaaaacttttacaaactctgtttgctcttgttgttgtaaatatgaaaagccagcattcaagtttcagcaaatattatgaactaaccatactcacaataacacttaggtctcacatttactcatatcaatggcataatcagctagcgagcaataataataaaactcggatgacaacactttctcaaaacaatcataatatgatataacaagatggtatctcgctagccctttctgagaccgcaaaacataaatgcagagcacctttaaagatcaaggactgactaaacattgtaattcatggtaaaagagatccagtcaagtcatacccaatataaaccaatagtaatgaatgcaaatgacagcggtgctctccagcgggtgctttttaataagagggtgatgactcaacataaaagtaaatagataggcccttcgcagagggaagcagggatttgtagaggtgccagagctcgattttaaaatagagatgaataacattttgagcggcatactttcactgtcaacacaacaactatgagatggctgtatcttccatactacatgcattataggcagttcccaaacagaatggtaaaggtttatactcccccaaccaccaacaagcatcaatccatggcttgctcgaaacaacgagtgcctccaactaacaacagtccctgggggagttttgtttaattattttgatttgctttgatctttttggatcatgggactgggcatcccggttaccggccctttctcgtgaatgaggagcggagtccactcctcttgagaataacccacctagcatggaagatataggtagccctagttgcaacatgagctgctcgagcatacaaaacagaatttcatttgaaggtttggagtttggcacatacaaatttacttggaacggcacgtacctagggcacatatgtaggtatagtggagtcatacggaacatcttcggggttcatggagttttgaagcaattccttttctccagattagcccttgtgactgcgaacgcgtcactgggaaattatgtctccagacattccatataataagatacaaccctgtgatagaccccactttctctataagcttaagtc

SEQ ID NO: 436815 - DNA, 676 bp, Triticum aestivum
ttagttccattcaaatcatgcaaattagagtccaaaacaagggcaaaagagtttggaaaagtagatacgatggagacatatcaatagtcatattgcttaccaccaacatcttattttgattaggcggtattgtgggatgaagcggcccggagcaaccttacatgtccacgcacatgagaccggttccaccgactgacatgcaacttgttttgcataaaggtggctggcgggtgtctgtttctcctactttagttgaatcgaatttgactatgaccggtccttgaagaaggttaaaatagcaaacttgacgaatcgtcgttgtggttttgatgcgtaggtaaggacggttcttgctcgaagcccgtagcagccacgtaaaacttgcaacaacaaagtagaggacgtctaacttgtttttgcagggcttgttgtgatgtgatatggtcaatacgtgatgagatataagttgttgtatgagatgatcatgttttgttgaagttatcagcaactggtagaagccttatggttgtctctttattgcataagatgcaagcgccaaataattgctttagtttatcgctatgcgatagcaatagttgcaagagcaatagttggcgagacgaccatgtgacgaaacattgatatagatcaagatgatggagatcatgttgtcatg

SEQ ID NO: 436816 - DNA, 566 bp, Triticum aestivum
acgcctgcccgtaccgttcctagactcccgggtccacaggcataaataacatgaccgctatgttgatttcgtttcagctacatgcatgaacatgttccacgtcaagccactcgaatcattcaaaggaggataccaccctatcataccacatcacaaccattttactagcatgttggcactcaacgtaaaccattagaagctcctagcctattaagcatggcataatcaactatcatctctaactatcattgcaaacatgttcattcagaatgagctgaatcaggaacgatgaacccatcatatttacatcaacaagagacgtcgagttcataccagcttctcccatctcaatcagtccatcatatatcgtcattactgccttccacttgcacgaccgaatggtgtgtataataataatagtgtacatgcattggactaagctggaatcctgaagcattcaactcaagagaaaaggccaaggtaatgtgggctttgagtttaattaacaatccaggctattggaacctctaaacaaatttaaaatgggcctctaaactcgaaccccc

SEQ ID NO: 436817 - DNA, 374 bp, Triticum aestivum
acggggaccacgcaacacggtcaaagggaaatggttaccaaaggaggggcgggcaccaatacgacggctacgactagtctcacatttgctctgctggcgaatggtcgcatcccatttggtgctcttgatctggtgcggcctggccatatttttgtcacaacaaagcgcgattacctggagaacttgcgttttgcttagctgctattgagcatgactcgtttctgatgggactctttttagtgtttttgctacatgatcgtgtcgcctatctggtactatgaactaaacacgggaaaagaatggatcagtgttagttgatccttggtcaaaaaaaaaaaaaagaaaaaaaaaaaagaaaaggggaaggaggagag

SEQ ID NO: 436818 - DNA, 630 bp, Triticum aestivum
gatttaacagggagttactgctggacaggtgggcccccgtgatttgacttgccattatcattttaactgcggcgctacgaccggcgtgagtctcccaatgctccaccatgtagtagaggctggctcttgcatgagatcccacttctccactttttccttgcctctctttcctccacatatgcaaaaatgccatgtaaagcgcactattgtacttacttttacttgctcctacaggtgcttaagcttgccacctaggcataaagtctgacgtggcaagtttatcaagaagagagagactagtttgctgacccaaggaagaaacggtgctaagcgcgtgtacctaggtgaaaagacaattttgagtctatagctaattaaattaagcaaacttagccacaccatttcattggaagaggtcactccttggaaaatgcaataaatactagtactccatgtgtcccataagaacgtttttggcactacaccattgtcaaaaacattcttatattatggaacggagggagtaggaggaaagagttggagaggagtaaaaaaaaacacttatagccaaccttatagccaaccttgttgttgtatgagtgacttagtgttgactatgcgcctggaccc

SEQ ID NO: 436819 - DNA, 571 bp, Triticum aestivum
  unsure (1)..(571): unsure at all n locations
acgtgctaaatacaccgtacatgtgtaccgccgttttctagacgctttgctccatggcgcgggcgcaatccatggatacaaaattagtatactgtatactatttacaagtcgagggcggggcttttcctgcgcggtacgcggcggggcagttccgcctagtcggttcgacagagacgcgagaagacgagggagtaggctgctgcaaacgtagggctgtgtgatttgacagcgagttactgctggacaggtggggccccgtgatttgacttgccattatcattttaactgcggcgctacgaccggcgtgagtctcccgattcctgaccacctccatacaggtgcctctcccaatgctccaccatgtagtagaggctggctcttgcatgagagcccacttctccactttttccttgcctctctttcctccacatatgcaaaaatgccatgtaaagcgcactattgtacttacttttacttgctcctacaggtgttaagcttgccacatangcataaagtctgatgtggcaagttaatcaagaagagagagactagtttgggtgaccaagaaag

SEQ ID NO: 436820 - DNA, 478 bp, Triticum aestivum
ggccgccacctcgatccagctagcggttagggttcccgaaaccggcgaccatggcgaacgagcagccggcggagacctacacggtggaggagctcgtggcggtgaacccctacaaccccgacatcctcaacgacctcgaggtctttgtcaacgaccaggtttcttctaaaacatataacctggatgcaaatctcagccttcgacgcctttaccagtttgagccagaaaggttgagcgtgcaaattgtagcccgcatattgattaaggctctcatggcaatgccggcccccgacttcagcttatgcttgttcttaattcctgaacacgtgcaaatggaggagcagttcaagacgttgatagttctttctcactacctggagactggtaggttccgccagttttgggatgaggcatcaaagagccgtaacatactggatgttgtaccaggttttgagcaggcaatccaaagctatgcgat

SEQ ID NO: 436821 - DNA, 398 bp, Triticum aestivum
aggaccgccagctcaacagcattcacagccctcttgtgaagcttctgatctcgcttgcacaaactagtggtaaacacatgatactgtccaccgctaagctgctttggattggtctgataacccccctgctgctgttggtgaccctggccagactattgattaaagcccccatgaccactctgaggaccagaatttgagccgccccccgggccatgaaagccgccggcgcctgagccgccgcccgggccattgtagtttttaaaggccttcatgattgcacaatccttccatagatgagtcgttggcttctctctagagccgtgcctcggacaaggctcattcaacagctgctccagtgaaggtccctgacccgccgcctccgggaaggggcctcccct

SEQ ID NO: 436822 - DNA, 588 bp, Triticum aestivum
  unsure (1)..(588): unsure at all n locations
cacacgtacagccttgggacatctcntctttcctgatccagcaaggngagaggagaagttgagggagggctccggcagcacgacgacgtggtggtggagcttgcagttctccggcagggcttcgccaagcactaccgaggaggaggtggagttagagagggagagggctgcgccaggggcaagggtgaagctcccatgcgcctccccactatatataggggtggagggggctggtttcttgccctccaagtccattggggcgttggcaaaggtgggaggaaagaaatcccatcatttccttccccaccgattgttatcccccctttttagggatcttgatcttatcccttcgggatatgatcttattccttctaaggggggatcttggtgcaccttgaccaggggtgtggggccttgcccccactacccacgttcatgtgggccctcccatgcaagtgggccccacttcgccagaaccttcccggtacaataccgaacattttttggtggccaaaataggacttcccatatataaatctttacctccggaccattctgtaactcccggtcggcccgggtttcttgacc

SEQ ID NO: 436823 - DNA, 1103 bp, Triticum aestivum
  unsure (1)..(1103): unsure at all n locations
cgggtaaagtcaggccgccttcttcgagctggcctgggtgtcagccagcaaggggaaggcggccccacgtcttggattcctgagagccggacggcctcgtaattttttcagaagggccagnggaagccggctaggctacccatggctatttaccccgacagttgtcgagatacacgacgtgtacatggtggtaagtggcgagagagtgtgtgaagaagtacacccctgcagggttaacatcatctattcgaatagccgtgtccgcggtaaaggacttctgggttgcctatacagttcatagacaagtgaaagtggatactctaaaatacgcaagataagcgtgagtgctatggatggcgttctcgtagggagacgggagcggatccatagtggtgtattgatatggtgaatatgtggactcgtgtgcgccacctcaaaagagttacttgcagtcgtagttcaggatagccaccgagtcaaagctggcttgctgcagttaaaccccaccatcccctttgttgataatgatgcatatgtagttagttctgatgtaagtcttgctgggtacatttgtactcacgtttgcctattttatgtttttgcagagagacttcagtctcactagtagttccgcttggacttcgacgtttagcttgttacctcagctacgatcttgtgcccccagcaggatctggtagatagtcaggcttctcagcctttttcatttctagatgtctgtactcagacatgttaagcttccgcttgtgctttgacttgtatgctctgaatgttgggttgtgagacccttgtttgtaatatctcgctcctcggagcctaatgaataaatacttgagttgtagagtcatgttgtgatgccatgttgtatttgcacatatcgagcatattgtgtgtatgttattgaaatgcttggtatgtgtgggatctgactatctagttgtttatccttagtagcctctcttaccgggaaatgtctcctaatgcttccactgagccatggtagcttgctactgctccggaacacttaagctggccggcatgtgtccttcttcgttcatgtgtatgtcnctttggggaaatgtcac

SEQ ID NO: 436824 - DNA, 429 bp, Triticum aestivum
  unsure (1)..(429): unsure at all n locations
gtacacccgtgcagggttatcattatctattcgaatagccggattccgcggatgggctacttggaccccttgcattgttcatagacaagtgaaagtggatactctaaaactgcgcaagataagcgtgagtgctatggatggccttctcgtagggagacgggagcggttccatagtggtgtattgatatggtgaatatgtggactcgtgcgcgccacctcaaatgagttgccttgcagtcgtagttcaggttagccaccgagtcaaagctggcttgctgcagttaaactccaccaccccccctgttgataccgatgcatatgtagctagttctgatgtaagtcttgctgagtacctctgtacttcacgtgttgctntaatcttatgttttgccagaggagagactgtcagtctgcgctatgtagttcccc

SEQ ID NO: 436825 - DNA, 427 bp, Triticum aestivum
gggccgacgggctcaaggaccttgatgcccctgagatgaatgtgggcagcttggatgatcatgtcgagatagacatcaacagtgacgacgacgacctggagtacacgatgaacaagatgtctataaccccgcaccactctttcttacaccagatggccatggacagcgacggcggcctcagcatgccagcgaggatcagaccatcgacaagccctccgtcgcggtgggccatgtcaggagaatcaccatagatggaagaaacagctggatacttggggctgtacaaggagggtatgactgtcaaactgatacggggagcttagtttgtagtggggtcaaagaacccattcatttgcagtgtattcagcccaagtaattcgaaaattttgggttgagagtgtgaagtacagatgttgttagaaaacgt

SEQ ID NO: 436826 - DNA, 268 bp, Triticum aestivum
ggtcctaatatccgggtcgaccgggaaggagggcaaggcgcccaagtcccccaagaagactgccaagtcgcccaagaaggccgccaccccgaagaaggcctaagagatgcgttctgagttgtttagtctgtgtgctgtgtagtgttcgtctgaatagcggagtgaaggtgttctgtctagttgtcgatgtaacctgtgttgtgatggaagaaatccaaaagtcgctgttgagtttccaaaagataattaaatgtttttgcagagagac

SEQ ID NO: 436827 - DNA, 632 bp, Triticum aestivum
attccaggtcgacgggcgaggcgaagcggcggttccagcggatccaggaggcctactccgttttgtccgacaaggggaagagggccatgtacgacgccgggctctttgatcccctcgacgacgacgaccaggatttctcggacttcatgcaggagatgctggtgatgatggatagcgtgaaaaacgagaagccggacacgctcgaagacctgcagaagatgctggatgacatagtcaacggcgacggcggtagccgcgccactgctggtgctggtggtagcggcggcggtggtggtggctgcggtggtcgcgttccaccggaggccaaccgcagaactcgtgtcgccccttacccgcagccttcgcgaaggtgatggacgcgccggtgctcgtgacgtgcacgcaccgctgcgcttgtaggagagagatcagagcaagaagagagcaaccagcgtgaaaaaaaacattagcaaatcagaattgttgctcgatccccttgttggggtggttacaacttagtgtttagatcatctttgatgacaattgacgccgtcgatctgtttaattgtgttcctttggctggttggtgcttcagtcgcagccaagaattggcgtggatgccccggcgctct

SEQ ID NO: 436828 - DNA, 408 bp, Triticum aestivum
ggggaatagatcatcacttgaacataagtaatcatatgacaaaatctatatatgctgctgctatgagaataatcatgatgccttcatgtccgtattttatttttatcgacgcctctacctctaaacatgaagacatattttttgttatcggcttttcgcttgaggacaagcgaggtctaagcttgggggagttgatacgtccattttgcatcatgcttttatatcgacatttattgcattatgggctgttatttcacattatgtcacaatacttatggctattctctcttattttacatgatttacataaggagggagaatgccggcagctagagttcctaggctggaaaaggagcaaatattagagacctattctgcgcaactccaaaagtcctgaaactccacgga

SEQ ID NO: 436829 - DNA, 412 bp, Triticum aestivum
cacggtaagtcaacgcttacggattcgctatgtggatttcgccagcgccgccacaccatccaccctctccctctcatgtcgccacccaaggtgatcgccgggccagcctgtgtggttggcgatgaaggtcgtggtgagatttttgctgattcgttcgctggcgaaggaccttggacgccaaggcggcggcctcggacggcgaggaagcgttcgtcagatgtgctagccggcttcctcggctacacgggtggagaagattcggctgattgtggtcgcaacccggattccccaccttctgctccagatctgaagactaagaaaggtttggaggactccatcggcatgcacacggtccaatgctacaaatgtgagaaatggcgcaagatcccaacgaaaaaggagttcgagacga

SEQ ID NO: 436830 - DNA, 324 bp, Triticum aestivum
cagtaccacaagggcaccgaggaggaaggaagctaggccagcggcgtcgtcgctagcaccggcatcgcagctgcagcaggaggagtagcaggtagtgttcgaggatggtagtagcggattagcagtagctaaggttgttgcgttggctaaggttaaggtgggtgagtttccatggaacctggaggtggtagtggcgtctgcatgcaggctcgcttgttttggatgtgcatggcaggttctcgatcaatcctaatcaagatgtagtggcgatggtttgtgaacactccctatgtagtgctgaatgatcatggtgttttcttcttc

SEQ ID NO: 436831 - DNA, 391 bp, Triticum aestivum
  unsure (1)..(391): unsure at all n locations
agggtatctcgactactacttctggctgtgggcggggatcggcgcggtgaactttgttgtgtacacggcattcgccaagaattacacggtgaagaaagtcgagctccggtgaacacggtttgctgtcggtcacaggcgtacgtttttcatcctctttgttgtgtatgtaccgtctacaaaaccagttcgatgtaattaaatatcgcccaaaattcctgtagctgtgttcatttgaataaatataaaaggtgcctttggaacagaaatgaaactaagctcgctccctaaaaataaaaaaaaaaaatacaatagaacgtaacatgcaaaaaaaaaactgcacacactaacaaaaaaggggccgccctaaaggttccaaccttnnnnnnnnnnn

SEQ ID NO: 436832 - DNA, 450 bp, Triticum aestivum
cgtcatgttctcccagtcagtctcatcggcttgtgatcctggcatggttagcagcaatagaaacacacaagaatatgatcctacagactactaccaagaggtggtggtgggtgtcacaaatccgtcaagcaaatctcaaattcttaccagttcttacccagcagcaggcggtgatcggcaatcgttgtagtcaaaaactctcaaagcttggatagagcgattaccagggagagtcaaccgcacgacgtagatgtatgtggagctgggaaggcttataatatggtagcaaaaatggtcagcaataatcaattcagagatgcaaagttgaataaacgctcaacgacggtactgtgctggtcctaggctagaccgtgctagagacgcgagcctagagcactaacaaaatcacggcgcggcacgttaacaagagaaaagctcactttgcccgtc

SEQ ID NO: 436833 - DNA, 307 bp, Triticum aestivum
ggggggcaagggcgccgtgcagaagggttccaagggcccaaagattggcggtggcggcgggaagcgttgaaagtcgattacgccatagacatagaattgtgctgcctagccttgtttcctatcctactatcatagacctttgtcaagttattaccccgccatcttgaatttgcaccttatctgtgaggctgaatggtgttaacgttttggattgtctcgatgagtttatttataatgaatggttcttatgttggctcttatcaagacaaacaccagggacgcgccctctacggattcggaggctagg

SEQ ID NO: 436834 - DNA, 441 bp, Triticum aestivum
  unsure (1)..(441): unsure at all n locations
attccgtggtcgacgggggggcaagggcgccgtgcagaagggttccaagggcccaaagattggcggtggcggcgggaagcgttgaaagtctgaaagtcgattacgccatagacatagagttgtgctgcctagccttgtttcctatcctactatcatagacctttgtcaagttattaccccgccctcttgaatttgcaccttatctgtgaggctgaatggtgttaacgttttggattgtctcgatgagtttatttataatgaatggtacttatgttggttctaaacacaaaaagaaatagacgactgagtaatataaagtccacgcgacatcgcataaattccatatatacattatagaacaatgatggctactttatgtctatacaagtttatgcatgtcccatgcaatcnnnnnnnnnnnnnnnnnnnnnnnnnnnnnnn

SEQ ID NO: 436835 - DNA, 687 bp, Triticum aestivum
cccggtgttgaaactctgagctcttcggccctgcagccgtggccgatgtgtggcgtgctcgtcggatttttaatctgagctgaccagcgacgaggtgctgcatggctggtgcaagttggcaagcattcctgctggttggaattgctacgggggactctgaacatgttttttttttgggtgagggggactctgaacatgttaggacgcgatcatgcggctctaatcagattgtggtgtttgaaatcaacgactggccaggcaaatgatcttttttttttgagcatcagtacagacacaagcgctcatatacacgcgcatacactcacccctatgaacgcacacacgaacaccatatccctatgagcacctccgagagactgagccggcatatcatcttggaaattctgaaataaacccaggaataatgcaagcaccaggatttgaaccctggtgggttggggataccactattcacctaaccaactcaaccacaagttgatttgcagtgtcacgtggatctgaccaacgtgttgacatgtcagagattagattaattctgcctaaattggtcataagtgtttattgagaaaattagcaaagaaaattgtgggtttttgggacgcccaaagaatgtggtggcaattccagaactgaacttcaaatgtggtggttttttgcaattcagtg

SEQ ID NO: 436836 - DNA, 455 bp, Triticum aestivum
cccgggtcgacgaggtagcttaagatgctgccaggtccaaggacaaggctgcacaaacctcggcgactgtacatgttccgcgccactctcaggaggcgcaagaccaacagcgtcacggcgcttgcagtgccatacgcatgatagcccaagaccaagctggtggatctcgggccgctcaagaccagcatgcacgccagcgtgctggcacgagcggggcacggtcgcctggacgggatactgctccttctaacatagttagaagtccgagcacgtcccgctcctcgcgccgtccgccactgccacccgccactccagcagaagctttggcgcgagctcaactgctcctagattaccctccgacgccggacaagatcgacgaatggagggccaccattcagagtctcatcggctacgccaacggcgacactccacggtgaacgaattcgtccccgccg

SEQ ID NO: 436837 - DNA, 870 bp, Triticum aestivum
gggtcgacgggacgcgcaagaggacatacgacaaggtggtgctcgattactttcctgggaacaccggggatatctgacggttgccatgcaaacacgtcgacattcgcccgcaggaaagcaacgagcgcgctttcctatttggggtcaagagtggcgctgatggtgaaggtaccaccagtgccatcctccttggcggacaccttcttggtctcaggtggagctgccattgccttcttacacttgccggtggagctcgatggtgcgtcctcgacggtagcgcagcactccgaagaggtgcgcttgccggagtgggcatcagagctcttgccggacttggtcttcttcttccccccgggagcttcagcggcaagtgtcttgcgatctgctgcggctgctgcttcccggtagatcttgtcggcacagataagagcatccttcttgtcgccagggacagagatgacacttattgggcctggcattttcagtatgttgtacgcatagtgagaggctgccatgaacttggcgagtgctggacggccgaggatcccattgtaaggcaatggaaagtcggcaacgtcaaaagtgaccctctcagtcctgaagttcagctcactgccaaatgttaccggcaacgtgatctttcccttcggcttgctccttcccgggttgattccttgaaatgtgccggtctcttcgagctcgctgtcagggatctggagtttctggagcaccgcggaggagatcaggttcaagccggccccgccgtcaactagcatcttagtgaccttgaggttgcggattgttggtgaaaccaacatcggcaagcacccgaccgcagttgtgcgatcagggtggtcctcaatatcgaag

SEQ ID NO: 436838 - DNA, 422 bp, Triticum aestivum
cacttcaatgttttttaaacttatttgaactccggacttcttttgtgttcagtatgcagcattctaagcgacgtcaccaatttccaacatgttctgacatcatttgttgttttttcagtcatttacctaattgtttagagagctaaatgaccgtgaaattgaaaatcactacaaaatgaactgtgaaaatgttgaaacctggcatggtatcatcatttcacccgcatagcatgtgcgaaagagtagagagggtcacggcaaaaactggacgcacttcgtgtacaaactggacaatctctttcggagtatcagggtttcggaccagaactcatctgttacacgggcacttcaatgttttttaaacttatttgaactccggacttcttttgtgttcagtatgcagcattcaaagcgacgtcatc

SEQ ID NO: 436839 - DNA, 196 bp, Triticum aestivum
tcactacaaaatgactactgagaatgttgagacttggcatggtatcatcatttcacccgcatagcatgtgcgaaagagtagagagggtcacggcaaaaattggacgcacttcgtgtacaaactggaaatagaagaaaagaaataatgcacaacagaaaaaaaactatacagagaattactaaaaaataattagaag

SEQ ID NO: 436840 - DNA, 461 bp, Triticum aestivum
cggtcgagaaatccgggtcgacggggatgaatgaatccattgtgagaagagcccttgtgatcatgcaccagagggacgaagtggagtacaagagggagcgccatgtgattgtccgcaaggcttgagctgaactgaaccgatggaactaccatggaaccctctggccatctgatgtgtgtgtataagtagtgctgacactgcagcctgtttcctgaggaaatttgttgcgtcgttgaaattgagttgtagttgtactactttaagctgtagctgtagccctaaattatcttgtgtcgaactgaagatgtaccacagtaagttcattcatgaatgcaacatttgggcgttctgcagctgagcagagttaatgcctaggaaactgaaaaaaaaaaacgggaaaaacaaaaaatgcatgtatggtaaacgttgtgtgacacatttgaagcatggaatgttctttg

SEQ ID NO: 436841 - DNA, 579 bp, Triticum aestivum
cggtcaaggactccgggtcgacgggtctgtcaaattcagagccgtatgtatttcgcaaatattctatgtccacaatgctctgcacggagctactctagctaattgctcccactttcaatatgtatccagattgagacttagagtcatctggattggtgtaaaagcttgcatcgttgtaacttttacgacgggctcttttatcacctccataatcgagaaacatctccttagtcctcactaaggatattcttgacccatgtccagtgatctacttattagatcaaaattgtattcctttgccaaacacagagcaaggtatacaataggtctggttcacagcatagcatactttatagaacctatgactgaggcatagggaatgacttttcattctctttctattttctgccatggtcgggtcttgagtcttactcaacttcacaccttgcaacacaaagaagaactccttctttgactgttccattttgaattacttcaaaatcttatcaaggtatgtactcattgaaaaaatcttatcaagcgtcttgatctatctcaaatagatttgatgctcaatat

SEQ ID NO: 436842 - DNA, 1558 bp, Triticum aestivum
gggcccggacatcgtgatagtcgaccccttctacatgcgtgccaagatcttgggcagcgctggggaccggcaagtcgcgagttcttacctcgaaggcgtcattctggcaaaccaagataaggataacttcctcgtgccttactttcccgagtaagtcctcccctcaaccgccccgtaacatatgaattcttagatttcgatcgtttttcttttaacattccgtgttttctgcagtgacacacattgcacgctcatcctcctaagccccaaatattccatggccacgtatttcgacccggaccgtcagtcgaacgtagactacacaaatgtcaagaaggttcttgatgatgttctccccggctacgccaaatctggaggcaccttcaccaggcctattcgtaagtacggcaagcacgtgttctcccacaatacgacgttctgctgcgtcaagcagccgcctggcggtcagaagggtgcctactacgccatccatcacatgcgggcgatcgtacgggaccatcatcaacttctgctaccgagtaaactcaaagattgggccgcgagcgtgtcggcaatccaggacgcggacatcagacaagaattctttcgcatccagtcggagtttgcggaaatcatccatcaagatgtccttcgtacctcggggcagttctacctcagaaatcaaccgtccaacagtgacatcgacacaatgctacaaatgcaggctgacaacgcccgttatttcatgactcccacgatagacggcggcttcatccacgctccggtcccttgagtcgagtcgaaagcagtgatgctgtgtctagttctgaaacatcgattggctcatgttgtaattaaactttaatgaacttgtagtatgtctctttggtttcgagagtcgttcaacttagatgtaatcgatgctattaatgtcttgcttttctcttccgatcgttctgttgcatacttatatattgcttatgtattgtctgtgaattggtactaacgtttcgtttggctagtgcatagcgatgccgacgtatgtcgtgtacaagggtaaggttcccggagtctacgatgactgggaggagtgtcggagacaggttcaccgattcagcggtaacagttacaaagggtacaccactagggccgaggccgaatctagatacgcccgctatctagcgggagaggggagggagcgttggaggaaccggatgaagacgagtttcatcgtgatgatgatgctcatcgtgatgaccgcagctctcttctatgtgatggtagtttagatgatcgatatcgacttgtaatgtgaagacaaactcgctactcgcggtctcgagacttgtaatataatgttctatctttgttcggtcttttcaattcggagactaatatgatgaattgtattcggagactaatatgatgaattgtattcaaagactaatcttctagtgtattcgatgaatctattgttgatgtgtgttgtctatattttgtcaaattagacattttgtaacctgtgcaaaaaaaaattgccaaccgcctaacaaaagaa

SEQ ID NO: 436843 - DNA, 629 bp, Triticum aestivum
gggtcgagcggtctctttggtttatgagagtcgttcaacttagatgtaatcgatgctattattgtcttgcttttctcttccgatcgttctgttgcattcttatatattgcttatgtattgtctgtgaattggtactaacgtttcgtttggctactgcatagcgatgccgtcgtatgtcgtgtacaagggtaaggttcccggagtctacgacgactgggaggagtgtcggagacaggttcaccgattcagcggtaacagttacaaagggtacgccactagggccgaggccgaatctagatacgcccgctatctagcgggagaggggagggagcgttggaggaaccggatgaagacgagtttcatcgtgatgactgtgatgaccgcagctctcttctatgtgatggtactttagatgatcgatatcgacttgtaatgtgaagacaaactcgcggtctcgagacttgtaatataatgttctatcattgttcggtcttttcaattcggagactaatatgatgacttgtattcgaagactaaaatcatgaattgtactcacagactaatcatctactgtactccatgaatccattgtttaagtgtgctgtccatattttgtccaatatacattt

SEQ ID NO: 436844 - DNA, 429 bp, Triticum aestivum
cgacggggagtaaactccaagattgggccgcgagcgtgtcggcaatccaggacgcggacctccggcagcaattctttcgcatccaggcggagtttgcggaaatcatccatcaggatgtccttcggacctcggggcagttctacctcagaaatcagccgtccaacagtgacatcgacacaatgctacaaatgcaggatgacaacgcccgttctttcatgactcccacgatacacggcggcttcatccacgcgtccggtcccttgagtcgagttgtctagttctgaaacatcgattggctcatgttgtaattaaactttagtgaacttgtactatgtctctttggttttgagagtcgttcaacttagatgtaatcgatgctatcaaagtcttgcttttctcttccgattgttctgttgcataagtatatat

SEQ ID NO: 436845 - DNA, 392 bp, Triticum aestivum
cggggccatctaaccatggaagaccttccagagcctgcgagcaatcgggcttgggtcgccttcagccttcggaacatccatactcctccacctcgtcctcacttatcctactcaaccgggatggatgccttcccctctgctgtcgatccatataaagaacatccacaggggcaagcacgggagcgattctgagacgtatgacacagaagggaggtttgaaccagcgaaattcgatgctatattcagcaagtttggcaaaactcggccaaatgctttgtcagaagatgagattaacgccatgcttaaatacaaccgcaatatgtatgatttcctgcgctgggccgcggccaacctccaatggaagttgctgcacaaggtgggcaaagataacg

SEQ ID NO: 436846 - DNA, 454 bp, Triticum aestivum
attccaggtcgacgggtacacgtaagcctttaggtttatgtaatgcacctgctacctttcaaagatgcatgacggctatattctctgacttttgtgaaaagattggtgaggttttcatggatgacttttccgtctatgggtcgtcttttgatgattgcctgagcaatcttgatcgagttttgcagagatgtgaagaaactaatcttgtcttgaattgggaaaagtgccactctatggttaatgaaggtattgtcttggggcataaagtttctgaaagaggtattgaagttgataaagccaaggttgatgctattgaaaagatgccatgtcccaaggacatcaaaggtataagaagtttccttggtcacgccggattttataggaggttcattaaagacttctcgaaaatttctcgggctctggacaatttattacaaaaagatatacaatttgt

SEQ ID NO: 436847 - DNA, 643 bp, Triticum aestivum
  unsure (1)..(643): unsure at all n locations
tcggattccgggtcggccccctanggtttctagaatattgcggtatttatagagcaaagaggcggtccggggggcaccaagtgggcacaacccaccaaggcgcgcatgggcctcctagcgcaccctggtgggttgtgctcccctcggaggaccccgcgacgcgtcatcgtgacccattgggtgtcttctgctccaaacaaatcgcggtacagtttcgttgtacttggacgctgtctggtagtgatttcctgcgatgtaaaaaacatgcagaaagcagcaaccggcacttggcactatgccaataggttagtaccaaataatgatataaaatggctataaatgattgtaaaacatgcaaggttgataatataacagcatggaacaatcaaagattatagatacgttggagacgtatcagcatccccaagcttaactcctactcgtcctcgagtaggtaagtgataaaaacagaattttttatgtggaatgctgcgtaacatgtcatattatatttgttttctttatagcatggacatttggacttttacttgttcaaagcaatagtctagttttgagatgataatttagatactcaagtatatcaacaagcaaccatgtctttcanaatatcaatgctaaaata

SEQ ID NO: 436848 - DNA, 741 bp, Triticum aestivum
attccaggtcgatgtccggacgcaaaagccttagcagctttcaggcataacgtccgagacgaatggctcgccagacacctcggccaagaaaagccaagaacaatggccgcactaacaagcctcatgacccgcttttgcgcaggagaggacagctggttggcaagatgcagcaccagcgacccaagtacatccgaaactagggatggaaacggaaaaccgcgacgcaacaaggaccgtcgccggactaaggaaaaaagtccgaagagcacggcagtcaacgccggattcaaaagctcacgacagaatcagaaaaaaccgccccccccaggataacagggacgagctatccaacctaaacaaaatcctggacaggatatgtcaaatacacagtactcccgggaagcctgctaaccatacccacagagattgttgggttttcaaacaatccggcatactcaatgccgaacacaaggggctcgacacactaagagaaggcgaggacgaaccccaaaagcagagcaccaggaaacaaaagaacttcccacaagaagtaaaaacagtgaacttacttcacataacaaaacgtgcggcgcccataaaggtatgcaacacacggtctatccccaaagggtcccgccactggttgtcaaaaccaatcatcttcgatcagctagattattctagaaatatcaagaatgcaggctggactgccttgatacttgatccaataattggcggact

SEQ ID NO: 436849 - DNA, 453 bp, Triticum aestivum
aaagcctcaccgaaaactcaattggaagttgggaggaacttgaggatgctttcagggcaaattttcaagggacctatgtccgacctccggatgcagacgatttaagtcacataatccaacaacccggagagtcagcccgtaagctttggaacagatttctcactaagaagaatcaaatcgtcgattgcccggatgccgaggccttagcggctttcaagcatagtatccgagacgaatggctcgccggacacctcggccaagaaaagccaaggacaatggcggccctaacaagccttatgacccgcttttgcacgggagaggacagctggttggcccatagagtcaccagtgacccggcacatccggaatttgggatggcaatagaaagccgtgatgccgtaaaaacaagcatcaaaacaatgaagacagtccatgataatgacccgtggaccc

SEQ ID NO: 436850 - DNA, 884 bp, Triticum aestivum
ggacaccaacccacagacaagaccgccagtcgtgccagcgccaagccatggcaagaacgccgcaacgctactggacatgccggacatccctatggcacaggatccggacatgcatatggcacaggatccggacgatgacgacaacgacgacggtacatttaccaatgtcgataagtactttgccgaacatggatacggtgacgagttctgcgggcctccttctcaagaacccaaccctgaaaaagacgaccgcgatctagctggtaccgcggagaaacccaattgcaacaggcgtcgtctggcgttccgttctcaggagacgcctccagctgccgccttcaccgagcctcagatagccgaggtgcgaaatattatcagccccaacacactcaagagggtggtctctgagcagaactcgatcccattacatcagaagaagaagggatggaaaagaaagactaagaagggtgcgagccagccggcaccgagtacgatccgtgctcaggacgggccaccttcaccgcaggatatctcgaggagggtgcatgtggcgggtagggcgatgctaccaccaaatatgctcaatgctgcaaccggtgctatgcggagtctgcacgacagtgttctttctttggagaagcggcgtctcagagagaaggatgtggcatacccggttttcgtggccaaggtgccagagggcaagggctttgtggatggcgacatcgggggtacgatcgtcctgcggtttgatgacatctttgctatgtttaaccttcatccgctgcactacaccttcgttcggctattttcgctgagtatggagatgcggatcattcgcgacaagaccccggacatcgtgatagtcggcccgggatttcttgacc

SEQ ID NO: 436851 - DNA, 610 bp, Triticum aestivum
gggtccacgcggattcggaagatgaatgggacgaggacgaggacgaagactccgacgaggagggggacgacgaaggccaagattccgatgacgacgacgaacacgaggactctgatgaggaggaggacaatgacgaggacgatgaatacgaggacgaggacgacgacgacgacgagtatgacgggatggaaatggagcctgcggcgttcgcatctgggtgaggatgaaatgaagatgcaagtagctgaagggtctgttttgcactgatgctcaagtgtatgtatgtaagggatggcaatcggtaatcatatgttgcggatgcagaacattggctacggcatgactaaatatttgcctcagggtgacctctgaagcttctgttgctgattctctgttcccactatgtactatggtgaaaattgtattgttctgctcatctgagccctgtatctgctatttgaggaggaaactttgcgtgccacgattctatctttcgtcgaaaacttagaaatcatatgtaaaactttgagtgtatcatcagtgaatggattttcggttcggcttttaagaacctcactcagtgggagcaaatggccatctagttttgtag

SEQ ID NO: 436852 - DNA, 408 bp, Triticum aestivum
aaaacaatcgactctcctgtcaaaacttactcgtcagctcagcgtccatgataacagagctgcagctgcatcatattctgatgatacttctggtccggagagtggcccacagagccctggccagtccggtgaggactggaggtctgccttcagtgctgcagcaaatggctctgccgcccgatccagttcacagaacgagtcgagatcgagaagtgctgacagtcgtggtcggcggtatgaaaatggggatgccaacggtgccaattcaggcagccgacgcacacccaaccggttgccacctgcaccgccgaaatactaagcatgttgattggcatatgtgagaatcatatttttcatggcatgctctcactccctcctgatactgattgggaaacaaattggcatgac

SEQ ID NO: 436853 - DNA, 1454 bp, Triticum aestivum
taaattgactcctattataaagggaataataaatatggcagagagaaagtttcagaacctaaagtctcatgactgccacatgattatgatgcaactgcttccggttgcattgagggggcttctaccggaaaacgtccgattagccattgtgaagctatgtgcattcctcaatgcaatctctcagaaggtgatcgatccagaaatcataccaaggctaaggagtgatgtggtgcaatgtcttgtcagtttcgagctggtgttcccaccatccttcttcaatatcatgacgcacgtcctagttcatctagttgacgagattgtcattctgggccccgtatttctacacaatatgttcccctttgagaggttcatgggagtcctaaagaaatatgtccgtaaccgcgctaggccagaaggaagcatctccatgggccatcaaacagaggatgtcatcgggttttgtgttgacttcattcctggccttaagaagataggtctccctaaatcgcggtatgaggggagactgactggaaaaggcacgcttggaagggactcaataatatgcagggacggatattcttggtctcaagcacactacacagttctacagaactctaccttggtgaccccgtatgtcgatgaacacaagaacagtctgcgctccaaacacccggagcagtgcgacgactggattacatgtgaacacatcaggactttcagcagttggttggaaacacgtctcagaggtgacaacactgtttgtgatgagttgtacttgttgtccaggggaccatcttcgactgtaatgatttggaaaggatacgagataaatgggaatacattttacacgatcgcccaagatcaaaagagcaccaaccaaaacagcggtgtccgctttgatgcagcaaccgagaagggaaaggacacatattatggttacatagtggacatatgggaacttgactacggagtagattttaaggtccctttgtttaagtgcaaatgggtcaatctgtcacgaggcggggtacaggtagacccacagtacggaatgacaacagtggatctcaacaatcttgcgtacgctgacgaaccgttcgtcctacccaatgatgtggcacaggttatctatgtgaaggacatgtctaccaaaccgagaaaaagaaaagataaggaagcgaatacatcatacgatgagccaaagcgccacatagttctttcaggaaaaagggacatcctgggagtggagggcaagacagacatgtctgaagattatgaaaagtttcatgaaattcctcccttcaatgtcaaggctgacccaagcatcctgataaacaatgaagattatccatggttacggcgcaataagcaaatgacacaagcgaagaaaaagtgaagactttctcccgcaactattatgatgataccatgccaactttgtaacagatgatctt

SEQ ID NO: 436854 - DNA, 451 bp, Triticum aestivum
ctgcagttcggtcgacaatccgggtcgacgggctgggacgaaaaggcacgctaggagggcatcaaataatatgtatggacgggcattctctcactgaagcacactacacagttctacagaattccgccttggtggctccgtatatggacgaacacaagaattttctacagtccaaacacccggagaattctgacgactagattacacgtgaacaaacgaggacttttgccggttggttgcagaaacatgccctgaatgatggtgatattcaaaatgacctatactcgctgtcccagttaccatcttcgaatataatgactttcaaagggtaccagataaatgggaatacattttacacgatcgcccaagataagaagagcaccaaccaaaacagtggtgtctgcttcgatgcaacaaccaacacgggaaaggaagcataataggggtacat

SEQ ID NO: 436855 - DNA, 456 bp, Triticum aestivum
agtactatggggcagtgaggcctgcacggcagcacagccggccacggggaggagggagcaggcagtcccgccggcgcttgtttgagcggctggagcaggaagagcagagattgaagaagcacgacggccgttggatggccatccaacagtcactgcttgtgcgtcaaccttttttttaggaaagcctcaaatctgtggaaaacagcatacaacccatctgccattatttctaataatttacagcccatttgctaattattaaggtttttttggagcccatattctttttgttagcattacagcccatattgtggccacggttaaaaaattatacgaaattttgcatatttcggtgcagtccgaactgtttttaatcccgaaatttcgactcacattcaaacttgattttaaaaataaatgtatatcaatataaaatccaacaaattctccacgcat

SEQ ID NO: 436856 - DNA, 437 bp, Triticum aestivum
tcccgggccgacgggagctcggaggccgggagctacgagtacgacgaggatgccgaggaggactacgaggaggagctcgagaaccacctccgcgtccaccaccacgagcacccaggcggtggcgaggttgatggggacgatgatctcgaggctgatggcgagggcgagggtgagggtgagggcgaggatgaaggcgaggatgacggttctgaagagagcgagtacgacgaggaggggtttgatgaggacgaggaggtggaggatgtggatctagacccggcagagtacgaggacgacgaggcttatgcacgggcgcttcaggacgctgaggagcgtgaggttgccgcgcggcttatggctctcgctgggatcagcgattggcgggccgtggagcatgttgaggatcacatacacgacgcccaggattcatggcaaga

SEQ ID NO: 436857 - DNA, 429 bp, Triticum aestivum
  unsure (1)..(429): unsure at all n locations
actcacgggtcgacggcaggttcaagggagagaagcgacggagttagaagttgtaaatatgcattgttgtatcgcgacctgaatgaaataaacgaaataatgctcttgttcaatcgtcaaaaaaaaaaaaaaaaaaaaaaaaaaaaaaagaggacgcacaagatgaaaaaaaaaaaaaaaaaaaaaaaaaaaaaaaaaaaaaaaaaaaaaaaaaaaaaaaaaaaccccccccccgcggccgcccaaaaggttcaaacctaatttacccttgaaggcaacttcaaaccccttcaaaagtgtaccaaaatttaatttcatgggccttcgtttaaaaacttcttaacgggaaaaacccgggcttaaccaaactaaacccccttgaaaaaaatccccctttnnnnnnnnnnnnnnnnnnnnnnnnnnnnnnnn

SEQ ID NO: 436858 - DNA, 423 bp, Triticum aestivum
  unsure (1)..(423): unsure at all n locations
ttcccgagtccacgggaggttcacgggagagaagcgacggagttagaagttgtaaatatgcattgttgtatcgcgacctgaatgaaataaacgaaataatgctcttgttcaatcgtcagcctccggttcaagtactgcaccaagctgttattttttacctttttgaaaagaagcacgtgttgctgtgtttattttatatttttatctaaggatccagacatctacaaacacacccagtgaaccaccaaatggtcatatacccctaaaacccctttgcggggcaagggccaaaataattaattcaaccaattaataagggcctccttcaaggttnnnnnnnnnnnnnnnnnnnnnnnnnnnnnnnnnnnnnnnnnnnnnnnnnnnnnnnnnnnnnnnnnnnnnnnnnnnnnnnnnnnnnnnnnn

SEQ ID NO: 436859 - DNA, 371 bp, Triticum aestivum
cggctacctcatgaacactgcgttggatttgcccgaacaggagaggatgatgcagtaaagtagcgtaagtattttccttagtttttgagaaccaaggtatcaatccagtaggagaccacgcacaagtccctcgtacccacacaacaacgatagcaactcgcaaccaacgcttaggggttgtcaatcccttcacggtcactcacgagagtgagatctgatagagataatatttttggtatttttgatagatagatgcaaagtaaaaataaaggtaaagtaaaaacaaagcaagtaaataaagtgatatagattgatatgatgagaatagacccgggggccataggtttcactagtggcttctctcgagagca

SEQ ID NO: 436860 - DNA, 431 bp, Triticum aestivum
gggtccacgcggtcacatatatcgtgagtctctgctcatgaccgcactaccaacacactaacggtttggatatttgatccgaggggcctctggcctgatagcactaaccatcacgtgggcatagtatgggcgttctgcgtcgtatgcatcagccgaagcttaatagacgtcaggcgactgagcggcgcgcgccgggttggactggtaagcacctgcctttttgaaggaggtagctaggtctgctcaccggccgcccacgcaacgtgcaggtgttcccggggcgatggcccatgacccctgggggcataggtttagtccggcgtgcttgacctctctattaagcctaggtcgggttgcggcgtattgtttggacgaggccgggcatgacccaggaaagtgtgtccgaccggagttaatcgagcgtggtgggt

SEQ ID NO: 436861 - DNA, 717 bp, Triticum aestivum
ctagtagcgtgggttaaaaaaaactcgctatcggtaaacttctatctataagcattttccaagtagtgtaggatcataggaaaattcaacaatatagctatcacataacatattctcaacacgatccacatgcatgcgaagttgacactcttccaaaacagtgggattatcattaactaaagtcatgacctctccaaacccacttttatcaacaataccataagattgaacattctccaaatatgtgggatctaaagttgacactcttccaaacccactttcaatattgttgaaaacactattatcaatctcatattcatcatggggcttaaataaattttcaagatcataagaagaatcaccccaatcatgatcattgcaacaagtagtagacatagcaaaactagcatccccaagcttagggttttgcatatcattagcacaattgacattaatagaatttacaataacttcatcgcaatcatgctttcgattcaaggaactatcaagtatgggtgcaatggcaacaatctcatgtttaacatcagaaactatagcaaattcatctccataaatattggtatcatggccataagaatagcaagcatcatgttcatcaagggatatttcaatcaaatcatcggaatcataattatctatagattcatgcatatcattattttcttccaaagcaactatcattccccgtcgacccgg

SEQ ID NO: 436862 - DNA, 346 bp, Triticum aestivum
gagttgaaacacaccgcagatggaacgcaatggagaaagatcgacagagggttcaaagattttgcagctgacgcaaggaacataagatttgctctaagtacggatggcatgaatccttttggcgagcagagctccagccatagcacctggcccgtgactctatgcatctacaaccttcctccttggttgcgcatgaaccggaagttcattatgatgcaattgctcatccaaggtccgaagcaacccggcaccaacatcaatgtgtacctaaggccataatttgataaacttttacaccggtggggcaaacttgtggtcgttttttggaatgaccacaataagaagg

SEQ ID NO: 436863 - DNA, 485 bp, Triticum aestivum
gagagcagcaacagcagctgggcgagcgagcgatggagcgagagccggagcagcagcagcagcgcgagcgagggagcgagagccggagcagcagcagcagatccggctggtacggccgccgccgccgaaggggcctcgcactaggggagagccgccgtggagatgtcgcccgcggcgctggcttcaaggtagccgctccatgggggtgcaggatggagcaccgtcggcgccgggaggtcaagttaaggagaaggtgcgatgcgatgagtgtacaacctctttggtggcgccgagtaggcctcggcttcgtccgaggagtcggtgaggatgttgcggttccggtggagcaggttaaggcggcgctgtggggatggagcagccgcgatagacgaggcgatcgtcggagcagctccttggacgtggaggacggggctgctgaaccggtgggatggcgagatggacgacggatcctcatccggggaggt

SEQ ID NO: 436864 - DNA, 651 bp, Triticum aestivum
gggtccagccactagatcaaacataaggcagcgctgtcaatgtaaatgcgggccattcctttctcccaaggacatcgtctgtgaagaagaacacctcagatgttgatgaatcttacgcagaatttctgagcctcatgaagatcaaggatggtttcatggttcttgagctggaaccaggtgttactgtggtatatgagcaagaggaggagacaccccctggatatgatgaattgagaactgtggttatgtctgcgcctggaattgacgggcctgctccagacaatttgcatggtcaggatttaatctgcacagatgagcatggacttgtaccttgtactgaatcttctgattttaacgcatctgaagaatgtgaagaagcacctattgctcttagttgtggtgctccttctacatttgatgaaaaacttgattctgttttaagtcagccatatgaccaaaatgaatacaaacagcttatgagaaaagccactgaccagaagcctgtgagcagacaaagacaattgcgaagtggatccatgcgctatgccacatggattcgttggtctgtcgtatcctgatcactacccagatctggccaagcaaatcgacactgctgacactaatgagagacgactgaacctcctgcgaaaa

SEQ ID NO: 436865 - DNA, 478 bp, Triticum aestivum
  unsure (1)..(478): unsure at all n locations
aaatantattatcgaggagggggtatatcgaccccccctcgtgttgaagttacccccctcgtgttgaagttattgggagggggtaatatcgacaacgacaacatacatacacgggaaaataatgttaccggggagggggtatatcgaccccccccccacgtgttgaagttatcacgagggggttatatcgacaacgacgacatatatacacgggaaaataatgttatcggggagggggtatatcgaccccccccctcgtgttgaagttatcccccctcgtgttgaagttatcgggacgggtatatatcgacgaccacagacccgataaaacataagaaaacgaagaagaaatataaagaggagagaagaagaaaggaatagaggagaggattgaagaaaaaagaagaaaaaaaagaagaagaaaaaagaggagaagaagaaaggaatagaggagaagaagaaaaaatagaatattttc

SEQ ID NO: 436866 - DNA, 407 bp, Triticum aestivum
gggggtgcctacaagcctcatcatgcatggtcttcgaagaagggtcatcctcacggccaggtgtatgggtataggaactccctctgggcagaacaccttggtatggttgatgaccacttcaaggaaccttctagcctggactgtgtaagattagtgaaccaaatagccgaagaaaactgggaaagattcgcgtcagaagagatgaaaacgttgcaagggcacctcctcagatacccagtgaaggtagagcccgatggtaagatcgtcccgctgcccgaccaagaatgcttccccgacgttggcggcaagatctgcggcgctccgacctcgcttcctgattcgctgacgatgtagcgtcacagtactgacttctcttcagggtccaagctggttcttttgctcacctg

SEQ ID NO: 436867 - DNA, 491 bp, Triticum aestivum
cgggatagaccaaaacgaagtcattggtgtaggcattgaagatgaagttcatcatgtgagagaaagtcggaggagcgttgacgaggccaaaagacatgacagtgtattcgtatgaaccatagcttgtcctgaaagccgtcttgggaatatcttgctcacggattcgaatctgatgataacccatacggagatcaagcttggagaatacttgggcacctttgagttgttcgaacagctcattgatgttgggaagtgggtacttgttcttgatagtcttcttgttcaatggacggtagtcaacacaaagtcggtccgttccatccttcttcttcacaaaaagaactccacaaccccacggagaagaactaggtcggatgagacccattctctcttgaatatcgagttgcttcttcaactccttcaactctttaggtccaagtttgtaaggacgtttgcaaacaagtttcgtgccaggctcaatatcgatgaaa

SEQ ID NO: 436868 - DNA, 724 bp, Triticum aestivum
gtccgacattcacgggtcgaccgcgacggaaccctcacctacggcggctactccagcatggtggtggtgcacgagcgcttcgtggtccggttcccggacgccatgccgctggacaagggcgcgcccctgctgtgcgccggcatcaccgtgtacacccccatgaagtaccacgggctgaacgctcccgggatgcacctcggcgtgctgggcctgggcgggctcggtcacgtcgccgtcaagttcggcaaggccttcgggatgaaggtgacggtgatcagctcatcgccggggaagaagcaggaggccctcgagaggctaggcgccgacggcttcgttgtcagcaagaacgccgacgagatgaaggctgcgatgagcaccatggatggcatcataaacacggtgtctgcaaacatccccatggcccctctcttcgggctactcaagcccaacggcaagatggtcatggtcggcctcccagagaagcctatcgaggtccctccctttgctctggttgccaagaacaagaccctggccgggagcttcatcggcggcatgagggacacccaggagatgctggacctcgcggcgaagcatggtgtgacggcagacatcgaggtgatcggcgccgagtacgtgaacacggccatggagcgccttgccaaggccgacgtcaggtatcggttcgtcatcgacatcggtaacacccttgacaaagccgccgccg

SEQ ID NO: 436869 - DNA, 402 bp, Triticum aestivum
gagagagtgtgggccgagagcgaccgtacgtatgtagcaagtggcggggggcgacgggagggcaggaggaagaagaaggcgagatcggctgtgcaattatttggcggcttgtctttagtttcctttgcgattctttcccttgtttaagtttaccctggtgtgtgtgtgtgtgtccttgcgagactatttcggctctctgtctggtctctgcgacttggtagcttctcatgggctccatggtgttggatgatgtggagggaggagggttcgtgttagctaagttagtccactccctctgttcgtgttttgtaagttaattagtagtatgtgtgctactagtatatggaactttaaatcggttcaccggcgaattatgtgctacaaaaaaaaaagagagagaag

SEQ ID NO: 436870 - DNA, 656 bp, Triticum aestivum
ggaggaaagaagcacccaagccccagtcagttctaagaccgagagaggcgagaggaagccagggggctctgctgcgaagggagatggccgggaagggaggcaaggggctgctcgcggcgaagacgacggcggccgagggcgccgccgacaaggacaaggacaagaggaaggcgcctgtgtcccgctcctcccgcgccgggattcagttcccggtgggacgtatacacaggcagctcaagcagagggtctcggctaatggccgtgtgggtgccactgctgctgtgtactctgcagcaatccttgagtaccttactgccgaggtccttgagctggccggcaacgctagcaaggatctcaaggtgaagcgtatcacccctcgccacctgcagcttgcgatccgtggagatgaggagctggacaccctcatcaagggcaccatcgctggtggtggtgtcatccctcacatccacaagtcactcatcaacaagacctccaaggagtgaatgaaatgcaataacgggtagttgttgtgtgttgtatcttcgtgatcccttgttatgttgtgctatctgttacgtgttgctattatcacaacctgaataggttgtctgaatttgtgatggggctagctttcggtaacttgttattacgtaaag

SEQ ID NO: 436871 - DNA, 416 bp, Triticum aestivum
tcccgggtgcacggggacttctgatcggtcccatgataatatgcagtctccattaccaatagctcgctcgctcggtccgcgcgtctggttgcttgttagtcctagtagtagtaccggtgatacatgtttgctgggtgctccacaatgtttttacttactgttatttcgctgtctcttattggtgatgtactgatgtactgtaatgaatcatggtattgcttctgaataaaacaccaatataaaaagtcaaaaataaatgatgatggaatcacaaatcaaaaaaaaaaaatcactctacaacaaaacatcaaaagagtgcagtattttgttttaacaggtaaaatgtatgcgtgtaatatgctgcctcataatatgttatgtcgttactatcccttacttgttgctattaccacctc

SEQ ID NO: 436872 - DNA, 666 bp, Triticum aestivum
gggtttggcaacctgctgctggagctgatcaccggccagacagcgctggagttcggaaaggcatcaaatcagaagggagccatgctggattgggtgaagaagatgcaccatgagaagaaacttgatgtactggttgacaagggtctgcggagcagctacgaccggatcgagctcgaggacatggtgcaggtggcgctcctttgcacacagtacctcccaggccaccgaccgaggatgtcggaggtggttcgcatgctggaaggcgacgggcttgcggaacggtggccagcgtcgcagcgagccgactcacacaagttcaccgtgcctgagttcaccttcagccgctgctactccgacctgaccgacgactcgtcgttgctggtgcaggccgtcgagctctctgggccaagatgacatgatcaccaagcgcccacagactgagaacaccaagcagcagtccttgtacagcatgataatcctatgtagatttggaaataatccaatactgacgtaaagtatacatagtgatgtatgtatcttacatgaagtgtacacaggagagtgccgcaactccctggaatggtattgaactattaatattacagatttctagctgaaacaataagactagttgtaacttgtaataaaatccggtagcgagatagc

SEQ ID NO: 436873 - DNA, 347 bp, Triticum aestivum
ggtcgacggggaacactaaagcgaggcggaggactctggcatgggagacgtagacttcacaaaggctggcgctggcgcggactgagcgggtctcctcccacgtgggatgagattgcctgtacagcgccagcaatgaaggggaagaatgtttggctcctcctgtttgtttggggaggcacgttggatggatggacgagtgttgactctgttattagatattgacgatcagttgtaggctacccgtggtcttacagattggtttgcttttcgctgaccactgatgctgaatactgttgcgtgcgctggtgctacctgttttcatcaacatttatacatggattttgctc

SEQ ID NO: 436874 - DNA, 340 bp, Triticum aestivum
  unsure (1)..(340): unsure at all n locations
ggtcaaaaattaccgggtcgacgggagcacaataaaaaccaaaaccaaggcttaaccgcagttccgcagttcgtgtgttgcttatattatatgttgctattatattaccattattaagtgagggaggaattgattagtgccagtgtttgattttgttctgtttgtcatggtacgaggaaagatcaccaagtagataaggtctctagtagcagtttggctgtacctaatcagtacccttatttcattccgactagtaagtaaaaacttgtttttccctcagttgtctgcccattgtttcagnnnnnnnnnnnnnnnnnnnnnnnnnnnnnnnnnnnnnnnn

SEQ ID NO: 436875 - DNA, 595 bp, Triticum aestivum
actttagggttgtctcggtgtcttctatatagtttttatcagctttcttggagcccaacagggatgtctcactatcttgaaccttatctacattacttcctttaccattggataacagggtactcttctccaatattttattcgcattctaaaagagaaacaaacaaatgcatctcaggtttacaatgtagtatatgaaactcattttggtaaaccagttcagtagtaaggtggacaggataacagcatgaaacaaacatatatctatgtagtatcgtcactgtatggtctatatcattctagtttatgttgccaaatcaagatagagacagttcaaatcatatctatttaagacaaagcagcatagaccgaatataagtgtcggaaactagacagcaataacaacacttgtaatgtgcatggcatgagaacataactgtttcttcaattgaaactaaaatcaacatagagaaagttacaatgaactaacatgttaaagaaataggtttcaaaacatagctgttgcgccattggagtttcaattgcatccttcaaattagaaattagttggtatgagtaaatatagtgagcaaga

SEQ ID NO: 436876 - DNA, 433 bp, Triticum aestivum
gggccgaatcagatatgggccataattgagcccaaagcctcttaaagggccggacctgatctgggccgtgatttggcccagaacgtgggaggcttttaacgggccggatctcatatgggccactactaggcccggagcatggcaggccattaatggaccggatcaattatgggccggcatttggcccaaaacatggtagccagttaatgggccggcctactagggtcctcaaaatcttgtgggcctacagctgggccggcccattaatgtcggcgaaatctcgtgggcctttagctgggccggcccgttatgatccgcaagaatcttgtgggcctttacctgggccggcccattatggcacacaaaaatcttgtgggcctttacctgggccggcctattatggcccacgaaatcttgtgggcctttagctggg

SEQ ID NO: 436877 - DNA, 448 bp, Triticum aestivum
ggtctaggattccgggcccacgggcctggctatctctctggaggaccggcgccatggcggcggcggcgctggcgcagggaactcctcgggcgattcgccgctgctcctgctgccgatgctggacgacgacatctcccgtgaggtccagcgcctagatgctgatatggaccgattcatcagggcccagagtgagcgcatgaggcagtctatattggagaaagttcaggcaaagcagtttgaagcgctggcctctgttgaagacaagatcctccgaaaaatacgcgataaagagtcagaagtgcagaacatcaacaaaaggaacctggaactcgaggaccagattaaacaaatggcaggggaagttggtgcgtggcagcaacgagctaagtacaacgagagcatgatcagcgcactcaagtacaacctggagcaggtatgtgcccatcag

SEQ ID NO: 436878 - DNA, 503 bp, Triticum aestivum
cgggccgaccgggttcctgagacgacgaggagccgtgcggggggttcttcgccgacgagccgccgctggcgtggtggacggagccgacggatccctggaaatgaggcgcggcagagagcgagagactcggtgggagacgacggacacctcgcgcggggaataaaagattagtgaagaaagcaggggcttttctgaaatttttgtaaatctcgtttttatctagtcctttcctgtcaaaccctcgccgtcgctaggcagccagcatcagcaatagtactactactactactagtgccatttccgcccccgctctttctgccatttcctttttcctcccgtaaaccctcgccttttagctaaaaacttaaatgttcaagctgaatagacgggaaaaaaaaaaaaaaaaaaaaaaacaaaaagaaaaaaacaaaaataaaaaataaaagaaacaggataaaccggaagctctagaggtttaaagctaatctgcatgtgaatgaaac

SEQ ID NO: 436879 - DNA, 223 bp, Triticum aestivum
acgggtaggcatactcgaattagttcctgtaccaaaatatgaacataccaaacaattggatagtttgtatcaagtttttgtggcacttgctaccttgatttcaatggagacaacggtgtagcacaaattcaaagcatctgtatatgtatgctatgcattcttatgcccttcatgcgggatggatatttttgaaatcaacaaaagagacagatatattatgtgt

SEQ ID NO: 436880 - DNA, 540 bp, Triticum aestivum
atcgctctatccaagcattgcgagatgttgactacaacggttgccgactcaccgcctgctgttgggtacgaactcgtacgaatccgagacttgcttgaacagatgtgtgatacaccaccaccacttcttagtagtctgtaggatcatattcttgtgtggttctattgctgctaaccatgccaggatcacaagccgacgagattgactgggagaacttatcgaacaaggagcttcatgataagtttcagcaaatgatgactgaacaggtgcaagatgtgctgaacaattttgaagaggccatggagaagatcactggccttgagatgacgttcgaaacaaagctcgataacagatttaatgaactgctcgcgcgtcttccaccaccaccacccgctgcccctaacgcacctctcctacaacaacaacaacgactacctccacaacaacaacaacgccgctttccaaatcaagtgggacgagcacatcgcgttcccattgaccctaagcaaacttctggtgtcgctgttgatgcctctaacg

SEQ ID NO: 436881 - DNA, 538 bp, Triticum aestivum
actcaagccgcaccccgtaccaaggcacgggaatatgcgccggacttaagagacatgttggatctacggaccgcgtgggcgccccacggctcgagacggtaaccgtcatgccgaccacagattcggccgggccgaacacagtagacaaggctcattggagctacgtcacgatatcgcccagcacagaggcgccgcacacccactctgcttcacagacgagataatggatcatcaaatccccgagggtttcaaacccgtaaacatcgtatcatatgatggctcaacagatcccgcggtatggatcgagggttatctccttcatatccacatggcccgcggcgatgatttccacgccatcaaatacctcccactcaagcttaaaagaccagcccgacagtggcttaacagcctgctaacagggtcaatcagctgttgggaggacctggaagccgcattcctcgacaatttccagggcacttatgtgcgacccccagacgctgatgacctaagccacgtaattcagcagccagaccaatca

SEQ ID NO: 436882 - DNA, 409 bp, Triticum aestivum
ggtcgacgggcgatgagcctcaagcgatcgcaggaggacaccgggaggcatgtcaggatgctcatccatgagatcaggagcacgcttgacaggcacaccatcctcaagactactctggttgagctcgggaggacgctgggtctgcaggaatgtgctttctggatgccgtcgaggaccggttcgagccttgagctaactcataccatgcgccaccacatccccacgggctcttctgtggagattaatctccctgttgtcaaccaagtcttcagtaccaaccgggcgatcatagtgccacatacttctcctttggcgaggatccaccctgttcaagggcggcatgtcccacccgaggtggctgctgtgagagtccccttgctgcatcttccaaactttcatcccgagcctt

SEQ ID NO: 436883 - DNA, 412 bp, Triticum aestivum
tcgacggggggacaagtggcttattctgatgatgataaaacgctggccaaacagcgtgaggaaataaagcgcatgactgctgagtttgatgcgagcatgctggagatccgcaagaatttggatgctatggatgaaattgagaggcggagtgcggaggactatgagaagttccgtaagaagctaaacaatattgagaaagcatgcaatgttgctttgatcgtgctggtgcctagcactgttctgctttttatgtcactgtagtatcatctctattagttggttataagaaacccttatttaactagtgggttaagaaaccctaccttcagaactctatgtgttgtagtgatccagctttggactttgcattgcatcttaatgaacgcataatggttagcagactcgttataag

SEQ ID NO: 436884 - DNA, 357 bp, Triticum aestivum
gacggagagggcaagtacgaggacgagctcgaggacgatgccgacctccaggactagagatcaaccgagtaccgcgtatgattattggttcttttcttatgttaatttgattgtgtagtgctcttctgtctttcttggtgggtgctgttgttgaggaacagaaaactcatggaagggtggttgttggtgagatagcttggtataacctctggcacaattgctgtgtgcaagcaacgccctgttgcgttctactggtagtggtgtgtgttgtctggtgtccattgtctaactatcatgtccaaatctaatgtaatttgaagttgcttgtgtctgaaaaaaaaaagagcaagagaaaag

SEQ ID NO: 436885 - DNA, 394 bp, Triticum aestivum
  unsure (1)..(394): unsure at all n locations
gagggcgagtacgaggacgaggaggacgatgccgacctccaggactagagatcaaccgagtaccgcgtatgattattggttttcttaggttaatttgatgattgctttaggcttgtgtagtgctgtttctgtctttcttggtgggtgctgttgttgaggagcagaaaactcatggaagggtggttgctggtgagatagcttggtataacctctggcacaattgctgtgtgcaagcaacgccctgttgcgttctactggtagtggtgtgtgttgtctggtgtccagtgtccaactatcatgttcaaatctaatgtaatttgaagttgcttgcgtctnnnnnnnnnnnnnnnnnnnnnnnnnnnnnnnnnnnnnnnnnnnnnnnnnnnnnnnnnnn

SEQ ID NO: 436886 - DNA, 372 bp, Triticum aestivum
  unsure (1)..(372): unsure at all n locations
gggtcgagtcggacagactagatgataaattgcttctgcacaaggactgccccgcatcattttgctcaactgtggatcgcaaggctgtagcaagctgccgattgaagttgtgggttcatacccctttttttgcctttataaaaatgaattttgtggatccaatagtgagctgccctatcttaaagagttgcagctcctcctgcatgtaaagttttcagtgttggtttggaccatcagatagacttgctggagttgtttctcagatgctaccatgcaacctcaggaaatatataacattcctactgttcccnnnnnnnnnnnnnnnnnnnnnnnnnnnnnnnnnnnnnnnnnnnnnnnnnnnnnnnnnnnnnn

SEQ ID NO: 436887 - DNA, 457 bp, Triticum aestivum
tcgtgagacttcaggttttgaactttttctccgccatgtttattattccctttatattcgacgagaagccagacgggaccttcaaactgctcaggcattcaaaaaagatgaccttctcttctttggtcagagcgtagctggcacgaccttgaaaccattccggatgccggtcatcagggtctttcaaacgttgctggtcctgccgtgcttcctttgtatcatttgtcttcccatacacgcccaagaagcttaggaggttcacgcaaatattcttcgtaacgtgcatcacgtcgattgcagagcggacttctaggactttccaatattctagctcccagaatatagatttcttcttccacatggctgcgtgcccgtcagctcccttcggaactgattgtccgccaggaccctttccaaagatgactttcaaatccttgaccatatcaaatacctcagc

SEQ ID NO: 436888 - DNA, 1160 bp, Triticum aestivum
cttggacgatacttctttgcttgaaccacacacttggctcttgctcttcatccaacccttgtagatattgaaacaaaggtagccatccattgcagggtagtggatgtggtctatatctagtacattctgctgccatgcataacgatgaaatgtgtatggaggtttctccagtttaccgtacgaaggatgacccatggctcctcccagggtcagcagtgaaggctgacgagacgacgccagccaattctcctggaggtcgaaggtgttgcctacaacgaggcctatccgacgcaggacttctttgtcgttaccaaagtctacagtaacgaatttgactaggttgctctcgaggaagtccttaaaatctaggcattcaacgtcggcatggcatatgtggtagaccaagcataagtcatgcacgcaaacctggatcacggcgggcttcttcctctcttcctcctttagatccttctctcgtcccaggactgtggtgtactcaacatctagcccagcgacccactcatcatctgagtcttcgaacatgcgtctgaagcgagaaaggcatcctttcaccatcccggaagaacgggtgtagatgacgtcgaactcatcgccggtgatggttctaaccttgtactcaccgccgatcgtggagatttgggacgccatggatttgggaggagggttacgattagtggaactgccgtaatgtgaatggacgtgacgactaggagcaaaccaccatagtattgaaggacgtgcggggacgagtaggagcgaactgccagcgtgcgaacggcggggtagtggctttccattctcccatgatacgggcttccgagagcccttggatctgagatcgaacggttgcatcgcgtgattctagacctatgggtgaatatcctatcctggggggttattctgcaaattttcagcaacttagcatgcgaccgtttgatctcagatccaagggctgccagcagcccgtatcatggtcgcgcctaccacgaccgtcgcgtcgctcgcgcggtcgcgcccttggagatttaacacggtgcgttaggctatctaatgttggcatgtcatacatagtcatcacttagtcactcatactacaacaaggttagctataacgttggctaaaagtgtgtttatttttt

SEQ ID NO: 436889 - DNA, 350 bp, Triticum aestivum
gggtcgatgcggcgctctatctcagctggaagaacaagcccctcgtcgtctcctccgcatggcactagtgttgtggtgttactgctttgtgacttcgctgctcgtagacgaatctagatgcatgctttgttggactctagggtgatgctgctgctgtggagaagaatagctcccaagtaacctgctgttgtaatgccgaacttaggtctaggcctgaataaggctgatgagatgtagtggtacaagttcgagggctacagtatatgtttcagtttcagacgtctaatcttaatgtaattgcatttaacgaaaaaaaatcaagaaattgaaaaaaaaaaagcggccgctct

SEQ ID NO: 436890 - DNA, 511 bp, Triticum aestivum
cgggtcgaccgggctcctaaggtcggggaaggctctgattaccaacttgtaacgccctcgatgcggctatagctcccacgtgtcgaggcacgacttagaggcataaccgcattgaaagcaatgtcgcaagttaggcaatcttcacaacatcccatgtaatatagataataaaagggggagataacatagttggcttacactcgccacgtcaatcaaagtacataaataacattacatcatccaaacactcatggcccgactacggcgccaaaatagaaaagaaaacccaacatgcgacacggtcccgatcgatcaccccaactgggcaccactactgatcatcaggaaaggacacgtagtatcgttgagagtcctcgtcgaactcccacttgagctcgagcgcgtcacctggagcggaatcatcaggccctgcatctggtgtaatagtaatctgtcagccactagggaatcagcaatctcgcaccctcgcgaaatcgagactatataagct

SEQ ID NO: 436891 - DNA, 548 bp, Triticum aestivum
cggggctgaggagtaaaaagaatcctactctccgatatatataatcctaagactcaaaacatttttgttctagactcaacaacgtcagcgattcgatcaagcagggggctcctaagtcggggatggctctgattaccaacttgtaacgcccacgatgcggctatatctcccacgtgtcgaggcacgacttagaggcataaccgcatagtggttttgtcgcaagaagggtcatcttcacacaatcccatgtaatgaacaagaatgggataaagagttggcttacaatcgccacttcacacaagacataaatataattcatacatcatccaaaatacacacatatagaccgactacggtcaaaatccagatgaaaagaagacaaccccaactgcttgatccccgatcgtcccaactgggctccactactgatcatcaggaaaagacacatagtaacgaccacgttcctcgtcgaacgcccacttgagatcgaccccatcgtcggcaccggcatcgtcggcacctgcaactgttttggtagaatctgtgag

SEQ ID NO: 436892 - DNA, 492 bp, Triticum aestivum
gctcctaaggtcggggaaggctctgattaccaacttgaaacgccctcgatgcggctatatctcccacgtgtcgaagcacgacttagaggcataaccgcattgaaagcaatgtcgcaagtgaggtaatcttcacacaacccatgtaatacaatcagggaacgagatacatagttggcttacaatcgccacttcacacaattacatgaataaagcattacatcatccagatacaatcaaggtccgactacggaaccaaaataaaggaagaaccccaaatgcgacaaaaggtccccgatcgaccccaactgggttccactactgatcaactagaacgaaaaacaacacaaagggcaagatcttcttcgagctcctccttgagcttggttgcgtcacccgctcggtctcatcggcacctgcaagctggttttggaagtatctgtgagccacggggactcagcaatctcgcaccgcgagatcaagactatttaagct

SEQ ID NO: 436893 - DNA, 450 bp, Triticum aestivum
  unsure (1)..(450): unsure at all n locations
ggtacgcagtctacggggccacgtcgtagtaaacgggagagggattgagttcgagtcgacgccttaaatatgtgtgggccgcttggttttaggggaacgaggcagcattttgggttcggggaccagtggagatatagtacgtacaaaaaattgtggacgtaggttcgaccaaaaggcaatgatgcatgggccctgcattttgatatacccggggccgcgtgaaatttgctactctactcaaaactagtaaggtacacatggattgaacgcatgagatttcgaaaccaaattatgaataaatacacactatagcatgtaaagctttgagtcatatatgtatgatgtagatgttcatttagttcttatagttaataccattcaaagtcaattagttttataaaaaggttaaaattcatggcattgtgcattgtaaagcataaagtanaaaac

SEQ ID NO: 436894 - DNA, 424 bp, Triticum aestivum
gacgatggtgatggtggtggagcagaagatcttgatgacgacgatgatgaggaagacaccgatgacgatgatgaggattcggaggatgatgatgtgcgagaagagacggaagaggaattccttgcaagatatgctgctgctgctggcgagtcaatcgaggttgttgaggaaggagacatagatgaagaaacccaagacattgaactgggttccctggacgaaatggacatacaacaagtggttctttcactgattcagaaacatactgcgctcctccaagcgcaggttttgccagatgacctaattgagagaattgcagaaacatttcccgaatatgagcagctgttgcatgctcaccaacttaggtgttagacttgtgcagattttattttccaaacatgttttctgtgttagcttttgcggc

SEQ ID NO: 436895 - DNA, 480 bp, Triticum aestivum
  unsure (1)..(480): unsure at all n locations
acgggaacaccagctgcacacccgtataaccttgtaagtatctgtcctccggtacaacatcaaggtcgattcctcttatttgatcaaccattcgccgtgtcaaaaatgcagagggggatgcaaggagcacaaggcctgcacatccaagcaagtggtaacatggacttgtacatggaacatcccaagcgcaatcagagctgcagtgagcctgtacaacgagctagcgtaagtccctgcatttcatttaattcgtactggcattcgtgtatgatttgtgtgcagtggctgatccacgaatttaagttaccaggggcgaacatttaacttaaaaaatacgaaggcacttgcactctggaaatcaacataacttgagaaatgtgaagctacatgcactttgaaaactagctaatgatccaaagtagttcagattataaacactaaatgatgcaagcaccanaaaacacaaaatgcaacatggtg

SEQ ID NO: 436896 - DNA, 439 bp, Triticum aestivum
gggtcgaggcggatggtgacagttagggctctggcaggggaaacaggggccgtggtggtggttacagaaacaatggaaatgacaacaatgagggaagggcctccagtcaagaccgcggtggtggctggtctcactcttctgcttggaatgctgataaaaagggaagcgctgaagacgatcaatctttctcaaagggcaagtccagctgggggagtgacaacaacggtagctggggagctccaaaaccatctggtggtgatgatcaggcaggaaagaaggatggaaacaacacctggagtcaaaacaagccattttctggcgatggatcctctatcctgggccagtgggctcctgctggcggcgccaccgctggtactgcaggatctgcaggcggaggaggatcatggggaaagagcaatgaagatagctggaattcttc

SEQ ID NO: 436897 - DNA, 692 bp, Triticum aestivum
tcccgggtccacggggagcacaaaaaggcggaggagcacaagaagaaggacggggagcacaagaaggacggcgagcacaaggagggcatgatggagaagatcaaggacaagatcagcggcgagcacaagaacgacggggagcacaagaaggcggagggggagcacaagaaggacggggagcacaagaaggacggcgagcacaaggagggcatgatggagaagatcaaggacaagatcagcggcgacggccacggcgacggcaagaaggacggcgaccacaaggagaagaaggacaagaagaagaagaaggacaagaagcacggcgagggccacaaggacgacgacggccacggcagcagcagcagcgacagcgacagcgactgagccagctccggccgcgctccggcagcagcgtgcagtgtaggcgagatcgatgaacgcttgggagaagtgtggcatacatatatgttgcagggtttggagcgtgtggtagcatatgtatgtaatgcgtgacatgtctcatggatcttgtgatgtataataattagccggctgcactgcactgcacggtgcttgtaataataacgttaatgaatcatgttggtattgatgcatctccgatgagaatttggtatacccatgttttttaaaaaaggccacaacagataaccaataaaggggccgccctaaag

SEQ ID NO: 436898 - DNA, 906 bp, Triticum aestivum
gggtcgacggggagtacaaaaaggcggaggagcacaagaagaaggacggggagcacaagaaggacggcgagcacaaggagggcatgatggagaagatcaaggacaagatcagcggcgacggccacggcgacggcaagaaggacggcgaccacaaggagaagaaggacaagaagaagaagaaggacaagaagcacggcgagggccacaaggacgacgacccaccacaacaccatcatcgcatcccattagcattcccattttcctcggagagaagtagccagaaacagcagcgccatggccggcatcatgcacaagatcgaggagaagctccacatgggtggcggcagcgacgagcacaagaaggacgaggagcacaagaaggaggacggggagcacaagaaggacggcgagcacaagaaggacggggagcacaaggagggcatgatggagaagatcaaggacaagatcagcggcgacggccacggcgacggcaagaaggacggcgagcacaaggagaagaaggacaagaagaagaagaaggacaagaagcacggcgagggccacaaggacgacgacggccacggcagcagcagcagcgacagcgacagcgactgagccagctccggccgcgtgcagtgcaggggagatgaacgcgtgggttaatttggagcgtgtggtagcatatgtatgtaatgcttgacatgtctcatggatcttgtaatgtaataaccggctgcactgcatggtgcttgtaataataacgttaaggaatttccattgggtaatttggtaccatccttttttccaagctttttgtgtatgtatgtatgtatgtggtgtctctgttcatctctggatctctccgaccgagcgtgattaacggctgggggatctttaggaatggtt

SEQ ID NO: 436899 - DNA, 666 bp, Triticum aestivum
ggggagcacaagaaggcggaggagcacaagaagaaggacggggagcacaagaaggacggcgagcacaaggagggcatgatggagaagatcaaggagaagctccacatgggtggcggcagcgacgagcacaagaaggacgaggagcacaagaaggcggaggagcacaagaagaaggacggggagcacaagaaggacggcgagcacaaggagggcatgatggagaagatcaaggacaagatcagcggcgacggccacggcgacggcaagaaggacggcgaccacaaggagaagaaggacaagaagaagaagaaggacaagaagcacggcgagggccacaaggacgacgacggccacggcagcagcagcagcgacagcgacagcgactgagccagctccggccgcgctccggcagcagcgtgcagtgtaggcgagatcgatgaacgcttgggagaagtgtggcatacatatatgttgcagggtttggagcgtgtggtagcatatgtatgtaatgcgtgacatgtctcatggatcttgtgatgtataataattagccggctgcactgcactgcacggtgcttgtaataataacgttaatgaatcatgttggcattgatgcgaaaaaaaaaaaaaaaatcaaaaaatagcaacattaaaaaaatgttaacg

SEQ ID NO: 436900 - DNA, 602 bp, Triticum aestivum
ggggagcacacgaaggacggcgagcacaaggagggcatgatggagaagatcaaggacaagatcagcggcgacggccacggcgacggcaagaaggacggcgaccaccacaacaccatcatcgcatcccattagcattctaccattttcctcggagagaagtagccagaaacagcagcgccatggccggcatcatgcacaagatcgaggagaagctccacatgggtggcggcagcgacgagcacaagaaggacgaggagcacaagaaggcggaggagcacaagaagaaggacggggagcacaagaaggacggcgagcacaaggagggcatgatggagaagatcaaggacaagatcagcggcgacggccacggcgacggcaataaggacggcgaccataaggacatgaatgacaagacgattaagaaggacactaagcacggcgagggtcacaaggacgactatgaccaccacaccaccatcatctcatcccattatcattctaccattttcctcggcgtgaagtaaccataatcagcagcgccatggccggcatcatgcacatgatcgaggagaagctccacatgggtggcggcagcgacgatc

SEQ ID NO: 436901 - DNA, 631 bp, Triticum aestivum
tccgggccgactaactggttattctttgttaggaaccgtgtctagaattgtctggccgattcttctggctgctgaattatgtggcttaagtcgtcggcatccggcggtcgcacgtaagtgccctggaagttgtcgaggaatgcggcttccaggtcctcccaagaaccgattgagtctgctggcaagctgttgatccaatgtcgggccggtcctttgagtttgagcgggaggtattttatggcgtgtagatcatcgccgcgtgccatgtggatgtgaaggagataatcctcgatccataccgccgggtctgttgtgccatcgtatggctcgatgtttacgggtttgaaaccctctgggattttatgatccattacttcattcgtgaagcatagcgggtgtgcggcgcctctgtactgggctatatcacgacgtacctcggaagcactatgtctgttgtgttcggcccggccgaatttgttgcatccggagtgaagatcattgtcacatgccgtagggcgcctgtgcgatccgtagatcgattttgtttgtcttgccttatcctccagtatgtctcgcaggtcgggcgcattttcccgtgccttagttgagcggcgtcggggcatggcttggg

SEQ ID NO: 436902 - DNA, 739 bp, Triticum aestivum
aagctttgagatccttattcagagagtcgtggacgagacattctgaggtgtcaactttaattactagcagaatccagtggaacctgcggacacgatacatgcacagtacgtcatgcataactcatcgattagccggccacataccatgcatggagtaaacaaaagagaatgtgctcaagacagaaacactcacccaaaatggtaaggaaatagaatatcacttttgagttcctgctttgtaagaaactgccacaggtctgcctccatgtcggcggggtgatgctccaacacatatccattaacgatgtgtgggtcaatgaacccaacatcatggatgttccttactctgcattccttaatcttcattctgcatgtataatagcggacacaacaatatagttaggacatatatatagtgcaggcaatatgaacgagatggggtagaaattaataaatcacttacagaacgtagcaactgatgatagatttatcgagctcgcgcagattgaaaagctggaacaattcactcagttcaatttgtacatagtaatgtttgaagtgatgctcatgtctaacttccgcataaatatattctttggcgtttttattttttatgtaacccttgtaccatttcagcagacctttcatttgtggaggtagatccttttcctgcgcaggctcgacgagaggcccattcttcacatatggtaattactacctccttcactggcgcctcatc

SEQ ID NO: 436903 - DNA, 635 bp, Triticum aestivum
tccgtccagtttggaccatatactcgatcgctcatgccaaatacatggcacccccgacaagccagccaagcacaccaacagggaatgttggatgttcaagcaggccggcaagttaagcgccgaagacaaagataaggggctacatagcgatgacgaggaggagccccggcagccgaacacccgagggcagaagaggttcccccaacaagtgcggacggtgaacatgatatacgcaacccacatccccaaaagggagcggaagcatgctctcaaggacgtctatgtgttggagccagtcgccccaaagttcaacccatggtcctcctgcccgatcacttttgatcgaagggaccaccccactagcatccgtcatgatggattcgccgcattggtcctagacccagttatcgacggatttcacctcaccagagtcctaagggacggcggcagcagcctgaacctgctttatcacgatacagtgcgataaatgggtatcgatcctcaaggattaaacccacagagacatacctttaaaggcgtcataccaggtgtagaagccagctgtacaggctcggttacactcgaagtggtcttcggattcccggataatttccgaagcgaagagttaatcttcg

SEQ ID NO: 436904 - DNA, 206 bp, Triticum aestivum
gcccaacctgttcatgtgagcgggtccctactctactctactggtctgtgtgttttagcgtgtaagagtttgaagatttttgcatgtggaagttttggttaagcactttgatgttttcagtcactaaggatgctgctgctttgatgcaactcttgactttgtttcgtattagtaatgcgcagcagatccatcaactgctagcccac

SEQ ID NO: 436905 - DNA, 479 bp, Triticum aestivum
tagcgtcaacaattcaaggtcgacggggaggcggagctgcaagcaaggagtgaaggtttcaacttggaaaggaaggcggaaacaggggaaatgtggcttttggtaagggggagggggcggggaggtagatatttccgcggaagccgaaaatttggaatcgcttcagcgaaaaaactggcgcgcaaagtgtcatcagacacggtcccttattcagaactgtgtacgatatgtgaacatcacaaacgattcagatagcttaacccgtgtgtgatgagtttgaacgtcaaaagttttggttcgaatttccatggttacagtggtcatccacgtcattgcataatttgggtacacaaaggagactacagcacacccacacttcttaatcgagcaagttcagcaattaaacagagctagctgacctaaacattactctaacaaattaaagaccggcgctcttaattaaacaaaacaaagagtac

SEQ ID NO: 436906 - DNA, 169 bp, Triticum aestivum
actccctatagcgaatcatattaataagttagacaaggatgacttaagaaggctagcatacaagcaacacgatcgaagacgcaagagcctcctgcctgggacctcctaactactcctgttcgtggacggcctccatgtagtagtccaataaaaaacacttacaccaatg

SEQ ID NO: 436907 - DNA, 426 bp, Triticum aestivum
ggtcgacgcctctgtggaagctaaatcatatttatgatggcctcggtcctcttcccccaaaacgtaggcaggaagggatcccacagtggccaatttcaaaataggcaagtagtacatcttatcctgacgaaaggtggtcttcgcctgctaagcttctggtcgtgtcgctgtggtgggctcggtgatgacatctatcctaccgtgctggcgatcttggtctcgttgcaccgaaatggaaacctttgccagatgacatccgtcctactgtgcctgtccttgcctccttagcaccagacaccaatacaggaaactgcctcctctgcgcccgctggagcccacctgccattgttatcacggcttgcgtcactgctagattgatggggagagagttggtgatgagggtagcaagattgccgtcatgatcct

SEQ ID NO: 436908 - DNA, 672 bp, Triticum aestivum
ttccccgggtcgacctcaggtataaaatcgtaatggtaggcctgcaccaccacctcaggtacgagatgatgtccatattcctaaactgaaattgaatattccaccatttgagggtagatatgttcctgatatatatcttacttgggagttagaaactgaacaacgatttacatgtttacaatatcctgaggagagacgagttgctgctgctgtttgtgctttcactagttttgcatgtgtatggtggtctgaacattgtagattatatcctattccaactacttgggctgctttgaaaactgctatgcgtacgcgttgggttccaccatattatcaacgtgaattgcttcaaaaattgcagcgtttaagacaagggaaaaattctgtagaagaatattatcaggaattacaaactggcatgattagatgtggtatcgttgaggagaatgaagctatgcttgcacgttttctgggtggattaaatagagagattcagaccattctagactataaggagtatactaatatcactcgtttattccatcttgcttgtaaagctgaacgtgaagtgcaggatcgacaagcattggcgcgaactaacttttctgcaggccgaccttcctcatggacgccgcgtgcatcttctacttcaactgcaccagcacctcaatc

SEQ ID NO: 436909 - DNA, 405 bp, Triticum aestivum
  unsure (1)..(405): unsure at all n locations
cgggtatcagcacctccggcaagttctgcagggccacaagaggccgatggtgatggcaacgtgatcagccagccagcagcttgctggatcctcttctctctggatgcctaaagtcagtatgtcaatgtaatgtaaacatccctttccccttcccctttcttcatgtagcttcggtctactccttaggagtcttggtaaagcttgtgctctgtagttgcttcagctactggtaccgtctattgtgtgtgatgtaatatattatggaccattatgccattcctttttcaatcaatctgcccgttgttgccgcgagtctgaagatgatcgctgtgtttgttccctcaaatcctgatgaactttaattgctacaaaaaaaaaaaaaanaaaaaaaaaaaaagcggccgc

SEQ ID NO: 436910 - DNA, 441 bp, Triticum aestivum
cacgggccattgatctacaataacatagacatgcaaaatactatccggtactaagttcatgataaagtaaagttcaattaatcatattacttaagaactcccacttagatagacatccctctagtcatcgaattgctcacgtgatccatatcaactaaaccatgtccgatcatcacgtgagatggagtagttttcaatggtgaacatcacgatgttgatcatatctactatatgattcaccctcggcctttcggtctcagtgttccgaggccatatctgcacatgctaggctcgtcaagtttagcccgagtattctgcttgtgcaaaactggcttgcacccgttgtatgtgaacgtagagcttatcacacccgatcatcacgtgttgtctcggcacgaagaactgtagcaacggtgcatactcagggagaacacttatacc

SEQ ID NO: 436911 - DNA, 559 bp, Triticum aestivum
gggggatgaggagtaaaaagaatcctactctccgacatatataatcctaagactcaaaatagttttcttctagactcaacaatggccaacaatcaagggggctcctaaggtcggtcgaggctctgataccaaattttcacgcccaagatgtgaccctatcctaaaggaactcgaaggtcccaccaaggatagaagcgcatcttgaagacgcttttgcaaggtggatatcattacatcaacactacataatagatggggatacatacaaaaggcatacaaatgccgcatgaatacaacatcactatacatgagagcaacatccgactacggatgaaacacaaacagaagctcaaacgacatccaccctgctagcccaggctgccgacctggaacctatcccctgatcgaagaagaagcagaagaagaactccaaaacaagcaaaatcgctctcgcgtcatgatcatcgcataacctgtacttgcaactgatgttgtagtaatctgtgagccatgaggactcagcaatcccattaccatgggtatcaagactagcaaagct

SEQ ID NO: 436912 - DNA, 407 bp, Triticum aestivum
gtcgatgtcaaagtctaaagtgagtccctacactatcatcaatgctgaagaagaaagttaccgcaaaagataggatttcagggaggcttctaaatggtcgtgctggggacgcaacaataagagaagcttctaatactgaggatatgacctacagggaagcattcccaaatcagtggcagtgaaagcaccctgagtaggtctttcttcataattaacagttttgttttgctgtgctgttgcatgcttgaagtgcttgaagtacgcggggcactgaagctgcttcgaacccgtgcatggaaaatttcagaaaggaaagtcgtagaccatttgtattggcagtcggattgagaatccatatcagaacaacgcgacagtagataagcactcgattttgtgaacatgccaag

SEQ ID NO: 436913 - DNA, 332 bp, Triticum aestivum
gggagcatccccgggatggagcctgtcaaggtggacgcggcgcggcccatcgccgtggcgccccggtccatcgtgttcgtccacatgccggattaccatgcccctgcgtgtgcttagttacggctttttggtgttcttgttggtataggtactggtgagaaaagggtggcttgctaagcatgtccatcctacctagggtagttataagatggctgaacagagtgtgtggctttgtgtgattagatgtaataagtttggagggaaaattgaattagtgacacaagaggcaatgggaataaactctttcctggataaaaaaaaacgggggggcg

SEQ ID NO: 436914 - DNA, 464 bp, Triticum aestivum
ggtctagatatccgggtccacgggctgaacttgatgctggtgacgagaaaattagagagttgatatcagttttagaccaaaggaaggatgaatcaattgaacgcacatttaaaggagttgcaaggcacttccgcgaagtgttctctgaattagtgcaaggtggtcacggatacctggttatgatgaagaaaaaggatggtgatgctgccgatgatgacatggatgaggacgcgcctcgtgaagcagatcctgaagggaggatagagaagtatattggtgtgaaagtcaaggtttccttcactggcaagggagaaactcagtccatgaagcagttgtctggagggcagaagacagtggtggcattaacactgatcttcgctatccaacgatgtgacccagctccgttctacctgtttgatgagattgatgctgctctggatcctcagtacagaacgggtgtccgg

SEQ ID NO: 436915 - DNA, 457 bp, Triticum aestivum
  unsure (1)..(457): unsure at all n locations
acgcctgcccgtacctttncgaagcctccgggtcgacagggacctcctgaaggtgatggaccggagcgacctcaccggcgcgcgtgcagcggcagatgctgccccgcacttccccctgaaaggacctggctgggaggtcgtggtggctgccgggggcggtatgctctcagcgctcaccagctgagccccgggcccgctccagtgaccggcctgtcaacggcgaccgacgccttggtattctggtgcttcggctttgttcgtcgcctgtgttaaggccgatgtttttgtgaacatgatgtggacatgacaacggcatcctaccccccctaagtaattatggacgaccgaggcgttgcagtgtgtactgtactgcaccccctagattaggagctgatcgatcctttggcgagctgtgttgtgatgtaactcgagctcgtgccttcatccaaggcaaccg

SEQ ID NO: 436916 - DNA, 366 bp, Triticum aestivum
acgggaagaccgcagccgctgacaagaagaccgccgccgccgacaagaaggctgccgccgacgccgaggaggacgccgccgccgacgagtagacagggccaacttgcgtcgcgtagttctgcatctgagaggggagagaaagagagagagcatgggatcctgtatgtaatgcctggtctggagtccgaactggtggtagtctgtagcgtcgattgatcttgaatcaccgctgaattgaagctggaaacttgatcgtttagccaattccaataaacagtgaaaaaaaaagaaaatagaagcagaagagagtaagaaaagggaagagagaagacagaggaaaaagcaaatggtgaaagtcaagggacg

SEQ ID NO: 436917 - DNA, 402 bp, Triticum aestivum
gggccgacgggatacggtagtcagaccacgccccttttccacaagaaggcaaaaaccaccaagaagattgtgctgaagctgcagtgccagagctgcaagcactactcccagcgcgccatcaagcggtgcaagcattttgagatcggtggagacaagaagggcaagggaacgtccctcttctagattgctttcacctatctggagtcgttgtggtcaagaactattactacttgtcgtgatgtttttgatgttatgagttgaattgaccagaccttctaatgtatccaaacccctttatctggcatttgagcaacgatcgacttggcagaatgatcttttgtagcttgaatcctcttttaatctcaggcattgccgtaacgtggatatggatgtcctgtgccc

SEQ ID NO: 436918 - DNA, 510 bp, Triticum aestivum
tcgacggggtgacgatgcgcgtcgggaatggttcacaaggtcgatgtgatcgccgtcggcacgctacctctgcatctacctacgggattagttttaaacctcaataattgttatttagtgccagctttgagcatgaacattgtatctggatctcgtttaattcgagatggctactcatttaaatccgagaataatggttgttctatttatatgagagatatgttttatggtcatgccccgctggtcaatggtttattcttaatgaatctcgaacgtgatgttacacatattcatagtgtgaataccaaaagatgtaaagttgataatgatagtcccacatacttgtggcactgccgccttggtcacattggtgtcaagcgcatgaagaaactccatgctgatggacttttagagtctctcgattatgaatcatttgacacatgcgaaccatgcctcatgggcaatatgaccaagactccgttctccagaacaatggagcgagcaaccaac

SEQ ID NO: 436919 - DNA, 411 bp, Triticum aestivum
  unsure (1)..(411): unsure at all n locations
ttcgccggtcgacgggatccacagacacgacaaattcgtcgtcgtcgaggcttgcctcgtcttcggagggaggcatgcaattatcgtcctctacctctctgtctgccgctctctcatgagggctggcttctccatcctcctgtgctgaatcctgctggagggggttgtcttcggcactgtccggggtgttattatctcccgtgccggaatcgccgtttttgctttggcgggatttagagcggcgccgctgacgccggcgcttaggctgcttcttggaggggtcatcctccgttgttccgtcgccgttcccttcttttggggtgtccaccatgtatatgtcgtatgacgaggtggctttccagtgccctatangcgctggttcttggtcgtctccttcatcagcgtccatac

SEQ ID NO: 436920 - DNA, 702 bp, Triticum aestivum
tgccatatttgaaatgcttggcatttccaaactgtgtctccgattccggtgttctttacatcgatttcaacgaaatcacctcacctttccagtggcacgcttggatttccaagttgaggccgggttcattctttccttatcaaatcttgcatatgcatcacatatcgcatcccgcatagcataccatgtttgcatcatgttgtttgagctttgcacgtggttgattgtgttcctcttgcatgtttgtcttgtttgggtagagccgggagacgagttcgctaacgaggagcccgttgagtttgctttgcaggatccagtcaactctgacgactgtgcaggcaagatgatcataccctcgaaatcagtactatctttgctatgctagtttgctcgctcttttgctatgccattgctatgatgcctaccaattgcttgcaagcctcccaaattgccatgtcaaacctctaacccacctttatcctagcaaaccgttgattggctatgttaccgctttgctcatcccctcttatagcgttgctagttgcaggtgaagattggaggtcgttccttattggaacatcttttatttacttgttgggatatcattatattgccatgttatcttaatgcacctatatacttggtaaagggtggaaggctcggcctctcgcctagtgttttgttccactcttgccgccctag

SEQ ID NO: 436921 - DNA, 359 bp, Triticum aestivum
ctcgcgggtcgacaccctgcactacctctagtaggtgcacctgagagtcaatagcgcagcagatgaaataaccaacttcattgtagaagatttgaaggccatcaagaagccaaagataatcgtggatcatgtcatcaccagttgaaatgtggtattctcttggagcgctttctcatcatcctacatttccactctgtttgttgagattattgattttatcgatgccgttcgtactccaacaaatacggttcctgtacgccactattatttatttggttttgaacttgacaccttatttcattctgggcttgtaagttgatgttgcaagagttgatgttgcaagagttgattttaactcg

SEQ ID NO: 436922 - DNA, 1079 bp, Triticum aestivum
gacatatatcagggcccaatgtatggtagtaactgaatcatggatcacaaacacagaactcagttcctgaggacggctacaatgagacaacccaccatgtactcctacatggcctctcaccgctacctttaccaaatcgtgttcacacacttagctcacacacagtaggacatgttcacacgcctctgattcatccccgatgaatcagacctgactcaactctaagcagtagcaggcatgacaaataagcatgaagcgggggtgtacttcttcatacatgtttccaccacttagcgtctgcacacgacatgtgctcggcagacttcaagcgaaagccgacgtgggtgtagaccacgacctgactaaccacacaaatccctagtccaggtttatcgcctattcaggttccatccgtagggagtccgaccgaggtttccacatacggccccgaacgatgtgtatagggtttcgagacaccaaacgggcgcccgacatacctggccacgtacctaccgcatcacagcccaccccaagggtcagcgctgtgcacggcctccattatactacaaacaccttgcaactcctggacagaggacaagggtggttaataagtcgagcggggtcatatttcagggcccaatgtatggtagtagctgaatcatggatcacaaacacagaactcagttcctgaggacggctgcaatgagacaacccaccatgtactcctacatggcctctcaccgctacctttaccaaatcgtgttcacacacttagctcacacacagtaggacatgttcacacacctctgattcatccccgatgaatcagacctgactcaactctaagcagtagcaggcatgacaaacaagcatgaatgagtaggcacatcagggctcaaacaactcctactcatgctagtgggtttcatctatttactgtggcaatgacaggtcatgcagaggataaggggttcaactaccgcaacaagtaacagttgaatcgttgttgtcctaatgcagtacaagagagcaggagcgagagaggggggttgtatcggaatgaacaaggggttttgctt

SEQ ID NO: 436923 - DNA, 729 bp, Triticum aestivum
gtccacgggcgtgtagaaacgacatacctaaacacttaagcctctagtccaggtttatcgcctatccaggttccatccgcagggagtccggccgaggtttcccatactggccccgaacgatgtgaacagggttcccgagatacctaacgggtattcggtacacccggccacgtacctaccgcatcacagcccacccctacggtcagcgctgtccacggcctccagtacgctacaaacaccagaaactacttgcaactcctggacagagagctacggtgaataagaagtcgagcggggtcatatttcagggcccaatgcatggtagtagctgtatcttaaatcacacatacagatctcagtgcttaaggtcggcttcaatgaaacaacccaccatgtactcctacatggcctctcatcgatacctttaccaaatcgtgttcaccacaccactctcattaccgacataatcatttcactctagcccatcacccagatgaaccagacctgacacgactctaagcatagcaggcatagcaaggtaggaacaacacatacatatggctcaatcaactcctacacatgctagtgggtttcatctagttactgtggcaatgacaggtcatgcagaggaaatgggttcaactaccgtagcacacagcagtttgaaacgcgttgtcttaatgcagtaaaagagagcaggagcgagaacatgggattgtatcgatatga

SEQ ID NO: 436924 - DNA, 472 bp, Triticum aestivum
acgggcagcaagataaaggtgtgtgcggttgagggcatacacttcagaaggattgactatttgtgattaggcaacagaacaaaaacagtcagccagatcaaagtgtctccgattgatggcatacacttcacatggatgagctgtttgcgattagccacaacaaactgaaacagttagacacatcaacgtgtgtgcgctagacgggcacacacgttctaattaaaagaagcgtgcgcgatggtaataacgagcgcgcacggttgttggaacaagacgtgtgctgacattgcctattgcggtgcaccctatggtgcaaacgccacgtacgcggccgagaaggcgtatgtgcccacgttacgccttccgggaatagtgccgcacttataaccgtcagtaaattttgagcatgcgtcccgtcacattccaaattgcaaacctgttcacaccgatcaaaacctaaacggtttcccac

SEQ ID NO: 436925 - DNA, 786 bp, Triticum aestivum
cgcctgccggtaccgttcctatgctcgcgggtcgacaggaggaggccaccctactcaccccagtcaaacggggttgccgagcgaaaaaaccgtactctaactgatttggttaacgccatgttagatacgtcgggtttatccaaggcatggtgggggaaggctataatgacatccggtcatgtcctgaataaagttccaacaaaggataacgagatcactccttatgagaagtggaccaagagaaggacaacactctcgtacttacgtacctggggatgcttggcgaaagttaatgtgccgatccccaaaaagcgtaagcttggaccaaagactgtggactgtgttaatttgggctatgctatgaatagtgttggctatagatttctagtagtgaaatctgaggtacctgacatgaaggtcggtacaattatggagtctaaggatgctacattctttgaggacattttccccatgagagatgtgcaaagcacttctagacaggaatctgaggagactcctgaacctgccatcccgatggaatattatgaccaaacacatgatgaaaatcccgaggaggatgacgaggaatcccttggtaggggcaagagacaaaggaccgcaaagacctttggtgatgatttcttcgtgcacctcgtggatgatactcccacttctatttcagaagcgtatgcctctccagaagctgactactggaaggatgcggtccgtagcgagatggattccatcatggctaacgggacatgggagatcactgactgtccctat

SEQ ID NO: 436926 - DNA, 388 bp, Triticum aestivum
cacgggtcgacggcgagaagtattgggccttattgggccatacgggaatagaggagagaggccaaaaggaaggaggcgcgcaccccccctctggtcccaattggacaaggggtgcagcccccttttccttctccctctccccctccttccttctctcctactccaacaaggaaaggaggagtcctactcccggtgggagtaggactccccccttggcgcgccctcctccttggccggccgcctccccccttgctcctttatatacgggggcaggggagcaccccatagacacaacaattgatctcttgatctcttagccgtgtgcggtgcccccctccgccatattccacctcgattatatcgtagcggtgcttaagcgaaaaccctg

SEQ ID NO: 436927 - DNA, 452 bp, Triticum aestivum
tctatatataaagggatgacccggcggcggtttagggcaagtaacatcggatcgagagctaggtcaagcgatttcgctccctggtaatcgagacataagcaatcccactcaaaactggatcgtaggcttttaccttcactgcaaggggccgaaccagtataaaccccgtgtcctttgtcccgattaacccctttaagcttcctagttgcgatggctccacgactaagtccttcctcgaggacatctgccgtgacaattccacgacagttggcgcccaccgtggggccagcgcacggtggatttgagttcttgaagggcagcttcgaagggctcaagggatacgctgtgggccggatgaccaagagtcgtcgcggcaagctctacatcgacgatgcaaactggggccccgacgccggctcaattgagtacgggtaccgggtccccttcggcgg

SEQ ID NO: 436928 - DNA, 406 bp, Triticum aestivum
ggggctgacgtcgccgtggagggcgccgaagaggttgatcctgcgctagaggagacggtcatggaggagaccatccgcgtgacacgcgccaagctaaggaggcgtgccgccgccgaggcgggcgcgtgaaacctagctgcaaaccattgttttattggcgcatggtgttgttgctcctattttttgagtcttttttagattgtcatgttgtctggtggagagaatatctgttggtcatccaattggtcgttctgtttcagaagttgtcacccgttcctttcttctttcctgtggctctcgctggcctgtttatgtgcctggaagtttgtaaatatcaccgggcatgtgtatatacagattgttggcatgtgctacgacctacgaatgcatctatcctactgctctc

SEQ ID NO: 436929 - DNA, 349 bp, Triticum aestivum
gccaacaaccaaccagttagggaaggggaaatatgttttggccagggaaccttcaacgccagaattttccaaggggttaaaaacaagagttggttgttggatgtgttgtccccggttttgcctgatactgtatcccgttgcgagaaatactgtaacaaatccgtccgtggtgtacctagttaaattatcgagaagtgacattagaaatggtctgtggagagctttggtaataaacggtgcttctgtgcctggtagaatcatcaaaaaaaaaaaaagaaaaaaaaaaaaaaaaaaaaaaaaataaaagaaacacaaaaagattaaaacaaaaagcggccgtacaaggggt

SEQ ID NO: 436930 - DNA, 358 bp, Triticum aestivum
gggtcgacgggagattctacatatattttctaaaagacatgtcacttggtcgaggccttgatcatggtgatatgtgtttattcgtccggtgactcagtagaacgataacctctgtgcacagtgatgtttcagtttctacattgatggtttcaagcataagaaggtttcaaaattaaatgagccttgtacaggactgataacaaattatgctttctgagtttcaagctactgaaagtaattgaagctttgccttcgctatgtaagaatggttgcatgtgttaattagtggtgcacattttttgagactgtccaaaattctattataaaatgcttatatgaaattaacggaacaaaaacg

SEQ ID NO: 436931 - DNA, 449 bp, Triticum aestivum
tccgggtcgacaagtaggcctcaacctgctgctcacttcatgggcatgcatcaaagcctcggtattcagctcgcacagcttgggaaggatgcttctgcagcaggagctgcacgcagaggtactactcagcggaagacagttgaggtcgagtctgttgcagctgcagggaagcaacaagctcgagaagtagtgaagaaatctttccgtgccgagttcctcgagaagctgcacaaagatttggatgacgatatcgatgtgagagccttggcaaatggatttatatctgtcactcctctgaatgtgcacggccatgtcgagcctgaactcgaagctccagcgtcagactggctgtcagcagctgtggctgtatccgaagaaaacgaagctccagcgacctaacagaaacgcagaaatgtacactgtaggtggcttagtccttgccctggtgt

SEQ ID NO: 436932 - DNA, 471 bp, Triticum aestivum
acttgatatatatatgtattgcaattgaatactcgtggtgacaatggggcatcgtatggattcacttgatatatgttttggcactcaactcgcggattcccgaggtgacattggggtaatctatgcataggggttgatgcacgttcttgtctttgtttctccggtagaaatcttggggcactctttgaagttctttgtgctggattgatgtattatgaatctgaatttgctttcgtggtatcttagtacggtctctaggatagatcgaacggaaaaaatagctttgtgttattttaatatgaactcttgaatagatcgaacagaaagaatagttgtgaggtggtttcgtaccctacaaacaatttattcttatgttctccgctagatagtaactttggagtgattcttcatcgcactttgaggggtggttgtatgatccaattatattagcattgctgagatgttgcacta

SEQ ID NO: 436933 - DNA, 467 bp, Triticum aestivum
  unsure (1)..(467): unsure at all n locations
gggtcgacgggcagtttacttcaaaaatggaaggcatggttactgaccttactgttgcaagagatcatcaaactaagtttgaagagtttgtagctgatcatccggagtcgaatcctggggtagacttggctgttactgtcttgacaactggattctggccaacctacaaaacttttgacataaaccttccctctgagatggtgaaatgtgtacaggtttttaaggagttctacgcaacaagaacaaagcacaggaagcttacctggatatactccttggggacctgcaatatcagtgcaaaatttgatgctaaaactatacagctcactgttacaacatatcaggccgcactgctgttgttattcaatggatctactaagcttagttactctgagattgtaacacagctgaacctgtcagatgatgatgttgtccgtttgctcaantctctctcttgcgcgaaatac

SEQ ID NO: 436934 - DNA, 602 bp, Triticum aestivum
gggccgacgggcagcaggaacccgttctaaggattctttttagattaagaccctgcataaaccttttttactatctcttgttgacaacatcccccggtttttccctacaaccgaggaggaggctggcgttttggcatgtggccacgccagaattttgcgcgtacctggacaccaggggcttttttaccaagggctctgttcggcccggtcttcataaagaccgaataccttagggagtgttcggcgtcgcgagtttggccttatatgcatcagctccgaatcatgtctttggtcaaatgttgggtttgcccggctcctgtgttttgctgccttacgttccgctctatcggctaaggcggcaccaggagaactactgcgattgtgccccggttcggccaggcgagcacctcagtagagaaagccgaaaaccgactgtcatgatatagcgtgagactggtcaaccacccgatgactctccggaatctgtaggattcctccgcattaacgaagggccgtttcccggccaggcacatacgcgccccgaattcgggcgagcgcaatcaccaccaggggctacctaaatagtcccattatcccctcga

SEQ ID NO: 436935 - DNA, 467 bp, Triticum aestivum
cccgggtcgacgggcagcacgaccgtgcgccatggtttctttctagattaagaccatgtgtaaaccttctttactgtctcttggtgctttacaccctccggatactcaacacaaccgagagggatgctggcgttgttggcatttcgccacgtcagacgaatgcacatacctggaaattcagggttcattaacaagggcgttactcagcccggtatatgttgtaaagtccgaataccttacggagtgttcggcgtcgcgagtttggccttatatgcatcagctccgaatcatgtctttggtcaatagttgggttttcccggctcccgtgttttgctaccttacgttccgctctatcggctatggtggcaccagggggaactgctgcgattgtgccctggttcgtctggatgagcaccttagtagagaaagccgaaaactgactgtcatgatatagcgcgagactggtc

SEQ ID NO: 436936 - DNA, 438 bp, Triticum aestivum
acggtcgtagattccgggtcgacgggatacttgattgcttcaagttaaacccttttgagcatcttaagctgtcttttgattcttctgtggatgaggtgaagaagcaatataggaagttgtcactgttggtccatcctgacaagtgcaagcatccacaagcacaagaagcttttggagccctggcaaaagcacagcagctcctacttgatccacaggaaagagggtacattcttgatcaagtcacttctgcaaaagaagaactgagggcaaaaaggaaaaaagagttgaggaaagacagtgcatccaagataaaatcccaagtagatgagggaaagtatgaagagcagtttgaaagatcggacgaatttcagaagcagctaataattaaagttcgtgagattttgacagacaaagaatggcgtcggaggaaaatgcaga

SEQ ID NO: 436937 - DNA, 464 bp, Triticum aestivum
gggtcgacggcgagcacaaagggcgagtcgccagcaagattggcctcaagtcggtcgtcgtgaaggtgaaaggatactcctttttcaggaagaagaagaaggtgatcatgggctttgcggatggtttccggggcgaaagagtgaggaccccgtctcctatcatgtacgtccacgacgtgacccagctcgcgcataatggttgccggctgcccaaaaaggtaaggaagtaagactgataatagcccccagcaagaagtgtggagatcagtatcctgcctccaaggagaagcacattaagaacgatatgtatgtatcgactggtttcgtaataatgtcatcagcctggaagtatttatgaatacttattagacagtcttacatcggcgcttgtaagtcataacctttttgtcatttcccgtattgttgctgaggtgatggatttgttttgatttgacctgattgca

SEQ ID NO: 436938 - DNA, 430 bp, Triticum aestivum
  unsure (1)..(430): unsure at all n locations
acggcgagctcaaagtgcacatccggccgttcctcgcaaagtggctccgagcacagcgccaccgttgacgcccgaccaacagctccccttcacctgcggacatccggaggccggaacgccgtccttttacgacggcggtccttaccgcgcgctgttctggtcgctgcccgagcttgacgaccaaggcccaaaagacgtcttgccgttaccatggtcgcggttggagatgtggggcaggctgacggcggcggcgctggatgggacttgggccgttagccccccgattatacacgaacatgcgttacctgagtccgtgacgctctccaccgacgtggtgatgttctaccggccggacncggaggctgggggaacgaatgtgatgattgctgcaaccgaggatgtggagcatgtgtatagcatggaggaacat

SEQ ID NO: 436939 - DNA, 410 bp, Triticum aestivum
ttcgcgggtccacgggcaacatcaagctcagcgtgaccaagagcaagccggagaccggcgaggcgatcggtgtcttcgagagcgtgcagccgtcagacaccgacctcggcgccaaggcgcccaaggatgtcaagatccagggtgtgtggtacgcgcagctcgagtctaactagagcagagcagaagtgaagatactcatcttgtgtgcatgcgtacgtgggttgatcggtggagaggaaacaatcgaggcaacaaatgtgtttgtgtgtgtatctagtaatctaaacccagggtgtcggtttatattttagcttctgttattattgtttcttcctggacaactcatgatattgatcccccatgaatgttcacaaaattctttgttgataaaaaaataaaaaatgataatc

SEQ ID NO: 436940 - DNA, 715 bp, Triticum aestivum
gggaagggggttgacaacaaggggtggctgcgtggcaacgcaaagctaccaaagcaggttcctgctactgaggagcagaagtggctcattgagcccacgggaaaagagtaagtggttcattattttgcttgtcacatgcttattccggttgttatttattttgcttgtcacatgctaatagttcattcttttgcagcaactggatatattctaaaggggtccgtattcccaacggcctcatcaccgtcttgctgaagttatactggccggggttgtactgtccggatccagtcaggcagccggaccgtcgggttttggccacgagctgggaccactgggaagcggcccgccacgcggaccatgagacccatgccaaggccgtgatcactactttctgggtgagttctcttcagaagaacaagtccattctagtttcatgaaaatgatttaactcatggcttcttccattcttgtttcatgcatgattgtagaaattctatcgagttcttcgggagcatagggctggagcggaccagatcgtgctgcgccaatgcaagaagaaggcccgccagatgcagtacgaggtgcgctatgtggccatatccacatactaccacgacgttcttggtgtgaagatgaccaaggaagaagcgcggaggatgggcattaccttggagaggcccgagttcttggcggtaagtataaaagatttttc

SEQ ID NO: 436941 - DNA, 434 bp, Triticum aestivum
ggggaaggggtagacgataacgggtggctgcgtggtaacgcatagctaccatggcaggttcctgctactgaggagcagatgtggctcagtgagcccacggggaaagagtaagtgccactttataataattgcattagtttgcttgtcacatgctcattctggttgttatttattgtgcgtgtcacatgctaatagttcattcttttgcagcaactggatatattctgaaggggtccgtattcccaacggcctcatcaccgtcttgctgatgtttcactggccggggttgtactgtccggatccagtcaggcacccgatccatcgggtcttggccacgagctgggagcactgcgaagcggccctccacgcgtgaccatgggacccatgccaaggccgtgatcaccactctctgggtgaattctcttcagaagcac

SEQ ID NO: 436942 - DNA, 481 bp, Triticum aestivum
gggattgtgtccttccggacagcccaggacagcaacggggtgcttaactcgtgggcgtcgaacctggagaagctgctggacctggtggagaagagctgccaccaaatacacaaggagacgatgatccacaaggcggtgctgaaagcctgaagtgaaccattttgaattgaatgtggccttgtttaggttgtgtgcgtagtagactttctctatggatctgaattcactttcactgtatgggtaaaactattctctctgctcaggtgggcatcgcctgtttgctttgggaactcgtgtgcgaaccggtctcgaaatactgtaaccacagggaatgacgaatgctatttgctgtatttttctgaacattatttgtattctttggcatcaactcttgctgaacctggatgtatctgctcatcagagcgtagagccagtttctgaatgatttgctgggagacgcgcttgttccgttttgagtggt

SEQ ID NO: 436943 - DNA, 339 bp, Triticum aestivum
ttccgagtccacgggcacaggacattcctgcaggctatgtcctccgagcctcgtgaaatcatgaggacagaagcttccgtgcctacttcaactctgcaggaccaatgaaccttgaagtttacaagttgggggatgccagtgatactgatcttgcacgctgcttgctgctgtctacttgatgtttttaaatttaagtcaaattaagcgtcatgtgtcgttaaactttagttatgtccagtcttgcgattttggttcgtgtgcctgtgtgctaaactactgttggatcctggatgctatgttttgagtcaagatatgattatgtacaatctatctattgct

SEQ ID NO: 436944 - DNA, 325 bp, Triticum aestivum
gcttaggaaatctcgagtcaacttttgagaccttggttgatgcatttgtcgtcttggataatactaaagtatgggtctctgagtatggatgagattagtctggcagtaactatgagcataccaggggaacgctctgctggccgtacaaccatgaaaagacttgagcgacatcgattgggacacgagtgggatggctagccacatcgactttctgtctgcatacaatcgccgtctctggataggcgataaccaggatgacgatgactgatcgatgtgcaagcgacacctcacaaatatggtcgaccagaaccttgatgcatagtgg

SEQ ID NO: 436945 - DNA, 479 bp, Triticum aestivum
aattcgccggtccaccaactcctgcagcttaatgaggccagcgagaatgtcgtcgtcgccggccaaggacttcagcaatgccagctcgtcgcgatcgccgacgcggcgagtgcgcttgtgagagcccttgcgtgcccgtgagagctcgttcgagggctccgcggcgcaccgggacatctctgctgcggctgccgcttcgcggcgggacctctctagtgcttccgcggccttggtctttgctgcctggttatatgtccacccgaaactcctcctaccggtcatggcggaatgacttgacaggaaagaccagttttgtgggtgatgaggagaggaactgtgaagtaattttcgagtgggtagtttttatagcccggtgctaagtgtgaacacatattagtttgataggtgtgaacagatttgcaattacttattgcgttgtaatctgcaatgtgacgagaaacaaggtcaaaattattgat

SEQ ID NO: 436946 - DNA, 584 bp, Triticum aestivum
  unsure (1)..(584): unsure at all n locations
gcggctgaactgacgggacggtgagatggacgacggatcctcatccggggaggtggacgagggacatcgagctgttgcggtggacgatgtcgtcggggaagaggctccggctgggcagcggtgacgtggcggacggaggagggtggggtttcgcggctggagcggagaggttatggcggcctgggatttcgaatggcgaaaagggggcgatgggagggggtgaagcatgacttagggacgcgcttgtccaaaatgtagggtgtgttacaaaagtaccccccaccgatttgaactagcggccctttcggctcagggttagaagggggatttcgcgtgtcgggatttggcagctggagggagttttcgcgcgcgttgtaatttcgggatagcaaggcgcgggttgtgaaggcgccagttttgggagcacgatatctgaattttcgggatataacaagacgcgggttgaattttagggacaagcctaacatgtagtaatattgtacttgtacgtaccaaatcaattcgcacttccctcaaccaaaaagaaaacgacaaaaataaaactattcacaccacacanagag

SEQ ID NO: 436947 - DNA, 443 bp, Triticum aestivum
attccaggtccacgggaggcacccatagaggcaacaattcagtcaattcttgaaatgggtggtggaacatgggacagagacactgtgctgcgtgccctacgtgctgcattcaacaacccggagcgggctgttgagtatttatattctggtattcctgagccgatggagattcctgcaccaccaccaagtgcccagccagctgatcctgccctggcttcacaagcagctcaacctgcagttgcctcttccggtcctaacgctagccccttggacctcttccctcaagccctgccaaatgcttcagcaaatgctgctggtgaaggaaatctggatgttttgcgtaacaatgcacaattccgaagcttactttctttagtgcaggccaaccctcaaatcttacagccattgcttcaagagctgggaaagcaaaaccctcagatttt

SEQ ID NO: 436948 - DNA, 399 bp, Triticum aestivum
  unsure (1)..(399): unsure at all n locations
cgggcacgcttcacactccgggtactctatatctcgcaatcatacaagcatacaataagcaatcaggcagaatcacgagtgaaactcaaataagagatctaaccagaaagttcagcttaagaactctggttcgcaaaatgaatcaaatcaaacgaagcatgaatactcaagcggtgagagaagcaagcttcgtttattaatctggactaaggtcaaattttacagtagcaaaaacgtggttaagttggataaacggaaagagggtttcgagacgaagctctaggcgcttgaatcgcctgattccgataaatgagcgaaaagttatactagaacgaaaatcggatcagaaatcacgaanaaaaaagcnaaaccagaaaaaaaaaaaaaaagcggccgctc

SEQ ID NO: 436949 - DNA, 453 bp, Triticum aestivum
ggtcgacggcatgaaccccttccaggcggaggccaactacgtgtcagcgcgtaagacgaaacagaattcctacaaatccaagccttgggacaagcccgccagaccgagtcgctagactttgctgaaagagatggcgccccgaggctccgtagaaagagaagagaagtgttgttgtatcgccaatttttcgaaatataccgtctgctgttcctttttttcccgccttgttgctcctttttttcaccttgttgtttgactagacggctcgaaatagacagaactcttgatcggggcctgtatttaattgtgagattctttgtagcgcagccggagtagtagaacatgttgccgtttttcgcagcatttttcgcagcatttttcattcttgtttctccagcaacatagttatgatttgttatgaataaacatttgttctcgtttcaaacataagat

SEQ ID NO: 436950 - DNA, 613 bp, Triticum aestivum
  unsure (1)..(613): unsure at all n locations
atcttcggagacnggctgtgttccatgggttcggctcgagtcngttatccgatgcaagcagacggtacgctccaacagtcangacttggtcaataataaaaggaccttcccatttgggcttgagtttgtcctttttcttgtccggcaggcatagaactagctcgccaaacttgtaagttttggcccgtacttctgtgctttgatatcttcgagcctgctgttgatagaatgcggaacgggcttttgccacgtcgcgctcctcctccaaagcgtccaaactgtcctgccgatccaactcggcttctctttcctcgtacatgcgcacgcgaggtgagtcatgaattatatcgctgggcaaaactgcctcagcgccgtataccataaaaaatggtgtgaatccggttgtgtggtttggtgtggtccgcagcccccagagtacggagtcgagctcctctatcccgcgcgtgttagattctgtgagggaccgcactaatctgggtttgatgccgctcatgattagaccatttgctcgttccacttgaccattagtttgagggtggtagactgaagcgtagtcgagcttgatgcccatgtttttgcaccagtgtttaac

SEQ ID NO: 436951 - DNA, 417 bp, Triticum aestivum
gccaaccggcatcccaaaatacattctggcaatcttgcaccagaaggttcagtagcaaaaatactgggcaaggagggactgtttttctcaggtcctgcactagtttttgacggtaaagaatcaatgattacacctatatcagaaaacccagcaaatttcaagggaaaggttgtactgatccgaggagaaggaccaaaaggaggtcccgggatgcctgaaatgttgactccaacaagtgcaataatgggggctggtcttgggaaggagtgtgccctgctgacagatggtagattttctggggggtcgcatggatttgttgtgggccacatatgtcctgaagcacaggaaggaggcccaattggtcttgttgagaatggcgatacaatcacgatcgacgtcgggaagaaagtaattgat

SEQ ID NO: 436952 - DNA, 496 bp, Triticum aestivum
cggtccaaaataccgggtccacgggctgatcacgaaggctgcgaagaagggtcagatgccctcgcagatcggcgttctcctccgtgaccagcacggtatccccctcgtgaagagcgttacgggaagcaagatcctccgcatcctcaaggctcatggcctggctccggaaatcccagaggatctgtactttttgattaagaaggctgtcgccattaggaagcatcttgagaggaacaggaaggacaaggactccaaattcaggctcattcttgttgagagcaggatccaccgtcttgcccgttactacaagcgcaccaagaagctcccgcccacctggaagtacgagtctaccactgccagcactctggtggcttaagagggctcttcatctggtgtgctcttaccggcttcaagattgattgttctggaaaccattcttatgtaatgctttatgatagtttggagccaagcagatgctgcaaattttctatgtttg

SEQ ID NO: 436953 - DNA, 372 bp, Triticum aestivum
gcgggtcgatggggatcactaaatcgagtctgataactctcaaggtcctcctcatcccggggatcctcaacctaccgccgttcggtaccccttcctgaggctcaactgaacttgtaaataagatcccggtacctaccctaatccttttcctttttttgcggaaaatcacctggttaattgttacctgcccttcgatccaggaagttcatgtgaaaataaaaagttccaggaagttcagatttatatgtaccttctctatcgtccaagatgtaaccaggatattaagttccaggaagtttacttaatatcctggaagacagagatgctggtttaagtttcaagagatatggatttttgactaagttgaattta

SEQ ID NO: 436954 - DNA, 417 bp, Triticum aestivum
gggtgctgagagccagaccacagaggaagaacttgaagtgtacatgcagaaccacaaaaaagttatggttgattccttgtggaagcttaatgttgctgacatagaagccaccatatcacatgtctgccagatggtgcttcaggaccccttggccaggaaggatgacctgcgtcttcgtgccaaaggactgaaaactttagggaaaattttccagggtgttaagctcaacagtggtgagggggaagggtcgcacatgaagaatatagataacatggatgacaatgccggtagctcccctgattcgtcaccaaaacgggagccatcattcaatcccattcctaaccctcctcttacccagagtccatatgtggaggctccccagtttggcggaacctattgttcgttaacctcccaatg

SEQ ID NO: 436955 - DNA, 372 bp, Triticum aestivum
cacgcctacgtccaggtcgacgtcttctacgacgacgacccaagggccaacctccccgacgaccagtacgaggtcatccaccacgacagcgacgaagaagcttgatctacttagctgagcaagatctatctacctatctatctatctaatgtgcgccatggattagagtgtgattccttctagtgatctactgcgtcttaaatttatgtttgcaagtgatgatcttgtatcgtagctatatgtagtgtgtcctctggcttttgcaacctggcaagctactatctatctaatgtgttactgaaactccccgttatgttgtccttccaatcaccgattaaatcagtcggtaatgcacagtttttcttttctgaa

SEQ ID NO: 436956 - DNA, 382 bp, Triticum aestivum
gaagataaaaatagccaacaggcagagcagccggcttgtgtgggagacatgcctcagcgagttcaagtcgcttggcaaagtggccgtcaggctcatcttcctccatgcaaccgccaaggggttcaaatgcacgccgccgatgacgcggtggctcaccgcgccgggcagctcagccggcagcatcggccgggcgcaccggctggtgttcatcgcggcgaactcgaagctgcagaggagggatttctcaaacgacgaccacaaggacgtggagctgcttgacggaacgcgacgacgacatgctacacagagactggcaatgtggatccctcctcctcctcagtgtagcattccattcctgctgctgctgctgctgcttaatttc

SEQ ID NO: 436957 - DNA, 418 bp, Triticum aestivum
  unsure (1)..(418): unsure at all n locations
ggtaccggataaggaattcgccggccgacgggctcattgaggaggactcgtggaagcgtcaggttggcggggactaaagctggtagactgtttgaatggaaggctctgtgctgcaacaaaaccttgccctagtagctatatgcaatgcttagcactgaactgctgtgacaatgttatgttaccgtaacatgtgtgggctatgtctgcccattgtgttgtgctactactgtaaaccaattgcgtggttgcgttagtttgcttggaccattgcttgcatgcagctacaagttgctaatgaataccctactctaacctccttttgtgagcgtggtgcaggtcattctgccgatgtcataatcacnnnnnnnnnnnnnnnnnnnnnnnnnnnnnnnnnnnnnnnnnnnnnnnnnnnnnnnnn

SEQ ID NO: 436958 - DNA, 316 bp, Triticum aestivum
agcttcatattcctcgcatgattatcaagtcttcacggacacaccaatttcttcactttcaaagtcttcatgaaagtctttagaaataccaaaatcttcactcgaagatattcatttttaggggtcgacttttcttgtaaatatcaaactcctcatagacttattgacctgtgtacactcacacacgcattagtcccttaacctataagtcttcaatacaccaaaatcactaaggggcactagatgcacttaaaatctccccctttttggagattgatgacaatatgggtaatttttacaggggagataaacatat

SEQ ID NO: 436959 - DNA, 435 bp, Triticum aestivum
gcccgggtcgatggggcaccctatgttgagtcgtaggagcagtggctgatcgagaaccacagctaccagccgcagtacgcggtgacggagctgaacgagaaggacttctggcgcatgttcgacgcgtcgcactacgagcactgccggcagaaatacggcgccgtgggcaccttcatgagcgtctactacaagagcaagaaggggcgcaagtccgagaaggaggtgcaggaggccgaggccgccatcctcgagcctgcctacgccgacgaggcctaggcgtgttcgtcgtccatcgccgtcgtgctcgtcgtcggccgcctgtgtctcgccggtttcggtttcggtttcttcggtcgtcggaactctggattaattggttcccttttgcttggttgcttattaataagtagaacttgatcgatcgtgtagcgttga

SEQ ID NO: 436960 - DNA, 379 bp, Triticum aestivum
  unsure (1)..(379): unsure at all n locations
ctcgcgtttcgatacgagtcactagagtgactcgaactgctctcttgtacatggatggatggaagcgttggcccagcctgttgtcttcttgcccgcgtgttgtctctgtgttgtatcataactcgaatcaattcgttggttgtacctgagaggccattcctttcattgcctaggaatgattttaagttggtgcattttggatgctgtcctgtgttgaaatcagggaataatgtgtatctcgccctgctgccttttcctgtatgtactctaatgaaagtttggtcatatgcaccctccttggnnnnnnnnnnnnnnnnnnnnnnnnnnnnnnnnnnnnnnnnnnnnnnnnnnnnnnnnnnnnnnnnnnnnnnnnnnnnnn

SEQ ID NO: 436961 - DNA, 422 bp, Triticum aestivum
tcactccaaaacatgaagttcttaattttaagcaaagggagggagaaaatttaaaagatgcttggcatagaatttgcaatgctcaaaatagatctactaggaagctttctacttccgttcttctccgcagtttttatgtaggcatcactccttggaatagatgtgttcttgatactgttgccggaggtgatttcttgagtagccatgcgtttgacgcttataatgctatgttagatttgtttggcccaccacctcttttggttaatggaacggttttaactttagaacacgtgatgcaacggcttgatgttattgaaaataaaatggccactgttgagttgattgacaatttggataaaaagattcataatcacattacccaatatggatctagggttggagttactttgaaaaatcttaaa

SEQ ID NO: 436962 - DNA, 397 bp, Triticum aestivum
acgggccacaaggtggagctcctctcgccgttaccgccgccgccggaggagaagaaggaagaggaaaagaaggaggaaccagagccgccgaaacctgaagagaagaaggagccaacggtgatctccgtggtgctgaaggtgcacatgcactgcgaggcctgcgcccaggcgataaagaagaggatcgaaaagatgaaaggagtgcaatctgcagacccagacctgaaggcgtcggaagtgacggtgaagggcgtgtttgaggaggtcaagctggccgagtacgtgcacaagcgcaccggcaggcatgcggccattatcaagtccgagccggtcgccccggccgagaaagccggcgaaggcgacgccaaggatgagaagaaggcagccgaaggcggcg

SEQ ID NO: 436963 - DNA, 377 bp, Triticum aestivum
gacggggtactacatcaggtccaggatcgtggggatccagaagaacgcgaccatcaaggccggcaccgtcgtgtagagcgccgccgggccggcgcgacggggttccgcgacaacctctgcgctgcgctgatcgttgtcgtcggcttctcggggccgggactggaggagtgacccggggacgggggccgtttgaagctttgaatggctgagactgaaagtggaggcgcgcgcaggcagcatcagtagtaagtagtaagtagtaagtagcagtggaacaaagtaatagtcgttcgttttgcccctgtaataaataagaagaggctgtgtgttgaggtgaaaaaaaaaaaaaaagtaaaaaaaaaaaaagcggccgctct

SEQ ID NO: 436964 - DNA, 459 bp, Triticum aestivum
ccggtcgaccggataaataagggtgcggatggcgatgttcccaagagtggtcctgtcgaagacgaggagcatattgcttctctgaggcctaaaagatcaaagagactagtgaggagcacgggtgaggataaggaatccgttgctgcttgtgatgttgagaaacctgcagatgcagctgaaaacaatgacaacaatgatgcagaagagttgcaatatccttcagcctagtggacctactgggttgacctgatgagaacataagatgcgaatggcaagactctaatttttggtgtcgagtaggagcatcaaagatggcacccagaggaggagctctggatctgcttaaggtgttacgcagttcaataagtactttaactgtgctgtgcagcttcttttcagaaacctgggactgcaacttgggtgcagttgcagtgagctgagcccaatgatggctgttat

SEQ ID NO: 436965 - DNA, 441 bp, Triticum aestivum
ggtctacaactcgcgggtcgacggggaccacgaaagaacacaccgaaaccttttgcggaacctgcaccggcatatacaatgcaagcgagttcgggttcggctgcgacatgtgcgaccggtggttccacggcaaatgcgtgcggataaccccggccaaagcggatcacataaagcactacaggtgccctgaatgcagcagctccaagaaaatgaggcagtaggccgccgcctgcaagtctgcttcagccgtctctgacccatctgatcaaactacaccatgtttcttttctgcccaaggtcgcggctagcggatgtggattcctctagaaactgtgctccctcccatgtggtagtctcctagccgtaggtgctgtgaaagactgatacatagctcatactctcgtagcgttataaatgtttccttggttgtcatttgatgtg

SEQ ID NO: 436966 - DNA, 433 bp, Triticum aestivum
cgggtcgacgggaggctcaaggcttaggctgcgacagatcttatcccatagtgttaccagctttttttcttgctttgtggcagattgtttgggaaccggtttatgcattgcaattgcaactctgagctgctgcgaatgtttgaactgatgaggtttatgcattttgaacttaatagtaatgctatttgcatgccttcaaatttggaagcaaatgtttcagctgtgccaaaaaaaaaaaaagaaacaacaaaaaaaaaaaactgaaacataaacaaaaaaaaaaaaaacaaaccatacaaataaaaacccaaagacaaaaaaaagagcacatccaaccaaaacaaaagcgacacgggaaaaacaagataaaaacttgcttcaaaaggcccccaaaaatttccccataactccaaaaaaaaaaaaacggcccccc

SEQ ID NO: 436967 - DNA, 1028 bp, Triticum aestivum
aaagattgtatgtatgtggacgagagagttggagacaaacctaacacagacacagagagagagagatagagagagaaagagagaggaagaagttaggtatgtgagaaagatggatacatgtaatatacatgagatgcgtgtgcatctggattctgtatacgtggaaggagaagagacaacatgtttgatgagagagcaggaaaaacatggacgagaggggaaggatctcgtgggttgagggattgacaattttgtgcgggggagagagggattggtaattttgtgcaagagagagagggcgggtggggggaggagtcagtcagccgtcgtcacatcaccctgcttccaaatgaccccgcattctctagcgcggtgtggtcgccgtcttcgatctgctcgttgccctctttgaagattgaggtgttgtgcatgttggggtgcaaagaagcacaagcgagagtggtcgccgtataaccttggatggggatgaattgtgtgctcgggggagtgtgtgtgtgtgtggtgtgtgtcgcctctgtgtgtgtgtgtgtcagatattgagagaaaacaaacctaaggagagaaatgtgtgtgtatgtgacggaaagctacatgctaaacagggttttcacgaagagattgtgcgtgcgagatagagagcgatgtgcgggccttgaggtgggcaggggccgggtgagggtgtcaaaatgtgcgcgttgatgcatgtgttacatgcgatcgtgcgagggacggacgaatcgagagagatggttgttgtgttacggatgctcctctctctctcacacacacacacagcacacacacaagtaaaatagaagaccgttctctcatgtatacacaacgtatcggcatctctctatgtctcactcatgcatgatcatttgcacattcacacctctctatgtctctatcacacacacaccgtctccacattgcccttccgccacaacacacatatggacacatacacacgttctctctcagtcacacacacaaaatcagtatta

SEQ ID NO: 436968 - DNA, 543 bp, Triticum aestivum
  unsure (1)..(543): unsure at all n locations
gggnnnnnnnnnttnnnnggcaactgtttacgcctgcccggtaccggtccagaaattcccgggtcgacgggatgccctctttgaagattgaggtgttgtgcatgttggggtgcaaagaagcacaagcgagagtggtcgccgtataaccttggatggggatgaattgtgtgctcggggagtgtgtgtgtgtgtgttgtgctgcgtgtgtctctgtgtgtgtgtgtcagatattgagagaaaacaaacctaaggagagaaatgggtattcacgaagagattgtgcgggccttgaggtgggcaggggccgggtgagggtgtcaaaatgtccgcgttgatgcatgtgttgcatgcgaccgtgcgagggacggacgaatcgagagagatggttgttgtgttacggatgctcctctctctctctctctctctctatctctcccctctctctctctctctctcacacacacacacacaagtaaactagaagaccgttctctcatgtatacacaacgtatccggcatccngtccaaagtcncanncaagcc

SEQ ID NO: 436969 - DNA, 359 bp, Triticum aestivum
ggtcgacgggatgcgacaacgggcatctccagctcgatggaggacgggagcctgagcaagcgcgagaaccaacggtaccgatgatgatgggaacggcacaacgacgacgatgctgccgaaccgccgggacatgatctgagtctgtgcggatcggactgccccttgctagatatgtacgtacgtacggtaccattaaccaagcatgtcgtgattgcattattttttggcccctgattggatctcatagtacttatgatatacttataaccaactcaacccccctcctccttgctcttgattgtattatatgtgcgagcatcgttctatgacagttctttgatatactcacttgttgaacc

SEQ ID NO: 436970 - DNA, 482 bp, Triticum aestivum
atcgtctatcacaactggctgctcaattcccgggtcgacggggaggttgagaagctgattggcaggatagtgaagtggctgaagcccggtgggcatattttcatcagggaatcctgcttccaccagtctggggattccaagaggaaagtgaacccgacgcactaccgggagccaaggttctacaccaaggtgtttaaggaatgccactcctatgaccaagaggggaattcctttgagctttctctggtaacttccaagtgcattggagcttatgtgaaaagcaagaagaaccagaaccagatatgttggctgtgggagaaggtcaagtgcacagaagacaaaggctttcagagattcctggacaatgtgcagtacaaatccactggaatcttgcgttatgagcgcgtgtttggggagggttatgttagcaccggtggattcgagaccacaaaagaatttgtggacaagctggatctgaaagc

SEQ ID NO: 436971 - DNA, 755 bp, Triticum aestivum
gacgaaaagtgggctaaggaaactcgcaaggaaggttccaaccgatcgtctacttaagttcgagagagttttcaaagcacaaaaacgtatccctatgtctgttttcaaagcacaaagagttcttgacgagattcgctggcgttactacgaggaaactgttatgatactgaacctcatgccctatcgagcatcttatcccatcttaaagttggtttattcggcagccgcaaatgctactcattatagggatttcgacaaagcgaatttatttattactaaagccgaagtcagtaggagtactattatgaagaaattcagacctcgagctcgaggacgtagtttccccataaaaaaaagcatgtgtcatataacaattgtactaaatatagtaaagaaatcttaagatttcgattcccagtaaaaaaaaatatagaatagaaaaatatgggacaaaaaataaatccactcggtttcagacttggtacaacccaaaaacaccattccttttggttcgcacaaccaaaaaattattcggaaggtctacaggaagataaaaaaataagggattgtatcaagaactatatacaaaagaataggaaaaagggctcgaatagaaaaatagaatcagactcaagttccgaagtaattacacataatagaaaaatggactcaggttcaagttccgaagtaattacacatatagaaatccaaaaagaaatcgatacgatccacgtcaaaatccatattggattccc

SEQ ID NO: 436972 - DNA, 207 bp, Triticum aestivum
cgggtcgaccggaacgacaaagatattcctcttatctccatttacttccgataggcaggcgctgtcactctattgtgaggatagatgacgagtgtgcaaagaattcctgtggagagatgtttgaaacattcctagactcttcttagtcggcttggtttattttatgcattggtagcctagtgatcgctgatggtgttagcgtccaag

SEQ ID NO: 436973 - DNA, 518 bp, Triticum aestivum
tgatgagatcgaaagtatgttaggaaggagagaaaatcctggggagcatgaagccatgcgcaagatgaaaaatgaatttatggtaaattgggacgggttgcgaacgaaagataaagaacgtgtactggttcttggtgccacaaatagaccttttgacctggacgaggctgtgattaggaggttcccccgcaggctaatggtaaatttacctgacgcatcaaatagagagaaaattttgaaagtaattttagcacaagaagagttgggacaagatactgatctggagtcacttgctaatatgactgatggatattcaggaagtgacctgaagaatctatgtgtaactgcagcgcactaccccattcgagaaatcctagagaaggaaaagaacgagaagaatgttgcaaagtcagaaggtaagcctgagcctgcattgcatggaagccaagacgtccgtcctcctaatttggatgacttcaaatctgcccatgagcaagtttgcgcgagcgtgtcatctg

SEQ ID NO: 436974 - DNA, 424 bp, Triticum aestivum
ggccgacggcgatcagaagagggagtgggaggccaagaaaggacaagacagcagcagcagcaatgcctgctgaccctgggtctgcggggatcaagagagggcgtgggaggccaagaaaagagaagaagccagcagcagcaatgttggctgaaactgaagctggagatactgtgtcaactgggatgaagggggcgcttgagaatccaatatcaggtaatgtcgtgtcaactggaaccaatggagcacttcttagaacggacaatccagcggcaggtgattttgtgtccatggtaatgaagagagggccttgctttgattgaaacctggtttggagacatgtctgaagaagctagtccaggtgtaggaaaggaaaccaggcctggcctgaagatgcatgctggatgtgtgatttgagtctagtctc

SEQ ID NO: 436975 - DNA, 434 bp, Triticum aestivum
  unsure (1)..(434): unsure at all n locations
gggtcgaggcgatggtcnaatggataactccttagtcacattgagctcattatgatgatgcattaccgagtgggcccagagatacctctccgtcatacggagtgacaaatcccagtcccgatccgtgtcaacccaacagtcactttcggagatacccgtagtgtacctttatagtcacccagttacgttgtgacgtttggcacccccaaagcactcctacggcatccgggagttacacgatctcatggtctaaggaaatgatacttgacattggaaaagctctagcaaacgaactacacgatctttgcgctatgcttaggattgggtcttgtccatcacatcattctcccaatgatgtgatcccgttatcaatgacatccaatgtccatggtcaggaaaccatgaccatctattgataaacgagctagttaact

SEQ ID NO: 436976 - DNA, 454 bp, Triticum aestivum
ttacatgcacggggtcacgggacaatcaaacgacagttagctgctatcgctccaacacttgagcagttgaataagaagaagaatcagagaaagagggaatttgttagtgtacagtcacaaattgatcaaatatgtggtgagattgctggcaccacagaggtcggtgagcaggtggctacaccacaggtcaacgaggatgatttgacacttgagaggcttgaagattttcggtcccaactccaggagcttgagaaagagaagagcaataggttggagaaggttcttgagtatgtaagcatggtacatgatctatgtaccgtcttgggcatggattttctcagcaccgtgactgaagttcatcccagtctagatgactccattgctgataactgcaagagcatcagcgacgagacattatcaaaacttgacgagacagtacccacaactcatgaac

SEQ ID NO: 436977 - DNA, 431 bp, Triticum aestivum
tgaaaacaaataataaacttcaacataacaaactttgggggccacattcatttgcaggaattttgcaggcaaggaaaatgggaaaaattcctacaaaacagagggccaatatgtcacttactcggcacatgatgagaaatttctgtgcacttcaaactactccctccgtctcaaaatataagaacatttttgacactttgcaagtgtaaaaaacgttcttatattttgagacggagggagtacaatacaaatagtttgggtttatctttccatgctttgttgccaacttcattaagaaaaagtactccccaattaggcatgggtaactaacgtttccttttgattttgtacggtattttctcctgtagttgaattccttttcttctctcgatacatactccatatgcaagatcgggagaaaactgcaccgc

SEQ ID NO: 436978 - DNA, 423 bp, Triticum aestivum
gggatgcacgagttcttcgtccacttccacggacccaaagacagtatttaccagggtggtgtgtggaaggtcagggttgaactcaccgaagcttacccttacaaatccccttccattggcttcaccaacaagatctatcaccccaatgtcgatgagatgtctggttctgtctgcttggatgtgatcaatcagacatggagcccgatgtttgaccttgtgaatatctttgaggtgttcctgccccagcttctcctgtacccgaacccctcggaccccttgaacggcgaggcggcttcgctcatgatgcgcgacaagaatgcctatgaaaataaagtcaaagaatattgtgagagatatgccaagcctgaagatatatccccagaggaggaagaagaggagagtgatgaagagctgagcgacgcc

SEQ ID NO: 436979 - DNA, 491 bp, Triticum aestivum
acgcctgcccgtacgggcccgagattcgcgagtcgacgggacagggcacgaatacctgcagcacgagaatttcatggaatgagcagtcagttagtcaaggcaatgccgagtcttatttttacaaaagtccaggaagacaattgtacttcgtcaacatgtgccatttgcttggaagactacagtgttggtgaaaagataagggtgctgccttgtcgtcacaagttccatgctgcttgcgtggacctgtggctcacatcatggaggacattctgccctgtatgcaagcgagatgcaaatgctggaatgtcaaatttccctccatcagagtctacccctttgctttcttctgctattcccttgccagctgaatcgacagctttgtcttcttttcgttcaatggtagcagcatctcctccaaggacaataagccggcatccttcatggcagtccatgtcccgcactaactccaattccagtatcctcacatcccg

SEQ ID NO: 436980 - DNA, 804 bp, Triticum aestivum
ggtccacgggaatgttactatctacaaagctcgacttgtcgcaaaaggttttcgacaagttcaaggagttgactacgatgagaccttctcacccgtagcgatgcttaagtctgtccgaatcatgttagcaattgccgcattttatgattatgaaatttggcaaatggatgtaaagactgcattcctgaatggatttctggaagaagagttgtatatgatgcaaccggaaggttttatcgatccaaagggtgctaacaaagtgtgcaagctccagcgatccatttatggactggtgcaagcatctcggagttggaataaacgttttgatagtgtgatcaaagcatttgggttttatacagacttttggagaagcctgtatttacaagaaagtgagtgggagctctgtagcatttctaatattatatgtagatgacatattattgattggaaatgatatagaatttctggatagcataaaaggatacttgaataaaagtttttcaatgaaggacctcggtgaagctgcttacatattgggcatcaagatctatagagatagatcaagacgcttaataggactttcacaaagcacataccttgataaaattttgaaaaggttcaaaatggatcaggcaaagaaagggttcttgcctgtgctacaaggtgtgaagttgagtcggactcaatgcccgaccactgcagaagatagagagaaaatgaaagatgttccctatgcttcagccataggctctatcatttatgcaatgctgtgtaccagacctgacgtatgcttagcaataagct

SEQ ID NO: 436981 - DNA, 474 bp, Triticum aestivum
gggagaattaaggccaggcagatgatgtctggtgatgaacttatgatgtctgcggaaggtcggagctttgtggatggtggcatgaaggagatagaagctggaggtggaggatacagaagaggggcaaatgatgacttcatggtttatggacaggacaactcaatggacaggaggagctccttggacccccttgccgaggcgcattacaagagacccactcctctagaggaaaagaagaatgtgcacagtatgggcgatgagtccttcatgatacctgttacctccaactcacaggataatcttggagcagccggccgtactgccattgacatagatgccgagcttggctcaagtgttcagaaaacatcagatgctaaggctggagctgaacttttctatgagccagatgagttgattccagagcgtggatttgaaaatgtttcatttggatatgacccatcaatggactatgac

SEQ ID NO: 436982 - DNA, 634 bp, Triticum aestivum
agctttagcacgatctctaagcgaaaaaggaaatagcttcaatttaacaatatcattatccacatctttattcttttgcatgtcgcacaaatcaacgaagctatttagatgggtagcggcatcttcactaggaaggctggaaaacggatctttcatgacaagattcagccaagcagtattaatttcacgagattcagcatcggtaagaggagcaatcggagtgctaataaaatcattgttgttggtattggtgaagtcacacaatttagtattatcttgagccatcgtgacaagcaagcaaactaacacacaagcaaacaaaaagcaagcgggcaaaaagaggcaaatggcgaaagagagggaggatagaaagagagagagggcaaataaaacggccggggagaagtggcgcagcatgtcggatgaggagaaggcaaagtatggcggcaagaaggcagatgccccagcaagcaaggtggtgaacaagaaggagagcaccagctccaagaaggccaagactgacgctgacgaagaaggttctgacgttgaggatgatgccgaggaggacgaggagtaaatagtagatgagggaacagcagcggtgcaaatcagcgtttgctgcttaaggtttagc

SEQ ID NO: 436983 - DNA, 435 bp, Triticum aestivum
gacggcgcaaacgagtggagttgatcccttggtgcttgcccaacacagccaagaggcacaaccagtggaaaggcctgtatgggaggttggactgggagggcaacttccccacatccgtgacagatccccagccaatgggcaaggtcggcatgtgcttccaccctgatcaggacaggatcatcactgttcgtgaatgcgcccgatcccagggcttccctgatggataccatttcgctggcaacatccagagcaagcacaggcagatcgggaacgctgtgccgcctcccctctcctatgcgctagggaggaagctcaagcaagccatcgacgccaagcctcgactggcttaagttcactgcactgcatgatacaagtcccgtcattttttggttggtccgagtgggacttaattcatcattggcccctatatgtatg

SEQ ID NO: 436984 - DNA, 305 bp, Triticum aestivum
cgaggttatggggtacctggaggccaagcaccacctgctgctcttgtctcacccataactttgtttatatgcctagtttcaagtgaacttgtcatagcttatattgttgcttttgtggatactgctacccgttgcttcaatgctgccttaacttgttagcatgttcatgtgaattggctaactgcttcctgttaattactactactcactgccgctgtattctattggcacgaactctgctgcccgtgtattatatatattcttcttgctcaagcacaagagcactagtgcaaaatacagatcat

SEQ ID NO: 436985 - DNA, 436 bp, Triticum aestivum
cggtctagcattcccgggccgacggggtcgcagacttggttaaggaaggagatcaacgaactcgcgcttaaaagatatcttcattttccagcacgcttcggattcctggagcgttgcaagatcacgctcaagtccgtggagaggaacaagtcttgggaggtggaaggtgtcaactaccatccaggcaccagcaggtcttataattgtcttacgagaggctggaaggccttctgtaaggagaacgagctcaaggcaggagacatctgcaccttcaaagtcatcaacagcacgctgtggcatgttgtcatcgaccgctgctagaaatacggttcacagatgatcttggctgatggcggacctgctggttttgcgaacctaagtagtatcatgatgaatattgtggtgacatgataatccacctgctaggagtttgtgt

SEQ ID NO: 436986 - DNA, 398 bp, Triticum aestivum
ggtctagcattcccgggccgacgggaaagggaaagggggcggaaaagggaacgccaaagggtttggtaaaggtaaaggaaaaggcaaaggcaaccccaaagggaggggtaccacgcgattatctggccacaagaaacaaatattgtatgctagataccagcaggaatacgaagtccgcgtgtctgatatgtctgcgtgcttgttacattaacctagaccgggtccctggtatcacttcagttttgtttcacttctattgtgatagccggggatctaaccgtgattttgccacatatatgtaaccgcctttgttgtgacgacaagtaaccatgggctcaatttgatttgcatccagcattccacacttggttctactgccaatatacatctcaagctga

SEQ ID NO: 436987 - DNA, 478 bp, Triticum aestivum
caggtactagtcaggaatgcccggtcgaccgggaggttggtcagctggattcgtatgaaattgaaggaggtgaaacaaaatcagaaatcctgcagaatcttaccgagttccagttttcttgtgttatgtataatgctgttctagagaatgcgtgcagtgagcttggtgcccgtatgtctgctatggacagctccagcagaaatgccggtgaaatgcttgaccgtcttacactgacatacaacaggacacgtcaagcatctatcactactgagctcactgagatcatatcgggtgcctctgctcttgagggatgatgatgaaactttacgctatcatcttttttatttttctgttccaatgaaggccacttctaatctaaaaacagccttttgcattctcctgtgagtggatctgagcatcaataattagcctgaatacgggacggatatgccttgtggcgctatcaaccttgctttgt

SEQ ID NO: 436988 - DNA, 421 bp, Triticum aestivum
ggtcgacgggatcaagatatccggggagaaatccatggtggggagtttgtagattatataaccaacgaagaggctcggagtcgccgccgcggagtctaactgtcttgtgacgaaaggcggtgtccacccccaaactgtataaaagtgaggaagattggtttagtagtgcaggaattatggcgtggcgtggcatggcgcatccaccggtttttgtcgcagcggatgtcgcccccctgaagcagcggctttgaatcgcagtcgggagtttgctaggtccccccctcttttgaccccccgaactctgtacagatagatgtggggagttgatgatgactggatgatgatgcttttggtttggttttctgtaaagaacaccaattgtacagtcggatggatacttgtgctagttctgcatgccttt

SEQ ID NO: 436989 - DNA, 630 bp, Triticum aestivum
agattttcccgcccacctcaaaattttgtgacactggactccccgtgtggcgtgttgagtgattcggctaagcaactagcgagtagtagtagtaaactctgcatattaggtttgaccgaagtcaaacttcctaaagtttgaccaagtttatagaaaaatataaacatttaccataacaaatatgtatgatgtgaaagtacattcaataatgaatctaatggtatttatttgttattgtatatgttaatattttttgttataagctttctgagagtttacaaaacttgactttgaccaatgctaatacgcggacttaaataaaaacggagggagtacacatttgttttcttagtttgtagtgaactaatcatttgttgaaattgtgaaataaatatattaggctattgacttcgaatgtaatggtctatacaattcaatagttacaatcattgtcgaatcccaagatgtatacaaggtctatagtacttcataacatgctcaaactcacacacacacacacacacgcacacacataaagtaaactagaagaccattctctcatgtatacacaacgtatcggcatctgtgtatgtctcactcatgcatgatcatttgcacattcaaacctct

SEQ ID NO: 436990 - DNA, 501 bp, Triticum aestivum
agagtgtgtgtgtgcgagatattgagggaaatcaaacttatgatgagaatgtgtgtgtatgtgatggatagaactaaatatattagggtactgattccgaatgtaatggtttctacaattcagtacttagaatcattgtcgaattccgagatgtatacgaggtctatagtacttcacaatatgctcaaactcgcataatcccagtcaaatgaaaatctaaatgcgtctcatagctattactttgtaggatgcaacaaacccaaccataactcttcatgatccattataaaagcaacattttgaaacacatcccaatgtgtgaatgaaatgtggagagagagctcgcgaagatggagcagatagggcgagaaagattgcatgtatgcgggcgagagagtaggagacaaacctaataagagagagagggggggagaagttaggtctatgagaaagatggagacatgtaatatacgtgagatgcatgtgcattcggattttgta

SEQ ID NO: 436991 - DNA, 430 bp, Triticum aestivum
cgggtcgacgcggtacaattcaatagttacaatcattgtcgaatcccaagatgtatacaaggtctatagtacttcacaacatgctcaaactcacataatcccagtcaaatgaggatctaagtgcatttcatagttattactttgtaggatgcagcacaaacaaccatggctctacatcagccattatagaagcatcattttgccatatcccattgtgtgaatgaaacgtgcagagagagcttttgaagatggagtagatagggcgggaaagattgtatgtatgtggacgagagagtaggaggcaaacctaacgagacagagagaagcgagatagatggagaaagagagaggaagaagttaggtctgtgacaaagatggagacatgtaatatacatgattcggtatacgtggaaggagaagagaccacatg

SEQ ID NO: 436992 - DNA, 1147 bp, Triticum aestivum
gatatcgtttcgtccccaaaggtgggacattccctaccgaaaccatcgcttgttgtgagaagctctggtttgcgagaagcatataccccaacctgccccaaatgggacaaaaaatttaccacggcatgttgatgccgctccatgatagcatgccaagtttcatgaatttcagacgagttttggatttactagaatttaaaaaccaggcatctcaatgttttgccggcaatcaacggtgccctggtgtttgaaattcattcccatttcttgcatgggacctaagcatgcacccaaggacacagatttgatttttcaaccaatttatatgcactggagcatgtgcatgtagttcaaatttgaattatgcacataaatgcattgaaaactcagttaatgcataaaaatgtccaaacgaaccccgaaaaatcacaaaaattcacacaacactcctgttgttctatgttgacacgagaaaaaaaattgaaagcaataagaggcaatggatatcgtttcgtccccaaaggtgggacgttccctaccgaaaaccatcatgcttgttgtgagaagctccggtttgtgagaagcatatacccaaacctgccccaaatgggacaaaatttgtaccacggcatgttgatgccgctccatgatagcatgccaagtttcatgaatttcagacgagttttggatttactagaatttaaaaaccaggcatctcaatgttttgccggcaatcaacggtgccctggtgtttgaaattcattcccatttcttgcatgggacctaagcatgcaccgaaggacacatacctgatttttcaataagtttatatgcactggagcatgtgcatgtagttcaaatttgaattatgcacataaaatgcctggaaaacccagttaatgtatgaaaatttacaaacgaaccctgaataattccaatttttttgacgacacacctatagttgcatgttcacttcagataaaagttctaacaattcaaacaccatcctttgtagcagtgaccccattacgtaattcaaatgatcaagacgataaatcaattagatcacagccagtttattatcaccaaccacgtgagatgcagcacaaaatatcttggagcaccgtccgggtatagtacgcccaag

SEQ ID NO: 436993 - DNA, 688 bp, Triticum aestivum
tatggtagacattggagcatgtgcttgtagttcaaatttgaattatgcacattaaatgcccagaaactcaattaatgtataaaaaaggcgaaacgaacgcggaataattccaaaatttagcacgatacttctatttggtctaatctgcctgtgcaaaaaaacttaaggcgggagaaggcagtgtacgtatgtcgtttcgcacacggaggtgacacgtcccctctcggatccacgggccttcttgagggaagctccggtttgcaagaagcttacaccaaagcttgtcccaattcggccaaaaaatttaccacaacatgttggtgccatgtcatgacaccatgccaagtttcatgattttcaagcgtgttttggatttacaggaatttagaaaccaagtttctcaatctttccggccgagccacgacgcccagatgtttgaatttcattcccatttcttgcatgggacctagaaattcacccaaggacacacatgtgatttttcaaccaactttggtgcactggagcatgtgcttgttgttcaaatttgaattatgcaaattaaattcctagaaaacaaattaatgtataaaaaatgccaaacgaacccggaataattccaaaatttagcacgaaacttcaatttggtctaatatgcctgtgtaaaaaaataaagcgggagaaggcagtg

SEQ ID NO: 436994 - DNA, 715 bp, Triticum aestivum
gcatgccaagtttcatgaatttcagacgagttttggatatcctagaatttaaaaaccaggaatctcaatgcttgcggccgagtgacattggcagggtgtttgacattcattcccatttcttgcatgggacctcagcatgcaaccaaggacatagatttgaatttcaacctacttatatgcattagagcatgtgcaagcgtagaaaactcaattaatgcataaaaatgatcaaatgaaccccaaaaatacaaaaaaattgacacaagactcctgtttttctctgttgacacaatagaaataatttgaaagcaataagaggcagcggatatcgtttcacccgcaaaggtggggcgttccctaccgaaaccatcaggcttgttgtgagaagctctggtttgtgataagcatcttcccaaacctgccccaaatgggacaaaaaatttaccacggcatgatgatgcggctccattatagcatgccaagttacatgaatttcagacgagtgtcggatttactagattttataaactaggcatctcaatgtttgtggcagggtgtttgacattaattcccatttcttgcatgggacctaagcatgcacccaaggacaaaagatttgatttttcaaccaatttatatgcaccggagcatgtgcatgtagttccaatttgcattatgcacataaatgcattgaaaactcacttaatgcataaaa

SEQ ID NO: 436995 - DNA, 680 bp, Triticum aestivum
tttgcagataaggttttccctcgttcatccttttctcccacaagatcttgatcttccgtgcaatgcacgggcatcttgctagtactcctacaatatgtgtagcattgtgaaagttcatatacaccagccgagctttatgtcagacacgccagattgtcactacagttcgtacttttgtgggacagaaagataaacgaaacccgatcctgaacctattctaccggcggtgaccaacgtcctccatctgcgatctctatgtacgggggcggggttcaagacccgtgaagtgaaggtgcggtctccggtgaggaagagtagaacacgggatacggaccggccagttggcacaccatgccctgccgcctcccatgccctactcatcctcggaggagttcccgaccattggacggcgacacgttggacggcggcaagtaggacgcgtggttgacggtgctcccgtcgccggctaccagcgtggccactgcttgtgtggcgacttgagcgagggcggcgacctcgagctccatccccgaagacaagctctcccatagagcgtttgtgcttgcggtcatggcagatgtggttccaggtaggaggacgatgcgctatggtgtggaggttagctgggtgttgccgctttaagtagcgcattccggtgaggccaagcgtcctggtgcatc

SEQ ID NO: 436996 - DNA, 447 bp, Triticum aestivum
attcgccggtccacgggaaagatttcatacaacacccacggttcaatattgaagtgttcctgaagaggatgcaggacggacggtcaatcatccacaggcactggcctaaagttgcaaagaccttcaacatgaatgaaggctcaatattcgccttccgcttcagcacttttccagatgagatgcatctgtctatataccgtctatgatgctaatttcgaaaggttctacatgttgcatgtgaaacttgatgctggtgcagttgtgtaatggggtagctgagtgctgaagctatatcatgttgtactctgatgtatttcaattatgaaatcctgcttccttaatatggaaatgaaatatattatgtgcttaatatgaatttcaattagattaaaattgattattgataatagggcaattagcctgctaattgggtattcccctcgcccc

SEQ ID NO: 436997 - DNA, 440 bp, Triticum aestivum
  unsure (1)..(440): unsure at all n locations
ccggtccgagattcacgggtccacaggaatcgtcgatgtcactggatctggatttggccaggttcctggcacatggcacttcaggtgcacgatccttccgcaggaggagaagatcccggcaatcatctcccgcttcacggtgttccatgagacgttcatggcagagtaccgtgactaaactggtgtaacatgtgtgggattacatgcaagcctcatggattttccctaggcgtttttgcccgcgttgacagcagtatcctgtagatgagacaaaataaagcaaatccatggcttgtgtgtgtgatactatatcagattaccagtctgatgcctttgatggcaaattggcaactgagaatttttatttccacanaananannnnnnnnannnnnnnnnnnnnnnnnnnnnnnnnnnnnnnnnnnnnnnnnnnnnnnnnnnn

SEQ ID NO: 436998 - DNA, 458 bp, Triticum aestivum
gggccgacgcggagacaaacaacaagcttgaagggattcctggtgttctctttgtgctccctgattcctatgttgaccctgaacacaaggactatggagccgagctgtttgtgaacggggagatcgtccagagatctcccgagaggcagaggagggtggagcccgtgccgcagagagcgtcggacaggccgaggtacaacgacaggacccggtacgcgcggcggagggagaaccagcagcagcagcgatgatccatcacacgaacgaggccgaggccagagccagaggcaacctgctgtgcctgtttcaccccctcgacataccgagtacttgttattgctttggttttagtaatccgtttcgtgttgccactctgttatccgtatgtatttgaccacttgggacttgagactaagaatcttgatagcataaaagaattttagagccgaaaacaacgg

SEQ ID NO: 436999 - DNA, 768 bp, Triticum aestivum
gagttcactgaggctgagaagaagaagatcatggcaaatgaacgcctcgcagagatagctttgacagatcctaagagggtcaagaggattttggcaaatcgccagtctgcggcaaggtcaaaggagcgcaagatgaggtacattcaagaactcgagcataaggtacaggtcttgcagacagaggcgactacgctttcagcacagttgacaatgatgcagagggactctggaggacttgcgactcagaacaatgagttgaaaataaggctgcaagcaatggagcaacaggcacagctgagagatgctctgaatgaagcactgacgggtgaggtccagcggctgaaacttgcaaccggtgagattacggatgctcgtatgtcgaaggcgggtctacagcagcagatgaactcccagctgattcaaatgcagcagctgcaaatacagcagcagcaacagcagcagtcatcacagacgcagcaggctcagcaacagcaacagcagcagcagcagcagcagcaacagcagtcgcagcaatcagcatagaccaagttacaaagaacctggatctctgtagcagaggagaaacgcgaatctagacaagcatgatgagttgaaggatggtgatcgtatgtgcgagcggagagaaaataatatcttttgattatatcagacaggttgtaggattgatagcagtggttgggcaacggatgctgcccgagttcttttgtttaaggtggtcagcgtggagcatggtcgtcgtcgtaccgt

SEQ ID NO: 437000 - DNA, 461 bp, Triticum aestivum
cgaccggttttcacaaatacgatcaatagacatgaagaaagccgggatgcaaaggatacacaaaatatggaaacttcgggcaagtttgttgatcataggagcattgagacgcagacaaatccaattgatcgttctatagcactcttactttttcatcagccatcagaccaagtggctggagctgttgacaatcctcgccactaaaatctcataacgagaaccacaaggcctatgctaaaaactaggttggttaatgttgcgaaaattactggagatggctcgtggagattcaaggatcgcctagtcatatattgtaatcatcatctccgtgaatgcacgagcaatcgtgaatgtttatccgatatggtacggtacgtaccgttttaatcgttagtcggctgcaaggaaaaaaaaagtacaccagttaaccagccagctgtgactgttggtaccatattgtg

SEQ ID NO: 437001 - DNA, 433 bp, Triticum aestivum
gctaactatgtatccaagggagtaatagggaagctctaccgggaaattaagaagcagaaccctcacattggccacttcacaaaggatgtggcaaggcggtcctatgacactgatttgatagttgatggctaccaagactacattaccgaagctgtgtggttcaaggaacagtatgacttcaagctgggtaatctgatggagcactacggaataaatagcgaggctgagataataagtggatgcattcttaagatggcaaataattttaccaagaagaacgacgccgatgctatcaggctggcggtgaaatctttgcggaaggaagcaaggtcatggttcagcgagatgggttcagatgagggcggaggtggtcacgaagcctcggacgccaaggcatccgcttggtatcatgttacctatcaccctgagtact

SEQ ID NO: 437002 - DNA, 547 bp, Triticum aestivum
gcctacctgcattacatcttcggcgaggagaacgagccggagcaggtcggggagcaagagcttcatcggccggtgcaggcaccatggcccatcggcagcgatatcggcgtgacagtccttgggcgcacaatcgacatattgcagaggaggtgtgatgagcagtttgccatccaccatgcaaaagatccagagctgctcggcggcatgatcgacgacccacccgaagagccgccgtcaccagtgctcatcgagagcctgatgccccgcaaggaatgggcagaggacctctgcgattcagtcaagacacaggcagcctgcggcttcatcattgcccgcggcggccgtgtcaacctcgatcccgatgatgtggtggccaggctcgagcgcatccttggcggagttgacgtccccgacgaagtagaacatcgccaacatgatatcttgaggatgcaggtgatcgacggaatttgctaccaagcgagagacatggaaatggagcggtcccgcggagttgtcatgcgcgtgattgcacgctatcaagctcttc

SEQ ID NO: 437003 - DNA, 411 bp, Triticum aestivum
ggtcgacagctatcgctacctcttccaagatgtcgaagcgagggcgtggaggttccgctggaaacaagttccggatgtcgctgggtctgccggtggcagccactgtcaactgcgctgacaacactggtgccaagaacctgtacatcatctccgtcaagggaatcaaggggcgcctcaacaggcttccttccgcctgcgttggtgacatggttatggccactgtcaagaagggaaagcctgacctcaggaacaaggtcatgccggctgtcatcgtcaggcagcgcaagccgtggcgccgaaaggacggtgtcctcatgtactttgaagacaatgctggagtcattgtgaacccatagggagagatgaaaggttctgccatcactggaccgatttggaaagacttcgccaacc

SEQ ID NO: 437004 - DNA, 655 bp, Triticum aestivum
gtcaaatatgttagaggagttgctgtgccgttaggaaaaactaagtctcttgttgagagatttgaaaagagagagagctctagcattgattgttcatcgccaactggctcttgtggtgatcatacagtgaaagctgatagccctcccaccagttcggcagaagcaagtcgcacatatgaaagggacttgccaacagtggacgagatgacgactccaatcgatttggtgcggaaccatgatgaatttataaatgttgtaaaatctcggttgacaaagctagagatggtgcggcatgtctttaacctaaatggcatcaaaggagcaattgctgcggtcgcaaagttgcctgatatcgctgttcaagctgatgtggttagtactctcaagggaaaacttggtcttttcaacctagatattttctcaagccttctgcctgttcttgccgggttactgaacagcaaaactgaaaggcatgctattgttgctttggagatgttattggatcttataaagatttttggaccggttattcattcaacattgtcaagtagttcacctgttggagtagatcttcaagctgaacagaggttgcagcgttgcacccggtgttttaaccatttgcaaaagattgtgcaagctctacacccgttgatga

SEQ ID NO: 437005 - DNA, 413 bp, Triticum aestivum
tcccgggccgacgggacactctatcatcttctgccaacaattggactccttccaacgggggcggccacgcttcaggctactcaaaggaggctgacccaaccacagcttgaaagctgaagcactaaccacaacatcaacatccaacctttttgacatttgcaatcccagttttcacattaccatcctttcccacctctttttgcttgtggtgttttcggagtctgtagctatttagtactttctatgtcgtgggctaccagaggctccctagaggctgcaaattttgtcgctgagtagaagcaagggaacggacggagggtgctcccagtttctcctgagcctatatgcgtgtattaactgaaggccgtggaaggcaaaactcgtggggagctctctgagattttggactgtaa

SEQ ID NO: 437006 - DNA, 405 bp, Triticum aestivum
atgcaacacacacatgcggaccttctgcaacatgtaggagcggctcgggtcttgcgtgcagcggcggcagcaacatcagcttccattgaggccaaagtgttcgccagaattgtccttaggaatctggaacaccatcaggcacggacttcaccctgaaaacacaatggcgagcacaagcgcgactaattctccaacagggtacgacttctaacctttggccccagaatggatgcaaactcgcggttaagttgtcgccggcatttgaagctgccgcgcaagctgtgaccttggcacttccaccttggggagaactgtcagaagagatgaatgaacgttcaaccggcagctgttgagtgtgcaattttcctgttgtttgtctgatgtgtaaaagtaacttaaaaagtg

SEQ ID NO: 437007 - DNA, 414 bp, Triticum aestivum
ggggaggacgatgtccagatcgcggagcgggctgtccctgaagccgtgtttggcgagctcggcaagagagccgcggagagcagggaggaaagctccagtgctcaagagaacaacgagcagcagctgggcgctctcgagagaatcaagcgaaggcgtcaatagggtcgaagattgtgatccaagcacgccattacctgtcgtttgagcctaatgatgttgtagctgttacgtgtaaacatgttctttgctagcgtttgctcttcttgtacaaggattttgcaggagttaatccggtgtggatccgcagcgtttttctgtgtacaaactgtaaactcttgggacacgtgtccatcagtttcagtgaaattttgtcgatttcaacgatgaacaatggactggcagctttgttacaaa

SEQ ID NO: 437008 - DNA, 324 bp, Triticum aestivum
gacaagtatcctcacatgctatcggtgcggaactgcttcatcaggggatctgtggtgcgttacgtcctgcttccgcaggacggggttgacatcgacatcctccatgacgccaccaggagggaggcacggggcggctgattgatatagtttattcccttttctcggccgtgagataattctaatctgatttgtggaactggaacatgtatggactgacatcggcattgcttaactccgctcgtggtacacttgcagtgcaaattatccaatgttacatatgtcaatgtgctattatcaaagagcaacaaccaagcattgccatgc

SEQ ID NO: 437009 - DNA, 356 bp, Triticum aestivum
cgggtcgaccggtacgacgacgaagaagagtagattggtgggtgtctcaagatatctgcacttccagatgtgctccctttaaagcagtatctgttgtcttcccaatattgttgactagaaagtaagtagggcaacaagtaggagaatttaacttggctgtgttttcaaaagaagctggcgcacctgaaagctgattttgcatgtttttccccatgcatgtatgtaagcttccaataaggaaccaacccatgatcttattggtgatagcattatcatcactaggtaaggtttatgatgtggtgcttatttgctttgtcagaatgaatccattgtgaaagagatttgcaaaacaaaaa

SEQ ID NO: 437010 - DNA, 481 bp, Triticum aestivum
gggtcgaggcacttcgcgaatggaagcagtattcacatctagcagcacggcaacagatcggttttttttctttttcttttcctgcatgtgttcttctttccttttttttattttctgtagtatggatctatctctctgatcaagcaagaagagatcggcagctccagcgacacgacgagccgtcgccgggtttttatgaagggaactatttggggtcgcgcggaagcaaaattagctagggtttattagtgctgctctagttccgcttgctattcctttcgcttgttcgtttgtttctttaaggattttattatcaaggttgtaaggctggggatgtgcagctagcttcagattcaagcctgccgtctcgcctgcttgtacattgtaaaacagaaccgctgctctccagtgactgaatgattataagcagctactgtagtagtatttggggaaaaaatatgtaccaaactgttctgatctg

SEQ ID NO: 437011 - DNA, 422 bp, Triticum aestivum
cgggccgacgggaagagggagccagctcagaccaaaggcatgaggcagaaagtgatggaagaaatattcaagcctactgatgacagcaccctcagtgctccttctcctgagaagaaggtgcgaaggatcagagactcccccttcaacaagaagagcggctcggttctgcacagaatggcgagcgcttcaacagggacagaagatggtgaggctcctccctccggcagctctgccgagccagttgcaccgagaaggacaacaagggagaggaaggcggcagtagtctacgtcgcttccgagagtgaagacgatgagactgaggatgaagatgtgtcggaaccaagcgatgatgacttctccgaagatgactagactccttggctcaaccgcccaaacattgcgtggagtaaagtgactagtgt

SEQ ID NO: 437012 - DNA, 320 bp, Triticum aestivum
atcaagatagtcttctacaacccctagatccagctgatgggtgtgtttaataagtttgtagctcggtgatcctagtcgtattgcagctgctagttagttaatcatctgctccaacgagctattgtcgtgtcgtgtcgtcgatttgctgttcaattagtaggtgcgtggtgaatgtgtgactagagatgtttcattgtcgtgcaatgaactgcatgtcgtcagctctgtgtccgtccttggtgtgttgtgtgtgttctagtttgaatctactttaaaatttggctgggtcatggaactgttgttttttttttttttttttg

SEQ ID NO: 437013 - DNA, 468 bp, Triticum aestivum
ggggccacgggaggaggttcagcgcggagttccagctcgtcttccgtctgatcaaggggctgatattcataacattcatctccatcatcataatcttaacagcaatcgcccacatgacagtccttgacatcttcgtctgcatcctcgccttcatgccgactggatggggcctgcttctgattgcccaagcgatcaagcctgtcgtcgagatggtcgggctgtgggggtctgtgaaggctctcgcccggggctacgagatcctcatggggctcctgctgttcacgcccatcgcgttcctcgcgtggttccccttcgtgtccgagttccagaccaggatgcttttcaaccaggcgttcagcagaggcctgcagatctcccgtatcctcggcggccacaagaaggaccgagccacccggaacaaggagtacgtagaaagaagatcaaggctagctcccgcggactttgttc

SEQ ID NO: 437014 - DNA, 436 bp, Triticum aestivum
atcccgagtcgacggggtgatcctatggctcatcttgtcaagcgcaaagatacagactttcttctcaatgacttgggagatgatgaaaagatgaaggaatctggatttatagttcctcaaaatgtacctgctcacagctggctgaagcgtggggtagatcctcctccaaaccgttatggcataaaaccaggccgtcattgggatggagtggaccgcagcaatggatacgagaaggacatgtacaagctaaagaatgacaagcaggccacggagcaggaggcctacctttggtccgtcgcagatatgtgagcgccgcagctgtcccaagaacatgtccgatggcatgctggctggatcagttgctgaggttgcccactgtgcctgaaaggaaaggaagcgatgcccttgaacatcatttcttcgaacacatgatgac

SEQ ID NO: 437015 - DNA, 436 bp, Triticum aestivum
gggtcgacgggtgggattcagcttccttcaactgctcagtctaaacctcagagtggtgaggtggtttctgttggagagggaagaaccattggggatagcaaagtagaagtcggcattaaggttggggctcaggttgtatattcgaagtatgctggaatggaggtggagttgaatgattccaaccatctgatcctaaaagaggacgatatcataggtattctggagacagaggatgtgaaagacatgaagcctcttagcgaccgtgttcttatcaaggtagctgtagctgaagataaaactgctgggggcctgctgctgactaacagtgtccaggagaagccatctgttggaacggtggtcgctgtcggcccgggctatctggacgaggaaggcaagaggatcccgttgccggttatcaaaaggcaattccgttccg

SEQ ID NO: 437016 - DNA, 409 bp, Triticum aestivum
gggtcagaaaactgctgaagaagcctctctgctcaccattggcgctttccgtgggaagtgatagcaatggaagcggagctgtacctcttctgaaaattgcaaggatcttttcacaaatctattcaagccttaagaccagaagcaagtttaatcttctcgttggatgaacatctggctgaccctacaattaaaatggaactagcaaggttatcaattttttttacagcggcttgaagttttgaccaacatgtgcgtgatattattgactatgcaatttacttaagtagcattagttcctagagcaatgatctctggatgcatgtatcaaagcctccagagaagccttacatcaagcaaatctttgaggatttttcggatgtctccaaggaaatgggcatttcagtcgcac

SEQ ID NO: 437017 - DNA, 418 bp, Triticum aestivum
gggtccacggcgatttgagtagggacattgaggatgatgatgatcaggcctgaaaagccattctggtatggtagtgtcgattgtattgtctacattttttatataccattacttgtgcaagataccatcatgtgaccaataaacattgggttagttgcgctgcttatgtgatggatacgtgtgtaaactcaagtttgatgttataaagtggcatttggtaatgcatcatttggctataatttaaaacgagtgtaaaaattgaacataacacaatcagaagaaaataaaagcgacaaaaaaatttgaaaagtttgaaataaaacggggccgcccaaagggttcaagccttagttacccttaaatgcaatttaaaacctctccaaaagggcccccaaatttcattccaggggccttcttt

SEQ ID NO: 437018 - DNA, 494 bp, Triticum aestivum
  unsure (1)..(494): unsure at all n locations
gcggtccgtacattcacgggtccccgccggctagcggatggcgctagggttcgtgcgagagtggaagaagggataatgaccgcggtgaggcgtgtatttatagggacaggggcggcactgcgttattacacaggtgcccctggcgattcgcatctgagggacacctggccatcatgcagcattttgggggttgttccacgttcccacgcacgcctggattgtcgggtggtcgttcccacttctccgggtttcaggtggagggatgtggcattgaaagcggacttaaggtttgtctctgtatcttctgctgacaaggacgcagagaagacattcgacagtttcaagagaatgcatatgatttggagagatagagtttgagatagaaagcacagagaggttaaggtccgatcacattcacttagttcanaagattcaacaagaagacatagctataagtgaatgctgtaaaggacagaacactagtatatatatat

SEQ ID NO: 437019 - DNA, 394 bp, Triticum aestivum
cgcgggtcgacgggtacggctacggcgacgggagtcactctttgtcgccgcctgcagattccagaagcctgatgaagccccgacttgtttagttcgctatttcctctgtagtttgaactcaatcgtggaacaaagttattcgcatatattgttggagaaattcatggacagcaacaaagtcagaaaaaaagagaacaataaaagaagaataaagaaccagaaaaaagtcacgaacaacagaaaccgtgtatcaagaatgaagtaaaagtggcaccctcaaaaggatcaatctgtagttatcgttgaaggtaattttaaactttctcaaaactgaaactagaatccagacttaggcctttaggtataaaacgtggaacatggaaaaacctagggg

SEQ ID NO: 437020 - DNA, 763 bp, Triticum aestivum
  unsure (1)..(763): unsure at all n locations
gcggcgggtcattgggtgcgtcggatatggattccctttcgactgcctccaccccccgtgccacgaacgatgctgaggtgggatcccaggaagggatccaccatgaggaggaggccccggaggtgtcacaggacaaactcccggactttgcactggactctgccccggagcccgcggtggctccggagtccggcgggcggccccttcgtaagaagggcaagaccgtgacgccggcggcctccatccaaccgggggtgccggatagcttgctggaggcgctcatcggcgcctccatcaaagaggaacaccgcaccgtcatgagtgcggtgattcagaaggttcagctcgccaagagcgggctgaccgaagcctgcatcagccttttaacaggctttgaggtaagaattttgatatatgtaaaatagtaccgcatagacagtagcccccgatgctcggttcggtgttcggaaagaaaagccggactgaggatcttaaaagatatacgcaggagtcataaaaatatgtcaatatgggattgcaggctgcactgctgacctctgccgcactgactgcggaggtcaatactttgaagcaaaatctcgagcggtccaagaacgagctcggccgtgccaagaagcagctcgaggacaaggaaggtgagtaacaccttattaaaattgtaccttacataaaaggattttggttgaagaatgacaaggataacgtgggaattgcangggccactaacgaggtggtgaccctg

SEQ ID NO: 437021 - DNA, 422 bp, Triticum aestivum
tcgcgggatgagcttcggcggcgccagctccgtcgcggccggtgggaagcggccgttcgagtacgggaggacgcatgtggtgaggcccaagggcgcgcacaaggccaccatcgtctggctccacggcctcggcgacaatggagccagctggtctcaactgttggaaactcttccccttcctaatataaaatggatctgcccaactgcacctacgaggcctgtggcaatttttggtggattcccatctactgcatggtttgatgttgctgatctttcagaagattctcctgatgatgttgaggggctggattcctcagctgcacatgttgcaaatttattgtctaccgaaactgcagacatcaagcttggcgttggtggctttagtatgggtgctgctactgcgctttactctggtacttgct

SEQ ID NO: 437022 - DNA, 407 bp, Triticum aestivum
gggtcgacccgtgagaaattctcatcgtagtcaaccccttgaacttgtcgataacccttagcggcaagccgagccttatagatggtcacattaccatccgcgtctgtcttcttcttaaagatccatttattttctatggctcgccgatcatcgggcaagtcagtcaaagtccatacttcgttttcatacatggatcctatctcggattgcatggcttccagccatttgtcggaatccgggcccgccatcgcttcttcatagttcgaaggttcaccgttgtccaacaacatgatttccaggacagggttgccgtaccactctggtgcggaacgtgtcctcgtggacctacgaagttcagcagcaacttgatccgaagcttcatgatcatcatcattaacttcctccct

SEQ ID NO: 437023 - DNA, 362 bp, Triticum aestivum
agtggatataacgtcggtggtgggtgggaaacgaagttcgtcgtcgtccgcctcccgttcccgctggatgtacgtcggccgagagttccccgacaaggagatagatttcaatgagtttagcacatcgcctagaggtgagtgctggaagatgtccacggagctgaactccaggatcggtgcccaatcaggttcgatggacgccgatgcacgcggtccagaacctatggccgagaccagtccgaggttcccgtagcacaagcccagcttgatgtcgggtctttgtgcggctcgagcgccactaagtctgcggcttccgtggcggggttaagtttcctgtcttcagacgacgcgatctgctccag

SEQ ID NO: 437024 - DNA, 326 bp, Triticum aestivum
  unsure (1)..(326): unsure at all n locations
tcagtggatgatgaagactcggagtattagtcagtccttgaggatatccagagatgaataacgagcccttctgcatttgcaccagagcagtatatctttctgctgtgtggttcttttgagtttttccaatcgagatcaagtgcattccgaagacaattatgttattgccttgtacgcatgtaaaccttgttatatccgagtcaaaatatctctacctggttcgacgnnnnnnnnnnnnnnnnnnnnnnnnnnnnnnnnnnnnnnnnnnnnnnnnnnnnnnnnnnnnnnnnnnnnnnnnnnnnnnnnnnnnnnnnnnnnnnnnnnnn

SEQ ID NO: 437025 - DNA, 418 bp, Triticum aestivum
gggtcgacggcatggtctctggcaactcttgctcgaactcgtgggagcttttgcttgggtcggggtggaacatcttcttcatcttgtccttcttcgtggccttcttcattgttggcgttgtcgttctcttgtcgcggtggagaaggacgttgttgatgttcatcttggtgtgcttcctcattttcttcgtcttggtgtgtcccacttgtggatgcttccgtatcaactcttggttcaccttgtcgtgaggtagaagcttccacttggacggacgacgtactctccttcacctccgttggacgaaccgtgccaatagacaagtcttggattgcttccgagcggtctttgtctcctacatcaattggcaattgctctatttgcgagccgttagattcgtcaaacttcacatctactgtct

SEQ ID NO: 437026 - DNA, 405 bp, Triticum aestivum
gcccaacggggttagtaccattcaaaccaggcaatttagagtccaagagaagaggaaaaccgttaggaaaagtagatgcgttggagacgtatcaaccaccatggaccgtggtgcttccactctaccgtgggcatacaccctcctcggccggtgtcgtccgccaccgcgtaccagggggcttccactggtgcgtgggcatactcgctcctgagccgtgtcgtccgccaccgtggagcatggggcttccactggtgtgtgggtgggagttccctcgagggagactccggggcatgtacagccccgcttgtacgcgtggctagcatggcagaaactggagggaggttgtatcctaaggcaattcgttgaacccaagcgcggggacctcacaaagggccttacctccaa

SEQ ID NO: 437027 - DNA, 369 bp, Triticum aestivum
  unsure (1)..(369): unsure at all n locations
gggtcgacgggcagaagaagaagagtacggtgcccttctgcggctgtgtgcgccccaaaacagtgactgagtcttgattcggagtccgcagcaagcaatgtctttagtatctcttctgtaatgggttgcatgataatgttaacaaggagctcatgcattcggagttttgtccttgttcagaaatgccccctagtttaactagttaatcctactgatacttttatgaatcgaagcattttgtaattccgttgcccttcgctgtttctctgtgtctgcaatgaagatatatgagaatgcttctttcagggatataattttcacccccttttacattaaacacaagannnnnnnnnnnnnnnnnnnnnnnnn

SEQ ID NO: 437028 - DNA, 528 bp, Triticum aestivum
atattgttaagacgggcgtcggtgatcaccaagtttagctgcatgatttcttcataaagctccggaggtaaggaatccattagagcattaaggttggctggtttgcggctgagggcgtcagccaccacattagctttgcctaggtgataatttattccgaggtcgtagtccttaaccaactcgagccatcttcgctgtcgaaggttcatgtcgggctgagtgaatatatacttgagacttttatgctcggtgaatatctggcacttctttccaatcagataatgtctccagattttcaaagcgtgcaccactgcggccaattccaaatcatgagtaggattgtttccttcatgttgccgcagttggcgagatgcataggccaccactttgccatcttgcaagagtacacaccccagtccttttctggaggcgtcgcagtaaacatcgaaactgcggtagatatctggaagagttaatacggctgccgatgtcagtctggtttttaactcattgaagctccgttcgcag

SEQ ID NO: 437029 - DNA, 413 bp, Triticum aestivum
gtccacgggctgaaccacaagacggaaaagaccatcacaattggtggcgagcatggcacggtcgcctgggtggacctctggcgtggcatcttcttttgcgacgtgctcaagaaacgcccactgctccgggatgttccactgccggtgccggcaaggtctaactgggatcgcctcctcataaatgatgaccccggctatttccgggacgtaactatcagccgaaacaaagactcgatcaagtatgttgagttggaattccggtcaatagaagtgctcaaccccgccaccacccctgtttcctacaccgactgggtggcggtgaagaattcctcaaggaaatctcttcatgtcatccgcgatggctggaagtccacaacatggagcatggcaatacccgttggtttgcatgagcg

SEQ ID NO: 437030 - DNA, 409 bp, Triticum aestivum
caatcaaaaaagaggtgcttgatattctcgtcccgatcacagaaactacacctagtacatcctgtccagttgcgcttaatcaaattatcctttgttaaaattacttgtttatgcacagaccacataaacactttaatcttcaaagggactttgactttccaaacatgtttggaactcggaataacactagagttgatgacattgatatacatcgacttgaccgtgaagtctccagacctactaagcttccaacgcaactgatcaggctgatgagttagctgaacctccatcagtctactcactagatgaagccatgtttcccaccggtcaccaacaagcaccctccgaaattgaatattaagagggattgagggagtcctggattaaggggtgttccgatatccggact

SEQ ID NO: 437031 - DNA, 346 bp, Triticum aestivum
gacggggatccggacacccccggcagcaagctcggcgcgctggtgtcacctgatgagtgaaaaatgttgaagactccagcgctgaaatcgctgcagcactggagtggtttccgctgttgttttgtgttgcgtgcttcagtttgagcactactctctccggtggccggatttggtgcttcttgacgacgatggcggcttgttatctcagttgaatgttaaccatgttccttgtttattcagacagcgcctcagataatagaaactgtgtcgtaactgcacagattattagcatgttccatgttctccataagctctgaatcttttgaaaaaaaactggcatttgttg

SEQ ID NO: 437032 - DNA, 526 bp, Triticum aestivum
ggggggctcgatccactaacggtatcggttgcacgagtccacggacggctccacccatcgatgggtccacctttaagcaaccacccacatcgggtctacgcaagaagcaaccacccacatacggtccacgaagaagcaaccttgtctatcccaccatggccatcgcccacgaaggacttgcctcactagcggtagatcttcacgaagtaggcgatctccttgcccgtacaaactccttggttcaactccacaatcttgtcggaggctcccaagtgacacctaaccaatctaggagacaccactctccaaaaggtaataaatggtgtgttgatgatgaactccttgctcttgtgcttcaaatgatagtctccccaacactcaactctctctcataggatttggatttggtggaaagatgatttgagtggaaagcaacttggggaaggctagagatcaagattcatatggtaggattggaatatcttggcctcaacacatgagtaggtggttctctctcagaaaatta

SEQ ID NO: 437033 - DNA, 416 bp, Triticum aestivum
  unsure (1)..(416): unsure at all n locations
gggcacaactcaacacgcccaggtcgttcaacattttctttcgcttttggtgtgtcgcatttagagtcgttctttcccattttaccgtgtttgcatggtaagatgtttggttggatttgaacgttcatagccttggctccaaagcttcaagctcttatagaaattagtactgagggccttttaaaatgagtcctgcataatagtgttgttcagtgggatgcacactgtttggtagtctgatcggctatccttggtgctgatttacgtactgatttcatcatcatatgactacaataaagaagttatgtgtataaatattacgaactgctgatactttgcatcagtgatttcaattcnnnnnnnnnnnnnnnnnnnnnnnnnnnnnnnnnnnnnnnnnnnnnnnnnnnnnnnnnnnn

SEQ ID NO: 437034 - DNA, 412 bp, Triticum aestivum
gagcggtacacggtgccgtcgctggcggcgctggagcacaacctggaggcggccatgcacaaggtgcgctccgagaaggaccgcaagatcggcggcgagatgagctacctcgagaacatgatcagggggaaacaagcggagcgctacggcctgtgtgacaagctcgctcatgctcagagcctcaaggtcgtggaaggcggatccacctcgctgaacaacggcctggacctcaaacttggattcaactaggaacgggtgaaagcttctggccgtggggttctgctctagtgttgctgttgagctcgagtgttatgtcaggttcaaatattctgcaatttccttcgaagggattgtatgaacttgtaagagaccactgtcttatgagatgtttggcttaagctggactgggctg

SEQ ID NO: 437035 - DNA, 151 bp, Triticum aestivum
acgggaaacacaatcatttctgaatttccttccatgttagccagggtaaatgtagtaagtatgcagtctttttctcttggatggcttggataatggctatggtgaaagaactcagttgtaaccatgtctcatgttcttctgaattccatgg

SEQ ID NO: 437036 - DNA, 399 bp, Triticum aestivum
gacccctcggatggcagggaaagggaggaggctaatgaatacgctaggcaagaaatggcagagattgacttcagtgaactccgtctccttgatgctagaccaaatctgccacaggcgaaattttttccttacgttcctaacgaggacgacgctcttctagatgacattcccagcgatgatgatgattttgaagaggaggatgctctgcccatccaaggagaggacttcgaaggggaagccgccgccgccgctcacaagcttgttcctcctattcagtccagctgagaagatgattcagttggtctacctctatctattctatccaattatgtttagcagatgtctctgtcgtggatccgtacatgtgggttggtcgggtctatcaatctgtattaattt

SEQ ID NO: 437037 - DNA, 421 bp, Triticum aestivum
cggcgactgagtattacatctcaggaggttggtaccgtgctagctatctcaggttttggtgttttggtatatcaacttctgatctacccgtcccttgccaagtaggctgggctagtcaagccattccgttcggcaccggtattatctatacttctccttgcaacatatccattcatggctaacctatatggtgtggagctcaaagtactcatcaacatagcctcgcttcttaagaatatgtttgcggctacgattactattgcctgcaacattctgcagaacacagcggtggcacaagaacaaaggggtgtcgcaaatggtatatctgtgactctgatgtcaatcttcaaagcagtagccccagcagcagcaggaattatgttttcatgggctcagaaaaacataactggattgttcatac

SEQ ID NO: 437038 - DNA, 339 bp, Triticum aestivum
attcccgggcggacgggtatggcagctacattagcatcagagctcatgccctctgatgttgcaaaggcgttatggggcaccaccaagagttcctccaagataaataaagaagtccaggagcttttaaagcttacactgagcaaggcccgagtcaagctgactgagaataccattttcaatcggatcgttacggactctaatggctcagatccattcaatggtctctatgtaggagcgtttagtccatatggccccgaagttgtacagctccgtcgaaagtttggccattggaatagtactgatgacgtggaatttttcgagtatgtccaagcggttaag

SEQ ID NO: 437039 - DNA, 385 bp, Triticum aestivum
cgggacggtcaaatactagtaatgatcaagaagtgatcctgaactcctacttacgtcaaacataactcacaagccgtgttctcttcacggactccgccgaaaagagaccatcacggctacacacgcggttgatgtattttaattaagtcaagtgtcaagttctctacagccggacattaacaaattcccatctgccacataaccgcgggcacggctctcgaaagtttataccctgcaggggtgtcccaacttagcccattataagctctcatggtcaacgaacgatattccttctcccgggaagacccgatcagtttcggaatcccggttacaagacatttcgagaatggtaaaacaagtccagcaagccaccccctgtgccgac

SEQ ID NO: 437040 - DNA, 353 bp, Triticum aestivum
ccgggccgacgggaggtccaatagacgacgccgatgatggacagctgcagtggtgtctttgcatctgtaacgagactccggaatgttgttgccctgtgtaaacctgtaacacgaggcgcgggtttaggattgttgtagtcttatgtatcgatttcactgggcaggcagaggcagccatgtacctgtaacacaactccgaatgatttgaactaatgatgatgagcagccgagctacgcttgctggccgctgtgatgagatatgatgagtatttgggtttaaaaaaaaaaaaaaaagaaaaaaaaaataaaccaaccaaaaagaatctaaaaaggaaatggaaacagggaagaag

SEQ ID NO: 437041 - DNA, 419 bp, Triticum aestivum
  unsure (1)..(419): unsure at all n locations
gaccctggtccacttgaaatgcacgcagaactccaagggagagtccccccggtcgtcacgccgcagtaataatgacgaatgagccatcaaatcacaggcccaacctttcccactgtgaagttgctcggacgaaggaaccatcatgacttcgttgaattccgcttcttgaagaaaactactgtaccaactgtcctgctagctacagtagtactgtactccaccagaggcctcctttggttcataggataggaattttataggaatatgaaaatcataggaagtgagatgacaggcatctcaattcctatagagaaagagatgccatttgaatcataggataggaatttttccattgagtctaggctaatgtattggtaatttgctctanaaactacaatagtaactagtactggtacatg

SEQ ID NO: 437042 - DNA, 415 bp, Triticum aestivum
  unsure (1)..(415): unsure at all n locations
ggcgcaagttttcgggtcatggctgactatccacgtccgagtccaccttcagatcgtggagctgttgtgctgtttaactgaactttccttgtcaacaaacaacaggtctcttgggactttcccttgtcgtggagtactagtcgaaacttcttactcttccctttcccttttttttccaatccaatcctcaatactcacggataaccaacctggccgtagctttaggtgagatgtagcaaaagtactacttggtttaacacagtatatcagacaaaatagcagatcgcttcttctcgtaacttgccgcaatgcctgatcatctaaaaacttgaggagactattaatcttgccttggtttctaatgacagaaattgacccggattcgacggatcatatggtcgtancaacgctcaac

SEQ ID NO: 437043 - DNA, 264 bp, Triticum aestivum
gaggaggatgaagacgacgacgaggatgaagatgacgaggaagaggatgaagatgagtagtaagaaagagcttcatgtcctgctcctgccacaccaagggagcaggaagagcgtctattagcttgtcgatttgccagccttgtcttggtgttgttgttctcccgagtgcactcttttgatttctgtgtatcaatgtatgtttggtgtatctcctcctcgggttgcaagtgtattgctcgcatctggctattaatgtttgtattg

SEQ ID NO: 437044 - DNA, 413 bp, Triticum aestivum
aggatggtgtacatgtacccgggccgcggcggcgacagcggcggcatcgacgtggagctggcgctgcagccggagcccatgcagaggctcgagaagggcgacgagttcctgcaggtcgcggctgcctgatcacctgcacgccgctgcctgcaatatttagtgagcttaattaagcaaaggtttgtgatttagccactttcgttgattcgatcttcactagtgcgtgtgtgtttgcttgttactgctgcggatctgttccggctaaataaggatcgatcgattagtttgtgtaagatcaccatcctatttgtcgtgtcatgtcacacaaatagccatgtaatgccatgtagtagcatgtaatccgcctacaggatttgcatatttgtttacacgtactcggctcatcccttctg

SEQ ID NO: 437045 - DNA, 255 bp, Triticum aestivum
gacgggctgatggactctgcagcggcagacgccgaaaaaggcaaggaggaggcttaagaacccaacaaagccgtagcgaccgcatcccgttggctctacttggtttccgcggttgtttaaaccttcagaaccagtgcatgagacatggcgtgtgtccctgtttaacttgtattttcttagtgtcagtgtttgtgaactctttggcagatgatgaatctgttccgcgtgcaaaatatacttttggattcgtacata

SEQ ID NO: 437046 - DNA, 178 bp, Triticum aestivum
cgggtcgacgggacatccaaaattgataataaaactgcatggaacagtcgaagattatagatacgttggagacatatcagttactcttaagatgagtgtttattcacttgtcattgcacaagagtacggcggtaataggaattcccagtcgcaaagtaacaacacgtaggtatgaaaa

SEQ ID NO: 437047 - DNA, 615 bp, Triticum aestivum
ccggagtcgtgctagcccaacagtactgctcatgacacttgactggccggcatgtgtttcacttcgttcgtatgtctgtcccttcggggaaatgtcacgcggtgacttccggagtcctacctagcctgctacagtccgggttccatggagtcctgttagctcagtgctacagcccggattcactcgctgatgaccgacatgctcgatatgattcatgtatgcctgtccccatatgtctgtgccactttgggttcacgactagccatgtcggcccgggttctctgtcatatggatgctagcgacactatcatatacgtgagccaaaaggcgcaaacggtcccgggccatggtaaggctacacccgtgggaataccgtgtctcaggccacacagtgatatgaggtgttacccgctggatcgatgtgacttggaattggggtcggtgacacctttggtatcagagcctgactgcctgtatgattaccaagccaatctggtccatcttgagtctagaaatgctttacttatgtctcggaattgattctggaacggaacctttggctctttttactccttatacctcatggctttcggataggagttagcctcttctctt

SEQ ID NO: 437048 - DNA, 694 bp, Triticum aestivum
gggtcgacgggcatggccatagctcctgctgaaacatgggcagtacggaaagcctgctgaaattgatcccatgtgacagtgtctactggaaaagtggctgtgaaattctcccaccatgatgctgcgggtccttcaagctgatgtgcggcaaacctcaccttctccgcatctgtgcatcctgctgtggtcaactctctagctgtcttgcggagccaatcatctgctactatcggctcggtgctactggaaaacaccggcggattcagcctaagaaaacgggctaagtgatcaacaggtggtggtggtggtgggttgttgttgttgttgttgttgttcccctgattctgattctggactagcaactgcatcaatgtgttctgctgctggatcaactgagtgagctccggtgggaaggtaaatccggggtcacgtctcggaggcatctgagggtttagaaaagatgagatttaagaatagagggggtctaaagagaaaacactacccatatgcacatgaggcaacagcaaacaattcacttcattcaatcaaacaagggcatacaatcggtctaactatcgcaaaagtgctcggactactatatttacatggtggactactactgttggggtggtctactagaaatattcttcggttgcagactccatgatatctgctccagcttcatcaacataat

SEQ ID NO: 437049 - DNA, 687 bp, Triticum aestivum
acggggtccctcaatgaacctgaggggacagagtaagtgctctcaatcatattttcaacacatgacaacattttcttattgtacacaatggaatcatttgattcttttgcaaaaactggattcttcaagggaaagggccttaaaccgaacaacttatcacggtcccgttgaaggatttttggccgggcctattctgcccgcggccagacagggacccgcagcagcgggttttggccatgagctgggtccactacgaggcttgcaacaacgcggagtacgggacgaccgctaaggccgtgatcaccaaattttgggtaagttctcttctgaatcacttgtcttcagtttcgttcatagtttatcattgaatcactcaactcatgccttgtttgcttctggtttatgcatgattgcagcaactctatagagttcttgacgagcacaaggccagagccgacgtggtcttgcttgcggctgtgaagaagaaagctcatcagttgcagtacgaggtgcgctgggttgccgtctcgcagtactaccacatctacctggaacaaaagatgaccaaaactcaagcgcagaggcaacgacttaccttgaacagggagcagttcatgatggtaactattactaacttatgattgtttcaagcagtcaactatatgtttcgtgctcacatgtcatgat

SEQ ID NO: 437050 - DNA, 393 bp, Triticum aestivum
ccagaaagaccattgccggaggcaatcgagtattccttcgaagaaaggcggctggccgtctatttgtcaagagaagtttaagctctctttgcgtaggcgaaagttggaaacctgacggctgttacttgtgagagactggctgctgcctagtatgttggtcgacgacagtcgtccaatgctgttctgattgttcccctctgccacatttgattgtttccatactcagcaaaggaagcttgcgcttcagcagcttccgttcagtactgccattggttagatataattaatgtgtataggtttctttctcggcactgaatcatcttgaatctgtttgattaatatagatcggtattgtgttttatcctacaggagcgcggtcggcgggacagaaaa

SEQ ID NO: 437051 - DNA, 431 bp, Triticum aestivum
gacgggatgccgccggttcgaagaatggataaaggcctcgactcctgcgagtgctgcaggcagtaggtccgggtcggcggttgccggagacgtcgtcgggcggagcagttgcaggctgtttgggttctccctgactgatcacaacgtgccgggaggagcaggtgacggtggtgcggaggaacggggcgcggatgatgaggcggcggattgcgcggacccgcgggtgctcgacctgtttgggcgcggccaccctgcccctgctgcgctgcatgccgtcgtcgctgctcccctggggatgtgatggtgatcctcacctgcgtgcgtcctagtatctgacaattggttttccgttggttgaaggcagacaccatctgtaatctctcacctaagctactcttaaatcctactctacttgacattcaaaaccaaca

SEQ ID NO: 437052 - DNA, 402 bp, Triticum aestivum
gacgggatctgctgaggaaaatgatgatgaggaggatgctctggagaaggaagaggaggatgacagcagcctgaatgaggaagagaatgatgatggtgctgagaacaaggctggagaagaggatgctgtcgtcacaatcgtggttgaggccaaggatgagctgaagaagcctctgaagcgcaagggagctgaggaggaggccaaagatgagaagaagatcaagaccactgctgctgctcctgatgtggaaaatgcagctgaagaagacgccgagatggttgaaaaggaggaagaagaaggtgcccagaaggctcagaagaagcgcaaggggcgtgctggggctgcaggtactgcagctggcggcggtaagaggaagagggccagccctgctgctgctgaaga

SEQ ID NO: 437053 - DNA, 432 bp, Triticum aestivum
ggtcgacgggacaccatataatcagtctgctcattgggacgatttcgtgaaattcaaggattcggaattagctaaggaacggtcgagaataaacaagaagaatgccgaaaaaaaggataagttccataagctggggccaggtggctacgcggtggcagtgcctaagtgggataagtctgacaaagagatggaggatgcaggtgccactccggttactaagagctggccccccaggggcaggacttggttctatgcgcatggggggagttggacccgaagacaggcaatgtttcgacgagggcatgtctgaacggagccgacgatgcgctacttcttgcaatagaagaggctcgatcgggggtgttccagcccaacagagagaacgacgagcttacgcgtgccctgggaaatcctgaacacccgggaagaaca

SEQ ID NO: 437054 - DNA, 436 bp, Triticum aestivum
cgggaatccatagagaagctagcaccgccggggacacgcaattttttgtcagatgtctaagggggcttggtttggatcctcattttgttttttccttgttcaaatttgtttaggttctttcagagccactgccatggttggcattggcaatgctgttggattggtttggattggcttgtgagaggggcaagcggtgagcgaagataagggctgggctgagctttcctaaggagaggagagcttcactggagcccaattccggtgcccaaatggagcacatttcctgtgagaaattcaccccaaatctgcactgtttttggtactgccatagtggtggatgccatcttacgttgcatatggtgagatgctagctgttggatgcagtagtagcactgaaaggctgggggtttggccattgtttatagagccaagaaga

SEQ ID NO: 437055 - DNA, 412 bp, Triticum aestivum
atcttcggccccatcaacgaatcatatttctcggtcaagatgttcgagggagtcattgcaacatcttacaacgaaggtgacaagttcttcattgaccccatgaagctgctgcccctctcacgcttcctgccgcagccaaagggctcgactccaagaggtggtggtcgcggtggaagaggtggtggtcgtggtggatttggtggccgtggtggattccgtggaagaggtgcaccaaggggtcgtggacctcccaggggtggagggcgtggtttcagaggacgaggcagattctaggatgtagttttaagtttgctgtttgttgaaacatgatgctctacattatctgttcagctggaaacattatgctaagtcagctgtgagcgcactttgtgtggaaattgaattccttgcg

SEQ ID NO: 437056 - DNA, 303 bp, Triticum aestivum
gggaaggaccacaaggacctgcagacggagatcgacgacggcgaggtcgagatcccctccgcttaaagacctgatgtcgaggtgattatcatctctgatgatatggaagtcataccatgttgcttatgtaccttccaaacgatgtgatccctcctctttttgtcatgttttagcagtaatcctgtgagacctcattgttactactgcatatttggtctttgcaatgtagtctgtgcacttgggttaacttaatctataccattcagtggttaaaagtttaggaaaaaatgacgcctcaaaaat

SEQ ID NO: 437057 - DNA, 447 bp, Triticum aestivum
tgtgtcagcgtatagctctgtatattgttcagttgaccgctcacagtccacatgctgccttgtcagctcgtgttctctatcttcgtgtgctggcccatgtgggagtgggtgaaaaataagtaaactagaggcccatttgacatgcggtgaagtaaacaaagttgaaaccactcggggtagcaccccgcacgctagtaaactgagggtgcattgaggacacacttcttccgcgtgaaggacgcactcgcgcacaattcaccactacgcggcggcatgcacagaaggacgcactcgcgcacacccagcaggccagcacacaacacagaccagcacacgtgtacaccagcgtcacggccggttgagatggacggtgaggcagccaacaagcggaggcggctcgagccaaaaccgcatccggcgagcctggacttcatcagcagcctccct

SEQ ID NO: 437058 - DNA, 678 bp, Triticum aestivum
cgggtcgaccgtctagtacgaaatctagggctgtttatgacacttataggaataccccaacaaattgattggaaagaataacttgaggtggttcgtaccctaccataatctcttcatttgttctccgctattatttactttggagtgactctttgttgcatgttgagggatagttatgtgatccaattatgttattattgttgagaggacttgcactagtgaaagtatgaaccctaggccttgtttcaaagcattgcaataccgtttacgctcacttttatcattagttaccttgctgtttttatattttcagattacaaaaacctttatctaccatccatattccacttgtatcaccatctcttcgccgaactagtgcacctatacaatttaccattgtattgggtgtgttggggacacaagagactctttgttatttggttgcagggttgtttgagagagaccatcttcatcctacgcctcccacggattgataaaccttaggtcatccacttgagggaaatttgctactgtcctacaaacctctgcacttggaggcccaacaacgtctacaagaagaacgttgcgtggtagacatcactatttacatcccaatggtatatagccataggggcgttcagttatttcccatgtcccgtggccccggtttctcggacc

SEQ ID NO: 437059 - DNA, 573 bp, Triticum aestivum
taggccttgtttcgaagcattgccataccgtttgtgctcacttttaccacttgctaccttgctgtttttatattttaagattataaaaacctatatctaccatccatattgcacttgtatcaccatcccttcgccgaactagtgtacctatacaatttactattgtattggatgtattggggacacaagagactctttgttatttggttgcagggttgctcgagagagaccatcttcatcctacgcctcccacggattgataaaccttaggtcatccacttgagggaaatttgctactgtcctacaaacctctgcacttgcaggcccaacaacgtctacaagaagaaggttgtgtagtagacatcaagctcttttctggcgccgttgccggggaggtgagtgcttgaaggtatatctttagatcttgcaatcgaatctttttgtttcttgttttatcactagtttagtttataaaagaaaattacaaaaaaaatggagttaagtttgtctcatacgctttgtctttttaatatctttcgtgagtttgatggaaaggaaaattgtgctcaagtt

SEQ ID NO: 437060 - DNA, 478 bp, Triticum aestivum
  unsure (1)..(478): unsure at all n locations
aagttgaaagtacccgctgacgggtcgcaatggagaaaaatcgagagaaagtacaggaatgactttgcaggtgatgcaaggaacgtatggtttggcctaaccccagatggcattaacccttttggggagcagagcagcaaccatagcacctggccggtgactctaggttttgtataaccttcctccttggttgtgcatgaagcgcaagttcattatgctgccagtgctcatccaaggccctaagcaacccggcaacgacattgatgtgttacctaaggccattagttgaagaactcttacagctgtggaatggaacaggtgtacgtgcgtgggatgagcacaggcgggaagaatttgacctaaaggcgttgttgttcatgaccatcaatgattggcctgctctcagtaacctttcangatagacaaataagggaatacgcggatgcacgcactgtttggatgataccgacagtatata

SEQ ID NO: 437061 - DNA, 358 bp, Triticum aestivum
ttcgacgggtcggaccagatcaggaaggagctcgccggcaaaggcatcgccctgatggacgagcctaccggcacggtgtggagaccatgcgaacgggagtagtcggtggttaatctgtgcctggtttaacagatgacagtgtacaacggacggatcttattgcgctggtgcagattttactcatgcaatatcgccagttttggacgtggtgtttctgtaggggttccaagttgactcaagagacgaggcccgtgttgtgtcggtggttgcgtaggaggacaaattgaagggtcctccgtatattggtatacttcaccattagtctgcaaaaaaaaaaaaaaaaaaaagcggccgctct

SEQ ID NO: 437062 - DNA, 421 bp, Triticum aestivum
gacgtgtagggcgagctattcgtcacggatgctgtgtttgaaagccgctaaggcttcggcgtccggacagttgacaatttaattcttcttagtgaggaatctattccaaagctcgcgggcggactctctgggccgttggattatgtgacttagatcgtctgcgtccggaggccggacataggtcccttgaaatttggccctgaaagcgtcttcgagttcctcccaactcccaattgagttttcggggaggcctttcaaccagtgtcgagctggtcccttcaacttgaggggaaggtatttgatggcgtggaggtcatccccacgagccatgtgaatatgcacgataaaatcctcgatccagacccctgggtctgtcgtgccgtcatatgcttctatgttcacaggtttgaagccttgtggg

SEQ ID NO: 437063 - DNA, 493 bp, Triticum aestivum
  unsure (1)..(493): unsure at all n locations
gnntnccnnggatatgactttccntgttgtacntaagggttatatttatggatgaagaaactgctagagactccnngccttgtaatgatagagatgatcttaagaaacggttagctaagctgaaagaaaagtctttgaatgctagaatgcggtatgatcctaagttttctactctcacctatcatttgttaccgataaggattatgaattctctgtcgatcctaagttgattactttggttgaatctgatccttcctatggttatgaatctgaaactgttgtggcacatcttactaaattggatgatatagccaccctatttgctcatgtggaaaaaattcgctatttcctggattcttaagttgtttcctttctcgttaaagggtgatgctaagttatggtttaattctcctgctcctagttgtgtgtgtagtcccccgtngacccgggaatttntggaccggtactgggnggcgtaaacaggtcncnncaa

SEQ ID NO: 437064 - DNA, 574 bp, Triticum aestivum
caatgatagatatgatcttaaaaattattagctaaatgtaagcagcagtctcttaatgctagagtgaaacctggccctgcttttgctacttcacctatctgtgttactgataaggattatgaattctctgttgatcatgaaattaattactttggttgaatctgatcctttttcatggctatgaatctgaaactgttgtggcacatcttaccaagttgaatgatatagccaccctgttcactaatgatgagaagtctcgctattattatatccttaagatatttccgttctcattaaagggtgatgctaagacttggtttaattctcttgatcctggttgtgtgcgtagtccccaggatatgatttattacttctctgctaaatatttccctgctcataagaaacaagctgccttgcgggaaatatataattttgtgcaaatcgaagaagagagtctcccacaagcttggcggaggcttcgccaattacttaatgctttgcctgatcatcctctcaagaaaaatgaaatgcttgatatcttctataatggagtaaccgatgcttctagggattt

SEQ ID NO: 437065 - DNA, 460 bp, Triticum aestivum
ccgggtcgccgtatcataagcaccttgcgtccaatgggtgggtgacatctggcccactgacgagctgacacgtgtttcctccagccaatgataattttacacgtggaaaatccccattggtcggggctgttaacgggttatcggatccaaaacccgacccgatagcttaacggcgttccgttacggtggatgccacgtgtcggtcacccttgacgaaagcacttctgtgacgcgcgatttatcatcatggaagtggacacttccgtgatgataattttggtaatgtcatggaacacttctacgacagcacaggtatgactatcttgattctgtcataaatttgtcatggatgtacatgcatgacagaaaacgtgacctactgtgacaaacacgtatcatcacggaagtgtattttttttattgtgcaacgtcctaatttgattccgccgtattgttggat

SEQ ID NO: 437066 - DNA, 482 bp, Triticum aestivum
ttcccgggccgacgatatcatagacgcgtcccgtccatttgctggatgacaactgcacgaacgctgggccgacacgtggatccgctagccaatgaggattttacacgtggaaaatccccattggtccgggctgttaacgggttatcggatccaaagcccgacccgatagcttaacagcgtcccgttacggtggatgccacgtgtcggtcacccttgacgaaagcacttctgtgacgcgcgatttatcgtcatggaagtggacacttccgtgatgataattttggtaatgtcatggaacacttctacgacagcacaggtatgactatcttgatcctgtcataaattcgtcatggatgtacatgcatgacagaaaacgcgacctactgtgacaaacacgtatcatcacggaagtgtatttttttagtggtatgggggacaatacagagtacatgtgtctatcacgagattattccaatgaatat

SEQ ID NO: 437067 - DNA, 616 bp, Triticum aestivum
gatcttcatccggagatgatggagagcgaaacacctccccatgcctccccgcctcatgaggcgggcgacccggaggtgtcgtcacagaggatttctcctgatccgccaaggccagagggtaatccttcggcctcccgaagtccgaagtattcggctcctaaagggagcagcagaaaaagtctggagctgtccggtgcgcgaccggacgtattgatgagtcttctggagcaagcggctatctcagaagcgcatcgtacgctaatgggtatggtggctgagacgatttcatccgccgaaagcgggttgcatgaagcttttatgagcctgctgagaggctttgaggtacgcaaagtaatatatatatatatattttgacggtaccgcacatgctaggtgtgccctatacagatagtagcccctgagactctggttgctgtccaaaggcagcaaacagagaatcatagtaccaggtgatgatcatgctactttcatgtgcaggcggctgatggtccggtggctggccggactggtgagtttgctgaactgaggcggcaacttgatgcggcagatgccgacatcgttcttgtaaacaagcagcttgatgaggcacagggta

SEQ ID NO: 437068 - DNA, 435 bp, Triticum aestivum
acgggctatttaaaactgctcgacgggagcttaatcttccttctgctaatgaattgattagttctcagtcaaacaatgaggcaaatggaaatctggaaagcacacaggaagtgcaggtgaacccaacgagcttatctcaatacagggacatccagagaaagattgttgagtttatcagaaagagataccatattctggaaaaatgcttggacattgaatatgccgtgataaaaacaaatactcctgttcctgatgatcttactgaacaaaatgttcctatgggacatagcccagctgttccagatatcagtgaagtgttgagagaacttccccctcttgtaccaatttctgccaaagaagtggcttctgatggctcaactgaccaggcacacctttcccatctttacaacaagatgtgcggtgtgcttgaggaca

SEQ ID NO: 437069 - DNA, 441 bp, Triticum aestivum
tcccgggccgacggggataatgaagcatccatcaatagattcttgtcaccagtcatgtggtttgtacatccactatcgaggacccactcagtggctttgggttgatcatcctacagatgaattagtgcatcttacaaactcatatactccatcagtgaagaatatgacatcaattcatcagatcaatttcatcaagtaaaagaactaataacgcaatatgaggacgtgagaaatgaaagttcatttcttcatggttagcctgcgtcctttcaggcatgctcaggtctccagcaaattcttcagacgattatgtgcatctagagacctgaccctgcagaagagattagttccttttcttcactacccacatctgaaggggtggcaaagagttcatcattctgcgagctccatacaagaaggatggcatagaagccaatccat

SEQ ID NO: 437070 - DNA, 586 bp, Triticum aestivum
tcgcgggtcgacggcgtccagcatccacagtcggaggcggagttccacatcgactccagcgacgactccgacgaccactccagcgacgactccgacgacgacggataactggttagtcatctatacccatttatgtgtcaaatagatcatagggtttctctggttactcctgcctccccctttttggaatagaaatcctatggttatgttctcccaatccatgaaatctgagtaagtttcgttagatccgtgtagtgtattgattgtttgaatggtacaggtgataagtgattagttgtttcatctgtgcaaatgatttctgctagtaatccgactagggttagtgttcgtgctaataattcctagccagggcttgacaattgattttgaatgacctacatatgtttgtgccattattttcttcaagattggtctgtacatagacgactgtgcttaaaaatcaaaccataatatctggatatgtataaataaatagccataaattcctaatcctatttcacggcatgtaatcattgatttgatgccaaatttgttttactatttgtataggtgttgtcccgtcgac

SEQ ID NO: 437071 - DNA, 546 bp, Triticum aestivum
gcgccggggcaaagtactaaacaccgcagacaaatacagcgacagtcgccacacataagagctatccgaagcgaaaattactactataatttgatgaggaggccttagagcccccgcaatcaaagaataaggaaaacacccggtcgggtaaacaaccctacggccaacatatagcagcaatgggcatcgtactcaagccggcacgcgatccgcacaaggactcgcatcaaaaagacagcccagccagatctatctacgggccaagaaagcgcgctccagcatgcaatgcaacgcaacaagcatcccaacaccacggcacacccaaatacaggggtgccgcacaccccctatgtttcaccgatgaggtgctggaccatgaatctccaccgggattcaaacccgtaaacatagaggcgtacgacggaacgacagaccctggggcctggattgaggactgcatcctccatatccatatggctcgaggagacgatctccatgccatcaagtacttacccctcaagttcaaagggccagctcggcactgcc

SEQ ID NO: 437072 - DNA, 765 bp, Triticum aestivum
  unsure (1)..(765): unsure at all n locations
ctacaacccataacgagtcatagcctgaacgggtcctgggtaatcctgtgataaaatccatgcctattttatcccacttccattcgggtatcggcaatggttgtagcaatcctactggcttctgatgctctgccttcactctctgacatacatcacaaactgctacaaactccgcaatatccttcttcattccggtccaccagaaagtattcttcaaatccaaatacatcttggtattccctgggtgaatcgagtacggtgaatcatgcgcttcttgcaaaatcaacttcctgatctccggatcttttggcacatatactcggtccacaaaccataaggtatcgtgctcatcctcacgaaatcccttggcttttcctttgctcatcctctcctttatctcttcaatctccttgtctgtcttctgagcttctctgatcctttccatcaaggtggactgaatctccaatgtcgctagatagcctcttgggactatctccaaacatagctcgcgaaggtcctcggctaactcctaaggtatctctcctgtcatgggggtgctgccatggatctcttgctgcagttccatgcgtangatgaagggttcatgaatcacgagtagcataggaacaaagtgatgagcaccggccgcggcacctttggtcatcttgttcttcaaacagattgcacagccagagcaaacaacattccacaccgangcagctangatgaacacagtantagtcgagcataaatatatgaatacag

SEQ ID NO: 437073 - DNA, 212 bp, Triticum aestivum
gggtcaaaacacaaaacacgtacgtacgtagtagtatcgctgtgtgtgtaggcgaacgaaataatctgcaagggctcatagttaatttcaagctacatatagtgcatctgcctctcttctttttacttgattctatatacactgtactagctttgaatcttctgctgtgaggctgtggtggattcattgatgcgttccaaaaatgagaaccc

SEQ ID NO: 437074 - DNA, 482 bp, Triticum aestivum
  unsure (1)..(482): unsure at all n locations
gggtccacgggacaacaccaagctctactgaactcccaggaggaggatcttgccgcccatgangagaagcttggcgccacactccatggaaaggacgaggaggtggagaaggtcgtcgtgcagtggacctaagagctggagcagaggtacaaggaggcactcaatgcccaggctctggttcatgccggcaaggtgaaagagctagaggtggagcgggacgggctgaaggatcaggccctgaagctggccaaggagaatgacacgctcaacggtgccctggtggaggcgcagggtgcagtcctcggcaaggctgagcagctctccaaggccaacgaccccatcaaagacctgaagctgaagctggagggtcttgaggagatgctctcggaggccaatgcccgggaggagaccctggccaaggatctggaggtcgagaagcaactgcggaagaacgaagccgccaaccacaaagattttgtgga

SEQ ID NO: 437075 - DNA, 536 bp, Triticum aestivum
  unsure (1)..(536): unsure at all n locations
gggtccacgggaattaagggactgcttgagtccccgagatcatactatgcattgtctgccggagctggaaaagccgtgtcaacgggaagcaagattgcgctggagagcccaaggacggcggagaagccgtcggcaggcgacatcgtgtcgatggtgatgaggagaaggcgtgcgatgcccaggagcgagcagccctctgaagctgggcgcgtgaaatcctctggcgggatttttggatacgtgcgagaatccagtggtaaacaagagaaagagggcctggcatcacctggtgagggggagaaaacaccacagaccaaggaaggtgtggtggctgctttggggggcggtgaggaaactgggcttactgcagatgcgccggtttctgcagagaaggcaatagcgggtgatgccgctgtggttgagggaactggaggtgcgactgaagcttgttctgataagctgggttcttgtgcaaattcagagaaatcggcgagtggtcctcggcatgtggaggctgtangaggtgcgacagaatc

SEQ ID NO: 437076 - DNA, 454 bp, Triticum aestivum
acgggtcaacaacaagagtcaattcattgtccacgacggcggtgcttctgtgcttggcatcggcttccaggaagcagatctgagaccatggaagatagtgccggggaagaggctccgtgtacaacgaagatggtggaccggctccagtgcggcgtatgaggtcatcaatgaggcagatgcactgcagtggacaagtgcgccgatgtagaaggggaggagcacgaaggctgcggtggtgtggagaagtctattttgtggtggggatagaaaatggggagtattcaggtgtactactctgggtgccgggtggggttggctgggtacgatgaacctaaagttacgaaaacagctccctaccaagcatcatccataggcctgttctgaaggctatgatggtaacttcccactgctcaaatcagggtcgcgggagattttcccgccgaccacaaaattt

SEQ ID NO: 437077 - DNA, 406 bp, Triticum aestivum
cgggtcgtccggataaaggaacggatgagcaaaggaaagactaaaggatttcgtgaggatgagcatgatactttatggtttgaggatcacgtatatgtgcctaatgaacccgagatcaggaagttgattctgcaggaggcccatgattcgccgcattcaattcatccaggaaacaccaagatgtatctggatctgaaggaaagattttggtggacaggaatgaagaaggatattgccgagtatgtagcagtttgtgatgtatgtcggagagttaaggcagagcatcagaagccagatggattgctacagccattgccaatacccgaatggaagtgggataagcttggcatggactttatcacgggattgcccaagactcgtttaggctatgactctatctgggttg

SEQ ID NO: 437078 - DNA, 268 bp, Triticum aestivum
ttcccggaccgacggggcccggaagatgttggagaaaaccggagaatgagacactgtcaccttacgaactaagtactgttattttgttggtgttggcatatgtaccactggttcttatgaccttgaatgtactagtagttagcacaagaaagagtggcgcaatattcttttgtggcctcggtgcccctatgttgttaccttcatgttgattctcttgacgattcaagtcaggcatacaaaattcgttgtcaatttcccacggtcaaca

SEQ ID NO: 437079 - DNA, 588 bp, Triticum aestivum
gtcgaccgggacggatatcaaaaccatggcactatgtataacaaacaacgtacgggtaagataattatacgagtaactatatatccaaatcacacaaacatcaatttggtaatgtaaaacattcatgaacaagaggctcaccacaaggtggtgccggcgacgggacggtgcgggcgatcgacggtggttacgacggagatttagaaggcactaagtaaaccacacctacatatgcaaactaagtgttattttgacctcaaattgcatataaatcaaatactaccacatataattcctcccaaattactaaaacccacaattaatcactatataaaccattgcaagagctaatctagcaatgagagatgaaaggacaaagttgctaacctttgtgatcatttgaatggatgggggcctgcaaatcttgacaaattttgggcaaaatttgtgatgaactcgagaggaagaagggaagaacagaggagagggagaggggaaagggggaagaacagagtgcgggtggatgaagggtttatataggacgacctttagtaccggttcgtgccacgaaccggtacaaaaagtgct

SEQ ID NO: 437080 - DNA, 389 bp, Triticum aestivum
gactcgtgggacgacggggatcgctgtgatggctccgccgatcagggggctgacggcggggctgggcgtcccgaccctctacctgcccggccccttccccttcaacgtctaccgcggccccccctggcaccccgagcaatccaagccaagaaaaggaaaaggagaagattgaagattgagaaggaaggacggcaagttagtgtcggggattattaccaaccaaaaggacctacaaaaaatctcgacttgtggttatgttttctgggactgatttccaggcggttcctttgatgtaatatacattcaggatttggatgatcatatctctttaagtgctctcagtttttacaggaagtcatcgatttcaaaaaaaaaaaaaaaagcggccg

SEQ ID NO: 437081 - DNA, 365 bp, Triticum aestivum
  unsure (1)..(365): unsure at all n locations
ccgggccgacattactaaactcgcccagcattataaggtcaagctgggagacaactgatgagttctcggcgtacaagcacctccctcggagactacggtcggtcaccagtgcaagcagatccttgttctgccgagggcatcccagtcgtagatgtgatggtgcgatagtaatcatccattggctagtcatcgagcgtcgatttgttaggtgcagccgcgctctagttgtggccagctgcaaagcagcagttccttagtgtaacaactgtgatccgatccgttgatggtacgcttggtgtgataacaatctttgtatgacttccaagcttagcatgtcggcaagatcaaaaatancnnnannnngg

SEQ ID NO: 437082 - DNA, 381 bp, Triticum aestivum
atgcccgggccgacggggaaatcaataaactcgctcagcattataaggtcaagctgggagaagactgataggttcctgacgttcaagctcctccctcgtagactgactgcagtcaccagtgcaagcagattcttgttctgcccagggcatccccactcacagatgtgatggtgtgatagtgataatccattggctagttctcatcttgtggtgtgatgatggtaataaagcattgatttgtttggtgccgccatgccctagttgtggccagctgcaaagcagcagttccttagtgtaacaacagtcgatacattacgaccgtttgatggtacgcttggtgtattaataatctttgtatgacctccaaaataaatacaaata

SEQ ID NO: 437083 - DNA, 428 bp, Triticum aestivum
gggctaacaggcgatgaaggggagcaagagtgatcttccagctgttgatcgagccgtctctccagtcactaacctctcccaaaggcttccccccagccccggctgatataattgacaacattttccaccaagggaaatggagtcccaccatagaccattaccggtatacatacaggtttatacccggtacctaaggtcccagcagccagccatcacccccccatgagcctaggaccctccttttccttccttattaatctagagatcccttttttgtttaacctaatcggacatgaagcttcctcaagcttgtttttcattggctcttgctaaggtttggtcaagttgtcagctccaacatgtggtagctatgaacttatgatgatgtatgtagtacagcatggctgcatgagttttcttattcttgc

SEQ ID NO: 437084 - DNA, 466 bp, Triticum aestivum
  unsure (1)..(466): unsure at all n locations
gtagctcttgacagcaagatataagtgaagatcacaacggcagtgaagataatgatgaaaaacaactgccaagcaggatatgtcaacaactctctctccaactttcctcttgaaaagtttgtgccaattttctgataaattctttcgcaagaatgccactgactcaagctttccaatgcaaaaagaatcactcaattccgagttgatatgaggagtcaaagaattctaaaactggcctgaaaaactggaacaagctgtgttcgcgaacttcggagggcaaaaagacctatttagaagccgattttgaggtgccaaatatggaactaccttctgcaactatttggacgcggctcgttgctagcttccatttgagtactcgtggagccaaaacggactttgtatgagaaagttatgtctgttttactaaacaatgcacaanacagattccaatcctaaatcaactacg

SEQ ID NO: 437085 - DNA, 611 bp, Triticum aestivum
gtctagaataacgggtcgacctcggtgacacggcgccaggggcaaccgcactgaagctctggtacatgagcaggccacctcccggaagctcctgctcgacgacatcctcgagcacgtaggaggagccagcctccgcaccgcccgcccatgatttggcgaagccgtggccaccgaagatggtgacggcgacggagaagtctgacgggcggaagcacgacagcaccctctcgatcaggtcactgtagaccagggagccagggttgaagttcatcgcttcgtagctcgcgtagctgaagccctcctcgggagtgacgtggatcgtggaggctgcggggccgcagacgccgttcatcgagtagccgcacgggtcgaagtcgaagtcgcagatctccatctccgggatgatagcagagatccccgagaccttggtcatctccttggccgaggagcagccgccgtcggcagagttcttgaagaacaccgcggccttcccggcgtccagcccagtcatgcacatctcgagcgtcaccatgggttgctcaggctcctcagtggcgtagtagacgtgccacatcttcttgggcctgaacgcatcacccatcacatatgca

SEQ ID NO: 437086 - DNA, 444 bp, Triticum aestivum
ccgggccgacagcctcaaggaaaagatccacgacaaggaaggtatcctgccggaccagcagcgcctcatcttcgccgggaagctgcttggcgacggccgcaccctggccgactacaacgtccagagggagtccacgcttcacctcgtgctgggcctcgccggcggggacaagggctcctgctacccgcccaagatggagcctaacctgctcgccctcgcgctcaagtacaggcagcacaggcttgtttgccgcaagtgctatgcacgcctgcccctcaggtctgccaactgccgcaagaagaagtgcggccacagcaatgagatcaggcccaaggagaagctgcgctaccactgaagcattggaaacttgaccctgggagacatgccatagctggattaactgggaattcaaagttcggttcgagtcttaatttcagttaaatg

SEQ ID NO: 437087 - DNA, 550 bp, Triticum aestivum
gattgtgcgtgtgtatgcttgtgagaggaagagtgcttgtgataaaggttagtgaaaacagtcataactggttacgagaaggagggagggttatatcgggagcatgtctgcgagagagacacctcgggagagagtgcgtgagcatgtgcgagagaccaccgacggagggtgaaactacacgtaaaagactgatgtacgcattgagtaaagacataaattgtatccaaacattaggatgggatcatgatattcgcaattcgcgtaaggaacggtcattgatccatcagacatctagattctatcgaatttgagcatgtctatgtcattattcgacataattgatccacatagttagtattttgaactccagacaatgcatcgctttagcaatcgagtataaacgtgagtatagttcatgttgtgtgtgtaaagcacattatacatacgaaagttacacaatgaacattataaatagctagctaggaactagcatacatttgaattcaacttaaggtggtttaaaaaattcgaattcaacatgaagtccatt

SEQ ID NO: 437088 - DNA, 392 bp, Triticum aestivum
gagtgtgtgtgtgtgtgtgtgtgtgtgtgtgtgtgtgtgtgctcagaacagatgtgttttcagaacttattacttttgatacactgcccctttatgttgagcagatgcggatcatatttagggagattaagatgctcaagaccaaggaatgcatactgaaggctgccaatgatacccttcaacaaaggccctaacagataaatggaagcatctattgggtggtactctcactgcttagcacagagaatgaagggtcaacatttacggtcatgctgcccacgcttcggaaaaaaaggcaaaaatgttttacggctcaagcatgggaagtatagaccaaagaatgtggtttacagtttccctattttgttggattagctaatgtgttgatttgt

SEQ ID NO: 437089 - DNA, 436 bp, Triticum aestivum
gggtcgagcgcggaagcggccgtcgatcttaggccactgacgatggaggacctgaggcaggccaaaaatcaggtcgccgcgagcttcgccgcggagggcgctgtcatgaacgagctgaagcagtggaacgacctctacggcgaaggagggtcgaggaagaaggagcagctgacctactttttgtagaaccggaaggatggtggatgtgtcgtgttgggcaaatcgctgaagccttggcagagcatgagcatacatatgttggtgggaaaaggagagaggatttcctgtgagcaaccgtgagttaggatcttggagtgaatggactccttgagatgtgtggcagggggcattggatcatgtacgattcttttatacgaacaagtattgtagttattcattattatatatgttgtacctggtttgttaacctgtgtgt

SEQ ID NO: 437090 - DNA, 447 bp, Triticum aestivum
ttccggatccacggggctgcgatagtgaggagggcgctgtgctacccactcaaattgatcgccaagaatgctggtgtcaatggcagtgttgttaccgagaaggttctttctaacgacaacttcaagttcggctacaacgctgccactgggcagtacgaggacttgatggctgctggtatcatcgaccccactaaggtggtgagatgttgcctggagcatgccgcgtcggtggccaagaccttcctgacgtcggacgtcgtggtcgttgagatcaaggagcccgaggccgcgcccctcgccaaccccatggataactccggctttggatactgatgagcaacacaggccgagtttctcctgaggacgtggtttaatttttggtagcatgaaccaagttttgagagattgatgatgatgatgatggtagttttgagataagaaaaatgc

SEQ ID NO: 437091 - DNA, 489 bp, Triticum aestivum
atcatgttttgctcgtggaagaggcttagtcaacgggtctgcaacattcagatccgtatgtatcttgcaaatctctatgtctcccacctggacttgatcccggatggaattgaagcgtctcttgatgtgcttggttctcttgtgaaatctggattcctttgccaaggcaattgcaccagtattgtcacaaaagattttcattggacccgatgcactaggtatgacacctagatcggatatgaactccttcatccagactccttcatttgctgcttccgaagcagctatgtactccgcttcacacgtagatcccgccacgacgctttgtttagaactgcaccaactgacagctccaccgtttcaagtaaacacgtatccggtttgcgatttagaatcgtccggatcagtgtcaaagcttgcatcgacgtaaccatttacgatgagctctttgtcacctccatatacaagaaacatatccttagtcttttt

SEQ ID NO: 437092 - DNA, 389 bp, Triticum aestivum
gggacgacatcagacctcacgtcgattgaggttgcttaggaataggctctgcaggagaaagaactttggtcttcagtttcaaagactctgcgcttgcctgcgatacctcacgcaaaaccatcaggccttcttgtctcttagttttcaggacctaacaatttgtggatcatcattgttaataagctcatgggctgggggtgccgcgaaacagacatccgagggatgaaaactggttgacattgtcggtgtgtatattgttgcattgtgttgcatgtataagtggatctcatcaccaagtagtggtgatgaaatggcgcctgtgtggctgtgtactcgaaagtcgaaatgcagttccagatttcatttgaaatgtctgccttcgtgtgtgc

SEQ ID NO: 437093 - DNA, 470 bp, Triticum aestivum
taccggatcgacacttcccggggtcacgggatgacgttgcgggattctcgggagatgaactacgatagcaagctccaaaacatgagctggttctgctacaaacatgtgaacacgttgtcccagacaagcatgaccacatagtagtcttataataaaacactaccgagttcaggagggggaaccatcaacgagggtatcgaagtcctttcacataagtccggattagctcttatgaaggaactccttctccttgaacaaatcaatcagtggcttggtgtgctagggatacatatagattgaaggttgcaagtcttcaaaccacagaattcttcgcacgtgtgcatgactgatttggaatgattccaaagaaagcaacattgactttctcgaattcatggcggcaacttgcatcagatgcacatgaattaaaggaagtcactaccttcatccgaacatatgcttcatgaact

SEQ ID NO: 437094 - DNA, 429 bp, Triticum aestivum
cgggatgacgttacgagattctcggggaatgaacaacgatagcaagctccaaaacatgagctggttctgctacaaacatgtgaacacgttgtcccagacaagcatggccacgtagtagtcttataattaaacactaccgagttcaggtggggaaccatcatcgaggatatcgaagtctttacgcaagtccatggattagatcccaagcatagacttcttttccttgaacaagtcaatcagtggcttagtgtgctagggacacatatagaatgaaggttgcaagcctccagactacagaatacttcgcacgtgcgcatgactgatttgggatgattccaaaggaaacaaaacaatctttctcgaattcacggcggcaactttcaccaaatgcacgtgtataagaggaagtcactcctttcatcaaacaaa

SEQ ID NO: 437095 - DNA, 567 bp, Triticum aestivum
ggtgatgttgcccacgacatccactttaccggtattcgagggaccgatattatagttcttgggaaatgttccaaaccatcatatatgcctgagattcagatctggttgctgtcaggatattccagactcatcgagtctaggcagaaaaatgaaagtttgcaacacaattcgacgggacaacgctgcgcgattctcggggactgaactacgatagcaagctccaaaacatgagctggttctgctactcacatgtgaacacgctgtcccagacaaacatgaccacgtggtagtcttacagtaaaacactaccgagttcagctggggaaccatcattaatgacatcgaagtctccacgcgtggaagtccaaggagttcaccttagacagactcctttatctttgaacaactcaatcagtggcttggtgtgctaggatatacatatggaatgaagatgattactctaacagaccacagaattcttcgcacgagcatgactgacttgggatgactccaaaggaggtaaaacaagccttctcaaattcacgacggcaacttacatcaaatgca

SEQ ID NO: 437096 - DNA, 403 bp, Triticum aestivum
  unsure (1)..(403): unsure at all n locations
cggtcaagntatcccgggccgacggggatgacaagatgaagtacaccatagagttccagaagcacaaagagggcggaagcggtagcgctcctgctgccccggcgacagctgcgacggtggtgacgagttcggccccgacaggcagcaccttccttgccgttcagtacgcgcccgtgccgaaagaaaaccaggcaccagcttccccttcggttcatgagcaccagcagcccttggcaacatcctataccatttgttgatttgtttcggtaataccaacctcagtggtcaaaagacaaaaggaaaaccaaaccgaaataagtggctcccctctgtgatttcatgactacactggaaaacaggggaggtgccagagcaatagaaatcccaaacagcaagtcttttt

SEQ ID NO: 437097 - DNA, 450 bp, Triticum aestivum
ccgggtcgaccgggagaatgatgtagcttctccttggggacgacccttgggagtcatttgtcagtagtgtatggtacatcaagatactttcaccagaggatgtgcacaagttgggcaagcaaggaaatgatccacgttacctttccgaagtgcaagatcattgtgctgtctctgggtccagcgacgattcgacagcacatggtaccacccttgctcaccgcggcacaacatccccggaacctccgatcgtctcatcttcgtacctgtctcctgcgtgtgctccgtgcacgtcccgagagctccccgcccgttacctatctccgtccggtgcaagccaccgaagccatgaactgatatttctgtaggtccctcttgggaatctgtatcggtttaacttttatcctagatggtttgtacctcgcgcggcgccgcaatatgtctgcacgtctg

SEQ ID NO: 437098 - DNA, 427 bp, Triticum aestivum
gggtcgaccgggagaatgatgtgcttctccttggagacgacccttgggagtcagttgtcaatagtgtatgggacatcaagatactttcaccacaggatgtgcacaagttgggcacgcaggggaatgatccacgttacctttcctaagtgcatgatcattgtgctgtctctgtggacttccatgggcaaaagtcagattttgagggcatctcgggtcgcagcgacgactcgacagcacatggtagcacccttgctcacggcggcacagcatccccggaacctcccatcgtctcatcttcgtacctgtctcttgtgtgtgctccgtgcacgtctcgagagctccccgtccgttacctatctccgtccggtgcaagccaccgacaccatgaactgatatctctgtaggttcctcttgggaatctgtatcg

SEQ ID NO: 437099 - DNA, 471 bp, Triticum aestivum
gagagcttggatgtaacatcggtgagccaggtcccggccactcccagcgtggccacggcacgcgctcagagagcaagcaagactgcggccctgagcaagttcaagtcttctgtgaagccttctctcgaggctgcttctgacagtgaacaagacgagatgtccggactgacaactgatgaggatccgtctgatgattccgacgaccctgacgaggaggagtcttaagttcttgggagctgaggtatctgctggcgttcttgaccggaagaacccagcaattgttatttgaggtatgcagggtgacactgccactatgtattgtttcttttgaaccagtagatcatgtattcaggtgctcttcagcttgcaaagctgcaaagattatgctttggttgtcgtgcgtagattcgattcaaggatcaatgagattgtataaagagctctacatgaaagaatattgctcttttacgg

SEQ ID NO: 437100 - DNA, 433 bp, Triticum aestivum
gagatgtgtcactcgccgtcgggatcacgcgcgacggcccggccggccagggtggaggaattcgccgacccggcaacggaggaaggcggcgagtccaaactctccgcgctcctctacgacgtgtcgcagcaggtccaggacagcctccagagcatgctgaagatgacgggcgagatcgagcagtgcagtgacgagatcgaggtggagatcgagcaggccaaggagggcgtggctgacaagtacagggtgctcgaggaggagaaggaaaggttccagaaggtggccctcgcggcgctcaacatcctgagcggtggcatctgaagcctgcaccaccttaataccaacaaagacaatcctgataactgccccgctctgtagatcaccgttcatgtgcaagcctagcaatgaaccgccagttgtactcctccatatg

SEQ ID NO: 437101 - DNA, 373 bp, Triticum aestivum
cggtcgacgggtaagatcaagaagcatgagctgagagctaaggccaaggagctgggcccggtccggaagagcaggatgtgagctaggctagaactccttgtgccctcgtccactccagagctgtcgtttggcgtcggtgtactgtattcttaggacaccacactgtattttgttatatcacctggcttctgtacgaactaaggtgcttgctgaattgtttcttactggctgcttatcgtgtatatgccggatgtacttattagagtgttgtaagtcgtctggaaggcagagacgcactgatttttcatggtgttggtgaaaactgaaaattaggccgggcatcttccgtcaaaaataacacataccccataac

SEQ ID NO: 437102 - DNA, 296 bp, Triticum aestivum
  unsure (1)..(296): unsure at all n locations
gggtcgaccgggaggagagcgatatagggtcgcagctggactaactcgccttcgtctcgcgcttgtgatgcacagaaatgtttctatgaactgttcccttgtggaagtacatttctgcgattgcatccagtttaggcctttaggtaccctatttatgcatcatgagcgtttaatttcgaggtatgacctaatttaagtgtttttatcgagtaaacaagtatcactgctggtgcttctggattatgtttccgcaaccttggtcttgcttactgagataactagatctgnnnnnnnnn

SEQ ID NO: 437103 - DNA, 432 bp, Triticum aestivum
gggctacgggcagctgagagtctctgtcatggcgcgtcacctggtggatcgatctgtcaggcgggcttctggagtactcgcagctaagacatcctccagaagctatgctaaacttgaagttttctcttgtaagatggaagtcactgtcgcctgatctcatctcccgtactggccacattaccgtgacatgccgtgtcctagcatatgaatgtggctttggtttggctctaggtgccggaagtagttatttatctatgcatgtatgtatggttcgtaccatgtgttaagtggtggtactgtaacttaagctgggtgggtggtaataggccatatccttctatttgtcagaattactatgtaatatagacagttcagattcgatggttgttccaataaaaaaaaaaagaaaaaaaaaaaaaaaaaaagcggccg

SEQ ID NO: 437104 - DNA, 404 bp, Triticum aestivum
gggtcgacggggaacgccaggagttactgagcaggcatggatggatggatgtttggagcgcgagcatcaactgtggttgtgcataattatggttatgtcagacgtgttaattgtcgcaatttccaattggtggtactatatatatgtttgccaaataatgtgtgcaccgtgtgcaactatggaacagcgaagtggtaatcattttgtgagctttggaacagtgaagtgacacatatttgtcctaaaaaaaaaaaacaaaaaaaaaaataaaaaagaataatcaacaaaaaaacaaacaaaaaatcaaaaaaaatggaaccacttctagatgatcgacctcgacgtacacatctaggaaacttcaaggctctccaattctgccatcaagacacattgcggacccc

SEQ ID NO: 437105 - DNA, 633 bp, Triticum aestivum
ggtcgacgggtcagcttaaacccattcaagtaaacccgtggcgatggctccacgactaagtcctttcactaggacatctgccgtgacaaatccacgacagttggcgcccatcgtggggctatcgcacgatggtttgacgatcttggagggcaagctcaagggactcgaaggctatgttgtgggccggatgaccaagagtcgtcggggcaggatctacatcgatgatgcaggatggggtcccgaggccgattcgatcgagtatgggtaccgggtccccttgggcagcatacacgtcttcatcggcaagatcggtgagcctgggcctgagccggacatctacaccgaccccgtcgagacggctcagcgtgcgagatctacccaggttaaaccggccatgaagcgtgccttcgttggagtcatctacggaggagagcgtgaggacgaatcagagcacggtaacgagaccgtcgtctattccggcgacgagtcctcgaccggagagaccgagtcgctataccggatgcaagacgatcaggtgaggggttgttccgatggcgacagtattccggaccccccaggccaggtcaaccgggttggaatattcatggccggcacacatgcggcgaatcactc

SEQ ID NO: 437106 - DNA, 407 bp, Triticum aestivum
gggtcgactaggaaggattcaaaatcagcatggaaggttcttatcatggataagtttacggtcaagataatgtcctactcatgtaagatggcagacatcacagaagaaggggtttcattggttgaagatctatacaaacggagacagccattgccttcactggatgctatatatttcatccaaccaactaaagaaaatgttgttatgttcctctctgacatgtcaggaagaagcccgttatacaagaaggcgtatgtgtttttcagtcctcccatacagaaaggcttagttgctcaaataaaaagggattcaagtatattacctcgtattggtgcacttagtgagatgaatttggagtacttccctattgattcccagggtttcataactgacccatgaaagggcaa

SEQ ID NO: 437107 - DNA, 434 bp, Triticum aestivum
tgacggggtagaaagacgaattctaaccctgacggagggagagaaatacacgaagtgcgcgtgtgtgattccgatgcccacagggaaatgagatatgtatgcgtgtgagagagattgcacaattcattcacgtatcactatctagcgatcgtggacgtgcatcgcttgaacataagtcaatatctacttcgtatcgtggccaaaggtacaatatcgattcaacgctataaagattggacactcacatatcacatttttttctatttcaataaaccttttcagttgtgcatgccaaagttacagtgatgtttcttcaaacaaccaatgtagctatcatgtacatgcaccattgttactcttgcattcaaattcattagtcttggatgatttatgtttccattttgaagtaatatatgtaatattcatatatgaat

SEQ ID NO: 437108 - DNA, 436 bp, Triticum aestivum
gggtcgacgggttctaagtagggagtttgttgtggttaacaagcatcttctccatgacttgactgagatgggtatctggacacctgctctgaaaaataagataatttatgaagatggttctattcagaagatggaagaaatccctgatgatcttaaagcaatttacaagactgtttgggagattaagcagaaaactctggttgacatggctgttgatcgtggatgctacatcgaccagagccagagccttaatgtccacatggatcaaccaaactttgcaaagctaacttcgttgcatttccatgcttggtccaagggcctgaaaactgggatgtactacttgagaacaagggcagctgctgatgcaatcaagtttactgtggacactggctttctgaacgtcaatggggatgctaatgggactaatggcactaat

SEQ ID NO: 437109 - DNA, 462 bp, Triticum aestivum
ccagagaggcatatatctcaccaagatggatcgtaaaacggaccaagaataatccaccttggtcgtacaacctctctcttgttgtgggtcaaagtgatggccgtccatgcgaccccggagatgggctagctcgccaataatcacgcaagtagctagtccccgaagacaaccactgcatgcgtgtggcccaaacatatgtatggagaggtgtgtttttgagtaacaatggaacaactttgatgtggcaccatgatttcaaactagaaatccccacaccgagtgagggttaggttgacgatgcatatgtatgttacaccacacttcaagccaacgacggggattcatgcatgcatgcgtgcatagtatatgcgctcaaacttaattaggtctgaatctcaccatgacctatactacgataacacgaaccaaatgaagaatccgccatggttacctatcttgttg

SEQ ID NO: 437110 - DNA, 456 bp, Triticum aestivum
ggggccagaagtggtgggtctaaaactcccgaaccccctagaacaggacacgcccccaccgaccggcggcgaggaagaggaggaggacatggcggcggcgcgggggcaaaaggcgctggcgacgctggtgaggtcgctgcggagcgattccatctccaactccaacgctcccaggctcaggcacctcccgtctctcacgaggaccttctcgctctacgaccagatcaacctcatcgacaccgtccccgaagaccagctccgcttccaaacttacgatgacactggattcatgattaacaatgtaaagtatgaagggagcttgctgatagtagaaaacaagatactgacctggacacccaaaacatttgcggatataactgctgaaagtttatcaatcttcaaaattgtgcacccaatcccagagattctgaatcttggttgccggaaatacgtcca

SEQ ID NO: 437111 - DNA, 809 bp, Triticum aestivum
ggttttgaatttaactctatgcaggatctaaactccctctcctttgacaggactggctggcgaaggccgagcagattatctgtccggccccattgccagaggacccaccggacgccctcttaacggggctgctggctccggcaccccacgtggtgccggagaagaaggccaagaagaaggccacgggcactcggaagagttcccgttttcaggtgctatcggatgacgactccgaggccgactcctctcaccaaggtgaggaggagaagaagaaggcctctcccccagcggggggagggaagaaaaggaaggcctccccaacgagggaggccgaagggtccaagaagggaaaaactcttcccccggactgctctgccaacgccagtgacgacgacaaggactggcctccaagggccaagcccctggcgagatcgtgagtatccggactcccgaataacttcatggtttttcttttttgccacacaatgtctttctaatgccgcatacaaccctgcagtccgcccaaggatgatcttcccgcttcgtcgagcgggtccttaggtgcgtcggatatggattcttttccgactgcctccaccccccgtgatgcggacgatgccgaggtgggatcccgggaagggacccaccaggaggaggaggccccggaggtgtcgcaggacaacctcccggactttgcaccggactcggccccggagcccatagtggctctggagtccggcgggcgaccccttcgtaagaagggcaagaccgtgacgccggcaagctccgtccaactggaggggccggat

SEQ ID NO: 437112 - DNA, 422 bp, Triticum aestivum
tccacgggcaagaatatttggaagatgaagaagatgacgaatttctgaaaggtttcaaggttgcgaacttcgagtacatagatgaagctaaagctttagcagcaaaagaggaggcacgcaaaaaagcggaagctgaagccgcatccaataaagcaaactattgggaagaattattgaaagacagatgcattgagcaagaagtagaagaaattgctatgggaaaaggaaaaagaagccgcaagcagatggctgctgctgatgaggatgacattactggcctgcacgagttaagttctgaagacgaggattactcctatgatgatgatgtgtcggataatgacacgagtttaccagcaaatgtttctgggaggaaggctcagtattctaagaaaaactcacgtaatgtagattcactccctttg

SEQ ID NO: 437113 - DNA, 421 bp, Triticum aestivum
cggtctagatccgggcgacggcaaagcacaactcctacatgaccactagcatctccagctatctcatgccagctgctgcagtttcaaaggagaaggagagtacgaaacggcgtgcgccaaagtctatgggatccgcgcgcaagaagcagcctgccatcgctaacccagcagcggtacgaggaaagggtgatgtcggggatgcaatggacttgtcacagtaggtggtttgtgtggtggtttgtttgggtacgagtgccctttgagatgacgaccatcacggattcgttgctctcacaagtttcagcccatgccatccaccagcgcacgaagtagtatgaatcagaattttatttactaagtttatgatggaggttaatttaggagatgattatttaaagttagagctccctccaggtgcccg

SEQ ID NO: 437114 - DNA, 439 bp, Triticum aestivum
aattcgccggccgacggggcacacaacgaatatatcatctcttatgactctgatgatctatatccaggaagtaattcaggtgttggaaagctgagatcggacttcctggggacaaagttcgtcatgtacgacaaccagaaaccatacgacggcgccaagtccttgaagagccgatcaagtcgccgctttgcgaccaaacaaatcagcccacacgtttcaggcgacaatcttgaagttggacaggtgtcatacaggttcaacttcctcaaatcaagagggccgagaagaatgcactgcagtatccagtgccccgtaggccagggcaccgcatccgatccatccaaggagaagccaccgagcacctccagctccttgtctctaaaaaacaaagcgcctcggtggcacgaacacctgcagtgctgggtgcttgaattttcac

SEQ ID NO: 437115 - DNA, 409 bp, Triticum aestivum
aattcgccggccgacgaccaccggcctcgaagacggcgcgtggcggaccagctcgtactggagcaggggagtgagagcaggggagtgagcgagcattgagagagtgagcgagtgtgtgatctcgaccgaccgagcgggtatatttaccccacttccgaccgggccggtcggctaacggccgtgaactgccgcgccctgagcgcgcgtcgccaccttggctcgcagatcggcccacgccgtcagaaaaacggtcaactcgcccctcaccacgggtttggatttttttgaaacagcggaccgcgcgtttggtagctttctgagaaaattaaaaaagtgatagttttttggaaccctaacctgtaaactagtagctttatgctatttactccaaataaccaataacaaaaag

SEQ ID NO: 437116 - DNA, 309 bp, Triticum aestivum
tttgatgtggaatgctgcctaacatgtcatatcatatttcttttctttatagcatggacatttggacttctatatggttcgaaccaatagtctaattttaacatgataatttaaatactcaagcatatcaacaagcaaccatgtctttcaaaatatcaacgctaaaataagctttccctagcccatcatgctcaaccattgatccattcatgaaacacactcgcatattagctacacccaatgctcaagtacgatcatagtgccccctagttggtgccttttataagagaagatggagactcagaagat

SEQ ID NO: 437117 - DNA, 431 bp, Triticum aestivum
gggcgaatcgaaagaacaaaagagcttgcgcaagaacacgttaaccttgcggtcaaagccatcgaatctctcccagacagtgacgatgaagatgttctgatttcaaggcgcgctcttattgatatcacacagagagtcatcacaaggacaaaatagcatgattatacacagggtggagaagataaggcggagtttcaccacaggtgtagtgttccgcttggaaatttttggtcgccttggtcattgcattctttccattgcccgggttttgtgtaacatttgatgagacttcagggtaaccattcctgggaatcatcctaagtcgcagctgtagtggttttagttactggtggcagcagaatctgtgtattaatatcacgattggcgattgcacgatgacctgaccataagactgttacctttataatcca

SEQ ID NO: 437118 - DNA, 321 bp, Triticum aestivum
gacggggaaggagcacaagtcgcccaagaaggccgccaagtcccccaagaaggcttagtcgattactgtccagtgcttcgtagtagaattagtgatcgctgtttaggtaatggtgtcgatgtagtaatgttctgttctgctttaagaaaaatgtcagaaatctctctgacttgcagtaaagaaaaaaaaaaaaaaaaaaaaaaaagaagcatcaaaataagtaagacaaacaaaaagaaataaccatacaaaaaaaaaaaaaaaaatttacacacacacataaggttaatgtcatttgtctgaaagatgaatggggcacaa

SEQ ID NO: 437119 - DNA, 376 bp, Triticum aestivum
acggggtacgcgactgagcctccagaggctgatattgaggaaggggttgaagaagatcctgagaacaacgacgatgcccctgatgacgtggtagggggtgaaggtgaacaaaaggaacaggaaaagactgcccgtccacgcaatacaacaaaatatatgaccaagtatgagcgggcacgcatccttggcacacgtgctttgcagataagcatgaatgccccagttatggttgagcttgagggtgaaactgatcctcttgagattgccatgaaagaactgagagcacgtaagatccccttcacgattacgcgctacttacctgatggaagctacgaggactggggagttgacgagctcattgtggaagactcgtgga

SEQ ID NO: 437120 - DNA, 365 bp, Triticum aestivum
gggccgacgggcaagggcgggttcaaggcggcgagcctcaggttcgtggccgccggagtccgcaccagggtcaccttctacagctcctactaccacaccaaggtcaccgacggcgtctcgctctgcggccccgtgctcgaccaggtcaagatcgtgccgctcaagctctagtcgtccatcggagtaagaccagaagctcagatcaatcctgtcgcgttgattcggcatcgtcctctcgtctactatgtagtagtagtgggtacgtaatttgtgacattgctggacctctctctaatcgtgtgccggcgtgctggcgatgaattgcctgtgctgtgcgtgaaacagaagaaagagagggacggatg

SEQ ID NO: 437121 - DNA, 385 bp, Triticum aestivum
ggacgctagttcttcccttctctcccggacgctagttcttcgccatccacctccccaaggatcctcaccagcatggacccaacagcaccagcgtgtactcgggttgctgctccaacagttgagcatctcgaccagcgcgcactactaataagggataaattcactgctgatggttggccttgtccgcgttgctatcaagtgcacaaccccatagacaatctactctacacggttccagctttcgagtgtactactcccgagatgtgcaatgctaagtgccctgagacagttgaattgagcattactgactgcataatgaataccgtcaggaccaattttctgattagaagtcaaggctataaccggaactgcacagcacatgcag

SEQ ID NO: 437122 - DNA, 429 bp, Triticum aestivum
caggattgacgagtgggcgctggaactgtcaagctttggcctcaagtttgagagaacttcaactatccaaagcagagcattggcagaattcatagcagagtggacgccaacaccagatgaagaaattccagagacgagcatccccgtcaaagaggcaagcaaagagtggctgatgtactttgatggtgccttctcgctgcaaggcgccggtgcgggcgtgctgcttgtcgcgcccaccggagagcacctcaagtacgtagtccagatgcactttcccaaggagcaagcaaccaacaatactgcagagtatgaaggattgcttgccggtctcagaatcgcagcagaccttgggatcaagaagctcattgtcaggggtgactcacagcttgtcgtctgccaagtgaacaagaactaccagagtccattgat

SEQ ID NO: 437123 - DNA, 415 bp, Triticum aestivum
cgggtgaagctagttcatcaatctcagcgcctccgactacccgctcatgccccaagatgacctccttcatatcttctcatatcttccaagagatctgaactttatcgaccacacaagcaatattggttggaaggagcatcaaagggctagaccaatcatcgtggatccagcattgcagatctcaaacaaaactgacgttctgacaacaaaggagaaaagaagcatgccttcagctttcaaaatatttgtaggttcgtcgtgggtaatattgagccgatcattcctggagttctgcatattgggatgggacttccttcctcgcacgctgctcatgtacttcaccaatttcctgtcgtcctcggagggatacttccacacggtgatctgcaactcacaagttcaacaagaacacaac

SEQ ID NO: 437124 - DNA, 449 bp, Triticum aestivum
ggtccagatatccgggtcgaccggcgaacgggtggagggaaaatcccagtacgcggacgaagtgagagacgaacactaccctctcctggggctccggggtggggacgatttgtccctcggccggaagccgatgggtgatctccttggccaggtacccggcctcccggagcttcttgatgtccttatccttgatggaggaggccatctttaggatcgaaagtatgtctagaggggggtgattagactacttgaccagataaaaatctagccttttcccaattttagttcttggcagattttagcaacttagcacaagtcatgcaatcaacctacacatgcaattctaagagtatagcagcggaatgtaaaacaatttcatatgaaggtaaacgggacgagtttgagaaggcaaacgcaataggagacacggatgtttttgttgtgggtcc

SEQ ID NO: 437125 - DNA, 549 bp, Triticum aestivum
cgggccgaccgggcataatacgttgaagagaatatcacaagcttgagcattgtattgcaacatcttcaactcatccgcggtagcttcacggtttggttctctcccatcaaagaagtcaccctgcaaaccaacacacacaatagcccaaacggcggggttatgtccaagaatatgcattttcatcttatgcttccaactagcaaaatttgtaccatcaaagtaaggacctctacggtggtaatttccctcgctagacgccatactctcctaggttgtgaaaccaaggctatgaccaccaaaagctatggagatcaaggcaaatggagaccaaggctctgataccacttgtaggatcgaaagtatgtctagaggggggtgattagactacttgaccaaataaaaatctagtcttttcccaattttagttcttggcagattttagcaacttagcacaagtcaagcaatcaacctacacatgcaattctaagagtatagcagcggaatataaagcaattgcatatgaaggtaaagggaagagaatgggggaac

SEQ ID NO: 437126 - DNA, 419 bp, Triticum aestivum
acacacaatagcccatacgatggggttatgtccaagaatatgcattttcatattatgcttccaactagcaaaattagtaccatcaaagtaaggacctctacggtggtaatttcccttgctagacgccatactctcctaggttgtgaaaccaaggctatgacttctaaaaggtatgaaaatcaaggcaaatgtagaccaaagctctgataccacttgtaggatcgaaagtatgtctagaggggggggggtgattagactacttgaccaaataaaaacttatccttttcccaatttcagttcttggcagacttttgcaactttggacaagtcaagcaatcttaacacaattcaagcaagcatgcaaagactatatgagcagcggaaagtaaggcatgcaacttgcaagaatgtaaagggaa

SEQ ID NO: 437127 - DNA, 381 bp, Triticum aestivum
gaaaaagatcgaatgcatgagacgaacacgtatgcaaatgcgatgcacatgatgacatgatataagatgcataacagcgacaacaacacacggagagaaagacccgaacccgaggaaataaattaacttaacgccggaaacggcaagagttggagtacaaattgggaaagttatatccggggtgttacaacactccaccactacgaaaggatctcgtctcgagatctaggactgaaagaacaccgggtactcagaacggaggtgatcctcgcgttcccaggtagcttcacggtcggaatggtgtgaccacttgactttgagaaatttgattgacttgttgcgagtcttgcgttcagtctcttcaagaatagcaactgggtg

SEQ ID NO: 437128 - DNA, 425 bp, Triticum aestivum
cccgggtcgacggggacgatgacttctgtcagcacgacgacgtgatgacggttttggtgatgtgaacgccatcgccaaaaatgagccatgggtacatgctaaacacgtcacataatgtgtcttcataactgatccgatcaatcacagccgtgttgtcgtgaggagaagcaaaaggagcattgccgaaatggatggagtcgccaacgaggaagaccacgaccagtacggtgatccgatgagggaagatgatgctgatgacgacgaaacatacgtcaaaagaagaacgaagactacattacctacgaaagatcgtaatccctgcagaaggaaaactcacgaccatgggctcaattattcgacaatgaacaaaagagggaagaatattagtctaaagcgtcatcgtcgcccaagctgacaaactaatc

SEQ ID NO: 437129 - DNA, 403 bp, Triticum aestivum
cccaatgaaggcaagagcctcgtgcggtccttcctgctcgcgatgaaggaggacagcctcgaggacattctggacccgagcatcgtgcgcgcagggacggagacgctgctgggagaagtggccgagctcgggaggatgtgcttgggtcccatgggtgaagagaggccttccatgacccaggtggccgataggctgaaggctctgcgaagcacctggagggaagagctggtgttggaccgtgccgtgacggaaaatatggtcgtgcacatgccacctgcagcagctccagtgcccggggatctcgcgtcatcgtcatcgggagccccctcgacggtgccggacatgtccggaatgagcatgggggcacccaagatgatgggttaattttgagccttccttggga

SEQ ID NO: 437130 - DNA, 385 bp, Triticum aestivum
cgggcgtaacaacagcggcaatggcaggagggagaaggccccggcgtcgcccaggttccctccgcgcagcctgcacagcgcgtcccagaaggcgagcgtcatgagtaggaacaccatcaatccgagcacgagctcattccgatccccaaggtcattctccctcgccgatctgcaagacgctggatacaactagctgaaacgtacgccgaatttaggttggcgagatggtgctgctgccgctgctgctactgtataatcaagaggtctctacacataagagagcattaagttgttgtgttagtcagtatgtctgttggactcttcatgaatcacctggttggcaatggcatggcaaatgacaacggcaacatgaagtggccgtttc

SEQ ID NO: 437131 - DNA, 462 bp, Triticum aestivum
gggtccactaggccgtgtcagatcatcacgtgagacggactagtcatcgtcggtgaacattctccatgttgatcgtatcttccatacgactcgtgttcgacctttcggtctcctgtgttccgaggccatgtctgcacatgctaggctcgtcaagttaaccctaagtgtttttgcatgtgtaaaactgtcttacacccgttgtatgtgaacgtaaggatccatcacacccgatcatcacgtggtgcttcgaagcgacgaactgtagcaacggtgcacagttaggggagaacactttcttgaaatttttgtaagggatcatcttatttactaccgccgtcctaagtaaacaagatgcataaaacataataaacatcacatgcaattatatagttgtgacatgatatggccaatatcatatagctccattgatcttcatcttcggggctccctgatcatcttgtc

SEQ ID NO: 437132 - DNA, 365 bp, Triticum aestivum
  unsure (1)..(365): unsure at all n locations
tcgccggtcgacggggaggcgcgagtacgaggaagaggaagagctggagcaggagtaagatcggtgacgattgcatctctccgtttatgtggtattgtggttttcgtacaactggagcttgttactagtagagactagagggtaccatggctacaactctgctgcttgtttgcgtgtcttggcatgtattggatttgtactgcgttcgtttgtaggcatgttcactcgatgctatgtttctttgcgtgaattatttattctatgtgaggtttcaagcaagtggatttgaaatagtatccgttgctttgtagtttgaacaatgatatgctcattctgaaaaaannaananaantnnnnnnnnnnnn

SEQ ID NO: 437133 - DNA, 427 bp, Triticum aestivum
gttctcgatgcatagataatccatgtagtaggatgcactcttcggtcagaaagcccctggctatgcttccctctggacgtgacatgttgcgaacgtatcctttgatgacaccattcatcctctcaaacggcatcatgttgtgaaggaacgtcggcccgagttggatgatatcctccacgatatggaccagtagatgcaccataaagtcaaagaatgcgggcggaaagtacatctcaagctcacatagtatcaccacgatctcttcctgtagccttctgagttgcctcacgccaaccgacttccgagagatgacgtcgaaaaagttgcataggccaaatagcgtttcacgaacgtgcgcatccatgatcccacggattgcaactggaagtatctgcatcatcagcacgtgacagtcgtgagacttcat

SEQ ID NO: 437134 - DNA, 147 bp, Triticum aestivum
cagtcctcgacgtcggagacgaggtcgacgccgacctgcttcttggctactaggcgccactcttccatgttgggcacgaactcttgcgccgtcgtgatcccctgctggaggaagattctgtcgatgtcagtatcccgccgacttccc

SEQ ID NO: 437135 - DNA, 467 bp, Triticum aestivum
ccgggtcgacattcctggaaaggagctggctattacttcagatgaggctttaagtttggaggagctaccgaaacgtgctgtgattcttggtggcggatatattgctgttgaatttgcttctatctggaaggggttgggtgctgaagtagatctattttataggaaagaacttcctctaaggggttttgatgatgagatgagaacagttgttgcaagtaaccttgaaggaaggggaatccgattgcatccagggacaaatttgaccgagttgagtaaaacagccgatggcattaaagttgtgacagataagggggatgagctcattgcagatgttgttctttttgctacaggtcgtgcgccgaactccaataggctgaacctggaagctgttggtgttgaggttgatcaaataagagccatcaaggttgatgaatactcccgtacatcagttccaagtatatgggctg

SEQ ID NO: 437136 - DNA, 417 bp, Triticum aestivum
ggggccacgccggcatgaggaagctttgggccaccggctggctgcatgaccgcatacgtgtcgtcgtctcaagcttcttcgtcaaggttctccagctgccatggcgctgggggatgaagtacttctgggacaccttgctggacgccgaccttgagagcgacgcgttgggctggcagtacatctccgggtctctgcctgatggccgtgagctcgaccgcattgacaacccgcagtttgaaggctacaagttcgacccatacggggagtacgtccggcgatggctgccggagctggcgaggctaccaacggaatggatacaccacccctgggatgcacccgagtctgtgctgcaggctgcaggaattgagctaggttccaattaccctctccccattgttgagctagatgaagccaaat

SEQ ID NO: 437137 - DNA, 499 bp, Triticum aestivum
tgcccggggccacgggatcatgggaacgacaaccgcaatgacctgtaacaaacatagaacatcctattaactgaaacatgctttgcaccaactttaattcagtcctcaaacaaattaaagggaaagggatcaattgttttccatttatagcccagtaggaaataacacgcaaggtacaaccaacacaatcaccactttgaacctttcaactcttctcagcctcaaaaaggtgtcatggttttgatgatgtcctcatccaagcgatgcaaattatttgtagagaatgcatattagtaaataaaaagaaattccaaagcagaaaacaccaagcttgctaggatatttgtcactcaaggcatcattttttcatgcaaaagatataaaggtccaatgtccaataacaactcaaccttatttatttttcagaatcctttgatacacactataagttgccgaacaaaatctttgagcatgcacagctggcataaaaaattgatat

SEQ ID NO: 437138 - DNA, 477 bp, Triticum aestivum
  unsure (1)..(477): unsure at all n locations
ttcccggggccacgggcgagccattaatcacggatgctatgcttaaaggccgttagggcttcggcgtctgggcaatcgacaatctggttctttttaatgaggaacctagtccagaattttcgggcggactctccgggctgctggacaatatgactgaggtcatcagcatctggaggccgaatgtaggtgccttggaagttttctctaaaggcatcctccagatcttcccagctaccgatagagttttctgggaggctatttaaccagtgtcgagctggccccttaagttttaggggaggtatttgatggagtgtagatcgtcaccgcgagccatgtgaatgtggagaagaaaatattcagtccatactacgggatctgttgtgccatcatatgattcaatgttcacgggtttaaaacccttctgggaactggtgctccattacctcatcagtgaagcatanggggtgtgcggtgcct

SEQ ID NO: 437139 - DNA, 410 bp, Triticum aestivum
cgggtcgacgggcaaatcgtaggaacaacaaaggaccgcgaagaacggtcagtcgtcgccgggcgggatcatgatcacgagaaatatataggataataaggtggtgtattaccgccatgcccgttgagctgatgtttgtttcagctagagaaatcgttacgcccgctcataattcctttttcgacgctctggaaaataataactactggtatatcattctatatcaaaccggcttgtgaaataaatggttgcgccccggttttttgtcgtcaaaggaacaaacaaataaaatggaaatatacttttgcgatcaagtagatcaaaacttaagtagccgttggtgcaatctcatagatcctgaatcgatgtcgccacaatatgttatacaggacgcagtttgaaaccttcat

SEQ ID NO: 437140 - DNA, 445 bp, Triticum aestivum
gtaccgatcctacattcgcccgtcgacgggcgggatcatgatcatgaggaatatataggataataaggtggtgtattaccaccatgcccgttgagctgatgtttgtttcagctagagaaatcgttacgcccgctcataattcctttttcgacgctctggagaataataactactggtatatcattctatatcaaagccggcttgtgaaataaatgatccgccgtcttgccttctgtgtcgtcgagatcaaaaaaaaaaaaaataaaaaaaaccaaaaaaaaacccaaaaaaaaaaaaaaaaacccaaaaaaaaaaaaaaaaaaaaaataacccccaaaaaaaaaaaaggcaaaaaaaaaaaatacgggcctccaaagggttcaaggttaatcttacacttcttcgaaattcaaacttcttctaaatggccgccaatttttaatta

SEQ ID NO: 437141 - DNA, 445 bp, Triticum aestivum
ggactccagacactggctactatacacaggctggcaggaaaacacttgctgacaagtatgactatgtcatgcatggaaagctttacaagatttcagaggacaattccagcaaggataaaggacctactaaagtggagatctatgcatcttttggcggcctcctgatgttgctcaaaggtgatccttcaagtgctgctaacctcgagctggatcaaaagctgttcctcctcatccgaaaggtgtaaacgtgtcatctacctgataaccagcgcttgtagttcactcaaggctataccaagcctgtgatcgtttggaggctaatcgtcctacacccttatgtactcttttggcggtaatgcgactctagattggtaccatggcttctctgtagcaccagtcgcttattcctgtttccctggagcgcattatgcgtgttactaactta

SEQ ID NO: 437142 - DNA, 455 bp, Triticum aestivum
gggtcgaccgggattttgcagataagtacactccggtttcgcggggaaagaagggaaatgagaaggagaaaagcacttccaatagcaaggtgaaggcttctaaagtaaagaaagaagaaaccggttctgatgatgaatgcaagccaaaatctcagaagagaagtccagctgcgggcaaacccaagatttccaagattaagaaaccaaaagatgaatatgatgatacaaaggaggaaaagaaaataaagaaggaagttggtatcaagaaagatgaaaagaaggctgctggggtgaagaaggagaggaaggtgtatgaattgccagggcagaaacatgatcctcctcctgaaagggatccattgaggatattttatgaatcgctctatgggcaggtgcccgatagtgaaatggctgcattttggttgatggaatggggtttgctaccgctggatgtg

SEQ ID NO: 437143 - DNA, 393 bp, Triticum aestivum
gattttgcagatgagtacactccggtttcgcggggaaagaagggaaatgagaaggagaaaagcatttccaatagcaaggtgaaggcttctaaagtaaagaaagaagaaaccggttctgatgatgaatgcaagccaaaatctcagaagagaagtccagctgcgggcaaacccaagatttccaagattaagaaaccaaaagatgaatatgatacaaaggaggaaaagaaaataaagaaggaagttggtatcaagaaagatgaaaagaaggctgctggggtggagggggctattgtggtgaagaaggagagaaagttgtatgaattgccagggcagaaacatgatcctcctcctgaaagggatccattgaggatattttatgaatcgctctatgag

SEQ ID NO: 437144 - DNA, 478 bp, Triticum aestivum
ggggccacggggcgtcttactcaacattaagtagttgagacacgtgttgagcgataatttgctgaatcgtgcatggcatgctacgtcgttgtcgctggacgtgtagtttagagaaagaacccatttcatatatagaatagatagtgaaacaaactagtaggaaaaaaagaaatggcaaagaagcataccagtctaacaccagcgtcaggtatttcaccttggacgagcctatattcatacatgacccagtcggtccttgtacccttgggcgccttgccagcgtgaaacaccagggtcctcttcatcccaacagtgcgattttcatacaccacctgcctgtcctttccagtagccttccagtagccaccttcggttgaacggttagctctatgcccaacagagtactttctgccacgggtgcaaaagaagtaccactggagatcccggtcggcattgacgatttcgctgaagcaagttg

SEQ ID NO: 437145 - DNA, 469 bp, Triticum aestivum
  unsure (1)..(469): unsure at all n locations
gcggtttgtatgcaatcatgtctgaaacggcgggggttatcgttgaaacgggtagtagtagcgatgggggaaacgttgatgcttttgctaatactaatcctcatgaagaacctactattttgcacactaaaaagtttcgcattggtaggggcaatattattgggaaaaggggttattcaagaatttcctttacttgctgccgggtgctttgcccactatgggcgggtctattctccataaaactagtagtcttgcagatgctatatctttgctcgtggttgaacttgaaagacaatttatccacatgcatccttccatacagaggaatttttctagagttttccaatattgagcattcttctgttaagcgcgcagctaccatctttctagctcatgagttcagatttataataaaagaggcgaacggaatttttgcacattatanggtggatngccgacatcctcccat

SEQ ID NO: 437146 - DNA, 520 bp, Triticum aestivum
ttcccgagtccacgggggtaccgtgatgatcatcggggcagagattctagaaggcgaagtcggagtcggagtggagatagatatggacgtgacaggtacagagagagggaccatcatcgtcgtagcaggagtcgtagcactagtcctgatgattacaagaggcgtggcagagacagaagtcctagtcgtagcaggagccgcagctacagtcctgatgatgacaggaagggtggcagagacagtttgtcgcccgcacgcagaagcactagtcgctcccctcgcaagacaccacctcctcgcaagacaccacctccttgcgaggggtctcctgctaagcgcaatgatgaccgttctcctgttaggcgcaatgatgaccgttctcctgttaggcgcaatgatgaccggtctccaggctctcgtagcccttcaacatgagctgaatgtcaaacaactgaggatcaatggaacagagctgctcatattggaggctgttcagttgctttatcatgaacaatctgca

SEQ ID NO: 437147 - DNA, 452 bp, Triticum aestivum
gacaacctaatctatgccggggaggccacgagcgtccagtacacgggcacggtgcacggcgccttctccacaggggagatggcggcggaggagtgccggatgagggtcctggagaagttcagggagctggacatgctggagatgtgccacccgatggccgagcaaacggccaccgtctccgtcccgctgctcatctcccggctgtaaacagtcgccccctaaactacctacctattgtcgcggcaggttcgccggccgttcattccagtgattgctcggagaaggcagcgtgggagcaatctatccttgctcttcctcgtggcatgaggcgtgtggtcgtgtgaccctgtggtttgctgaataaaattactgctgggtaataaaagattgtgggcgtctggtatgtatactgtcagcgtgatgcgggggtttgtgtttggtaaggcgttatg

SEQ ID NO: 437148 - DNA, 481 bp, Triticum aestivum
cccgggtgcacggagaccgaagcagccaaagaaactcgaagcacaggaacaggaagcaagctgcccccccccctcctcatctccgactcactcacgatccgagatcaggatggccggatcgatggaactccctaccaagggcggcttcagcttcgacctgtgccgcaggaacgccatgctggagaagaatggcctcaagatgcccgggttcaggaagaccgggactaccatcgtcggcctcgtgtttgcggatggagttgttcttggcgcagacacaagggcaaccgagggtcctatagttgctgataagaactgcgagaaaattcattttatggcaccaaacatatattgctgtggtgctggaactgctgctgacacagaggctgtgacagatatggtcagctcccagctacaacttcaccgttatgctactagccgtgagtcaagagttgtaaccgctcttacactactgaagacacac

SEQ ID NO: 437149 - DNA, 451 bp, Triticum aestivum
cgggtcgaccggcaactgaagctctcaagtagtctaagtgaagtgaaagaacttactgcataatagatacaaacttcacagcaagatcagcacccaaagccaacaatctgaaacatattttgtcacagataagatatgttgctgattgtcttaatgatataagtttacaatcagaagccgttatacagaaaacaaacaagtattattggagcctggatgatgacatcgaaggaatttctgctttgagcaatgcaggccatgaagaacaacaactataaagacttgccacaaagaaattgttctaaacatccaacgatacatgtgtctaacatagctctttctatctacatgccttgctcataatattgtaaatgatcgttcgtaagcttattagaaaacatgtatcatcagcaaccatccatctatcagcaattcatacttatttccaaaa

SEQ ID NO: 437150 - DNA, 462 bp, Triticum aestivum
acggtcaggcattcccgggccgacgggaaacaaacggagtgtggaggtgctataataagcaaactcaccatttccccttggccaaagggctccttcacagaatcttccgacctatggcaccgggagtggttttgcatcactgaacctcgcggcaccaagtgggcagctacacctgcgttccgttctggccctccgttacagcttgcagcctggattaataaggggccaggactggggatccgttgatgaagtgcagacgctgcaaagccgcattcggagcctcattgaaaaggacaccggtctcatcaacgtaatccaagtaatgctagtccgtcgggtcctaccgtgccagcgacggcctctccgcatgtgggagttcaatccggaagggccgtgaacccttcagcacctctccggcacgacgctccgaggggtgcggaaattattcttcgggacacgaaa

SEQ ID NO: 437151 - DNA, 439 bp, Triticum aestivum
  unsure (1)..(439): unsure at all n locations
gggtcgacggcgacggggtgccgccggttcgaagaatggataaaggcctcgactccggcgagtgctgacggtggcagggccagaccggcggccgccggagacgtcgtcgggcggagcaactgccggctgtttgggttctccctgactgatcagaaggtgctgggaggagcaggtgagggtgatgccaaggaaggggacgcggatgatgtggtggcggagtgcgccgacccgcgggtgctcgacttgtttgggcgcggccaccctgctcccggcgctctgcatgccatcgtcgccgctcccctggggatgtgatggtgctgctcagttgcgtacgttgtagtatcggacaattggttttccgttggttgaagacggacgccatctgtaatctctcanctaggccactcttaaattctagcaattaaatctactctacttg

SEQ ID NO: 437152 - DNA, 387 bp, Triticum aestivum
gggggaccgcagcgccgcgaggacggcggagcaggcagagcacatcaggagaaccgggaggatgccgccctcgctgggctgctggaactggtgctcgtagtcgtagacctggaaaaaccagcatgcgttgctcctgtcaactagggaatggaatggatctggcaccgtagaatcttctttcttctcttttgattggttcagtagatatgtggcacgagaacagaccgcctgtaagttgtaactatgtgtatgtaagttgcgagctttcttgccttgtctcatgtttcttgcattcttcagtgatgctgagatttctgttcagatccgtatgtacattacagacagtgatttgcttccaaaaaataataaatgatgtatgttttcaaa

SEQ ID NO: 437153 - DNA, 417 bp, Triticum aestivum
cgggtgtatggcaaaccttactgcccctacaagttctaccacatccggtgcctgaggacgagccagatcgcgctggagaagcagaagaatctggagtgctggtactgcccctcctgcctctgcaggggctgcttcaagaacaaggacgacgaggagatcaccctgtgcgacggctgcggcgaggcctaccacgtgtactgcatgacgcccaagcgcacctgcgtccccaagggccactggtactgcccgctgtgcagcgtgcggcgggcaagggacgggatgcagaggtacgagaagtcgatcctgaagaaacaacaacatataagcgccaagcgtgcgagccagtcggacgacgcttagcctagttgatgatgctattgcttggccaagaagggagtaataagcagagcaacgttt

SEQ ID NO: 437154 - DNA, 596 bp, Triticum aestivum
gggtcgaccgggcagctcattggaggtggaggacggggtggctgagccggcgggacgatgagatcgacgacggatcctcatccggtacggtggatgagggacgtcgaggtgttgctgtggacgacgtcgtcggggaagaggctccggctgggtggcggacggagcagggtgtggggtttcgtcgcgggttttcgcggcctcggtgtacgaatgggtgggcggatgggatggcagtggggaaccatggcttagagacgcgcttgtccgaaatgtggggtaagttacgaaagtacccccaccgatttgaggcggttctttcggttcaggggtaccacgggcatttcgcgtgtcgggatttcacaggaggtgggagttttcgcgcgcgttgtaatttcggaatagcaaggcgcgggttgagatggagggagttgtcggagcacaacgagacaaagatatatcttaaatatttcgggctaacaaggcgcgggttgaagaggcgggagtttcacagcatgatagacagagacgctagcttgaattttcggcataacaaggcgcggcttgaaatttcggaagaacaagcttaacgtgtaccc

SEQ ID NO: 437155 - DNA, 412 bp, Triticum aestivum
gggtccacgggcaaagaaggaggtgaagatgtcgctccagagagtgtggaggttgagaagagtgggaacaaaacggagaagaaaaagaagaaaaagagatgcagaggaggcacaatacgtacagatagtagtttacattggcttgtcatgttatttggttgcagttatgtgggagcttgaactacctgttttatttgctttgtaccccttgcaaccgtctatggtttggtaggtacgcctgatgtactatctttacgttactgccattcaaccgaaatgctatggtaattacagagagttccctttaagtttggacaatcagccatgtattgcagtatctgttagctgtttttgcagtgaattttgttctcatctcaataaatcaagacacatgagctcaaattatcaataa

SEQ ID NO: 437156 - DNA, 377 bp, Triticum aestivum
ttcccgggtgcacgggatgcattacaacggcgtggtctatgatgctgtcatgcatatcatgctcaatgcattagtgattgagtcgcaacaaaggatctgactagtcgtaggggttcttgaagcaggtgtgctcccaacccctcttcttttggttcgttacagtacatgggtaattagaatgtgttgtgagataggaaggttcttttgattgcttcggcattttggttacgtgccagaaatcgccatcagattgctcaaccttagagtgtaatatagggacatcttagaaccacacagtttttggctgaatggtaaacggagatgatgtattgtatactttttctcgggtaataactaagatggtgattctgacatgt

SEQ ID NO: 437157 - DNA, 432 bp, Triticum aestivum
actcaaaaaatcaacgtctacgagcatagcatagcagtataagcataacgtagtagtaactcccaaggtttggatgcagggcagtaggttcctacctcatcaactacttcccaatacccacatgttatcaaatcctacccatgcaatgtttgagggtgaaactaatgcataaaaactgggtatgaaagggatatgatcaacgtgtgaacttgccttgtactgttgatgaagatgattcgcactcatcactcttcatagttctactcgtcacactccggtcaatctatcgtaagcaagcattagtaaccacacataagcaatcactcaaaagaccgggaagaacgaagaacacgattcggaaaacatcaaaaccaagcaaataactcttgcaacatagaacaatttctaacagtaccaaaattgggtgaattt

SEQ ID NO: 437158 - DNA, 568 bp, Triticum aestivum
gctgccatgaaaccctacgcggaggaaaataggccccggaaaacccaagaatgaagccgtttaaaacaagaatttgagaaaaaatgaatcctcaattttaaaaaccggccccaaaaaaaaaaggaaaacccaaaaaaaggaaggccgggatatttattatattaattaaagaaaaaaacggcaagttagttaggtggtgccacagaatgcaatgcatgctcccttcatcatcatcatcatcatcatcataatgtgatcagagctgagacctgatcgatggcaaatattagtacgtagatcagtactcctgcttacacaagtccagtaatgagatgcctcggttgcttcgcttcaaaaaaaacaaacaacaaaaaaaaaaaaaaagatgaaaaaaaggtaaaaaagttacaaaaaggaataatagaaaaatgtaaaataaagccacaataatcattcaaaatagacggttcagctagcatgaatgcttcagtcgattatagataccttggagacctagcacacaatcaggtattacagatacgacggtaacgtatcagcatccccaaag

SEQ ID NO: 437159 - DNA, 417 bp, Triticum aestivum
gccacgggccaacggaactgcttttcggccacggcgggcacacggccaagatctcggagctgtcgtggaaccccaccgagaagtgggtggtggccagcgtggcggacgacaacgtgctgcagctctgggagatggccgtgagcatatacagcgacgacaacagcaacaacgccaacagcgcctcgtgcctgtccacataacaagacgccgccaaccaacttcttccctgatgtgtggacgatggccgatggggacatggctcgttcgtactctttgggtggacgagtcgcgtgcggtttacttgtagtgcctcctgcggtttcgtcgcttaattagcagctgctgctatcgtttggcgcctagatcctgtagacatggttggatgcggaagtgactctggaatatttgtacgtcctt

SEQ ID NO: 437160 - DNA, 481 bp, Triticum aestivum
attccgtatcgacgggggacgacgccaagaaaggcttctatcaatgtatcatcagtatcaatcactacatgacaccacacaacagatatgctgctgtcagcagtcctctctaaatagacactgcaattatcgtataagtacatcattgctgctgtcagcagtgctctctaaatagacactgcaattatcatgtacatcattgctgctgcaatgaaccattaagaattatttaaaatctagcctaccatctgcgttgtcgtcaacagagggttgaggcggagttacaaaatctgtatgagaaaccgagggattgtccgagtcagcgacatctttgttatcttcagagctgtcagaagcagctgagatggcgtcacctgattctgaatgtgttctgtccacatatgcttcgggtaaggagctctcggccacgtcagcatcgccgttatgccgagcaatcagatcttctcttctgacaaaatta

SEQ ID NO: 437161 - DNA, 435 bp, Triticum aestivum
tcgagtattttaatttgttcttgtctttttttttatttattttttttttttttaaacagaaagcagcagcctgttgaatggtaccaaaggagtctgggcagattcgatgaacaaatagaactacaaactggatccaactgcaatcagtgtccagaacacgcaaagccgtacagattcacacagcaggggaagcacggagtttcgatgacacaaatggagataagggtggcagcagggggactcaaacgttcagcagctacagctagtacggtttcttcatggggaaaacgaaggaaacaagacctgcattgcctttctaataggcgatgcacggtttggtctcctccttcagttcccgcggggtaccaccccgttaccgcaggctttactcacttggccatcatgaccttgacgaactcctcgtacttgattcgg

SEQ ID NO: 437162 - DNA, 216 bp, Triticum aestivum
tttcatgaacacaccagcgtctacattttagattgcaccactagcagttcgcttcacatatagcatatctgcgaggtagaggaagatcgagtgatgtcgcaggcacagtactacagcagcacagcaagcttccaaagcttggggacaacacacaaaggctcacccacccacgcaagcaacgcaagcgcaggcagcaggtgtcatgtcacggcgacg

SEQ ID NO: 437163 - DNA, 418 bp, Triticum aestivum
cccacgagtattttttttttttttttttttatatacccctctttggttcatttgaagagaaattgcagtgaatattattcaacatgtaaactgcatcccaatggatgaacaacgttgcttgctgtttacatcataaagtttgccaaggcctcgcttgttatccagatgtcataatacgcggtcaagacgctcttacaacgcatacgccttcactacatatgaggccttctgcacctattataacactagtataattatcagtgctgcacaggttgcattctccattcctgctccactccttgaccgcccagcaaagcaatggaccaaaacattgcctccagagcttatagcttcatctatgaaaccaaagcattcatcagaatgctttaacagatcagtgtctgggatatcaagtact

SEQ ID NO: 437164 - DNA, 430 bp, Triticum aestivum
atgcaactgaacgacagatgattaagaaatgtgcagcacagtggacatatattacacaacattatatggtgcactacaatggttggaatttggaaataagtaccaactactgaactgaaatggacaggatattaagtacatatgaagggtggaataacagagttcttcgtgtcctacaagtagcatagcgctaatttattattacaaccaccatgcctggtaatagtagattaaagagtgctaaggtctctgccctgtgcagagagagagggagggagtgaaggggggcctggacctaaccatggtagtgacactgagaagtaatgacatctacatgagtggggtgacccaagacaacaaaaattcatctatgggtccattgtgttaatgagttacacaacaattgcttggtaactcaaaagccttcttt

SEQ ID NO: 437165 - DNA, 410 bp, Triticum aestivum
ccccacgagtatttttttttgtcttttttttgacaaaccaaacacccctccaaactagccctgtttatatttttcggcaaggtaaactgaaaacagattttactaggggtacatttattatagagtactccaacaggggccgtgcagccgtgcaggcaatggtacacagagctagactgcattactagtagtagtagcaagcatgcattattgtactggtaaaatagctaatgcttgctttaacaacctagctcgccagatatatacacaaaacacaccagctagctgttgcagtgcagtactgccctgcccccacagtcatgactcatgagccgtagatgagatcacagcatgagcgtccactgctgggtgggactcccagtggcgggcgacacgatgacttggctagc

SEQ ID NO: 437166 - DNA, 428 bp, Triticum aestivum
ccccacgagtatttttttttgtcttttttaattaaccgttgtaatagctgaaattattaatgtagatagacattatgccagcaaaagcactgatctaattcaccggcagctggccagccgtaaagaattaggagataagttactccacacagtctggttcagaagatcgccgccaggcataacatcttctcatgcctaccatctacatactccagaaaatccaatctactggagattactatttacagctttgtgagcgatttagacattcctctagtgaaacgcaaggaatgcaactgatggaaagctgacaccagaaatcaaagaactctcagttgagttagaaaggccgcgcacaagtccagaaagaggagctgtggcccactgactctttgcaaatcgaggaggtatttctccgtccctggttt

SEQ ID NO: 437167 - DNA, 401 bp, Triticum aestivum
gagtattttaatttgtcttgttcaatccatttgacgttctttaatacatctcaaaacacaccagattcgaaatatccagctgaatgacaaaaatgcagggagagaatgagaagagtacaggcgttcataaaaaggaatgagcgactcagctcatacaaatgtcaatgcaacgtcaagcacatttagcaggtcactgtaccacttcaaggtccttgaagtactcatgctcaagtgcttgcctcgctgtgattcttttgcctggctcgtatcgaagcattttagagagaaggtccaacccagcagggtcaagatttgggactactgttgccaggtcctgagcttgccacctggggaaagctgtcttgaagtcaggcaaacaactgactccctggccaactctg

SEQ ID NO: 437168 - DNA, 437 bp, Triticum aestivum
gcctacagagaaggtttcaccttgtcctaggtgatttgcttcctatgaaccaatattaatcagacatgtcacgagcatgcagcttcaactgcaaggctttttgtgacccctgtacatggatttccaaaataattcgacgacactggcacgctgcagctgctcactccgatgcaagcctcctgaacaattgagagagcctgagtgctgctgcattcgccatggctgtagcttccacatgtgccactcggtgtcccaaagcttgcaaacttgacgctgctgatgacctggccttcttttgggcattccaggcgaagtgcaggtccatatctctgcatcggctgttgagaactccaactatcaatttgggctggatgtgcctctgatacttgtgcgcacaaaattcctggtcggcctcatcacaaaggatatcttgcttg

SEQ ID NO: 437169 - DNA, 703 bp, Triticum aestivum
cgatcttaaatgatcaaagacctagatgaggaagaagagcaagatgcatctcctgcaaaatctcaaaagctaatgggggatgcaatcagaccatgggctgctccatcaaagcccaagtctgcccccaaggttgctgttcaagcccccaagagatccaccagaaacattgcaccagctgagaagaacaaggccccagtgcctgaagtggaagaagaagaagaagggcaagtgcttagaaagttgaagcccaagattcctgaccatgatgacacccatccagtggcaatcaccactagaaaaaaagacacatccgtgacattttgggccgaacgaattttttttctgtcatacatatgacacttctatgacgataattgtgacaaaacccggtatcatcatagatgtggtgggctcctacttctatgacaaaaaatcatgacagaaaatgggcttttcatcctgggcgggctggagacgcagctgcatgacattctttgggccgtccatgatggaaaaaccgtggtagaagcgagggggaggaaaatttcgggaagtttccggttacggtgggaggtcggaggccgagcgatgcgcgtttctctcgtacacgtacgcgcgtgtgtgcgaggcgttggctctaactgaacccgagcgaggcgttgggctctaactgaacccgagagattgcaatgtaggctacccc

SEQ ID NO: 437170 - DNA, 646 bp, Triticum aestivum
ggggcatcttgaaagttctaaaaaactttccatcatttgccacactactggttgcatatgaaaaacctacccaagcacagcacgatacaggagcgacgcacaattacaagctgatattctgttggacaatggaggctataaccaattacttttacgggaacaatagcacctaggcgggtccatgggtaggtatgtacaaaattggtactgcacatgtactgctaagtgattcaatacacacattaccaatcgaggaggagaacgatggtcgcggcggcctctgtgagtcatggtcggcaacgggagtcagttcattgtccacgacggtggtacttctgcgcttggcgtcggcttccgggaagcagatccgagaccgtggaagacgatgccggggaagaggctccgtgtacgacgacgacggtggaccggctccagtgcggcgtacgaggtcgtcgatgaggcagatgcgctgcggtggacgagtgcgccgatgtaaaggggaggagcacgaaggctgcggtgccgtggagaagtctattttgcggtggggatagaaaatggggagtattcaggtgtactactctgggtgccgggggtggggttggttgggtagggtgaaacctgaagttacgaaaacagcccccta

SEQ ID NO: 437171 - DNA, 205 bp, Triticum aestivum
cggtccacggggagcccaaatcgcccaagaagaccgccaagtcccccaagaaggcttaggttccttgcgtagttaggctgtagtagctggggtgtatggatgggtgtgcttcaggatacttcagttcgaagtagactgttcttgctgtgtcgttgtattttctgaccgccatttcaatgaaacaataagttgctttgacagaagt

SEQ ID NO: 437172 - DNA, 404 bp, Triticum aestivum
cgggtccacgcggggaccccatggaaggatggttgaacaggaccacgtggagggctggttgaacaggaccccgtggagggctagttgagcagtagcttaagatttcgaggatcgcagcccattgttgataggattttgatatgcatatgatgtcctatgtatagcatccaaattgaaaattgggatgttacaaacactcacattctgataatgaagaagataatgatgaggttcatgaaaatactcaaacaaatagtaatgaaccagacaatgatgttgagatagaaccgccagttgatcttgataacccacaacctaaaaataaaagatatgataatagagacttcatcgctagaaaacacggggaaaacaagcgaccagccgagaagaaaaaagcggccgct

SEQ ID NO: 437173 - DNA, 449 bp, Triticum aestivum
  unsure (1)..(449): unsure at all n locations
ttcaagggtccacgggcaagaaggagaaaaccatactaccaggacttgaacaagttgatgttggaaaacagatctcctcgcaagtttccacgaaggtggttccaggcgattcatgtaatggcagaatgactaaaagggtggactcgaagtcaaagaaacttgtgagatatccagtaatgaagttgtggcttcggccaagacaattatcactaaagcaacaaaagaagaagcataagaaaaccaaaaagcgtgttaaggacacggccagtgttgattgttctggtgacaacagcagtgagcagcaaacatcaacatcagcaactgtgccgcccaaaactgcagaatctacatctcgtaaacggaaatattcccatgccagtgtaagttctgaaaacaacacccaagcgctcaaagacaggcagcaagctgttggagcaagtantgctggt

SEQ ID NO: 437174 - DNA, 647 bp, Triticum aestivum
cgccgtttgactctcgttgttccattcgttctgattctttttgccaaccggagttcttaagttgaaccttctgtttagatcctctcatttgagttttacccgtgcattagttgagtacttattgtgtgcttgtttgtttgtctgcgatagagtacccggagtgcgccgcttgctacctcgaatcgctaggtttcccggatcgtcagcaaggcaggtaacactttgatcatacctcttctactacccagttttattgcattacatcaaatcctcacacattgcatgattaggatctaattaaattgtgggatgggaagtagttgaggtagtacctattacctgttttattatcaaacctttgggagttacttctacgtttgcttattatgccatgctatgctagtagacgtggattgggtgagtgatatccatgacagatgtgagtttgttttagtaatggtttatctaagatggcaacttaaacacagatctgggtggattgaggtacctgggtattccagggttgcctgtttcttttggaccgccacccaggctcaaagggatcatgagattattcatactagaaactttcctgtgcagccacaagccattatgggctctggcatagttgaataagtcgtgcgaac

SEQ ID NO: 437175 - DNA, 223 bp, Triticum aestivum
gggtcgaccggttctccacacatacggggatggagcgacagaagtatggaaataggataaggtagcggcgagacgagccgtttaaataggtgtcaagtggaagtgcagtgatgtatgcagctgaggcatcctaacgaacgaacgatttgaaccttgttcctacacggcctgatcaaatcgatcaggcacttgccatctatcttcattgttcaactctttgatg

SEQ ID NO: 437176 - DNA, 403 bp, Triticum aestivum
tcgaccacagtgctgtctgagtaaccgtctgcaatagaaatccccactatgcagggtaattagcctactattgataatccatgtactaatcaaactgatatttcttataaaacacgccaggtatttcatatccgtataacaagcaaccaggatttcataatcgaattacatcagctagcttcggcactcagttacgccattacacaacagcaccaacttccacatgcagcatcaaaaacctttggaatgtagcatcatacacggtaaatagacagatgaatctcatctgggaaactgcagaagcggaaggcaagtattgagccttcagtgatgttgaatgtccttgcaactttaggccagtggctatctgacaattgccagcccaaccttcgtcctcttcagc

SEQ ID NO: 437177 - DNA, 230 bp, Triticum aestivum
acaagaggagcagtggcagggagagaaggtgaagactacgccatgtgagttgctgatgttgtgccttatgcggtggggataagggatgtgtgatgtgcttgtgtggcgaaaggcgaggagtggcttttcctttttgcgggaggctgttcatttttgtctattctagttttatattcacgatacatacaattatttatcatcattataatcgagataataaatatttattt

SEQ ID NO: 437178 - DNA, 436 bp, Triticum aestivum
ctccatttggtcctgaggcttaggggtggaactatgatcaaggtgaagacacttactgggaaggaaattgagattgatattgagcccactgacacaatcgacagaatcaaggaacgtgttgaggagaaagagggtattccacctgttcaacagaggctcatctatgctgggaagcaactcgctgatgacaaaactgctaaggactacaacatcgaaggtggttcagtgctccatcttgtgcttgctctgaagggcggtcagtagatgcaacctcgacgtggaccgtaaaggccatttctaccagaacttgtttgcagacctagatctgtgaatttgccggttgattgaagtgccatgtaattgacgcatttgtgaagtcagctgtcacctgtacttggatggaattgtttgaactatatgcttatctgttgtcatc

SEQ ID NO: 437179 - DNA, 436 bp, Triticum aestivum
cgggtcgacgggtttgccttaatatgccatggtcaactcgcatgaagattgcgctcggtgcagcaagggggcttgagtatctccatggagctgagagatccatcatctatagggatttcaagacatcaaacatcttgctagacgcggattataatgctaagctttcagactttggcctagcaagaactggacctagtggagaccaaacccatgtctcaactcgggtcatgggaacttatggctatgcagctcctgaatatgtgatgactggccatttgacagcacggagtgatgtttatgggtttggtgttgtacttctcgagatgattattgggaggagggctgtggacaagagccggccgagccgtgagcataacctagttgagtgggcacgccccctccttgtccacaaccggaagctcttcagaatcattga

SEQ ID NO: 437180 - DNA, 445 bp, Triticum aestivum
gacgggatttgccagatggcgcagaagcttgtcaacatcataaagcagatggatcccagggaccctttcagaatcgagatgacggacatgctgatcgataagctgtataatatgggtgtaattccaacaaagaagagcttggttaaatgtgagagactttcagtgagcgccttcgccaggcggagacttgcaacaattatggtgaagctcaagtttgccgaacaccttaaagaggctgtcacctacattgaacaggggcatgtgcgtgtaggcccagagacggtcaccgatccagccttccttgtgaccaggaacatggaggacttcatcacctgggtggattcctcaaagatcaagaagaagatcatggagtataatggtgcattggatgattatgatgccatgatttaaggatatgtcgtgatagtagaaattttgggaacat

SEQ ID NO: 437181 - DNA, 390 bp, Triticum aestivum
gggtcgacgggccacggcgatgtcgtcctaggaggaagcaagggatgcgcggcgcggccggggcggcgttgatgcgcgccgcccgtgctctctgcagatctgactgagggtcagcaagttttggaagataatgcgcaaacttttaaattagtttcttcgtttattctcttagattgattctcttggggtagcactggtagctactccctccgttcggaattacttgtcgcagaaatagatgtatctagacatattttaattctagatacatccatttccgagacaagtaattccgaacgaacagagtaagttctaatgttagacatcttcaatagatgatttagatgtaaaaataaggaaaacgattgcgcgctcagtcggctgatgacc

SEQ ID NO: 437182 - DNA, 213 bp, Triticum aestivum
tcgacggggagcccaagtcgccgaagaagaccgccaagtcccctaagaaggcataggaggcgcgtcgctttgcttagattgttgtacgtagctgggatggatctgttgggtgtgcttcagaggagacgattgttgtacgatgctgtatcttctcacctgtgacttccatggaacgatgcgttgcataaacaattgtgttccctttgcctgcgc

SEQ ID NO: 437183 - DNA, 311 bp, Triticum aestivum
  unsure (1)..(311): unsure at all n locations
cgccgggctgtaccggcccgagattcncgaggccacgggtaggactacaaaatgaaatgctcttgaagacattttctcttggtccggatttgggcatttttatatcgtgcagtccgcagtttacctgcatctttcgctttgaagagtgtacatttgctatgtcatccacgagatttgttcttgtaaatgtgggcaagtcatttgcattttcataaagcaaacttcccttgcctacattgtatcaaatggacaaaagctcatcacattggtcaaactgatgcggttatgactaaaaacaagggcgtgaacag

SEQ ID NO: 437184 - DNA, 413 bp, Triticum aestivum
ctgtgtaactgaatctatccaggggctggcatttttcgataaagggtgaattttattgactcgaaataaagcatcaagttgatataaacacgatgacaacatacacggcctctgcataattaagacgcacataaccaataccaacacacacacaatgtacccgctagcaaatagcaaggccatatacgaccacagcattgcataagcgagagaaaaacccgaagcgaagcgaacaaatctgcgatcgacaaactacaacaatgaccatatccacaccaaccatctcatgatatcataaggacaacggggttcttcaacagcaacgccttcatgatgagagcaacgctcgagagccgccgtcatcggatccaaccaccaaaggtaagactctaggttttcaccctgaagacagt

SEQ ID NO: 437185 - DNA, 433 bp, Triticum aestivum
  unsure (1)..(433): unsure at all n locations
aggaagctgcaaaccctgtgtaaacggttgaacttgcggatgggcggtgaggcccgtagggagttgctgtataacatcgaatacagtgccgagtactgaagcatttgattttgatgatgccggtgttctttcaatcaagtaggcacgtgtagtgtttgccggtactcgaagagcacagaggctgtagtctgtaaattatactttgtaacagttttcctaatcattcttcagtatcccaggcttccttttttcgctggagagacaggatgagattttatttgttaggatttcagaataaggtcctaatacatttgtttctttgctcaacgcgctatcttccacagtcagaggatggatgtaacgttagttcatcataatgttatccttctgcaaaataaaaaaaannnaanaaaaaaaaaaaaaaaagcgggcg

SEQ ID NO: 437186 - DNA, 489 bp, Triticum aestivum
  unsure (1)..(489): unsure at all n locations
ttcncnngnccgttacgccgccnggtaccggtccaaaaattcccgggtcnacgggcgtgatcaatcgatattaagttcgggggtgctatcagtttagtttatacaggggctgtggtgctgtattatgcctataaaaacacttgtttggtcaattaaacagggcattgaaaattgaaagggcatttttgttttctgttgaacctaagcaatttcatacgcttgacaaagttgatgctttattcttttgctctgctctgctcttgctctgcatgtgcttctcacgtttgctagctatatctctaggttcttgattggcttcactagttgattggttgtttgcattgtctgtttgtgctactttcccccgacgcacccatgatctatagttcttgttccagacagagagttggtccactagttatgtagtttttaggaaaatgctagtaacttgtgctttcatatcctagttatgtagtttttaggcaaatg

SEQ ID NO: 437187 - DNA, 498 bp, Triticum aestivum
  unsure (1)..(498): unsure at all n locations
gnngcngnaactgttacgcctgccggttccggtcccaaattcccgggtaagacgggcggcctgtcctacaactatgacaataccctgactctcaaggggcgcttcaactcggatcttcatgtgggcgggatgatacagtttgaagaaaggttggctagtattgtgttgcgggcaacaggtgatgttgatcttcgtgctatgggtcagcagccccgggtcgggttccaagtggtgtttgacccgacctggaagtaagtagcctttgcctttgcagtgttggtgcttgttttgcttttgcttgggaggaacttttttggtaaaacggaaggtcttgattttgggttgtccatgatgattggtgtatggactgaagctttagacgtgtcaattcgactatgttggttttgccggaagcttgatgtccctctcatacaannaangnannggcngngcntcaanaancanaancnggccggcctaganggatncaaatctttg

SEQ ID NO: 437188 - DNA, 486 bp, Triticum aestivum
  unsure (1)..(486): unsure at all n locations
ttnnnngngacntgtttacgcctgccnggtaccggtccaaaaattcccgggtcgacggggagctcgaagacgcgtacatgctgtcaagaattgttagcttgtgattaaccttacagacaccgtatattatgtaaaatgtcctccactcacacccagtcaatttaaccaattttcctgtgatctatttaaagtttgcggtgaggtccgacgagcagagatccggccggcgcgccatttgttgtaattgttgatgtaaacaggagttgccttttgattgagcaaccatcctgctataagcaacatgtttctcattcttcccttctggtgccccccaacccggcgggctagcttatagttgttggcaaaggtgtacacaccaatcaacctcctcacagttataataagcaagcgcagtttgccaaaaaaaaaanannacggcnnncnannggggcnnctggncggnnaggnnanagtnnttaaggnggg

SEQ ID NO: 437189 - DNA, 498 bp, Triticum aestivum
  unsure (1)..(498): unsure at all n locations
ttcgnngngccttttacgccnccaagtaccggtccanaaattcccgggtcnacggggagacgacgccacccgccatggccgtaaagggccagattcagttgccgctctattaaagatcttgtccactttgtacaagggagaagaggaggaatttctctgcgtcaacccacaaggtggattctctatgcacaatcccccaagctgggtaagtggtcgcatttacttgctcatccgtttagtgttcccattgtcaaatactcagtctgatgacttcaacgcaggaccganaaaaaanacnannnnaagnanaannnncggccgctctagangatccaagcntacgttacgcntgcatgcacgtcatagctcttctatagtgtcacctaaattcaattcnctgggccgtcgttttacnagtcgtgactggggaaaacccctgggnggttacnccaacttaatcggccttngcaagcaaatncccctttccgccngccttgg

SEQ ID NO: 437190 - DNA, 485 bp, Triticum aestivum
  unsure (1)..(485): unsure at all n locations
ttnnnnngacctgtttacgcctgccaggtaccggtccnanaattcccgggtcgacgggctcttcaaccatgagaatggaaggaacgggatcatcgacctcttcttccaggacaggtacctcaatgctatccagaccaacgctccccatcttctgaggtaccttgctgctgcagttgttgtcaacaagaggagaaggaacatgcttaaggaactcatcaaggtcatccagcaggagcagaacagctacaaggatcccatcattgagttcctggagtgcctgtatgtcaagtatgattttgatggcgctcaagcagaagctcgtcgagtgcgagcaggttatactgaatgatcctttcctggggaagcgcgtcgaagagaggaatggcattgctgttcctctgagagacgagttccttgagaatgctcgcttgttcatctttgagacctactgccgtatacatcgctgcatcgatattgggtgcttg

SEQ ID NO: 437191 - DNA, 372 bp, Triticum aestivum
ttcccggtcgacgggcggtggcgcgagcttggagctgctggaaggcaagcccctcccaggtgttcttgcccttgacgaggcgtaggttgattcggtttcacctatcagcttgctgcgtgccctttgtttgggatctcatcttggtctaacgctggaacgttatatgtcccaaggaaactttgagataggcttgtcgccaatttttgctagtaaatgagtcgtgaataattatcaacttgctctgtgcgagtgaagtgatgtgactggaatttaacgtacccccgtggatgtgtatggttttaagatctgcatctttgtgtgctgcttccttctgtgttttttgctttgcttattttggaataaatttttgtc

SEQ ID NO: 437192 - DNA, 496 bp, Triticum aestivum
  unsure (1)..(496): unsure at all n locations
gggnngnagctgttaccctgccggtttcggtgcccatttcccgggtcgacggggagtgcgacgaaggtgccatggccgccatagcccagtctgcgccggattctgtgctgatgacattggcggagtttgagacggcaagagaggcgtggaatgcactcaaagagatgaggattgaataaaatcgtgtcacgaaggctcgggcacaagtgctgaagcgccaatttcacaagttgcagatggagaaaactgaatcggtgaacgactatgccatgcgtctgactactttggtgggagagatccacgcgcttggtgcaaagctcgacgagaccgagattgtggagaagtttttcagttcggtgactgataaattcacgtacatcatcggcacgctcgagcagctttacgacatcgacgactgaccataacgggaggcgattggatgcntgcnggncngtggggaagagaatgctcnttnatgtcngaaanggnaaagggg

SEQ ID NO: 437193 - DNA, 445 bp, Triticum aestivum
cacggggagtgcgacaaaggtgccatggccgccatagcccagtctgcgccggattctgtgctgatgacattggcggagtttgggacgacaagagaggcgtggaatgcactcaaagagatgaggattgagttaaatcgtgtcacgaaggctcgggcacatgtgctgaagcgccaagttcacaagttgcagatggagaaaactgaatcggtgaacgactatgccatgcagatggagtaaagctcgacgagaccgacattgtggagaagtttttcagttcggtcactgataaattcacgtacatcatcgggacgctcgagcagctttacgatatcgacgacatgaccataacggaagcgatcggatgcttgcggacgtgggaagagaatgctcgtggatgtcggaaacgcaaaggaggaggtgatgaccaactcatgtactcacgcgc

SEQ ID NO: 437194 - DNA, 784 bp, Triticum aestivum
  unsure (1)..(784): unsure at all n locations
cgggtcgacgggcacgggaggaaggcgcacgacgacgacgacgacgacggtggtgcgtaccggaagccaaagccgtcccacggcgacgacgacgaccggcccagctacggccgcaagaagaatgacgacgacgacgacgatgagaggcggtcacggtacaaaaagcgcgacgacgacgacgatgatgagaggaagccgcggtacaagaagcacgacgacgacgatgatgaccacgagaggaggccgcggtacaagaaacgtgacgacgacgacgatgatgacgatgacagaaagccacgttacaagaagcgctacgacgacgacgacgatgatgataggaagccacgttacaagaagcacgatgatgatgatgacgacgacgatgataggaagcagcgtcgcgggaacaaccgccgccgccacgatgacgatgactgattatgacatgagtttaagctgacgctaataagcatagttgcggcggctttgcatcgatgaattacgacatttcactttttttccaagcatttttcatttcgctgttcactgggcaccatgcttccaatcgtatgctcgagcttctcttggaataaaatgtgtagtttgacctaaaaaaaaaaaaaaaaaaaaaaaaaaaaaaaaaaaaaaaaaaaaaaaaaaaaaaaanaaaaaaaaaaaaaaaaaagaggaatcaaaaaaggttaaaggaattaattacacttgatgtaaaattcataactgatggtaaaaaaaaaagcggggctccctaaagggtcccatcttt

SEQ ID NO: 437195 - DNA, 726 bp, Triticum aestivum
  unsure (1)..(726): unsure at all n locations
gggnnnnngnnnttnnngnacctgtttacgccgcccggtaccggtccaaaattcccgggcgacgggaagttacagaatgaggacggttcatggttcggatcatggggtatttgcttcacatacggcacgtggtttgctatagagggcctatcggcagttggacagtgttacaataatagcacctacatccggaagggttgccagtttctattatcaaagcagctaaggaatggtggatggggtgagagtcatctttcatccacaaccaaggcatacacgaacctagacggggagaaatcacatgtagtcaacaccgcatgggcaatgttggcactaatgaaagctggacaggccgaacgagatccgtctcctttgcacgaagctgcaagacttatcatgagcatgcaacttggcaatggtgacttcccacaggaggaaatgattggaagtttcttgaaaaatggtcccttgtgttatatggcttatcgcaacatattccccatatgggcccttggagagtatcatagattagtactttgctctggctaaactagtaccttctggtatgaagcacctaaatgttgtcgctcctctgctggcaatgctgaaagagcgatgtcttgatttacatgtcctgaagaaagaaacaagaagatagtcgtgttattataaggtggtgtgaatacctgaagttcatacataatagtataagactatgttgtaatc

SEQ ID NO: 437196 - DNA, 441 bp, Triticum aestivum
gggtccacggggagattcacttaatgacgagctgaggaaaaaggagaataatcgtttgattttggccaaacatacctctcttttgaagaacatgaagagaaaactcattttggcgaaaacaaaggttgcaaaagcagagatggctttggcgaaagttcaggaatatctctctccagcagagcttccaacggatctggaaactgttacagacgaggagcgtttcctattccgcagaattggcctgaaaatgaaggcctttttgatgcttggcaggcgggaagtttttgatggtactgtgcaaaacatgcacttccattggaagcatcgagaattggtcaaaattgttgtgaaggggaagacctttgaacaagttaaacatattgctatctctctagaagctgagagtggaggcgtgctcattgcactcgacaagacaacaaa

SEQ ID NO: 437197 - DNA, 453 bp, Triticum aestivum
ggtccgaatatccgggtcgacggggcggcaactgttgcagccacaatgttcccaccatttgctagccagacacagctaaatgccagagctagctagcgcataatagtgcactagtagtagtacacttgtatcatcttcagcaaactactccctattcccaagaaattgcacgtatagggagagttgaggcaaaaaacctgcttcagcagtctccctaaacccaaaaaattatctcctcaaatagtggagagttgcaaccctccccataaattttcaatgcttgccatgtcagtgcgccgcctccattgaccgccgcgccactggaccactgccgcctgctggaacaccaccgctgccgccggacttctgtgctgccgttgctggacatccgcgccgccgccacctgccaccgcagccttgacgaaaagatgcaaatgagagagaggggaaaaa

SEQ ID NO: 437198 - DNA, 419 bp, Triticum aestivum
  unsure (1)..(419): unsure at all n locations
ggtccagaagtccagggtggttgccaaggaccaaagtgaggaggtcgccaaggaccaatcttcatagttcttgttcctccacggcgttgtatccgctgttgtatctgatgctcaaagtagatgtcatgtggcggcgccctcccgtgctgcgaaaccgaaactgacttggcctgagtttcgtcgttgttccatgctcccggctatcctagatggtaggtaatgtcggaacacagggggatggtggggcagtgttgttaccatatgatccaaggggtaccttttctttcttcatgctgaaccttgtactgtgtagcttctatgctggtgtttcatgctagtgatttttagcagtaaatgcatgtaacctgactatttgaatgatttgaacaaagttgtgcgaaaaaaaaaagaaggnggag

SEQ ID NO: 437199 - DNA, 423 bp, Triticum aestivum
cccgggtcgacggggagtttatccaggttcgggccgcaagtgacgcgtaataccctactcttactggtttgtgtgtacctggtgttcttggactagctacaaagtgtgccgggtccaaaaagttcgaatccgcctccagtacgcctcgggcctccttttaaagccaaaggggtcgccacagtggcacacaggaggtggaaagtttgtactgtatacaagtctatcgcctggcaccgtacgacaaaacacatttaatgcgctgccgacgtgccctcttactttactggggacgacaaggaagctcgtcccatccgccgccgcttcgtctcgctctgacgcgcgtccagcctgactacgcatgcagcgccatgctggttggttgctgagttggcgcggtggcagagtcttcatggagatctgcat

SEQ ID NO: 437200 - DNA, 460 bp, Triticum aestivum
tagccgtcctaaattctagggtccacggggtctcactggtccatatctctttctttagcaacattgaaatcctcttgaacctttagggaatgccgctgcagtctactaaagaaatcaaacagacccaactgctcaactacaaatttcttaggattaatctgtcgcacacatgcacctcataccgaggttaaataattcaaaatgattgacgaagctaaaatctaaagacaacttaagattactgaaaactgcccaaaacaataatatgactgaattgttagatggaaccaaaaaggaaattgtatttatcaagtttattaatctgcatgaactaagacagtctccgatattcaagaatgtagtggctcttgatttttaatcagagataacaaatgaccagatgcgtacaatagagggaaggagaagatactcacgtgtgtagcgcgcttgaatttgctgc

SEQ ID NO: 437201 - DNA, 553 bp, Triticum aestivum
tgaggacctggacggcttggcggccggcaacaagcaggagcaggtgtcaagcatcgtctcgcaggggcacgaggacggacagccggatgccgccgccggcaacgcggacgctaaggccgagaagccccacaagaaggcgtccggcaagcacaagctccgcagcgactagaagcagtgcgcgtgagcgcgtcactgccacaccgcgtacgtacgtaactacgagctgtcgccccgcccacctctccggcgacgcacgtaggcctccatccagcagcgtctccatcaaattgattaattgcgctttgaattactcttcttcttcctcgcggtactctcttccttgattgtagaaggaacgagtgacgtactaccatacttcggctagttacttaatgcttggttgatttttttctttcgaaactaatatcgcgtcgagtttttaacagcgaccgtagcactccagtttgtcttaattttttgttgtatttgttcttgtaaccaagtttttttggctgggtgccgaattatattgtaccagttttgtttttggctt

SEQ ID NO: 437202 - DNA, 426 bp, Triticum aestivum
gggtcagggcaacacactaggggtttgttgcaccaacaggagccctcgggcctggactgatcgtgtttccgagcgtagtcgcggtaggcccttccaagtacacaggcgaggaggctgccataagtcgtcccttgaggtcttctttgcttcttcataatctgagcttggatcagtttctggtcttcccgtgcatcacgcaacgccaattgtagtggggccatatttgtaatggcccatgaacgactttaacgcatgggggagtaactgccaattcactcttcccaccacgttcttctcccctaccacgtatgttgcatgcattgagtggggtaagtaaaggaggcgcgtggtgcgggagagtgtcaacgcaagggcctggccttctcgcattggttgagaaggacggccgtcacccatcgacggatt

SEQ ID NO: 437203 - DNA, 439 bp, Triticum aestivum
gtcgacgggttatcttggagtattaccatcttttatgtcaaggatgttgtgaggactgctccacctcttaaagaattcttggtattgtgatacttctcaccctcaccattctttcttggtccgcgtgttgattctaaccgggataccaacacgtgaaccatgctgcttggattctgtacttctagcaaccctattgctttgaagttaatggtcaacatttcatccttagaccattggttattgaatcaccattctaacattgatcctgctacctaagcccatatttcgggtgcacctttcaaccagtgattaattgtggtatgtttccctcgagtatacatcattatatcatttgatctgttaaatgttatctccttgttcacataattgtggaaatccacctttttgtgaatctcaatgaattgtcactgagcccatc

SEQ ID NO: 437204 - DNA, 476 bp, Triticum aestivum
attctagggtcgacgggcacggctgagacatgacgacagaaatcgactgggccatcggcgccttcgtctccggcgccaccgtctatggctacagaggaaagagcattaagtctgccctcatcggtggttctagcctggcattcacatctgccatcctggacgttggtggtaatactaccagagtggacaatggcaaagcgtaccatgcatacacaacggaaaagaagcccgagcctgcgcattgaccaaggttgtctacttgtagcacaaatcatgcaaaccagctcggtgaatttttgagctgatgcgtgctgttatgtctgttttgctgatgcacctagttcctttgcaaagctgtagtaacttgttttgctcgagggcaatacaacagacctggaataaatatcttgctttattttgcttcatcattggttacgataataatcacatgtgacacaatattgttaccccaaccc

SEQ ID NO: 437205 - DNA, 418 bp, Triticum aestivum
ttcacgggtccacgggcaaaaacaaaggtggtcacaaggaaccacaatagtattccaagcactatcctttggcactatcatcctgtacataagcaaggcaaccccagtccccaatctatacctactttgtaaggggagaaggtttcttactgctgaattttcatccgttaatttcgtttgtccatcacggtaaaaaaaaaaaaaaaaaaaaaaaaaaataaaaaaataaataaacataaaaaaaaaatcaaaaaacaaaaaaaaaaatcaacccccataaaaaaaaaaaaaaataaaaaaaaaaaggggcgccccaaaaggttcaagccttacttccccttaaatgcaatttcaaacccctccaaaagggcccccaaatttaattccagggccgtccttttaaaaagtccttaccggg

SEQ ID NO: 437206 - DNA, 633 bp, Triticum aestivum
aattcgcgggtcgacggggaacgtgctcaccatcttcgaggaggaaggcgggcggccggacgccatcatgatcctgacggtgaagcgcgacaacatctgcagcttcatctcggagaccaaccccgggcacgtgcggtcgtgggagaccaaggacagccagctgacgatggtggcggacgacctgaagccgcgggcggtgctgacgtgcccggagaagaagttgatccagcaggtggtgttcgccagctacgggaacccgctggggatctgcggcaactacacggttggcaactgccacacgcccaaggccaaggagattgtggagaaggcgtgcgtggggaagaggagctgcgtgctggccgtgtcgcacgaggtgtacggcggggacctcaactgcccgggcaccacggccacgctggccgtgcaggcaaagtgctccaagaggcagaggaccgccgagcaataagtaagctaagctcagatatgtactgctatgtagatcatctcatcaccttcacctttgccgaccatggtctttttcatgcttgttgtttgggatgcgtgcatacgtgttgtactcaggttgttgattcctgtgaattgttctaggagtagatggagcgctgagatgag

SEQ ID NO: 437207 - DNA, 433 bp, Triticum aestivum
gggaccaacatagacaaaacatacacttaagtaaagcacttacaaaacagctactcaaacccgcacaaggaaaagccaattccaacacagcgggagacatagtcaggccaatgtcgattagaaccagacacacctacgaatccatatatggcccatccacaacaccaaaacaacttcgcaatccccacatggaccaaacatccaaccaacagaccaccggcaccctctccctgcacaaagtccaaccccccttcccccaaaaaatcacatccaccgcccccccaagcacacaatattattacagaaataatggaataatcaacatagaaaggaactaaaagaggaagagaagaaattgctaccttcccgcagcagatccacaacaccaaaacagcctcgcaatgcccacatggaccaaacactggacatgatg

SEQ ID NO: 437208 - DNA, 423 bp, Triticum aestivum
gggaagggccgcctgagccaggaggagatcgaccggatggtcaacgaggcggaggagtttgccgaggaggacaagaaggtgaaggagcgcatcgacgcccggaaccagcttgagacctatgtctacaacatgaagaacaccgtcggcgacaaggacaagctggcggacaagctggagagcgaggagaaggagaaggtggaggaggccctcaaggaggctttggagtggctggacgagaaccagacggccgagaaggaggactacgaggagaagctcaaggaggtggaggccgtgtgcaaccccatcgtgtcggccgtgtaccagaggtccggcggagctccgggcggcgagggcgccgacggcggcctcgacgacgaggaccatgacgagctgtagatgggtttaaaggggaaccaatttttg

SEQ ID NO: 437209 - DNA, 407 bp, Triticum aestivum
attccaggtcgacgggtgctaatctcatggtaggtaatgacattacataagaaagattgtaagcagtaaaatttattgaaagttgacgaccataccattggccaaggagccattccatgaaagaaatttataagggaagaccagattcacatgccaatataccgtcctggacctcctttatgattgtgagccccattaagtattttatgtcaaattattgacgttggacaacgaagacaacataatgatttatgtttgttcatattcacacacaaagttactagcacaaagagcccctgtcgttgcaacgggagagaaaacatatcacacactcttaaacccgacaaccatcacccaagactacaatatgtccatcccctttaatttttcgagatatcatatttgtg

SEQ ID NO: 437210 - DNA, 354 bp, Triticum aestivum
ttcacgggtccacgggtctggccgagatggcgctcttcagcgaccccggcatgtacgtccaccccatcaacgtggaggcgctggcggagtcgtagtgtggaggaccgccagcgatctggccgtgtgtgcttaggacagtttttatcgaaccaaaaacttaatttccaaatagccgcctcaaagcatatcttccaacaaattctgagttttttttacgttgcatttctatcctaaaactttccttttgttatttctcccatcctgttgcgtatgtaaatctcacttccgcgtacattttaaaaacatttcaattgtgaatgcacgaaatcaatttcataaaaaagataaccatgg

SEQ ID NO: 437211 - DNA, 413 bp, Triticum aestivum
gggtacaactatattcaaattacttggaattattaatatccggaatacctcattgtgaaattacaaatgtgatttcaacacccattgcaacgcacgaggccttttgctaataataataaatatgataataataataatataatactcttcccattcctaaatataagtctttttagagatttcaacacagaatacatacgaagcaaaatgagtgaatctacacactaaaatatgtccatatacatccgttatgtgactataaattaagaaatatctaaaaagacttatatttagaaacatagggagtataaagcaaaagcttgctgattgttaggttcatataggttggctagtattactacaaatgcctcacgcaactgcctcctcccccaaaagtccagggtttctttgtg

SEQ ID NO: 437212 - DNA, 621 bp, Triticum aestivum
agtcccgggtcgacgaatacgcagatatgatgtcactgtcaaaaacgtctactgggctgatagtggtgacctagttgcgatcgcaagtgatacatcattctacatcctgaagtacaatagagatgttgttgctgcctacttggaaggtggaaagcctgctgatgaggaaggcgctgaagatgcttttgagttgcttcatgaggtcaatgagcgagtgcgaactgggatttgggttggagactgttttatttacaacaactcagcatggcgcctaaattactgcgttggtggtgaggtcaccacaatgtatcacttggatcgccctatgtatttgatgggatatcttgcgaatcaaagtcgagtttatcttactgacaacgagtttaatgtcagtgggtatacattacctcgcagtttgatcgactaccagacgcgtgtgatgcgcggggatttggaaagtgcaactgagatctgaccgtccataccatagacgcaatatcgtagtggctctcatttcctggaatccagaggaatgttggacgaggctcgtgaaatagccactgatgctgatgatcactttgaattcgctgtgcagcgtggacaactacaaatcgcaaacgc

SEQ ID NO: 437213 - DNA, 564 bp, Triticum aestivum
  unsure (1)..(564): unsure at all n locations
aactgttacgcctgccggtttcggtcgnaaaattcccgggtcagacgggaagatctcgctgactgagctgacggacgcgctgcggacgctggggtcgacctccgcggacgaggtgcagcgcatgatggcggagatcgacaccgacggtgacggcttcatcgacttcagcgagttcatctccttctgcaacgccaacccggggctcatgaaggacgtcgccaaggtcttctgaatcagttcatttcacctcagccgtccgatccaggagccgatccatctacgtacggcttcgtatatcaatttcatgcaactacctactccggtcccgatccagcctcagcttcacctgaggccggccctaattttgtttgatcaatttttttgctactagtagtaactagtgatgatcactgttgcatcatttatttattttatatcatcacaagtttcctgtgtttcttttctttctctacctttttgtcgatcgtcggctccagctcgatcgaacgatccatgctgctaattgtttgtgtacgggtgattaagtaacttgtgcacttgtgc

SEQ ID NO: 437214 - DNA, 428 bp, Triticum aestivum
ctcccgggtcgacccgggacgaggtgcagcgcatgatggcggagatcgacaccgacggtgacggcttcatcgacttcagcgagttcatctccttctgcaacgccaaccccgggctcatgaaggacgtcgccaaggtcttctgaatcagttcatttcacctcagccgtccgatccaggagccgatccatctacgtacggcttcgtatatcaatttcatgcaactacctactccggtcccgatccagcctcagcttcacctgaggccggccctaattttgtttgatcattttttttgctaccagtagtaactagtgatgatcactgttccatcatttatttattttatatcatcacaagtttcttttctttacaaaaaaaaaaaaggaaaaaaaacaaagaaaagcgacgcacagggagccagggccagc

SEQ ID NO: 437215 - DNA, 309 bp, Triticum aestivum
gacggggagtcgctgcaggagaggatcgagaagctgccggaagtggagcgggcgttcgtccatgcggacttcgagaccacccataagccggagcacacggtccggagcaggctgccggcgaccgagccctgacgatggcaccttccgctccagcattcgtcagatcttgtacagcgaaaatacacgcctgaagctgcagtgttcttgttgtttttctcttgcgctgaccccgaaaaacacagcgacagagccatctagaagatggatgtctctgtggaataatacaggattcgccatttttatgggagc

SEQ ID NO: 437216 - DNA, 458 bp, Triticum aestivum
attcacaggtcgacgggggctcaacaatactatggaacttcccgacaaggtgaagccagtgcaggaaatcagggaatgcaatcaccctacagatccagttcgtttcctgcacctcagtatgcactgcagagagagaatgtttttcctgagagacctgatcaaccggaatgcatatactacataaagactggagattgtaaatttggtgcagtttgcaaattccatcatccccgtgtgcgttcacagcctcccccagactgtatcttgagcccaatgggtcttccattacgcccaggggaagagctctgcaagttctattctcgctatggcatctgcaagttcggcgtaaactgcaagttcgaccacccgatggcggctccgatgggggtctacgcgtacggctactccgcctcggcgtcgcccaacgcgcccatgggccggcgtctcctggagtcccc

SEQ ID NO: 437217 - DNA, 431 bp, Triticum aestivum
gtcgactgcccggatgccgaagccttagcggccttcaagcacagtgtctgagatgaatggctcgccaaacacctcggccaggaaaagccgaggacaatggcagccttaacaagcctcatgacccgcttttgcgcgggcgaggatagttggctagcccatagcggcaccagtgacccaggaacatccgaagtcagagatggcaacggaaatccgtgacgcaataaaaacaagcgtcgaaacaatgaaaacagcccagataacacgacagtcagtgccggattcaggggctctcgacccggtcaacggaagaagccatttaaaggcagtagagatggaccgtccagcctgaataagattctagacaagttatgtcagattcatggcaccccccgaaaaacctgcaaatcacacccatagtgagtgctgggttt

SEQ ID NO: 437218 - DNA, 412 bp, Triticum aestivum
gggcgtgaagatgaccagatcgagtctgtagcgtgtgtgtcccccggcgtgagcccgtggttgcgttcgtggagtgaaggagctgcatgcgcagagccgttgcgatctgttggagtcaggtgcgatgtgcgcgcggctggagggagttagttgcaagctagctagatggttggccgggtcatgctagtgcatgcatgggctagcccggcgggtcatgtggtcatgcatggatatggatcgtgcatgtagtggttagcttagtgcgtgagttagttgccgggtgtgcaggccgtgtggtgtgtgtgcacgggtataaaaacccctcctccatgtactgatcgagttgagccggtgtgtagccatgtacccactgttaggaagaaaaggattggggcgttcgtgcgcccgtggc

SEQ ID NO: 437219 - DNA, 425 bp, Triticum aestivum
  unsure (1)..(425): unsure at all n locations
tcccgggtcgacggggcagtcgatgccaggatgctgattgtgatgagcattaagctgaagctcgctcttctcggcgttcgcaagagacggcgtgacctgtgaatacatcgagtgcggcatgtaacataggcaaatagcctgcctgaagagtgagggagagaaaacctgcatagattttgttctggcgtttttgtgtgtgtttctagtgattgtttgggtttattttccgcccttatggatgtacattacaggtatataagacaccatagtgatgatgtctccttcagggttatggaagtgaaagtaatgttatggaagtgaaagtaatggtatgaatgctgtcttcatggttataagacagcatagtgatgatgttttagatacaananaaataaaaaaaaaaaaaaaaaaaaagcggccgctct

SEQ ID NO: 437220 - DNA, 410 bp, Triticum aestivum
gggcactgagagagcttccgaagaaggctggccaacagttagtaatattatctcaggtcctaatggatgatattaatgttggttatgaaaggctggctgaactccaggtaaagaaggtgaatggtgttgaggttgagaatttgaagcatttgtgcagtatcgtggagaactgcactgaagaaaacttgagaattgatttggacgatgagcgggagatcgtcctgaaatttcagaacgcgaggcttgccacgtctcggatcctcaagcggcacaggattccatcagccatgtcgagtgaccttgtcgatgaacaagcgagcaaaggtgagactgacgcgtcatgcacaaactgacacattttcgtaggcgtagctacacagtttctgtggaagcaccgatgttaactcggt

SEQ ID NO: 437221 - DNA, 375 bp, Triticum aestivum
gggggttgttccatggtatgtgactcctccaatgatctagatactttttggtctagtgctttattcattgcgattttttgcttcctaagtgaccctattcttgagcttgcatggcaaatttatggagtaccaagtaattctaatgcatgagacaagctccacgcacatgtcggagtagttgctatcaatttcattaaattgtttcacatttgttttgagtcactaccaattttagaaatttttcagaggaacatatatgttcaggaaaatgtaccaacgtgggtcatcaatgtagaatgaatcccggctcctgagacttgagcatgatgacacatcatcaagggaagctgaccttctgccatgtgtcttaccatc

SEQ ID NO: 437222 - DNA, 474 bp, Triticum aestivum
  unsure (1)..(474): unsure at all n locations
cgcctgctgngtacggcccagaattccgagtcgacgggaaggtcactcagaatatggccctcaagctaaggaacaccgacactggcgagctcatcatgcacctggagtgggttaacctccccccaggcatgtcgcggtgatttgatttgatttgcagagggaggccagctattgtctgccttttgtgatcgtaatgttgcttcctctatatatgagctatgaaaataattaagcgatgcctatctcattctttacataacacccaccgtaatgatttgtggatctcaccaggatggtgcgtatataatatgagcaacgtcgtggtgagatccgcagatcatcacagtgggtgctacgtaaggcatgtgatagacttatgctgctgggggtaatgcttgctttcagttttggttctgcatatgttgtatggctattttaataaaaaaaaggtatattttgtcccaaaacaaaaac

SEQ ID NO: 437223 - DNA, 400 bp, Triticum aestivum
gggatccggcaacaacttgctcacaagggtgcaaccactgaatttgtaacgacacaatgatttgaaaaacaatcaacagatatgtaaagaacacagacagtaaaggtagaagatcatttccgggtagataggagagctattaaaatccacatacatgaatcagagtttcgactgggttctccagatttaaccaaaagaagacttttctacaaataagagaatttctcacttttttgtttataccgagccaagacatataatttccattgaacaacgaagtacggatgctagccggagaatcaagagatacatacttcccagtccgattcgtttttagttcccaagatagaatttctttgtctttggcaagagcggtgggtgacaacgtgcaagactagat

SEQ ID NO: 437224 - DNA, 461 bp, Triticum aestivum
gtaccggatcaagaattcgcgcgtcgacgggttcattgagctggacgaagatcggcgcttcagcattaagctcgaggagaccttcgatgttcatacggtacgcaaccgacgataatagtttttttcgtaattactcatgacttcaactattttaatcatgacaatatttttcatcttttccaattcgactagcttatcccatgctttgcaagacgctatgtcttggagaggatgggttttgaagaccatgaaagtttcgaaaccaaagaaattatcctaagtacccatcatggtgtggattttcaaataaagttgtacaatgctcagagtgtaacccattttggttgcaaaaattgggaagcactttgcaagatgtatggttttgatgagggtatgcttgttaccatggatcttggtgatcctacaatcgagcaagacaatatgggcatttgggtccttgt

SEQ ID NO: 437225 - DNA, 312 bp, Triticum aestivum
gtcgacgggctatccttatgagtcttcattttgagccacaaaaattcaccgtttgtcacaaaaaatatctttcttgcggaaaaaggggatgcacccatatcataacacatggatgggctcctagcctagtggcaagagcgcggtgatgtctctcggccgactcgggtttgaactgcctacgcaagcacttggtaaagttacgttacctgatctctgagtgtgggcactccatgatggacaacatattgtgcgtccacgatgccaaattgctcttcagggtcctgccagtccataaaaaatgaacataagtgt

SEQ ID NO: 437226 - DNA, 425 bp, Triticum aestivum
ggggtcccaaacaagttggggtaggctatctcaagacatagaaagccaagaagaaatttgtattttgggttttagatttgcaaattgtggtatagctatcgctacctagaatcgatagaacctctgtttttttcaataaagcccagaaagccatacttacactcattctccagcaaataactccactggtaagctattccttcgctagactcctttgaagcatcggaagtaaacacaagcaacctgtggttctttgcaaccagatctgtgacggtgggccactcctgcccactcgttggcatttctgagatagggtaccaatacttcatcaagtcagcagcagtaaacaatttgctcaatctcatcggggcatgtacgtaatcctcgatgaatattgtaacaatctccgtgggattctcggataa

SEQ ID NO: 437227 - DNA, 428 bp, Triticum aestivum
ggggaccaagcaggcaggcaggcgcaccaggctagcgttgcctgatcagcagctgcacatatagtcagtcgagtcgagtcgaatcgaggcagtatagtttagctggagcttgagagggtcagatcatggagctcgtcgggagttggaggaaggtgatgccttacatggccatggtcttcctgcagttcggctacgccgggctcttcctcctctccgtcgcgtcgctgcgccagggcatgagccactacgtcctcgtcgtctaccggaacgccatcgccgccgctgccatggctcccttcgcgctatggtttgagaggaaaacaaggcgcaaaatgaccctctccctgttctacaagatcgttgttctggcactactcgagccagtccttgaccagaacttcttctacataggagcccgtaacacgacg

SEQ ID NO: 437228 - DNA, 557 bp, Triticum aestivum
tatttcataacttaataatcgtagctccaaatttaataaactttatatgtaaatggggtagaaaatgcctagtttaacatggtgcactttattttcttgtttaacaacaataaaatgtggtttagggcagaacattaccaaattgataatatgcatatggggattttccggaattgttgtttgttcttccggtctcatttaaacttgcctagttaggtagtttcattatgcttcaccccttgccatgtttaacaacatttaatattgatcagtagcaataccgagagagaactaactaattgttgtggtgtttcgtcaatatgcaacttgttacatattgagctccacttaactttagtgttgtttgtgcactttgccatgccatgcctcattacactggacatgcatcatacttgattgtgcatcatgacatgattatgcctgtgtgtttaccatgttgtttgcttctttccggtttgcttctctcgttagcttcggtttcattccggatttgtgaggattcgttcgactacgttcgtttgacctcttcagggact

SEQ ID NO: 437229 - DNA, 393 bp, Triticum aestivum
gggatgatccaagaggccgacctcgacggcgacggcctcgtcaacttcgacgagttcgtcaggatgatgatgctctccgacgccgaccagcagcagcagcagcagcattgagagtttgtccgagactaggaaatatagtccgtccgtccgtcgtccatttcttcggtggacggacggacacctctctaatccgcccggggattaagttagctaagctagccatgcatgtgtggatgaatggatcgtgaattcttgattgaggagttacaactgttagtggaaaagctagacattagataactagctagagaaaagaaaaaactagctgaacgtggggattctgttccgtcggcgccagcggtgcatataattaaataattttcaccagtgact

SEQ ID NO: 437230 - DNA, 358 bp, Triticum aestivum
cccgggtccacggggtcaagggactgtacaaggggttcggccccgccatggcccgcagcgtcccggcaaatgccgccaccttcgtggcctacgagatcacgcggtcggccatgggctgactgacccaaggtcccggcgccgccctaagtctcttctccgacgcggctgaagcggcgttccacggagcaactgagagataattcaggaccatggcaaacaaaagaaaggaaaaattaaccattcttctttgctgcgacgttgtttctgaaaaccttgcatagactggcagcaatggcaggatcgttggtgataataaaggttgagctttacctgcgcacaaaaaaaaagacacgcacct

SEQ ID NO: 437231 - DNA, 413 bp, Triticum aestivum
  unsure (1)..(413): unsure at all n locations
gggggtagtcgagtgaatcctcacaatcgcaacattaccggaactaagaagcaacaccggaaagaaacaaacaatatggtaaatgcacaagcataaacatggcatgatgcacaaacaagtatgatgcatgtccggtttaatgaggcatggcatggcaaagtgcaacaaacaacactacaaattaagtggagctcaatatgcaacgagttgcatattgacaaaacttcacaacatttatttagtttgctctcttttaggtacgcaataatattaaatgttgttaaacatggcaagacgggaagcaagagaaaactacctatctaggcaagtttaaatgaggtcggaacaacanacaacaatttccggaaaatcctcatatgcaatttatgaattagctactgttctgcccaaaa

SEQ ID NO: 437232 - DNA, 404 bp, Triticum aestivum
acggcacggagtgctatgtccggatcactggtgatagtgataattctgttgtgcccgggcattttgagcttcatataccgtaatggggtacggcttggaagcatgtgaatgtgtctcaccccagcaaaccatgataccctctgttgagtgatgacacatggaagagaaactcttcggacctatagttctccggcgtgctgaataccacgtcgagtttgacttttcccgagcatctggcttcccgactagggataatactgtgaaaggttgtgttacgttggtcaatgcgactcatgtccatttgcattctattgagtgtgtcctcatagatgaggttcagtccgctatgctaccgccgtccttgagaactttagtgagccaaaacccgtctttgggtttaggac

SEQ ID NO: 437233 - DNA, 441 bp, Triticum aestivum
gggggggttcagcgcggtgccgtacgtggtggcgctcttcagctgcatgctgtggatcttctacgcgctggtcaagaccaactccagcccgctgctcaccatcaacgccttcggctgcgtcgtcgagggcttctacatcctgctctacgtggtgtacgcgcccagggccgccaggcaccgcgccctcgccttcttcctcctcctcgacgtcgccgccttcgccctcattgtctccgtcaccgtgctcctcgtgccccagcccagccgcgtcaaggtcctcggcagcgtctgcctcgccttctccatggccgtcttcgtcgccccgctcagcgtcatcttcgtggtgatcaagaccaagagcgccgagtacatgcccttctcgctctccttcttcctcaccctcagcgccgtcgcctggttcttctacggcctcttcaccaa

SEQ ID NO: 437234 - DNA, 373 bp, Triticum aestivum
cgggtcgaccgaaagcgacaacggacgataaacagggtgtcgtactctcctcccgagactccactgaggcttgctgatctccacaaccttacaggggtctacaaaacagactttcccacaatgccaaccaatgcgccaccaaggagggcttcatctgtgctgaatgcttcttacaagggcttcctcgagatggtcctccagaacactgagacggatgttcagacctaccatctggatggttagtcattctttgtagtcgggatggactatggtgagtggacgccaaacagtacgggttcatacaacaagtgggatgccatctctcgcagtactacacaggtcttcccaagagggtggactgccgttctggtct

SEQ ID NO: 437235 - DNA, 378 bp, Triticum aestivum
cacgggaagcgaccaaggacgatagacagggtgtcgtactctcctcgctaaactccactgaagcttgctgatctccacaaccttacacgggtctacataacagaccttcccacagtgccaagcaatgcaccaccaacgagggcttcatctgtgacggaatgcgtcctacaagggcctcctccacaatggtcttccacaacactgagaccgttgttcacaccttccaatctggatcgttattcattcattgtagtctggatggactacagtgagtggacaccaaacactacgggttcatacaactactgcgatgcgatctctcgcagtactagacaagtcttcacacgatggtggactgcagttctggtctcgctcgac

SEQ ID NO: 437236 - DNA, 188 bp, Triticum aestivum
gacggacggtaccaatgctgctgctgctgctgatggtgctgttgttggtggtgatgctgttgctgttgctgatggtgctgttgttggtggtgatgctgttgctgttgctgttgcagcggcggcagcttctcaaaacgcagaaactgcaacaccaaaaacaccagaaaatggagacagagaatacccaa

SEQ ID NO: 437237 - DNA, 271 bp, Triticum aestivum
ggggaggaccatgatgagctgtagatggtttaaaaggggaaccaatttttgtaatgggttagtaggggggaggagacatggataattggtgctctacttactttgtgttgtggtcgggggtggtcgggtttgttcgcggagactgctgttattagtctgttggccgagttgtagagaactctctttgctgctgctgctgttacttccttctgatgttttttcgttttgttattatatagccggatgaagaaaagatgatgcagttttatct

SEQ ID NO: 437238 - DNA, 347 bp, Triticum aestivum
ttcacggagccggtgtactatggcgtatctcttgtcataagggcaaattactttaaaatgttgggaaaggtagggtacgtagctcctggagtcatttgattccagtgttgtaggaaatggcgcgatggatgggttctaggagtttttcttttggacgggggatgtacgaaactgacttgcgcgcgtctctccgctcgtgggactcggggaaacagtgttccccttcgaactgttgtcctgtaggttttggactagaatttggaagatttatatagagaaaatgcactggcggtacttgaacttgaaaagaaaaattcaacaaaacctaaaaaaaaaaacgcggccgc

SEQ ID NO: 437239 - DNA, 306 bp, Triticum aestivum
ggggaagcgcaggaaaaagtgagcgagtgggagacatcaggaagcgacggagtctcagctgtgtgtacatgttgtagggtaggagctcctgggtcttttgattccagtgttgtaggaaatggcgcgatggatgggttctaggagtttttcttttggacgggggatgtacgaaactgacttgcgcgcgtctctccgctcgtgggactcggggaaacagtgttccccttcgaactgttgtcctgtatgttttggactagaatttggaagatttatatagagaaaatgcactggcggtacttgaacttg

SEQ ID NO: 437240 - DNA, 410 bp, Triticum aestivum
attcgcgggtcgacgggaggcgacagtggaacttttggcgatcgtggtggctttgtccctgctcggtcgccgcatttgacgtgcagtacatcatcgacgagtgatgtcaccgttgatctgtatgaataatttgtgtcaaataaaaggggggaagtgactagtgaagtaaaacgacctgtaacttgttaccctattcttttgcaaatgttcatgctaatcatgccataaacacgaactgttcgcttcaacaaaaaaaaaaaaaaaaaaaataaaaaaaaaaaaaaaaaaaaaaaaaaaagaaaaaaaaaaaaaaaaaaaaaaaaaaaaaaaaggggacccccaaaagttacaaacttaaaaaaaacggggccccccaaaaggttccaccctaaattccccctcaatgcaaa

SEQ ID NO: 437241 - DNA, 412 bp, Triticum aestivum
ggagtgcgactggagccacgataatcgaggtctgtgcgacatgcctcacctggatgatgattggtgcttcagcattaagcacgaggagaccttcgaagttgaaacggtacacaacaacgacaagtgttattttcataattaagcatgacttaaactctttcaacgtgtaattttcatcttttacaattcgagtatagcttatcccatgccatgcaagatgctatgtcttggagaggatggattttgaagaccatgaaatttctgaaacaaagaaaattcacctaaggactcatcacgatgtggactttgaagtaattctatataattctgagagcgcaacccattttggttgcaaaaactgggaagcattttgcaagatgtatggttttgatgagggtatgcttatcaccat

SEQ ID NO: 437242 - DNA, 832 bp, Triticum aestivum
ttccgggccgacgggcgcgcccaagcggcccttggcggcggctgccgcccccggcgacatgggatgccagctctcctgcgccaggacttcctgccaccgtctggatccaggtaatcagattggcacagttcatgtgcgccatgaattagtaatgcgcaaccactgcactcacgtctgatgagccgacaacgacgatgtggtggtaaactctttttgcagaccgcgaggccgctgaggcctgctccgggcagtgctatgacggctgcaagaccaagactctgccgaggcctctccgcgccggcgccggcatgcccaccacgttaggcccggtgctcgccgaccttccttcatccgagccggacccagatgacgcctttccttcatccgagccggacccagatgacgcccttccttcatccgagccggacccagatgatgcggtccgtgcgtcgtcagaggcgcccgaacatcaggcgatggggccacgtccaccgttttcggagatccacgctgctcctccggcgtccgcgtgacaagaatacctcggcgtacggccgtgacagttagcattggccgaccaatcgatatgtaagcgcgatcaccaggtgcggagggattagcgcatcgaccaaaaagccgcgtgctaatgggtgtacacgtactgtattatttataacactgctgaatgaagtgtcttaggctacttgtaacgggaagttctccgtatcaatatagtgtacgggtttgctaaactcagctaaccgagattaaatctggtctcattcagtgggccatccagaattacaaaatttagaaaaaaagcaacaggaag

SEQ ID NO: 437243 - DNA, 443 bp, Triticum aestivum
gtcgacgggacccttgagagccggacacactggtcgaacatataaagtttgatcatggttatacctcgaagagtccagcaattgtcaatctacttgagatcatgacggaatttactccggagcaacaacatgcattctgccagtttgtgactggtgctcctcggcttccacctggtggcttagcctccctaaatcctaagctgactatcgttaggaagcactcctcgactgcggcgaatacttcaaatgcagctggagcagcagagtctgcagatgatgatctgcctagtgtcatgacttgtgccaactatcttaaacttccgccatactcgacaaaggaggttatgcacaagaagctgctttatgctatcaacgaaggccaagggtcgtttgatctttcatagtgggttcaaaactaacatacagatggttggtgcacatgt

SEQ ID NO: 437244 - DNA, 424 bp, Triticum aestivum
ggggccatggaggccgccgtgaagccgatgaggagggaagacaaaggttgttgccaggagggaattatgctgctgctgctgctgctgctgctgggagatgctgccagtggcgttgttggcgtctagaagcttctaggtgaggcggcaccgccttctagggtcatggctgccgtgccgcgctgcgccgcccgtcggaattcatttcagtcgctccatcaaatccgttccgttccttcgggtgacattttctatttcctgcgttcgtttgtagtagtagtggtgataataatatgatgacggtcctcctccctgcggtgcaagagagtggagagccctccccagccaggctcgctcctcttcttctgtgtacaaaggcttgaacttgaagttggtactactacataaataaaacccagctcctctc

SEQ ID NO: 437245 - DNA, 386 bp, Triticum aestivum
cgggtcgaccggcgcggggcgcaagtgcacgtggccaacggcggtgggctcaccatccagcaccagaacaacgtcatcatcaacaacctccacgtgcacggcatcctacacacgtcgggccgcaacgtgtcgatgacggcaacccactccacgatccgtacccgcgccgaccgcgacggcgtctccatcttcaacgccaccaaagtgtgggtggaccacctgtccatgggtaattgcgaggacggcatgatcgacgtggtggccatgtccacggccgtcaccgtctccaacacccacctggcccaccacaacgacgtgatgctcttcggcgccaccgatgggaaggaggaggacaaggtgatgcatgtcaccgtcgccttcaacca

SEQ ID NO: 437246 - DNA, 421 bp, Triticum aestivum
  unsure (1)..(421): unsure at all n locations
ctcatgggtcgacgggggacaatcaccacgacggactgcatctgcccagacgatcgttgcgacggccacgacgaagtgcatctctcaattccaggatcagcatgctggacgaatcctccttgcctgttaagttgcaacggtgcaaccaaacaccatggaggcttctgtacttagggacggtgaatctgcatcgacagtgctggatggaaattgctcgccctccttcctccataaaccacgtagggaccttgtatagttgtattagcctccccatctatccgtcaggaagccctgactttccctgctattgctgtcgaaaatgctacccttgtagcacacgaactgaacttaagtatgtcacatggagcttcaggtaacaaatctaaaagaaccaaaattaatgtatggcatgtcnttcgcc

SEQ ID NO: 437247 - DNA, 515 bp, Triticum aestivum
ggcttgtcgtcatggacccgcccccaggagacggcgccaaccccgatgtcacccgcgatgagatcaccgacgggtacatcaagaccctcgcccaggtcgtcggaagtgaagacgaagcaaggatgaagatctactctgtgtcaactaggcattattttgcttttggtgccctagtatctgaggaactctcctacaaactcaaagagttgcctaaagtccgttgggttcttcctgattcatacctggatgtcagaaataaggactatggaggagaaccatttatagatggacaagctgttccttacgaccccaaataccatgaggagtgggtgagaaacaatgcccgtgccaatgatagatcccggcgcaatgacaggcctcgcaactttgacaggtcgaggaactttgaaaggagaagggagaacacacaggcctaccagagtgggcctccaaaccaaatgccaccccaagatgctggctctccaattcgcggtgcacagggcccgccgccgcct

SEQ ID NO: 437248 - DNA, 807 bp, Triticum aestivum
attgaggaggaatacagtcagtagatttgacaatgtattttaaaatgacatgtgaaatgccttctagccggattgtagatcgtttgtctttgccgaccttttcgcttcaacctcgggaccctagagttcggagtgtgtccgaataccttctcggttaagaaacaacctgggtatgcatggagaccaggcgtaggggtcattagtgctttatcagacaagtgcccaactagttatgttatattacatgggtagtaagaaacatcttccagggagaatagttccgttaagggttcctttccctgggtaggcatgccctaaagtgcatgtccggactgcgataggaaacgcaggaaaaaacatctgggggcagataaagaaaataagtaaaaatcatcttttgttcgccgaccgaatattcccttaagaacgctagctttcggcttcacccagtctgaggtacacatccggctgacccggcagtaacaatcgcagaggtgctccccttatgccctagccgaattaacgggaacgtagggcataaatacaagagccaggcaacccagcttggccaaaacttaagtcatatcgatgcatataatggtgaataacgggtacatgccgaatgataacacatgtgttgggcataaagcccgtatgaataagcttctgttaaagaatcccccaggtataatgagcgcggatagcgcgtcagttgcgtgcaaacaaggcatgaatgggctcctaaaggctgtgagagaaaaagaaaaggagaaggagaaaaatataagacagatagtgtataaaaat

SEQ ID NO: 437249 - DNA, 423 bp, Triticum aestivum
ggggaatgcggttacattgctgctaatctttatgccaagagtgtgttcggagaagatgctttggtgaacatcagcattgagaagcaagtcgatggcaagcttagtggtcacatcagaataaggagcaagacacaaggaatcgcgctcagcttgggagataagattaccctcaagcagaagggaggcagttaattctgatgttgcctgctcacaaacaccggattgtatgacatgtttccttcaagagatccacttgccagtgtcatactacaggcacaatgggattgattgaattaactacaggaagcttttgtgtacagaatatcaaagagaagaatgataaaagaagaggatcgtagggaagtcagtcttgggagctgaaaaacgatcttgacacttcctttcgcgataggtgtttattga

SEQ ID NO: 437250 - DNA, 507 bp, Triticum aestivum
aattccgggtcgacggggagtttaggaaagccggcgagaagaaccccatggaccgcttcgaccagtcgctcctaaagatatctgagaactgccgcgccctctcaaacatgatctgatctcatagagctcacatctcgtctcatcggatcggacacgcgcgtagacggatcgatcggtcgacctgacctggattgccgctgccgttaacgctgcacacattgttgattttccacatgtttttctactattttctttctattcgtctcatctttttgtttaccggtgagatgtgtatattacccggtcttgggaaggggaggtgaattgaaatttgtttcttaaaatgtatgtcttcaaaatattcctgatatatacaaaaatgtacacatgtgtctgaaaaaaagttcacatgtcaaatatttctttgatgaaaatgttagtcatgtgtttaagccatgttcaacgtgtttaacccatgtttcctacttagggaaaattttaagtggg

SEQ ID NO: 437251 - DNA, 410 bp, Triticum aestivum
  unsure (1)..(410): unsure at all n locations
atcccgggtcgacggggaacaggagccagaagccgtcgaggaccaggagcactcataagaaactacactacacgtaaacagttacaagaacctacatacatgttcgttccccacgctgatgttgctcttgtgtattgctgctgctgcccatcttttttctcatcccacagaggcacgcagtggctgttatgcatcttatcgccttggctatcgcaatcctgaattctgtatctcattgcccatgccatcatcacgtgaatggtagcagaatttgcacaaaaaaaaacaacaaaaaacaccaacgaacacacgaccaaccacacnnnnnnnnnnnnnnnnnnnnnnnnnnnnnnnnnnnnnnnnnnnnnnnnnnnnnnnnnnnnnnnnnnnnnnnnnnnnnnnnnnnnnnn

SEQ ID NO: 437252 - DNA, 465 bp, Triticum aestivum
ggtccacggtacgacgggtgatctgttcaggagcccgtctgttgttgctgttgacctcaggcaagaaatggtggactacattacacaaagaagtgaaacgttcatagctgatactctcattgaatcggaggtggaacaaaacgctgacaatcaaatgccagatgacccttatgaggtcatatcaatcttcatggatgatttcagtcgcacgaaaaggaacatcattggccatgtctctgggtggttgttgagcgacagccgcgaagataagatcgatgattttgtccaggaaatggatatgacccgcttctggccactagaaaggagagaagggatcgccgaggtcctcctcaagaatgtggacattaaaactaagttccactgccctgagaaatatgaaaacgaggaacgtcttgctgatcacaaggcacagtgtagcttcaggcctgtcacttggccgaacga

SEQ ID NO: 437253 - DNA, 427 bp, Triticum aestivum
ggggtgaacgtggtcaccgaagtttgggctgttaaggataaaatcaagcagtttccctgagaccttcagaagtggctcaatgggttggggcaccggggaaaccgttgacaaatggtggcccagttgggaattgggggtacctcccttggacctccggtttgtgcatacggctccccagaactgacccagaagcagcagaatgtgccaaaggccgacaactgagattttcttgcaaatgttgatccagttgatggtgcacggggcatccaagatttagaccctgcaactactcttgttgtggttgtctcaaagaccttcacgacagctgaaacaatgttgaatgctcgaactatcaaggagtggattgtctctgctcttggacctcaggctgtttccaaacacatgattgctgtcagtactaatctta

SEQ ID NO: 437254 - DNA, 452 bp, Triticum aestivum
ggggttcatgtgattaggcatgatgcaaagaagcctgctggggcagccaaggaaatagagagttattttgactgctcagcttcagatcttgtgctggttggtgacagatactttactgatgttatctatggaaataggaatggttttcttactgtatttacagaaccattgagttttgtcggtgaatcttacattgtcagaaaggttagaaagctggaagcgtacattatcaattattggtacaagaaagggcacagaccactcaagcaccctttgctccctgatgcgagaacgattgtgaagtttgatccgtgtgacggcccagtctcacctagagcatagcacagtcatgtgctcccgccgttcggaattacttgtcacagaaatgggtgtaaccaaaatgtatttaagttatagatacatcaatttccgagacaagtaattccgaacgg

SEQ ID NO: 437255 - DNA, 321 bp, Triticum aestivum
  unsure (1)..(321): unsure at all n locations
acactagcaacaactgatggttatacaccatgacgtctaggcccacatatttgaaccagaccttgtcatatatataccacaaagccattatgagtatatatagattattgtataaggttaccctatagatgaagaactaattcatcagctctacctaacctgggtacagagctaattcatcagctcaccagtgatcatgcgtgttgctgaatatctcatctatgtgcgtgttgtgtaatgagattaatgtgggaatacatcatgggcggagtcaggattcgaaaaanaaaannnannnaaaaaaaaaaaaagcgggcgctc

SEQ ID NO: 437256 - DNA, 363 bp, Triticum aestivum
ggggaagatcaagctccaggcgggaggagacccccgccgcgtcggtagacgagagaatgccgcggcaggcagtggcgcagtcatggtttagatatgaaagttttggacaccgagcggaactcagtcgagagcttatatatgaaaactagtgagagagagaagactatatttatgcaattagaagagaactatatacattgtttttccctaagctcaataaggtctgtgtcctttgtggactgcgtttcttctttgtagagacagaacatataataccgaggattgcagtcaaatggaaattaaattcaggtttgatactttaaataagaaaacagcataaaaagggggagagaaaacgaaaaa

SEQ ID NO: 437257 - DNA, 226 bp, Triticum aestivum
taccggtcgacttcacggggccacgggcccacgtcattcacggggatgtctgtccagggatgtggataagggcggtgttgtaatacctactctctccatgccggtgtattagtcattttaggttatacaccgcgatcaaggcgagggaaaaacgagagaatttgatgtttaattactagtacttaatatcatttcatgctgagaattgaagattgcatgttatgct

SEQ ID NO: 437258 - DNA, 415 bp, Triticum aestivum
  unsure (1)..(415): unsure at all n locations
attcgcgggtcgacgggaacggcttcatgcaagtctgatcgattcgaagcaggttgagttcagttcagctagaggaagacgaaggcgtttcgatcagtccgatctcctgctccttttacatgatgattactattatcttaatcttagtgcatgtgtatgtaatatgcaccatgaattggtagtgcagtgcagtgcagcacagcacatctctgaacctgggaaggtactactagctttcttttcactcagacaagtcgggagggggtttcttgtcagttagtcggtttctggcttgtcagtagctgtggtgcgtgtcgtgtggatcgagttagttgtactaccagaaattcggaatgacatggaacccatgcatagcatagcaaaataaaannnnnnnaaaaaaaaagccggcggc

SEQ ID NO: 437259 - DNA, 472 bp, Triticum aestivum
gtacggactgcaattcgcgggcagacggggaacgcagggagtttctgagtcgagccaaggatggatgcttgagccaagtgtggttgtgtgtaattatggtccttatgtcgacgtgttaattgtcgtgatttgccgattggtactctatatgtttgccaaataagctgtgcaccgtgtgcacctttggaacagtgaagtagtaattattttgtgaaaaaaaaaaaaaaagaaaaaaaaaaaaaaaaaaaaaaaaaaaaaaccggccgcccaaaaggatcaaacctaacttacccttgaaggcaactccaaacccctccaaaagggccaccaaaatccaatccacgggccgccgtttaaaaacgccgtaacgggaaaaacccggccgtaaccaaactaaaccgcctggaacaaaaccccccttccgcaaccgggcgtaaaaccaaaaaggcccgaaccgattgcccttccaaaa

SEQ ID NO: 437260 - DNA, 474 bp, Triticum aestivum
ccgggtcgacaagaagaattctgcaatgcttgtgaggatgaccgagtgttagaatgcgagattcgctaaaccatgtacagggtaatgatttgggtgcgggatggattgatcaccataccgacttactcttattattcgccttgctatatgggatggtaaatctgagtgacttacctatagtggacagacgacgatcaaaaccttgtttgagccttagaatggtacaggtattttttctcccttgtacacggcagttgttgccaaccgtaggttatacggtgaggttcaacccagacccatttcctgcaggagaaaccataaatggttgaccaccatgagatatcaatagttgtttagtattgggccaaaacccatcagctaagaggacccattctcaaaaaaaccttacctagatgaaggacagacgaattgtggtaaaggttatgccactaccggaaaaccccggataaggaa

SEQ ID NO: 437261 - DNA, 446 bp, Triticum aestivum
ccgggtcgacgggtgacaacgtgaccttgcaggtgactcgggaccgcgacatgaccaacctgcccaactcccaaggtcggcccggttcacgcccccaggttccccaagaccgcaggaggaagggtggtggctggtggtcggcgacagctccaccaagcagctgctggctatcaagagggtcaccctccagaagagggcccgtgtgaagctcgagttcaccgccgccgcggagccagggacgaaggactacatgatctacctgatgtcggactcgtacctcggctgcgaccaggagtacgagttcaccatcgacatcaaggaagctggaggcgactaatttcaaacacccaaaactcttttttatactgggtttttgctcttatgtagacaatattatgtgacctggaacttatcatctttttgtctgtaatgttacacctgaattt

SEQ ID NO: 437262 - DNA, 384 bp, Triticum aestivum
attcgcgggtcgacgggtggagcgagaagctgaagcggagctccgccggcgagcagaagtgggggctgttcatcgcgaccaagtgatctggccgctgagcagcgacgccatggacgcgatgattcgggagcagagcagcttctgttaagaaataaataaagaggatcggtgctcgacaatgttgtggccgtgtgttgggtgtgattgtttgtttgttgcagtggctgcattcactggctgggcaccaggatctataagataatgtgtacgtacgtacgtactgtattcctgaacttgtactgtgacgagcgagactcgctttgtaacgtgctattctgttgccaaaaaaatcatgcgaacaaaaaaaaaaaaagcggccgctct

SEQ ID NO: 437263 - DNA, 307 bp, Triticum aestivum
gggtgagtatgagcggggatcatatgtgtactttgattttcatctcgcagatgacggcaatgggtggtgccaaaggatcaagaacgacttcacatttgagtacaacttccttgaggatgaactgtcagtacagccaaactagggcaccagggctgatcaaagtgtttgatcaaatgcgactcgtgtaattttcagaatggaactgttggaatccggaacgaattcaaattccccacttgtaagttgtaaccttgtgggcgaatttaaatttagagctgttgtgtacaataaaaaaaaaacacaagag

SEQ ID NO: 437264 - DNA, 440 bp, Triticum aestivum
acggggacgtggtgaggctcaagctgcaaggagcatgcggggtgtgcccgagctcggtgatgaccatgaggatgggcattcagcggcgtttgatggatgaaataccagagattgctgcagttgaagctatcacggacaaggacgctgggcttaagctgaacgaagagaatgttgagaaggtactcgatgagatcaggccatacctcaccggtgcaggaggcggtaatctcaggtttgtcgcgatcaacaaattcttcgtgaaagtccaactcaagggccctgcagcaggtgtggcggccgtccgagttgctatagcacagaagctcaaagagaagatcccatccatcgcagctgtccggctactgccgtaaacttcaactgcaaaacattgctgtgaatatctggttatccaggagaatgctatgaatgcgctaactgat

SEQ ID NO: 437265 - DNA, 486 bp, Triticum aestivum
ccgggtcaacggggaaggcgaagatgtcttggaagacttacgtggacgagcacctgatgtgcgacatcgagggccaccacctcgcctccgccgccatcctcggccacgacggcaccgtctgggcccagagcgccgatttcccgtcgttcaagccggcggagatggccaacatcatgaaggacttcgacgagccggggaccctcgccccgaccgggctgctactcgcagacgccaagtacatggtcatccaaggtgaacctggcgccgtcatccgcggcaagaaggccagggcgcgggaggcatcaccctgaagaagaccgggcaggcgctggtggtcggcatctacgacgagcccatgaccccggggcagtgcaacctggtggtggagaggctgggcgactacctggtagagcagggcatgtagacgacgacgacgaccacgccacgccgccgcagcaccaacaatactaccggccaaaagacaca

SEQ ID NO: 437266 - DNA, 518 bp, Triticum aestivum
  unsure (1)..(518): unsure at all n locations
ggtgcggagtcgacggcaacacggaggtgaaaggagttccatgtccgagtcggcgacaacgtgcgtcatcgtcggcaacatggaggcgagtcaacggcgaggtgcggcaccggtggcgagcatggaggcgagtcaccggcgagttgcggcaccggtggcaaacaggcggcagcgagcgtgccacggcggtgcgctcgtggtgaaggcgcgcgaggtgcggctctcaccgaggccagcggcgacggcggcagtcggcgtgacaagatggcattggcggccgtctccgtgttgcaccgacgacgtcgacgaccacgggcttcaagagagaaataagttaacaagattagggaggtgaatgttagaactaatcttgttattagtgcgtacgattagatatgtttatatcatgcttgtagttgagctgcggctgtgtgcacacgtcaggttgtgttcagtgcacaaggcanagctaattatgcatggtagttagatgcatgcgttaaagctccgcgagtccg

SEQ ID NO: 437267 - DNA, 408 bp, Triticum aestivum
ctagcatcgctcgaaaagcacaaggccacaggggaacgcaccggacttgcgagatatattggaggataaggcaagacaatcaagatcgatctacggatcgcgtgggcgccccatgatacgcgacgacaaccgtcgcgccggacacagtaagtctggccgggccgaacaaaatagacaaagctcttttgagctccgtcatgatatcgcccagtacagaggcgccgcacacccactatgcttcacagatgaagtaatggatcatcaaatccccgaagggtttaaacccgtgaatattgaatcttatgatggcacaacagaccccgcggtttggatcgaagactatctcctccacatccacatggcccgcggtgacgatctccacgccatcgaatatctcccactcaaact

SEQ ID NO: 437268 - DNA, 296 bp, Triticum aestivum
ggtcgacggctgccgcacctacgacagctagccgtgagtagctgctccagccgtcttctgccattgccggccgtcatcatgagcggtagcttctggcttagcttgcgtggcacattggcatgttgggcgtgtaagtttggtttgttgctttatttggcttggcttactataaagcgagcagagatttgtttgtgaaattacaagatactataatgtttattaggagttctgaatatcaggttaaattggaacatgtggtaacacatgtatgtaatgcatgacatgtcacaaaaagt

SEQ ID NO: 437269 - DNA, 373 bp, Triticum aestivum
gggatcatgtatgctcctgggaagtgggaagaagcattagacattgatgcgacgctctacactggtcttgttgtatggtagtcagtgctaagtttcttaatgtcatttcatatatttatcctttccattttgagtcgctgaaactgctgagtgatgtgcagtttgctctgttggtcgctctgtcactttcacgtttcatattctttgttgtgtagttcctcatactgctctttcttcctgagtctcggaaagaataataaagagccatgtgtaattctattgcactgttctcccaaaattgtcattattttaagcagtaataatataaataactctgtaccaagtctcagtaatacctgaagttgatcgaatc

SEQ ID NO: 437270 - DNA, 422 bp, Triticum aestivum
ggtggcagcggcggagcgaaggtggaggtcgggatggaacaggtgaagagcgccttggagaagctcatggacggaggagccgacggggaagataggattaggaaggttcaggagctgaaggcgaaagcgaaggcggctttggagaacggcgggtcgtcgtgcatgaatctggacaagctggtccaatccgtcgtctgaaaattagcgcggcatgtcggccctgaataaattctgctgctttcgctcattgatgagcagattggggttgtttcttgcttgcttggaagatcgggagtgagtgaaaaacatatcctatgttgtaagttgcaactgtatctcatgccaactcagtctacaagtctcttgttaggcgctgcctgcttcgtaaaaaaagataacgaagctggcagctgctctaacac

SEQ ID NO: 437271 - DNA, 405 bp, Triticum aestivum
cgacggggaagaaaggattaggaaggttcaggagctgaaggcgaaagcgaaggctgctttggagaacggcgggtcgtcgtgcatgaatctggacaagctggtccaatccgtcgtctgaaaattagcgcagcatgtcggcccagaataaattctgctgctttcgctcattgatggacatattggggccgtttcttgcttgattggaagatcaagactatgttgcaactgttgtttagctgcaactgtgtctcatgccaactcagtccacaagtctcttgtttagcgctgcctgcctcgtaaaaaaagataacgaagccggcaggtgctctaccatttgaataaggaaagtctagagaatgtttgcaagatagctgcttcgagaaccgacagaaaaatcacacaaag

SEQ ID NO: 437272 - DNA, 446 bp, Triticum aestivum
gtccatgggccaggggaggatgatgcttatggggacgaccgcgctgattacaggaaatctgaacccactacctacatcaatgctcccttggtaggggttcttgcctacttcgttggcaacccaaacccaggccatatcagacactgagcataagcactttgccatgtagatagagaagagtgacagaagctataaataggtacacaggaagcaaataggtttgtgattggatggcactacatgttcataggagtggattgcagagcatgtgttctaccaataatgagagcttatctttcatgatttttcttttgtttgggtttgcactgaattttgttttgtgtgaaggtgtgcacagtgcaatttaactgcactggtgtagtcatgagtgaagaaagcttgcattttgcacaaatatttggtatggaaggtactcctgtttcaag

SEQ ID NO: 437273 - DNA, 423 bp, Triticum aestivum
ggtcgacggcgactcgcaggtgatcaatccccatcactcgccggcgattggtctggacgcgaccaatggcagaaaccgcagcgatagcaccaccaccacaaccaatggcaccaccgcaaccagtggaggaaaacgcaacggcggcaccgtcacaaccaatggcaccaccgcaaccaatggcggaaaacgcaacggcagcaccaccgcaaccaatggcggaaagcgcaactgtcgttgtggtggtgccaccaccaccgccagacggcaccacgacattcctctgcctcatcctcgccttcttcatccctcccctcggcgttttcctcaagtacaaatgtgagattgaattctggatctgcctcatcctaacattcttggcctacgcgccgggcatcatccaagccgtccgggtgatcgtgaagt

SEQ ID NO: 437274 - DNA, 470 bp, Triticum aestivum
cgggtcgacggggtgcgcgatctgggcgcggctgctgcggacggttggggtcaaggtcggcgggaacccgaacgtgtacgcgagcctccttggggttctgtggtcttccgtggcaaacaggtggcacctggagatgccagacattatagatggctcgatttcgatcatgtcaaggaccggccttgggatcggaatgtttaacacgggcctgttcataggtctacaggacaagctcgtcgtgtgccggcctggacttacggcgttgggcatggcgatgaggttcgtcgctgctccggcagccaccgcggtcggagcgctacttttgggactgcgtggtgaccttttgcgtgttgccatcttacaggctgcactgcctcagtctgtcggagcatttatcttcgcgctagagtatgacctgcacgctgatgtactcagtaccgtggtaatagtcggcacgctggcttcgctgc

SEQ ID NO: 437275 - DNA, 547 bp, Triticum aestivum
ggtcgacggcttccctcactattacatgggtggaagaactaaaatagaggattctgaaaaaaaaaaggaccttcgaaatccaattttatgtgtagcgcaaaggagttgcgattccttcttattcctatagaacatctagtaacaagaatatgaaatcgtaaatagcgaaaaattcttgtcttgcgcggtctaagtctaaggaaataaaaaaaattcgcttatacaatttcatctacatcgaatttatatatcagaatagcggatagaggcatcattaaaggagtcaggtctacttactttatgcttctttccaattttatggtggatttgataagaaccctttttgctttcttgataaataatcgacaaaaaaagcgttttttttatataacctgcttgttttattataattataacaagtcctatatggaaatgcccgctaaagagaaaatctgtttgattgtctctcggccaatatcgatttttagaaagaaaaaacaagaattttcttctttttttattaacattaagaaaaaaagaatataac

SEQ ID NO: 437276 - DNA, 349 bp, Triticum aestivum
  unsure (1)..(349): unsure at all n locations
gggtcgacggccagctgaaaatagataccagaaaaggtcagtggtgttttggagggcgcctcgtctgtatgtattccatctgtgtaagttaattcatttgggtgattggttcggctgtaggcggtatatctcaacacagtgggggatttgtaatgtttctggttttgtgttccttgtgagatgaaataataacttaacttgtttataacatgctcctcaattttcttcctnnnnnnnnnnnnnnnnnnnnnnnnnnnnnnnnnnnnnnnnnnnnnnnnnnnnnnnnnnnnnnnnnnnnnnnnnnnnnnnnnnnnnnnnnnnnnnnnnnnnnnnnnnnnnnnnnnnnnnn

SEQ ID NO: 437277 - DNA, 481 bp, Triticum aestivum
  unsure (1)..(481): unsure at all n locations
actgtttacgcctgcccggtttcggtcgcaaaattcccgggtcaacggggtatgacagataatatcgatataggttattctacaagattactctatagatccatcagctctaagtaaactgcgtataaatcatgtatgtataaggtatgtgttactgatgttagaagttgattccttgtgtgagggtgcggatgtaacacaacatgtaattcttaatatccacatgcctcaccaaaacaatgtacggctaacccacaattatgacgttatcaagctcattataaatatgcatgtaataataaactaaaagaaagaaacctggcgttacccaacttaatcgccttgcagcacatcccctttcgccagctggcgtaatagcgaaaaggcccgcaccgatngcccttcccaacagttggcagcctgaatggcgaatgggaccacgccctgttancggcgcattaancccggcggggttggttgg

SEQ ID NO: 437278 - DNA, 551 bp, Triticum aestivum
gggtcgacggcgatgggaagaaggacggcgacgggaagaaggacggcgagaagaaggagggcggcgacgccaagaaggaaggcggcgacggcggcgacggcaagaaggacggcgatgggaagaaggacggcgacgggaagaaggacggcgacaagaaggaggagggcgacggcaagaaggacggcgacgggaagaaggacggcgacaagaaagaggagggcgacggcaagaaggacgaccagaagaagcccgccgccgtggccccgctgccgttcccgcaccacatgccgctgccgcaccacatgccgccgccctacatgttcaacgccgactacatgatgaaccagtaccggccggcgccgccggcctacccgccgccgtacgtgccgccgcagcactactacgtgcggaacatgagcatggaggagaacccaaactcgtgcgtcatctgctaagtcaaagtcgatccctcgatcgctcgcgtacgtacgttccgtggggcgaccatgcatgcatccgtgtatagtagtattttctcgatcgtttttacg

SEQ ID NO: 437279 - DNA, 416 bp, Triticum aestivum
ggggaggacgatccggagacccaggaggcagagtgagctatgcgcgggcggaggggttttggagtaatttccagaatctcgcccgtgggtatttatagccctaccctgtcggtgtgaccgagtggaacaactcggtggcaccgagattgcagaaccgcaagcggttgctccaactcggtgtgaccgaagggttcaaatcggttgcaccgagattgagaacctagatcgacttagtgatctcggtttgaccgaattggatgtctcggtcagaccgatatgcacaaagaggttttggaagtttaagtctatgacgaatcggggactccgagtgctcctcacacagagtggttcgaatctgacttgatcaaactttgtgatgtagcatgaatagagtttgagacgagaaaagcatagat

SEQ ID NO: 437280 - DNA, 819 bp, Triticum aestivum
acagacgcacggcaggaggaaggtaaatacaacagcaatagactgggcatcggaacatggcagaatttcccctgtttctctaatggtgcacatcacaatgtttaatttactaaacaaacgtcgctagcctaagcaaaacagtgaataatacagagcaacttggagctagaatcaactactatgccgcaggttcccaaagaaaaatagcagcgtttgcttacagggaacatcaagagcaactctccaccttattgtgtacatcggagagctcagctggtggcaaggcgggcaaggcttcgccactgataggaattttgcaagttgctttgttgtgaccataacctttacatctgctgcagcgcactgcccttttaattgtgatgcgcggatcagctggtttctctttcggcctgccaacccgtcgacgagtttgaattgggaatggtaatgtcgctggactctgagaattgtccgttaaggtaacatcaggtatcggatttatggacattgaataggtcgagcggtaccgtttcgtcgtgaaatactccacacagaagtcatatgcatacctcccagtgcgctcaaatactgcaattgcatgcatgcatggcaacccagaaatattccactttcgacaggtgcagtcacacgtctcaatgttgacaacattaactgagtcatcgcataccttgaataaattaccatccccatcactttctgtgggcataacatcgagtgagtgagctttgctaacttcttcctgcaatttctggttagctacaggcgttaatccgtcaggccattcattacaagactctc

SEQ ID NO: 437281 - DNA, 442 bp, Triticum aestivum
gggccgacgggagatccaaaagggcagggctgcggttgaattcgaaaagaaggcacatgctgataaccttttacaaagtaaagcaatggagaaaaatatgattgccgtggctagtgagattgagaggcttcggggtgggcttgtaaatgctgaaaagcgggccactgctgtcaccacggcagcagctgtaactaaccctgggtatgctcaaccgtacagcagttctgaggcaacatatgccacaatgtatggcaatcccgaggcagcatatgcagcatatggcagtgctgaggcaacatatgctggaacatatgccaattctgatgcttatagcaccactaatcaggctcagactcgcactgatggtaatccacattacatgacccagccggctcactatgcgcagtacgaaggccagcagcagcagcagcagcagcagcac

SEQ ID NO: 437282 - DNA, 471 bp, Triticum aestivum
tcgcctgtcgacgggtgatacgtatgatgattgtgatatcaagattaggagggtgaatgttagagctaatcttgatatttgtattagcatgtttgagttttgcatgtagtctagtctagtgtggtgttcgtccgacgaaggcttcaggtgagcgcgccaaggaggtgagatgccaggatgccgtgtgaggcggcgagcacggcgagatgccgatggtgctgcctgagaagcggcaagacgtatcagaggctggaaccgttaaactcgacgtagaagaaggagcggcgctgcgaggaggcggcgccaacaattggcatcagagccttgtcgatccgcggaagcgatggcagcgacgacgacgcggcggactccatgttaagtggaagacgtcggcacgatgtgggtggccgtcggcggcgcgatgctaccggtggccggttgcggtgtgatgccgctagattatggcggtgc

SEQ ID NO: 437283 - DNA, 456 bp, Triticum aestivum
gtctctcgcgggtcgacgggtgatccgtatgatgattgtgatatcaagattaggagggtgaatgttagagctaatcttgatatttgtattagcatgtttgagttttgcatgtagtctagtctagtgtggtgttcgtccgacgaaggcttcaggtgagcgcgccaaggaggtgagatgccaggatgccgtgtgaggcggcgagcacggcgagatgccgatggtgctgcgtgagaagcggcaagacgtatcagaggctggagccgtgatggactgcatcaaattgggtcgggtgaaccggccggtcgttctgtttgttggactagctgttcatgcgtgagttcgtttagtcctagccgagagtatcgttgctagtagttgatgcatgcatgtagttggcctggtcacaagtggttaccgagtcgtgtgcaacgctggagtgatttcaggagtggagta

SEQ ID NO: 437284 - DNA, 544 bp, Triticum aestivum
gggtgggctcatgttggcaaccaatggatgtatcttttttattcgtcttgcaaaactatgtgagactattttacttttattcggcttgtaaaactatgttatttttatttggttgaaactatgctatttatttggttgtggactatatgtttgcttgtgaaataatgcaaaatttgtgtatgaagtagtgcaaaatttgtgctatttgttgaaaaagggcggtcagccggccatgccggcatatatgggtcggcgcgttgggcacactgccgacccaaatctcaaatgggacggacgccgagcgggtgaccacccaaacggataaaaaacggacaaaaacaccgtccgtttggtcggcgcgttggagtaactagttcaacttctccgaagagagcctaacgcccataagagcatgacagacgccacggcgacacaccaaaggccgaatcccttgtgtgccaggccgccccatgacccttcgtgctcagccttggtgtagcgccgacgaaggacatcatcaccagaggagcctgccctgctgctg

SEQ ID NO: 437285 - DNA, 668 bp, Triticum aestivum
gggaccatggaattttaattccaaaaaattaaaaaatgatcagaaaaacatgaaaccttgcttgatgtaatgtcatgccaccaagatgatgtggtaaacaattggcatgtttgacgaaagtttggacacacacccctcacaaaccggagcaactcgctagtgggctcgtggttccgagagggaacaatgcatgtttcatgacgaacgggagatagcttcctcttacggccttcaaattttttcctccgtctaacgtgcactaatacaactgtcatgtgaaaatttggaaaattttaggggtcatttgaccttttaaagacatttaagtgattttctaaccatttaatgaccgtaattcaaatttgaactacatctacatgcaacgcctaaccataacggtttgaaaaatcatatttttgcgtacttgtgcgcgagttaattccatgtgcagcaaattagaagggatttgcaaacatgttggtctcaaagcatgggcacatgcatacgtatggctggagtgacatggcatattaattcaaaaaaaataaaacatgatcaaaaaaacttgaaaccttgcttgatttaatgtcatgccaccaagatgatgtggtaaagaaattggcatgtttgacgaacgtttggacacacaaccctcacaaaccggagca

SEQ ID NO: 437286 - DNA, 468 bp, Triticum aestivum
attcccgggacgacggggcgacggaggcgatggactgccggccgttcggcggcggcgagagcaagctcaaggcggaggcgacgacggacaacaaggggtggtacaagatcgagatcgatcaggaccaccaggacgagatctgcgaggtggtgctgaccaagagccccgacgcgtcgtgcgccgagatcgaggagttccgcgaccgcgcgcgcgtcccgctcaccagcaacaacggcatgaagcagcagggcacccgcttcgccaaccccatcgccttcttccccaaggagccgcgcaaggagtgcggcggcatcctccaggcttacgacctcaaggacgcacccgagaacccatgaacccccatcccatccatatagtctcgctcagttgcttcccatcatcatcatcatcatcgtctcctcatgactctcctacgtacggtgcccttgcctagctacttctgttcca

SEQ ID NO: 437287 - DNA, 545 bp, Triticum aestivum
gggtcgaccggagaccctgatacaattgttgatgacattctggtagccaccgatggacgagaaccttgcctattggtccgcctcgttcgacgagcaggaaaatggttctcttcgtccctcgcccttggtaccgtcgttgttgccgacataatcgacaggctacccccctgacttgccttgcttgcatgatcacgcaagacgcctccgcccttcctacttctaacccacatggtgggcccataacccacagttccacaggatcaaaacctgactctcctgtacacccccggttgccgaagttattccccgcgcttggcttcgtatgtaattcacgggccaccttcctaatgctctattctggtatcagacgctatacttactctcgctgctctgaacccctttctcactctggttcagacttcgagcaactatctatccacttggaacctcttattgtaccttcgtaccttactcttgatgtattcgatatgttcaactcgagagataatcttatgcccattcatgggttaacccccatattgttt

SEQ ID NO: 437288 - DNA, 432 bp, Triticum aestivum
tcctcaaccggaacaacaccttcaagcccttcgccgaatacaagtcggactacgtgtaccagcccttccccaagcccgtgtgggagcagatcttcggctggctcacgaagcccggtggggggatgatgatcatggacccatacggcgccaccatcagcgccacccccgaagcggcgacgccgttccctcaccgccagggcgttctcttcaacatccagtacgtcaactactggttcgccgaggcagccgccgccgcgccgctgcagtggagcaaggacatgtacaatttcatggagccgtacgtgagcaagaaccccaggcaggcgtacgccaaccacagggacattgacctcggcaggaacgacgtggtgaacgacatctcaacctatagcagcggcaaggtttggggcgagaagtacttcaagggcaact

SEQ ID NO: 437289 - DNA, 631 bp, Triticum aestivum
accactccctacagtaagtcgtactacagcgagttcgtggcgatcatgacgaaaggggccccgtagggggccaacgccaacaagccgcgcgacatcgtgctctccgggacagcagcttggtccatgaagccggcggtcgatccgcaacagaccagcatgcgatcaaccgtgcgtgcgaggcatctcgctacgaccactattacgagctcatgtacactttgcacaggtcgggtcgagtagcacatcttcatatatctaccgtgggattgggactcgacaatgttcgtacgctgtcgggcgctcatcttcttcttcgctggttctgctggttcccttgactgcgacgggggttaccttagtttaattaatttggaatttttaacccgaaattggataacggttcaaggcttggaatgtataaggaaggtaccttaattgaccaacaaagtgtgttttgaacgtctctctcgcttacaaaaaaaaaaaaaaaaaagaaaaaaaaagagaaaaaaaaaaaaaagaaaaaaaatataaaagaaaaaaacaccaaaagaaaaaaatttaaccacggtaaaaaaaaactcgttttaagaaaaaaaaaaggggggccccaaaaagttttaaatttttt

SEQ ID NO: 437290 - DNA, 486 bp, Triticum aestivum
ggggcgaaggaagaagacggcagaagaggtggaagaagcccttctagccatccatgttgcatcaaatggctcacatgagtggattgacccaaattgctccttcagattgcaggatccacgtggcattcaaggtctcgaaggtagattccgcgtccgcacccggtttgcgggctcgacgcgcgcgcgaccggcttccgccgtgacagccaccatgcgcgcctcctccgcgcgggcggagacgacaatgacacgctagttcctcctcgccggcgtgctggagcacgcgctcgtcctcctcttcgtacgctgcgtgcatagacgcggctccaccagctgctcgcgtgcttggcagcgcggcggcatcgcgaggagggactgcagacgacgtgagcgggcgagccttcggcttcatggcacagggatggcggcgacacgccggtgatgggcgagaaattgttggccggagcaggcgggcgccggcatgcg

SEQ ID NO: 437291 - DNA, 414 bp, Triticum aestivum
  unsure (1)..(414): unsure at all n locations
gggggaagggaagtggctctgtactccgcatgcttctataggattttgggcgtggcgaatctgtgtcgtggcaattgcattcatcgtttgaatttttgcaggtcttaagtttgtgtccctgagcggctagcgttccttggcctctcaaactgaggttgcgaaacctttttcttgagtcaatttatatactgtataagaaaggttgacaagtcaggcatctaatattgtttcgtcgccgacgtgaactgctagtgaattgcatttttcaagctcctgtgattcgggagcatttctattagttacatctgcaaagccaagcnnnnnnnnnnnnnnnnnnnnnnnnnnnnnnnnnnnnnnnnnnnnnnnnnnnnnnnnnnnnnnnnnnnnnnnnnnnnnnnnnnnnnnnnnnnnnnn

SEQ ID NO: 437292 - DNA, 438 bp, Triticum aestivum
attccgagtcgacggggtgaagaaggagaacgacaacatgcagatcgagctcaggcatatgaaaggcgaggatgtgaactccctgcagcccaaggaactgatcgccattgaggaagctctcacgaacggccagaccaacctcagggacaagatgatggaccactggaagatgcacaggaggaatgagaagatgctggaggaggagcacaagctgctggctctgaggatgcaccagcaggacgacctgagcagcggcatgagggagatggagctcgggtaccatcagggtagggatttcacttcccagatgccgttcaccttccggctgcagcccagccaccccaacttgcaggaagacaagtaggccaccgaatcctgccacggcctgtgtcaactgaagctcctctacctgcaggccacaactgctagcttcaattt

SEQ ID NO: 437293 - DNA, 405 bp, Triticum aestivum
ggggcagttgtgagtgtgaggctgatcggcaagttggacgacggcactgtgttcaacgaagaaaggacatgaaggcgacgaaccattcgagttcaggacggatgaggagcaggtcatcgaagggctggacacgacggtgctcaccatgaagaaaggagaggtcgcgtcagctagaataccacctgaacatgcgttcggttccaccgagacgaagcttgatcttgctgtggttcctcccaactccaccgtcttctatgaagtggacctcgtttccttcgacaaggagaaagaatcttgggacttgaagagtaatgctgagaacatcgaagcagctgctaaaaagaaagatgaaggaaatgcgtggtttaagatgggcaagtacgccaaggcttccaagagatatga

SEQ ID NO: 437294 - DNA, 256 bp, Triticum aestivum
gggtcgaccgggagctggagtacatgcggggttgcttcgatcacatcatcgggtccgaggactcggagtcgctgtacatgctcgggccgcatggcggcgacagcccggagctggccgtcttcttcgttaggctttgagcccatcgatcgtctgcctctccctctctcttggtcgaacacttcgtgtacgtacacattgatacaaaacggcacgcgtgaatgcttggacgttgacgaccaaaaaaaagtttggttag

SEQ ID NO: 437295 - DNA, 705 bp, Triticum aestivum
gggcggccggggaggcggcgtatcatgatcaagaaccttgagaaggcggagaaattcaacgcgtcgtggcggacagacgcgcaggggctgtgcaagaagctcaactccacatgtcaaggccggcgtcgggccatttgggccctggttgctcgcctccgacgacctcaaggaaagaacagctgttttcttcagggtattcaagaacaatgacaccagctatgtcgtcctcatgtgcaacgaccctacaaggtcgtcattcgagtcgcagatctacaggccgaccttcgccggcttcgtcaacatcgacataaccaagaccaagaagatcgccctcaggacattgatcgaccactctgtcgtggaaagttttggtgccggcggcaagacgtgcatcctcacgagggtctacccgaggaatgccgtcggggacaatgcacacctgttcgtcgtcaacaatggcgagtcggacatcaagctcaccaacctgcgtgcatgggagatgaagacccccacgatgaacaagcgtctggggcagtagcaacagcccggcccggtagatcgaggattcagagtagcctagactagccatagctagctagcttgttgatttagttgagattaattaggagaggtccaggtttagtgatgagttgttagaaaggaccggaaatgatccattttgtttcagaaccttttccaaatggc

SEQ ID NO: 437296 - DNA, 416 bp, Triticum aestivum
gggtcctattactgttgtgcctcacgaaaatattgttgtggaagatgatgcacttgatgatgatctcgttatgcctattgcttgttgtgatgattatgattgggaagataatgatacttcttatgatcttgaaaatctttttggcacttgcttggaagaatatgacaattgctatactattggtgctatccatactactaatgatgagagtgattatgcttatgatatgaaaaggcccaagcttggggatgctatgtttgatgagtgtgacatttttgagaatatatttgctgcaattaatgtttgtcccaagcttggggatgctacgtttaatgaagatgatacttttagcccccccccccaaagttttgatatgcaaatttataatgatgatagaatgcctcctacttatgatg

SEQ ID NO: 437297 - DNA, 479 bp, Triticum aestivum
taccgatctacaattcccgggccgacggggatgatcatgttgtccttgacatgacttctatgtgcaagggcatgatattcgtgaacggcgaaggcatgggtcgctactggacgtcattcataactcctggcaaagtcgcttcccaggcagtgtaccatattccacggccatttttgaaatccaagaacaacctattggttgtatttgaggaggagcttggcaagccggaaggcatactcatccagacagtgaggagagatgacatctgcgtgttcatctcggagcacaaccctgcacagataaagccatgggacgagcatggaggccagatcaagctcatagccgaagaccacaacactcggggattcttgaactgccccccgaagaagaccatccaggaggtagtctttgccagcttcggcaacccggtggggtcatgccggaacttcactgtaggaacctgtcacgttcccaatgcg

SEQ ID NO: 437298 - DNA, 410 bp, Triticum aestivum
gggcatcatgaaacaggggacggcggcggcgagtggggcgtttaccgggggaggcgatgttcgtgctggcgcaggcgagaggaagatctccagcctaccggcgtacctcgccacggccgtggagggctgccacatcacgggcgacatcgtgcggcgcttcgcggagatggagctctcgccgctgctccgttggctgctgggcttcagagggtccagggagcgcctcctcaccgacgacctcttcatcgccaagctcgccatggagatgggcgtcagcatgatcgccaagaccgctgccgagtacgagaagagacgggagaacttcgtcaaagaaattgacatcgtcatccctcatgtgggtggggtcgtcattcaagggatggacctttccctcaaggtaagggccttgt

SEQ ID NO: 437299 - DNA, 604 bp, Triticum aestivum
ggggaacagcagcttgacgtgcgcggcggtggggtccatcccggaggcgcagctgaactacccggcgatactggtgccactctccaagaagccgttcaaggcaaaccggacggtgacaaacgtagggccggcgaagtcgatgtacactgctcacctcgacgtgcccgggtggctcaaggtgaaggtgcagccagaggcgctggagttcacgtcggcgatggagaagaagacattcacggtgaccgtgagcagcaggggaggcgacgccgacgccaacgccgggcagctggccgaggggagcctacgctgggtgtctgaagatcacgtggtgcggagcccgatcatcgccgacgccagggttgtcccgacatgattctgtcaggcgttcgttgtactcagccagcctggttagcataagcacaagtatccatacagttcacaacatggagacattatcgttcttcccaactagcactactccttgaggtcccgattgcaaacatgcaatcacacaaatagggcacttatcaaaggaggtcactgagataaccttgtatctttactgtatcaaatatcactactcaaaatcctcaagttgcccagt

SEQ ID NO: 437300 - DNA, 306 bp, Triticum aestivum
gacgggatgccctagagggagacgttccatggcatttggagcctgcgaccttgattgtgtccggcaccagttcttgatcgtgccgtctgcatgggtagctagcacacatgttcactccatattttgttacagtgaatgaacgagtgaatctctccagtgtaattcgagtgctcggcgatgtgttgctcctgacgcagcacacaccctgatgcccacacgcgctggcactctcctctgtacattgcccgtcgctgtggaataaaagtataatcattcagaagagaagagaaaagcagaaacgcgaaa

SEQ ID NO: 437301 - DNA, 382 bp, Triticum aestivum
ccggggcgccgggagacggcggtgtctaaggtggagtagaaggatgcggctgctggagcttttctccctccgtgcacccaacaagcctttgtgcaaaatttgaaccagacattgcttttgtagaattatcgttgcttagtattacgattctctagcagttctgctcgctttatatatcccctacttctacatgtactcattgtacatagctcgcccccatttgtactcgtatactatcttaaagaatattcgtcaaagcacaagaagaaacaaaaaaaaaaaaaaaaaaaaaaaaaagcgggggcgctctaggatatacacgcatatatacgtgtatatgagatgtcatatctcctctagagtgtcacctattcacatcaca

SEQ ID NO: 437302 - DNA, 427 bp, Triticum aestivum
  unsure (1)..(427): unsure at all n locations
cggtcgaccatccgggtccgccggagacagcgatgtataaggtggagtagaaggatgcggctgctggagcttttctccctccgtgcacccaacaagcctttgtgcaaaatttgaaccagacattgcttttgtagaattgtcgttgcttagtattacgattctagcagtaccgctcgctttatatatcccctacttctacatgtactcaattgtacatagctcgcccccatttgtactcgtactatcttaaagaatattcgtcagagctaattggtgatcatcgtgtacatgctgtttgatgcttatatgtggatgcaacagcacggttcgagcttttgatgcacaaaaaaaaaacatcatatnnnnnnnnnnnnnnnnnnnnnnnnnnnnnnnnnnnnnnnnnnnnnnnnnnnnnnnnnnnnnnnnn

SEQ ID NO: 437303 - DNA, 339 bp, Triticum aestivum
gggtcgaggcgattcatcaagggccgcaagcgaacgtttaatctcggcacctagagtcgcgcggcgacctcaccgtcctcctcttccacatcgtcctcggctgcaagttcatcgcctctcaacgacaccggcaaagccaagctcaacggcctctcagttcagagcaacgtccaggcaagccgttcgtcctgtttcctctcttcatcacagttgctcttccgtgagaatggtgctatgatgatgattgcctatgtgctttggtgtgggttcatcgggtggaggagcagaagaagctagacgtgccctccgatgaggtgttggtcaatgcccctgtcagca

SEQ ID NO: 437304 - DNA, 410 bp, Triticum aestivum
ggggtgaaggacctgtacaaggggttcggccccgccatggcacgcagtgtcccggcaaacgccgccaccttcgtggcctatgagatcacgcgatcggccctgggctgatccgcacaggtcccagcgcggcctccgtctcttctccgatgccgcattacacagagcatctgagacacaattgaggaccatggcaaacaattcctctttactgcgaccttgtttccgaaaaccttgcatagactggcaccaatggcgggattgttgatgaaataaacgttgagctttacctgtcgagcagcgtcgcgggaacaaccgccgccgccatggttacgatcactgatctcggcatcttgatatgagtttagctgacgctaaataacttcaatcgcggcagctttgcttcgatgaat

SEQ ID NO: 437305 - DNA, 381 bp, Triticum aestivum
ctcacggtcgacgggaaacttaacatagactcggtttgcggtgagtggcatgccgagcgaccgtgtggggtcgagccgtggaggagggtgagacacgaacacgacagacgtgatttaaatgttggttttgctcgatggcgcgatccaacaaaatgaaacgttggtttctctccatttccattttttctacggaaaaacggaaactatccactccattttcattcctattccaaggttgccccgttacaacattccatcaaatacaaaggaaaactaaccactacaagaaatatgtcaacttgtgaccttgactattggtcactgaaaggtcattgtttttcatttgcgacctttttgttaccaaaaatagaaggtcaaaag

SEQ ID NO: 437306 - DNA, 424 bp, Triticum aestivum
  unsure (1)..(424): unsure at all n locations
tacggtcatgaattcacggttcgacgggatgtagaacaacttcggcgatggaagtcaagattatggggagattattaggataatcatgactttgatgcatggataagctagctacatgcgtgcgtgagttggttagtctatgcatggcgtgagttagctggttaagttgttagctacgtgcatgcatcgcatggatatgggtgcatgtggttgagatattctaggaggtgagtgtccgtgtgtgtacatggatagagtttgttagactccaagaaaaacgaggtacgtagtaggaggtggtgatgggaaannnnnnnnnnnnnnnnnnnnnnnnnnnnnnnnnnnnnnnnnnnnnnnnnnnnnnnnnnnnnnnnnnnnnnnnnnnnnnnnnnnnnnnnnnnnnnnnnnnnnnnnnnnnnnnnnn

SEQ ID NO: 437307 - DNA, 561 bp, Triticum aestivum
ggtcggggggtgattaattaggcatagggggagctaggagagtccaaatgtaggtgccaatgctggtcttggtgccggtgcaaatggaaatggtggtgctggtcttggtgtcggtgcacataaatctattggtgctaatgttggtgttggtgcgaatggaggcgctggtgctggtgttggtgctggccttggagcaaacgtaggtattggatcaaatgtaggtgccaatgctggtcttggtggcggtgctggtgctggtgctggtgctggtgcgaatgggggcgctaacattggagctggcattggagcaaatgtaggtgccaatgccggtcttggtgtcggtgcacataaaggtattggtgctggtgctggtcttggagcagatgtacgtattggagcaaatgtaggtgccaatgatggtcttggtggcggtgcaaacggtggtgctggtgttggtgcgaatggaggcgctaacgttggatttggcattggagcaaatgtaggtgccaatgccggtcttggtgtcggtgcacataaaggtattggtgttggtggtgtttt

SEQ ID NO: 437308 - DNA, 438 bp, Triticum aestivum
  unsure (1)..(438): unsure at all n locations
cggtcgacaattccgggtcgacgggcaagtgcagaattggaatcccggcaactcagggtacccaccagctccaggccagtatccagcccataggttctcacctccaccacagcagtacacggcgacatcagggggcttctccgcccctccgccaccgccgcctcatgagatgcatccttcacaccagatgccacctgctcatcatggaaatgagatgcatccttcacaccagatgccacctgctcatcatggaaatgagatgcatcctccacaccagatgccacctgctcatcatggaaatcagcagagaccggcaagtggtgcccctggaactggccaaccacctccgtattaccaccattaagtgtgtgtgtaccttcgccgccatttctgattagtttatggagttttgccactccaacantacggctaccccat

SEQ ID NO: 437309 - DNA, 421 bp, Triticum aestivum
cgacgccatggaactaacccgccctttcttgcgcctggcatgtggcggcgaggaactggggacaccataccgggacacatccggcgagtggtgtcggcacgaggacgatgattccgaagatcttgagccctggcagttggacggtgagccggtatccgacgcggaaaccaccaatgaggagtaatgcagcaacttggccctatgctgccgtgtgccatgtttgcttgccccagaatgatcgaaacagctctcatcagtcgtgtgttggtctcttgttgtattaccggataagctatattttcttgccgttatctttcctcatgtgcccgttccgtgtgcatatggcatcctgtttgttgttacattgtgctatataggctgtagtattcagattctggatgttatttatggaaacatttgc

SEQ ID NO: 437310 - DNA, 405 bp, Triticum aestivum
ggtcgaccgggaaggtgaaaccatagagagatgtgtatttttaattgagatgttttcaggagtacctttgtgaagctgatatatctttcttttacaagatatgttgcacttgcttcatctgcataggctgtctggaatgccacgacgccgggattggtgtatgaaatcttcacagctattatattggtctcaagaaacttgcaatacatcaatatttttaatttttttgctgacaccacagctaccacctcttcactaaatgacagaggttgccagcaactgcacatggaaggatttaatgttatattatgtctactattcaataacgagggagatcatattactgctctcaaatattcacctgattgattttgaaaagagggttaaaaatggtgttatgaatga

SEQ ID NO: 437311 - DNA, 559 bp, Triticum aestivum
attcgccggtcgacggggttgattacaagtatgacggtgtcaacaacgagagcaaagagcgtaagggagggcatggcatcccaaaggtttccatggtcccacttgtcttcctcatattctatgaagtctcaggaggtccctttgggattgaggacagtgtcaaggctgctggaccactcctggcaattgtggggtttcttctgtttgcgctcatatggagtattccagaagccctaatcactgctgagatgggtactatgtttcctgagaatggtggctatgtcgtctgggtctcttcagctcttgggcccttttggggttttcagcaaggctgggcaaagtggctcagcggtgtcatagataatgctctctatccagtcctttttcttgactatgtcaagtccagtgtcccagctctcgggggtgggcttccaaggacttttgcggtgcttatcctcacagctgcccttacttactggacctacagaggaataacgataggtggctgggtggcagtccttcttggggtgttcactctgctccctttctttgttatggg

SEQ ID NO: 437312 - DNA, 676 bp, Triticum aestivum
ggggaatcccaaagaaagatttttcttttctgaattataattattcagtcaattcaaataaggcgtatcttgttcaagccaataaatatagctggggttatagttaaagcagccagtagaaaaccaaaataactagttaaagtaagcatgaaagagttaaattccatttattttttttttactacactacatatgttggtaaagcatttacctaagttatggaaaattcataattcatcagttattttagataatactaaaaaacaggatagagtaagatacaaaaagtgtaaaagaaagtggattcatcagatgatacatgagtccctaatttccgaaatcaagagatttgttgtggaatttgtcaattgagtaaagtaataatattaagaactagatcatctaaccccattgaatgaaaaaatgaaattcgattttcaaggaaatttttgaataagagataaataaacaattgaattgaaaaaaaaaaacttctttctattttggataatttccttttcaataagaccctctttttggagtgaacgatcgaatattcccctattccttcttattttaactgattgtattccatatggaataagaggagaacaaaagcattccacgacctgccaaggggctgttaaaaaaaaaagaaagctcttccttgaattta

SEQ ID NO: 437313 - DNA, 707 bp, Triticum aestivum
  unsure (1)..(707): unsure at all n locations
ccgggtcgaccggccaggccaacgctgtgtggtggtggtggagtaccagcacggcggcaccctgaagacgctgctgttccagcaccgggacaagaagctgccttacaagaaggtggtccagctggcgctggacatggcgagagggctgagctacctgcacgcgcagaagatcgtgcaccgggacgtgaaggcggagaacatgctgctggacaggaagaagtcggtgaagatcgccgactttggggtggcccgtgtggaggcgcaggacgacgacaacatgacggggcagacgggcacgctggggtacatggcccccgaggtgctggaggggcggccgtacgaccacaagtgcgacgtgtacagcttcggcgtcctgctgtgggagacgtactgctgcgccttggcctacccgaactacagcatcgcggacatctcgtaccatgtggtgaagctgggcatccggcccgacatcccgcggtgctgccccaagccgctgtcggagatcatgacgcgttgctgggatggcaacccggaccaccggccggagatggccgaggtggtggcgatgctggagaggatcgacnacaccaagggcaagagcatgacgcccgcccgtcccgaccacacctcgcanggctgcagctgcttcggcttctccaagtagtagtagtagtcgtcgtcgtgttgtgatgctggtcggtctgctg

SEQ ID NO: 437314 - DNA, 410 bp, Triticum aestivum
tggagaaacaaagtgatgcgacgagtgtacaacctctttggcatagccttgtgcacctcagcatcattgggttggacgtggaggatggtgatgatgctggtgtgactgccgctcgcggggaagaagatccgaggcctccggagacggcgccgtgggtacggctccgctgtgatggacggttccgtcgttggagcagctccgctgaggtgtacggcggcgaggctgaagcatgacacgacagacaacgttaatctgaagtgggaccctaatagcatctgcaatagatgatgtacaatacatcaccaaaaagtgctagatgtgcaacgcatcagccgcgccacggccgctccgactgatgcagtaaatactgttgactcagaacttaattgaagaaactgaactttacagtc

SEQ ID NO: 437315 - DNA, 619 bp, Triticum aestivum
ggggatactaattcatgaagagtgttatcctatggaccatttgtttcatcttgcttgcaaagctgaacaggaaataaaacgacgtgttggccacgaggagaacaagcgcacggtgcacattccaagagttgatatgattgtaaatcatcaaagcgatactatgacaaccacatccgttgttgtcaggactacatcacctccaccatgtgacacatcgcccccgagagtggctacatcatctgagttgatcataagaggtaatgacaaaggtactgatcttccatctctacatgagaatgatgaatgccttgtcaatttgaatgcaccatctgatgagctacccactactttgatcacaccacctattttagaggactacgttgataatttgactttgccatgtgatcaaacaactgaaataccaacaattttgagtgcacccattgaattaactattgatgcaaaagaaccaatgtttaatcattttgatatgacctctaatcttggtgatgattctgtgttgaatgacttattgcatgtttgcttatttaagcatgttgtagcatgtaaatttgatgcaagtaaggtttattcaccaatgttgggatggtttaatgat

SEQ ID NO: 437316 - DNA, 394 bp, Triticum aestivum
  unsure (1)..(394): unsure at all n locations
gggaagcaggacaagggcgacaccgaggaggcgcagagcgaatgcaatggcgatggcgcggcgcctgggcagctgtcctcgcccgccacagtcgatcccaagtgggtcaagaggatccttgcaaatcggcagtcggcacacccgtcacgcgtgcgcaagctgcagtacatctcggagcttgagcgcagcgtctcgtcgctccacacggaggtgtccgcattgtccccgcgtgtggcattcctcgaccaccagcgctcactgctgacgccggggaacacccacctcaggcagcgcattgcggcgctcgcgcgggacaagatcttcaaagatgctcatcaggaggcactgaagaaggagatagagaggctgaggcanatcttacagcagcagagcc

SEQ ID NO: 437317 - DNA, 461 bp, Triticum aestivum
taccgggcaagaattccggatcgacgggcttctttgagcaatttgacacaaagaaaaaatgtcacggagattgttgctcggacaacttctcgggcgaggaatgcaacgcaaagagccaaatcggtggggtgtttgacgctcttcgtgtcactgatgacctgttgatgaggagggcatattttaggaagcagcagcttgacaacaaaacaacatcacctaactctaactgaagaggacagccggtgtgatttgctcttacattgatatcgcatgcgtatgaataatggtccaatggaattgggagcggagtaagaagctcatgttgcctttatgcatgtaataatcatgcctgcctgcatggcccgctagctgttggtccaatgcctggctgcctgcctgaactggcgtcaatttccagtttgtttttgtaatatataataactcttctgtattgtgcatta

SEQ ID NO: 437318 - DNA, 359 bp, Triticum aestivum
gacggggtcacgcatgtgaggttcagcatacgaggcacttggcacggtttttgcttgaacagcgtcaacactgccttcggcacatatgtggtggtactcagaaggacctccagggctgatacaacaatcagaataaataaatgtctaagcatactgttctgattgtagttccataactgtaaatctgtaactatatggtattgtgattctgtcgcaagtagaataaagaccccgtgtatgctgcaaaaaaaaaaacaaaaaaaaaagaaagagacagattaaaacgataaaaacaaaagtagacgtcccagaaagttcaaagtaacgtctagattgtaaaaaaaagcggccgccctaaa

SEQ ID NO: 437319 - DNA, 450 bp, Triticum aestivum
cccgggtcgacggggcaaggatgaggaagggtggtcggccgaggcgaatgaagacgaggcggcgtcgtccaacgagaaggacatcgaggagatcaacgtggaggatgacggtagtgtcgccatcgcggatgcctccgtgggcgtagtcaccaaggaggatgacagtatcatctcggccgatgctccggcgatagagaaggaccagatcgacacgttcgtgcctgctccggcagccaaggccaacgaggatgccggtgccaccttcctggctgccccggtggccggtgatgatggcagtgcctccttcgttgctgcgccggcggccatggaggacgaacttgtatccatctcgtctgctccgttggcggaggagattgagggtatcatcatggcggctgctccggtcgctgacgatgttgatgttgcaccttcccggacgctccggtggcc

SEQ ID NO: 437320 - DNA, 300 bp, Triticum aestivum
gggggtggcagaggcgatctcagccgttggattatttcaattcttggggcctattgcttaagagagattgatcgagagataagatattgccatgtagagagattatgctttgctctatcactgtggcaaatgcaataatgtatcccttctgtactatcattaggatttgaatgaatgcaataaaggatggtgctccttgtaaaaaaaaagaaaatgaaacaaaacaaaaatagaaaaaaaagaaagtaaaaacaaagaagaaaaaagaagatgacccatcgggaaggtagcgaagaatag

SEQ ID NO: 437321 - DNA, 428 bp, Triticum aestivum
ccgggtcgacgggatgcaggagttcctcgtcgaattccgcgggccccaagagagtctctaccagggaggtgtatggaaggttcgggtagaactgcccgatgcgtatccttacaggtccccctcgattggtttcgttaataagatatatcacccgaatgtcgatgaactgtctggctccgtctgcttggatgtcattaaccagacatggagcccaatgtttgatcttgtcaatgtgttcgaagtcttccttccgcaacttctgttatatccaaatccctctgatccattgaacggagaagctgctgcactcttgatgcgtgatcgccctgcttatgagcaaaaagtgaaagaattctgcgagaaatatgccaagccagaggatgcgggtataaccccagaagataattcgagcgacgaagagctgagcg

SEQ ID NO: 437322 - DNA, 435 bp, Triticum aestivum
  unsure (1)..(435): unsure at all n locations
cgggtcgacgggggcgaggaagccgcgcagcagagagcgtcgtcttcgggagaacagcagcaggaagagataaatgaggtgcggggtctcctcgacagtctgacggaggagatgccgagttttctgtcggacgccaccatccggcgtttcctccgggcgaggagctggagcacggagcaggcaaccaagtctctcaaggagactgtcaagtggaggcgtcagtacaggccggatgcaatttcctgggacgacattccagaaacggggagcgaggcccggaggacacatgtggccgactaccttgacaagaacggaagaagtgtcctcgtagcaaacgtgccaatgaagtctaaagtttcagcanaggagcagatanagcacctggtatatctcctggagtatctcgccacaaactcagcggatgaacaagacgac

SEQ ID NO: 437323 - DNA, 461 bp, Triticum aestivum
acgcctgcagtactgtcgtagcttccgggtcgaagggtccttggtgttggtgggttcggtaaagtttaccagggagagatcgatgggggcacaactaaggtggctatcaagcgtggcaaccccttgtctgagcagggcatacatgagttccagactgaaattgaaatgctgtcaaagctccgccaccgccatcttgtgtcgctgattggttactgcgaggacaagaatgagatgatcctggtctatgaccacatggcccatggaactctgcgtgagcacctatacaagacccagaatgcgccgcttagctggaggcagcgtttggagatctgcattggtgcagcccgtgggctgcactaccttcacaccggtgcaaagcacaccattatccaccgtgatgtgaagaccacagacatcctcctggatgagaaatgggtcgccaaagtttcagattttggtct

SEQ ID NO: 437324 - DNA, 413 bp, Triticum aestivum
ggggctgacggcggggatgtcggactggagcgagtgcccggagctggggccgatcggggacctgcttgtgtccaaggacttccagaccaaggcgtccgtgctggtggtgcagtcctatgggagggcggcggcggcggcggccgcgtcgacgtcttctgaatttgctgttggcgaggccgtcttgccggcgccagaggccatcatgccggcgacctccatggggcacccgccaaggcgcccacgacaacattcacattctgaccttatgctttgatagtagtatagtttggtaaagcttgctagcacattgattaattaattaattaattagggagcgcctaatttttgcacgggaattaggaagtgtctgatgatcagtcgagtgatgttaatttgggtgacagtcaaacatt

SEQ ID NO: 437325 - DNA, 457 bp, Triticum aestivum
ggtcctaggttcccgggtcgacgggggaacgatgagatcatggctaggggaacttttgccaacattcgtattgtgaacaagttcttgaagggagaggttggcccccaaaccatccatgtaccatcaggggagaagcttgctgtttttgatgctgctatgaaatacaagaacgaagggcatgacactatcatcctggctggtgctgagtatggcagtggaagctcaagggattgggctgcgaagggtccaatgcttcagggagtgaaggctgtgatagccaagagttttgagaggattcaccgtagcaatctcgctggaatgggcatcgtccctctatgcttcaaggctggggaggatgccgacactcttggcttaacaggccatgagcgctacaccatccagcttccgactgatgtgaatgaaatcaagcctggccaagatgttacagtcacaaccg

SEQ ID NO: 437326 - DNA, 320 bp, Triticum aestivum
  unsure (1)..(320): unsure at all n locations
gggtcgaccgggccatgtccgagagcatgctcaccggaaacgtgtctagatcgaagatggaggtagtaaaccccccaccggtttttttcactttgtgagacggggaggggctggaacctttttattcccaaggtccaacttggaatggagttggaaaaaattctgaatttaggcaagggacccgggaaccctcccgttggtccaaaaaaaggttgtccaaaaaaagtactgatttctgagccaacatggaacctgtgttatactggctagccttgtaaattacgggcgcgaacaagggaggcttacagccannananaaa

SEQ ID NO: 437327 - DNA, 312 bp, Triticum aestivum
gggtcgacgggagcaggagaaaccacacaaaattttcttcgacacctacctgtaactgaagtaattctgtaagggctcatttgccttgcatgattctaaaaacatagggataggtcatggaaaaacacctgaataggataggaatgcacatgggaaacatcgcatttgtgaacacaggatttctgtcaacttgggtgtttgcttcacacgaattggaggagcagaggaatgcacagaagcatggccacactagagtgaaaccatatgaaagcgtgtatatggaaaaaaatcagcggtcattcacacgaaaca

SEQ ID NO: 437328 - DNA, 466 bp, Triticum aestivum
ggtccgacattcacgggtcgacggggaagcggtcgttcgatgctgagacgccgcggcggcgggagtcggcacgcagcaacgaggcggtcgaggaggcgcggatcaagctgctggagctgcggcaggtgaacaaggtgaaggcgctcgtcggcgccttcgagaccgtcatggacgacaaccaaagccccgccaccgcccgcaagccgcggctcaacctccacgcctgaactacgagtacattccaccagcatgaagctcgatcgcgtgcgcctcctcctttatcccggctactctttaatcacccatcaacccaatttgtcgtcgtcgcacacttatctataattacggtatcgcttatattttgcaaggaggaagatgatggaagggttatcatgatgtaataataataatgatcatggaggataaaacaaaaaaaaaaaaaaaaaaaaaaaaagcggccgctcta

SEQ ID NO: 437329 - DNA, 446 bp, Triticum aestivum
ggggaagcggtcgttcgatgccgagacgccgcggcggcgggagtcggcacgcagcaacgaggcggtcgaggaggcgcggatcaagctgctggagctgcggcaggtgaacaaggtgaaggcgctcgtcggcgccttcgagaccgtcatggacgacaaccaaagccccgccgccgcccgcaagccgcggctcaacctccgcgcctgaactacgagtacattccaccagcatgaagctcgatcgcgtgcgcctcctcctttatccccgctactctttaatcacccatcaacccaatttgtcgtcgtcgcacacttatctataattacggtatcgcttatattctgcaaggaggaagatgatggacgggttatcatcatgatgtaataataataatgatcatggaggaagatggtgtagttcactttatactatcgtctacacgatcaat

SEQ ID NO: 437330 - DNA, 486 bp, Triticum aestivum
attccagggtcgacgggtacctgatacccaagggggcgacggtgaacttcatggtggccgagatgagcagggacgagcgggagtgggagaagccaacggagttcgtgccggagcggttcctgccaggcggcgcgggcgaggctgtggatgtgaccggcaaccgggagatcaagatgatgccgttcggcgtgggccggaggatctgcgccgggctgggcatcgccatgctccacctggagtacttcgtggccaacatggtgagggagttcgagtggcaggaggtcgccggcgaggaggtggacttcgccgagaagaacgagttcaccgtcgtcatgaagaagccgctgcgcccacgcctcgtgcccccgaagggcctgagacaaagtccatctccatcagccagtagtcaaatccgaccaatagtccactcctatcgcttcggtcgttcttgtttagttactctatggttgataatggttaattcgt

SEQ ID NO: 437331 - DNA, 417 bp, Triticum aestivum
acggtcatgaaaacacgggtcggcacgatcaagacctacctggcgcgcccatggaaggagtactccaggaccatctacatccagaacgagatcggcgccttcatcgaccccaagggctggctcgagtggaacggcgacttcgccctcgagaccctcttctacgccgaggtggagaacaccgggcccggcgccgacatgagccagcgcgccaagtggggcggcatcaagactgtcacctacgccgacgcgcagaaggagtacaccgtcgaagccttcatccagggcgagtagttcatccccaagtacggcgtgcccttcatcccggggctcctcccgcagtcagaggcggggagggatcattaactcatcactccatccctcaccatgtttcattattccgctgctccattgctgctt

SEQ ID NO: 437332 - DNA, 655 bp, Triticum aestivum
ggggacagcgacaacaaggaacagttcaagagaagagaagatggcttcttcttcctcgtcggtgctgctggttgcggcggtggtggccgctgtggtgtgcggcgcgcacggcatccccaaggttccccctggccccaacatcacggcgtcgcctgcgagctacggcaacaagtggctggacgccaagaccacgtggtacggcaagccgacgggcgccgggcccaaggacaacggcggcgcctgcgggtacaaggaggtggacaaggcccccttccacggcatgacctcctgcggcaacatccccatcttcaaggacggccgcggctgcggctcctgcttcgagctcaagtgcaccaagcccgaggcctgctccggcgagcccaccatcgtcaccatcaccgacaagaacgaggagcccatcgccccctaccacttcgacctctccggccacgccttcggctccatggccaagaagggcgaggagcagaagctgcgcgacgccggcgaggtggagatcatgttccggcgcgtcaagtgcaagtacccgccgggcaccaaggtcaacttccacgtggagaagtcctccaacgaaaactacctggcgctggtgatcaaattcctccaaggcgacggcgacgtggtgggcgtggacatc

SEQ ID NO: 437333 - DNA, 460 bp, Triticum aestivum
gggttgcaacaatggtcgttcacgatcacattcaacggcagcttcctcggtacagggggtcagtccctggccgtgctcccaacctgaaccgcaacagggagagaggccacgccctgctctatgccgattgcttttccaacaaaccgctcttcaagccggataaattccgacgccgttttcgaatgggaaggcatgtgttcaatcgtatccgagagggagtggttgctcatgacccatacttcgagtgcaagagggatgcccttggcgagcttgggttctcctcttgccagaaatgcaccgcggccgtccgcatgcttgcctatggaattcctggcgatctggtggatgacgacgtgcgtatgagcgagacaacatgtctgatgtcaatgtacaagttctgtcaggctatgatcgaggtgtttggtccagagtacttgaggcagccaactgccgctgatac

SEQ ID NO: 437334 - DNA, 397 bp, Triticum aestivum
  unsure (1)..(397): unsure at all n locations
aggtctagaactcacgggtcgacgggatccatgatgtcttcacttcctcgcgtggatccaccaagacccttggcaacttcgtcaaggctacctttgactgcctgatgaagacctatggattcctcactcctgacttctggagggagacaaccttcaccaaggcgccgtaccaggagttcaccgacatcttggcgaagccgaccaaggccctgatgcttgatgcaccagctgagaagatagaagcttaggatgaagggtttttactagctgggagctgtctgttgcactttgctttattatagtcgagaaccaggtgtctttgaattgtgctacttgtggaagtctctgtttgctgtcaaagttttggattatggtgcaatgctactctngtattgtc

SEQ ID NO: 437335 - DNA, 393 bp, Triticum aestivum
gggagttcattaaactaccttaggtggtggttttgttttctttcactaagcggggcttataaggatttcctgttgagttttgtgttgtgaagttgacatgttttgggttaagctttgaaggactacggaatacactggcgagagcctaagcgtggggatgcccatggcaccccacgagattctacgagtagcaaaagcctaagcttggggatgccccaagaacagcatcccctctttcgtcttcgttcatggggaactttacttgaagctatatttttacacgccacatcataagtgtttttcctgcagcgtcacgtactacatcaatcttatctttttaatataccacaatcatcctttctgtacacaccttttgagataagcccacatgat

SEQ ID NO: 437336 - DNA, 266 bp, Triticum aestivum
ccgggccgacgggggatcctagcaatggtcgactatgagtagtgtgcgtttggttagcagatgacatgggttgtctgtcatctgctgcagtatcactgttggactgtagggtttttagcctgtgatgatacaattgtgtaacaactccctgtgtttggaactcgtctgactgaggtgcccgtttcttctatgcaatgtcaaactaatatattggtgtgtgtttttccgaaactagcaatattgttttggattaataagtggtgtcc

SEQ ID NO: 437337 - DNA, 418 bp, Triticum aestivum
ggggctattggtcagcttgcaaggctcctgtgggaagctgagaagtcggggcactaccagtacttcctctgtgtcactggagaccactctactcctgttgagtacggagaccacagctttgaacctgtcccgtttgcaatatgccgtctgagagatttcgtgggagcgattggggagggcaatgtgatgaataccccccttgacgatttcccgctgcctttggttaaatccggagaagatttaactgatgattcagaaccagcggaacacaagcctggggagcgtaaagcttttagcggcgatacagtgtgtgaatacaccgagattgctgctgcaaggggctgccttgggcggttccctggaagtgagatgatgggcatcatcaagaagttcatgaaagcaaagaacgattaacgcc

SEQ ID NO: 437338 - DNA, 513 bp, Triticum aestivum
aaattggatttcgaaggtccttttttttcagaatcctctattttagttcttccacccatgcaatagagagggaatgggaaaagaagggttacttttattttcatttttcccttaaaagatagactttgaaataggagtcttggaataatgctgaattcaaaggtttatttctttctatagtataagaaagaaataaaatttatttctatttctatagtataagaaaaacaaatagtataagaaaaacaaatcgaatcaaattcatggatttaccacgacctcggttgtgactccatagataaaaatgggaaatttctctcttcgagaccattgaaaaagggcgttgaacgagaaagaaatcgtccacagatgataaaactatcatatgccttggaaagtgatatgaggtgctcggaaatggttgaagtaattgaataggaggatcactatgactatagcccttggtagaattcctaaagaagaaaatgatctatttgatactatggatgactg

SEQ ID NO: 437339 - DNA, 316 bp, Triticum aestivum
gggacacggacgcctgggccctgcaggagaagacagccaagaacgcggcgcatgccacgcagggggccgacgacgccttgaagaacgccgccggctcgatatactagttcggatccggataccggcccaccggcatattgcatctgttctgtctgtctcgtgaattgtcatgaagtggagagatgttctgatgtagaatttccgtgcgatgtggttgcgcccggcttgtagcacaattctttcggcgcctccagatcgggcccgtgttgttgatgcgtaactcgtgaatctttgacgcaatgagatgcatttcgtc

SEQ ID NO: 437340 - DNA, 647 bp, Triticum aestivum
cgggtcggccgggatgggcacggtaccctggatcgtcaactcagagatctacccgctgcggcaccgcggtgtgtgcggtggcgtggcggcgaccgcgaactgggtgtccaacctcgtagtggcgcagtcgttcctgacgctgacgggggccatcggccccgcgtggacgttcctcatcttcggttgcctgtccgtggcagcgctcgccttcgtgctcgtctgcgtgccggagaccaagggactccccatcgaggacgtggagaagatgctggagaagcgggaggtcaggctcaagttctgggcaccgcgtggccgcggcagcaagaacgacggggtgtgagtatcatccctaccttctccatttagcgcgcgaacgagacaatttgtggccatccgcgtgattggaatttcgatttgtaggctttcaatactactatatatgctacaaataacatttgtaggctttcaataatatttgtcttgcaacggggacataatatttctagtgattaaaacagtcaggggtaccagatctttcaaagtgtaagatgcggtgacgcacagaagaagctcgcctcaattcgcacgtaatcccacttcactacgctgtcaaaatggcccctccatacaagtaaaaacccgtcgtt

SEQ ID NO: 437341 - DNA, 430 bp, Triticum aestivum
tcgagggacgcgtttcgaaagctgaggctttattacgagacaaagaggaagaaaatgcgatgctgaagcaacaattggaacagtatgagaataaatggtcagaatatgagaccaagatgaaagttatggaagaggcatggaagaaacagctctcttctctgcagttgagtcttgtggctgctaagaagagcctagctgctgatgacatggtcacccgagcagctcggactgataccactccaacgcatgctcaatacgactctgaagatacaatgtccacagggacccataccccagaagggacagagttgaaataccaaaaccacaaccctgaacctagactgggcaacaggaaactcagataggcggataaatgctgtgaatcacctagcaaaggagtttgaggacaggcgacaggtattcgacgacg

SEQ ID NO: 437342 - DNA, 390 bp, Triticum aestivum
  unsure (1)..(390): unsure at all n locations
aattcgccggtcgacgggggcggtgaccgggaccctgaactacaacaagcaacatagcgtggacatgcacctgctgccccctcaggtacagaatcctgtatatggctggtaagacagaaccactgctgttagtagtacatagataggcctgtaatttgtgacactaattctttttcctcctctccctgatgccaacggcaaagccttgttcattattaccaatacgaactacagactgcttgtagcactagataagacttgtgtattcgatatttcgatcccttgagttttgatggccattttcactgggacgctcacatctttgtatggctggtacagtagcaatgagaatcctatgcccnnnnnnnnnnnnnnnnnnnnnnnnnnnnn

SEQ ID NO: 437343 - DNA, 556 bp, Triticum aestivum
agggttttgccggaaccccacatccgacggtgagggattcattattttgcggcgtattaaggaggcatttccttgcgtgcggccgtggacccagctgtcggcctctccacgtacagtccacttccgatgcatgtcggtcgttgaccatgttgaccaggccgcgccgagagcaccagggcggtggacgacggcgaggcctaggaagggaacgacacggaggcagggaagactcggcagttgtttcccacgtggaggggagtacgactgtacgagggtttactggttcgtctgccgtcgccggagaataacagcaggtgtgggtgagtagagggatggctaggccagcgatgggagtacggtggggcggtgaggcctgcgcggcagcagagccggccgcggggaggagggagcaggcagtcctgccggcgcttgtttgagcggttggagcaggaagagcagagatagaagaagcatgacggccgttggatggacatccaacagtcagtgcttgtgcctcaacctttttttaggaaagcctcaaatccatggaaaacag

SEQ ID NO: 437344 - DNA, 428 bp, Triticum aestivum
  unsure (1)..(428): unsure at all n locations
ggggacttgaagctggcccagatatgcggcaccatcgcggctgacgaaaggcgccatgagcttgcctataccaagatagtggagaagctcttcgcggtcgatcccgactacacggtcctggccttcgccagcattatgaagagcaagatcacgatgcctgcccacctgatgtatgatgggcaggaggacaacctctttgagcacttcagcgcggtggcacagaggctgggcgtttacaccgccatggactacgccgacatcctcgagttcctggtcaagaggtggaacgtcgccggcctcactgggttgtccggtgaagggcggcgcgctcaggattacctatgctccctaaggaccaaggtttangaagctggtggagcgagctcaggggagcgggaagcagttgcctgttgttcctttcagctgga

SEQ ID NO: 437345 - DNA, 453 bp, Triticum aestivum
cattcgcgggtcgacggggacgcagaagatcgtgatcccgccgggcaacttcttggtgggcgcgctggagctgtcaggcccctgcacctcctccatcatcatccggctggacggcaacctcctcggcaccggcgacctcaccgcctacaagaagaactggatcgaggtgatgcgcgtggacaacttcgccatcaacggccacggcaccatcgacggccagggccccctcgtgtgggagaagaaccagtgcagcaagcactacgactgcaagatcctccccaacagcctggtgctggactacgtgaacaacgcgacgatccggggcatcacgctcaagaacgccaagttcttccacctcaacctcttcaagtgcaagacggtgctggtggagaacgtggagatcacggcgccggggaacagccccaacacggacggcatccacatgggcgactc

SEQ ID NO: 437346 - DNA, 460 bp, Triticum aestivum
gtcaaaaatttccgggtcgacggcgagaaggacattggagatggaacggtcagctatggaatggatgatgctgatgacatatacatgcggtcatggactggcaccattattggccctcacaatactgtccatgagggtcgcatctaccagctgaagctgttctgtgacaaggactaccctgagaaggcaccatctgttagattccattcaagaatcaacatggcttgtgttaatcacgagactggggcggttgacccaaagaagttcagtttgctagcaaactggcagcgggagtacactatggaacatgtcttgacccagctgaagaaagatatggcggcgacgcagaaccgcaagctagtgcagcctccagaagggacattcttctagcggggtgtttgctggcccatctccagttccagcagcagctatctatgtcactcccatgggatttgaaatg

SEQ ID NO: 437347 - DNA, 448 bp, Triticum aestivum
ttcccgggtccacgggggctcatcaaacatctcacaccatgcccatcgcaatgccttccatgccggctccggcactagccctggcactgctcggtgctttcggcctcgccatcgccccggctgttcagtcggcccccaccatcgaggccatccaagctacatgcgccaagacaatacagccagactcttgcaaacacgtcctgctcgccatcatggccgccggctcaccggaggtgaacagtgtccccctaatgtccctgcaagtcgcggcaaagctcgccaagatggccaacggcttcgccaatgccaggctcaccacggacccgcaccccgccaaatgcctcgcatactgcatcgaagaccttcatagggtggccaacgcatttgacgggattccagtggaggcggttaaacctggcgacgaggccggggtgctgtccttcagctc

SEQ ID NO: 437348 - DNA, 438 bp, Triticum aestivum
gggtcgacgggtccgccaacggccagccgaatcgacggagaaggaatggcttcaaccaggggagacgtaggatgggagttcggccaaggcgaactgatagggaggatagtgtacggcgaactgtctatgtctcagacattgatcaacatgtcactgaacagaagcttgctgaggttttctcaaactgtggtcaagtggtagattgccgtatctgtggtgatccaaactcagtgatgcgttttgcttttatcgagttcgccgatgatgtcggtgcaagagcagctctaacgcttggtggaaccattcttggtttttatcctgtcagagttctgccatctaagactgcaattttgcctgtgaaccccaaatttcttcctcgaacggaggatgagaaagaaatggtatcaaggactgtgtactgtactaacatttgacaaa

SEQ ID NO: 437349 - DNA, 635 bp, Triticum aestivum
tagtacacaaggctctttattttggcggtgtatatgatacctgggcccctggggggggagatgtaagaaaaattaccaatttgacccttagtcccagtgttatatttggttatttactaaaatctccttttggtggagaagggtggattgttagtgtagatgatttagaagatataattggtgggcatgtatggttgggttttatttgtgtatttggcggaatttggcatattttaaccaaacccttcgcatgggctcgccgtgcatttgtatggtctggagaagcttacttgtcttatagtttagctgctttatctgtctttggttttatcgcttgttgttttgtatggttcaataatacagcttatccgagtgagttttatggacccaccgggccagaagcttctcatgctcaagcatttacttttctagttagagaccagcgtcttggagctaatgtgggatccgctcaaggacccacacgtttaggtaaatatctaatgcgttccccaactggggaggttatctttggagggggaaactatgcgtgtttgggaccttcgtgctccatggttagaacctctaaggggccccaacggtttggacttgagtaggttgaaaaaagacatacaacc

SEQ ID NO: 437350 - DNA, 398 bp, Triticum aestivum
cacggcgcagaggtgtaagaaacagaaggggtgctctgtttctcacatcgagtgctctgtcgagcagaactactgatcgtgatcgccccgagcacgggcggggtatatattgaccatcgagtgtcatgttgtttcgctgtgctggggttttgttgtcggggttttgtcgtcagatttcaccagctcgtttctttctccggttctttgtttctttcacacggtaaatgcagctaccactcgattcttggcgtttgttgtttgtaaagaagatcgtagcttgtaagtaaaatcgtttgcagtgtaaaatgtacaaaggtagcatgggaaatgcttaacagaggagtcttggtcttgcactcaaaaaaaaaaaaaaaaaaaaaaaaaaaaaagcgggcgct

SEQ ID NO: 437351 - DNA, 452 bp, Triticum aestivum
acgggcttccaaaagttctttcgggattgaggacaaccccgaaccgatcgaccgagagaaccccattctttctggtctacggagccgaacagctttgccgagtgacctgcttcacggcgcaccccgagtcgagctctactctgaagatgaagcagaacatgcccggcaggacgcaatcgacctcctagaagaagaatgagaaatggccatggtccgatcgaccatctatcagcaagccttgcatcgattccatgccagaaatgtgaagagtcgagccttccaagaaggagacttggtcctccgagtggattaacaaaaaccacacaaactctcacctacttgggaaggtcccttcatagtcactagagtcctcctccacctttataacgtcgatcgccaagattgatgagcaacgaatcctgaaatgcggaactactttgccccttttatag

SEQ ID NO: 437352 - DNA, 531 bp, Triticum aestivum
taccggtcttatattcccgggcccacggggatgaaaatagcggagctcaaatcgaagaaaaactagacaagatgcagcacaacgacgatgataatgtcgactgcggcgttggtctcggatgtgtacagaataattcctcgctatcaggtggtaataacgcaccggaacggacgctgttcttgatgcgcggaatggcaaggcaaagcattctttcaccgagcaatggtgattgacgacttgattacagacaagatagatttggcacattcttacctgtaaagataatttgccaaataaagccgtttataagctttgccactttgataatctcttgtactgacacaatttgaaagaattcctttgagaacaaaaaaaataaaaaaaaaaaaaaaaaatgaaccttaagcaaaactacgtaaaaaaaagttagaaccccctcatgaagatcaattataaaaattatcttagaatgccaagaaatggctgctacaattgggacaccaaaatctcggtaaacaaaaaggggggggc

SEQ ID NO: 437353 - DNA, 423 bp, Triticum aestivum
attcgccggccgacgggtggaataaccaacgatatgttgatcttcaatgattttatccgcacccagtcgctagttgaactacccatcaagggtaggacgtacacgtggagtaacatgcaggatgacccgttgctggtgcaattagattggtttttttcctcagtgcactggtcttcttcctaccctaataccactgtatcgcccttgggcaagcctgcttcagatcacgtcccctgcgtcattggcattgatttgtgcatcccaaaaagcaaggtgtttcattttgaaaactactggatacaacattcagggtttcacgagatagtgcaatgctcttgaagccaaccttgtcatgcggctaactcagcggctttgatctgtagaaagctaaagatactgcgttacgctttaaagtcctggagc

SEQ ID NO: 437354 - DNA, 453 bp, Triticum aestivum
gggtcgacatgcatgcgcaaggggaaccaggcgacttgccgtacgcggtaggttgccctgcgttcactcgtgagctgcggcaagtccagtggcccagcacgaagaatttcaagccagacgtaccggagaagtacgacggcaagtcgcatccgtcggagttcctcagcatctacaccaccgcggtgcaggctgccggggggcgggacgacaagatccttgccaactacttcccgctggtgctcaagcccaacgtcaggtcctggctcatgcacttgccggacgactccatatcctcctgggcagacctatgccatcagtttgtcggcgcctttacaggcggccacaagcctcatggccaagagagcgaccttcatctgctcgcccagaaggaaggagagcccctgcgcaagtacaattcagagatcagccgtgtacagcacaacatcccagatg

SEQ ID NO: 437355 - DNA, 609 bp, Triticum aestivum
gggctatgctaagagtgtgactcgttatttttttcttttttttaagaaaaaaacttagtaattatagaaaattaactaataaccaacctattgcttcgtattgtcgagatcctaactaagaaacagtcactatatgaataaatacctctatcataaatgagtagatgtgtcatatagttgtagcaactgcaattttttctctaaaaaagaaaagggattctaggttgtgaagcaaaactaaagggatgtggataaagggagggatgatagaaagaaggaagaggaaataaattagattttaggattccactaggtatggtctatgaattacatcataaaaggcaatgtgataaagcatcaatataataaaaataatagagaattaaaaattttaacttgaaacaagaactacaaatttaaagcaataataaagagccgcccgggttaataaaactgagaaaattaactcggaaagaaattttttggaagctccgttgcgggattcagacctaaccattcaaggagaagcagtgggaacgacagaacctatgattccataggattttattgacaagaatcctaacacttcattgggtgggatggcggaac

SEQ ID NO: 437356 - DNA, 363 bp, Triticum aestivum
gcgcgcttcgagcaccgccgcctggatctgccgctcgtgctccttgagcatctcgtccatgttccctcccggcggcaccagcgggccggagtagttcatcctccggttccgccctccgtaaccaggcacagctgaaggggcgtccctcgtgggcatggcggtgtctttgttggcagggacgggcctgtcaagcgcattggcgggctcggcgacgtcgaggcggttgtacttggagttggtgttcctggccgccgacgagctcgggtgcaggtcggtgccccgggacgtggcgtaggacctctgcgacgtcaggtgcgcggcgtggttcgacaccctgacggagctggtcgttcgctggacccc

SEQ ID NO: 437357 - DNA, 453 bp, Triticum aestivum
attcgcgggccgacgggcagaacatcctagatacatttacgaagctttagttaccatgcatgtactattgtctcgttcatataaatggatcaatgtacgagccacgtagacaccgacatggcataactaacgggacattagaacatcagccttttgcacagaggattatcagccaagaaagaggattacaatcaggaccgactacatcctagagcttgagtcagaacgcacatcacttgcctccggcaacatcacaccaaccaccacagaataaaataatggatcaccttttcacccagagctcaatgtggctccaacgctaatatgcaatttttcagtcctccaaaatagcttaccaaatgatggtgtcccggctgaggggcctctcaccatgtcgaatcctggcctggttgggccaacctgaggaccccttgtcggtttcgacttgggcca

SEQ ID NO: 437358 - DNA, 185 bp, Triticum aestivum
attcgcgggccgacggagttagaaattgtaaatatgcattgttgtatcgcgacctgaatgaatgaaataaacgaaataacgctcttgttcaaccgtcaggctccggttcagtactgcaccaagctgttattttttgcctttttgaaaagaagcacgtgttgctgtgtttattaatgttttcatct

SEQ ID NO: 437359 - DNA, 545 bp, Triticum aestivum
gacgggcacggcaggcgcgcctggcgcgacgtacaccgacatgatgaagtcggcggcggagggcaccagggactacggcaagacgctggcgagcacggtgtacgacatgatcaagtccgcggtggcgggcgccacggactacggcaagaagctagcgagcaccgtgtactataaggtcgccggcgtcggcacggccgttgcgagcaaggcccagaatgtgacgacatcggccggcactgaggtgctttacggcgcggctccaacgataaacactaatgtgttgtgaactgcgccggggtcgatcgtgggatcgctggaataagtcgcctgcttggtggttgggttcatctggggcttcacacggttctacaggtgttcgtgtgagtttcacacggttttgtatgtctgtaaatcatgtacggtacgcgtgtgtatgtacatgtttctgtctgtctgtaaattcttttcaacttcacgtgtgtaatctgtgtcatcaaaactgaaacagagcattaaacacggcgggtgtggtagttaaacaccgg

SEQ ID NO: 437360 - DNA, 475 bp, Triticum aestivum
cgcctgcctgtaccggcccgaaaattccgagtccacgggggaaccgctacatcgcgccgccgaacctggcggcgaagctgatcacgaagcggctgtacgcggaggaggcggagtggaagaactgggtgtggcactcggagggggacctgatgctcaacgacgccgtcttcgccgacagcggcggccccaaccagaggaagttcgagaaggatgacctcatcccgcccaagccgggatcgtacgtcaccaggctcacgcgcttcgccggctgcttgccgtgcaagcccggcaagccctgctaaaccttggtggccccgccggccggccggagccgatcccttccgaatcttcaattctatagctttgttcaattcttttactcaaagattcgtgtatgtattactaggacatttgagtagtctacggggttcagatcagagggccctgtaggttgttcttgtacgtgcattcgccg

SEQ ID NO: 437361 - DNA, 421 bp, Triticum aestivum
gggggcggcatgttggggcatcgttttccacggaggctggggagactatccgcgcaaccctgtttcccggtgatggcatcgggcctgagatcgccgagtcggtcaagcacgtattcaatgttgcaggtgtaccgatagaatgggaagaacattatgttggtacggaagttgatcccagaacagagagctttttgacatgggagagcctggagtcggtgcgtagaaacaaagttggcttgaaaggtcctatggctacacctattggaaaaggccaccgttctttgaatcctacattaaggaaagaacttggactctacgccaatgtcagaccttgcaacagcctcccaggctacaagactagatatgatgatgtgaaccttgtgacaatccgtgaaaatactgaatgagagtatactggcct

SEQ ID NO: 437362 - DNA, 437 bp, Triticum aestivum
  unsure (1)..(437): unsure at all n locations
gggaccaaaccattcaccatggtactgcttgatgagatagagaaagctcaccctgatattttcaatatccttctccaaatttttgaagacgggcacctggcagactcacagggtcgcagagtttcgttcaagaacacattgattgtcatgacatcaaacgttggttctacgtcaatttcgaacggacgacggaccatgggtttctcaacagaggacaccgagtcgagccgatatgtcgcggtgaaatccctcgtgatggaagagctgaagggattcttccgtccagaattgctcaacaggatcgatgagacggttgtcttccgtcctctggaacagactcagatgctggcgattctcgatatcctcctagaggaacttaagggcaagctcttggccgtcgggatcggcctanaggtctccgatgccatgaaggagct

SEQ ID NO: 437363 - DNA, 440 bp, Triticum aestivum
acggtctagcattcccgggccgacggggcaaatgacaggaagtcactacaacgagctctggataataagatatatcttctcctgtatggcaaaacttttggggctcctgatggcaaacctgtttggcatttcccagaaaaagtgtacgaaaatgaagactctttgcgtttgtgtgccgagtcagccctaaaatctgttctcggcggacttgacaatacatattttgttggcaacgctccaatggctcacatggtaactgaacaaaaagaggattccagtgtttcaccattcaagcggttcttcttcaagtcgcaagtgatcggcaccacgcatttggacatcaggaggtgcgaagaccacgcgtgggtgaccaaagctgagttgctggaatattttccggagcacaaggatttctttaataagatgattattcacgttag

SEQ ID NO: 437364 - DNA, 405 bp, Triticum aestivum
gacgggggaagctacgctggtgcgccgcgccctcgaggccgtgcgccggacgccgcgctggcagaagaggctcgtcgtcctcaccgcaggagctggcactttaagctatgcttgccaggataaccgtgttcttcaaatcagtgatggaacggggggcaagaaaaaagtggttatacttggaactggttgggcaggtgcaagtttcttgagaaatatcgacacttctttgtatgatgtccatgtggtatcacctcgcaactattttatgttcactcctctgttgccgagtgtgacatgtggcacggttgaagcacgcagtattgtggagccaattcgcaatattgtgagaaagagacgtggtgcattcagattctgggaagcagagtgctacaagattgatccaac

SEQ ID NO: 437365 - DNA, 394 bp, Triticum aestivum
attcacgggccgacgggggactacatggcgaggatggcggccgccgagtcgacggaggagtacgtccaggactacgccgccgccacgatcaacatcggcaggatggaggtgctcaccggcggcaacggggagatcaggatattctgcaccgcgtacgttgactaatggagccggcggttggtcgatgtgagttggtgcgcgtgcctccatcgatcgtcatgtggacggggtcacgacggccggtgtgcccgccagccgcatcgcacttgcattattctaggggtggttagagaattgacaccgtcacaccgccacgcggcgagtcttccggtgtatgtaaaaaaaagtcgtctctttgttcttgaccgagtgcccattgagatttggcgagctg

SEQ ID NO: 437366 - DNA, 356 bp, Triticum aestivum
gggcgaccggatgctcgtggagatgtaagtggaggccgatacatcgctcgcagatatactgatttgtgtgttttacgttgcagatccgggaggcacttatggcatgacatcattggcggagacggaatataggttgggtacaatcatgtgacttcagaatcatgctttatgatcaggtttcatgagcatggtcaagcgcgatctgcgaatacgtttcgtgaccatgggtcattgtcttggagtaagccattccattgacactcctatggtcccatggatgatttacatttttctcttgtcccaattcatccacatatgtatccggttatccacacccttctaactcggccccatcg

SEQ ID NO: 437367 - DNA, 371 bp, Triticum aestivum
tccacggggggaattggtggatgatggggccggccaacaagttttactgcactgcattgcattggtccttttgcgccgtgggaattctttcgattcaatctgtttgttatgctggtttcttggtataggtggtaggggaggccatgagtagaatagctcgagtatattggtttagtgtgcccttgtgtagtagcggcaatcgatctatgactgaaccagtcctcattgccaagagattttaacctttggccttgcgcctaacagttctgcatctcttgttctgatcacacaatgcttactgaattaatagcgatcacctcctcgtcgccctgttaaaagcacgatcatcgggttgtatctggcacataaaa

SEQ ID NO: 437368 - DNA, 408 bp, Triticum aestivum
cggtctacaattaccgggtcgacggggatcgccaagccgagcggaggccggagagggagaaggaagatgatactcgccgtgctcttcgccaactccgagggcaacatcctcatcgagaggttccatggcgtccccgcggaggagcggctgcactggcgctccttcctcgtcaagctcggcgccgagaacctcaagggcgccaagtccgaggagctcctcgtcgcctcccacaagtcggtctccattgtgtataccatgatcggggacgtctgcctgtacattgttggcaaggatgaatatgatgagcttgctttgttggaggtgatcttcgctgttacgtcggcggttaaggatgtgtgtgccataccacctaccgagcgcctcttcctcgacaagtatgggaagatt

SEQ ID NO: 437369 - DNA, 429 bp, Triticum aestivum
gggtcccccgtggaggagtcggagggctgcctgacgctggggtggcacacgcgcccgctgatcgccacctccgcatggcgcctggccgcgccgtgaccgcgagttttgaacgctgtaagtacacatcgtgagcatggaggacgacacaaccccggcggccgccccggctctccggcgcacgcacgcacgcacgctcttgaagaagaagaagaagctaaatgtcatgtcagtgaacgctgaattgcagcggccggccacgatcgaccgtccggcgtgaagagacggacgacgacgaattccgagccgaccatcccaccggcatgtagtaatgtaatcccttcttcgtccccagttctccaccgcctccatgatcaaccgttaaactcccaagccctacaactactactactactactactactactatca

SEQ ID NO: 437370 - DNA, 383 bp, Triticum aestivum
gggcaccccttgagagagtcttgtacacgctggtgctgactagccagcatcttctttgcttttattctggccggatttgttgaataaatacgcgaaacaaattaacaacgagtgtagcagtacatccaattgaaatgttttatgtggccttggcaaaaaaaaaaaaaaaaaaaaaaaaaaaaaaaaaaaaaaaaaaaaaaaaaaaaaaaaaaaaaaaaaaaaaaaaaaacaaaaaaaaaaaaaaaaaacggccaccacaaaggatccacccaaaacgtcaacatacaaacaacctcaagcccctctcaatagggcaaccaaaattcaaaaaaaaagggcgcccttaaaaaagttcctgtctggaaaccccttggggtaaccca

SEQ ID NO: 437371 - DNA, 425 bp, Triticum aestivum
ggggtgggagatcctctcggtcttcaaaagcctctgtaacagttcagtctcgcaaaatctcgaaggttggtgatagcgtgttcattgaggaaatgcctgatattctaagggagccttcttctcctggtatcgtgaagacttgttcccctaatggaaaaagagtttcaccgccacataatgcactcagcatttcaccaaaccgaaaaggagggcggaagctgatactgaaatcgatcccctcctttccatcactggttggggacacgagcggtggatctgcaatatgcagctccgacagcacaacagctcttgctttaggtccatcgtaaaagctgggctgggcagccgattatccgcgaccggagtacgacttgtagtccgataatggtacctcgcatatgaactctgcggcaaggctcaaggta

SEQ ID NO: 437372 - DNA, 417 bp, Triticum aestivum
attcgcgggccgacgggcggtactggaaaagatgctcgaactagcaccttgcccggagccctcaaaggaagataaaggggggaataatgaggtcgaaagcagggccccatcgctaccaattccaaccgagggagtgagcgcctccgtgaaggaggataaccaaggggaagaatctgaccttctctcgcttcgaggaatgaagaggactgcctctgaagatccggaaaccaaggcttccaaacacgagaagaactctccaccagagggttctgccttggagggtgcccttgccgcacaaagtccgcgcaaggatcagccctccaatgagctgtaagtaatcaaaaagtactttaatagtggagatatactaccttacctctgaggaaaataaccgaagcatttatcttgcagtttgga

SEQ ID NO: 437373 - DNA, 406 bp, Triticum aestivum
ggtctagaaatcccgggccgacggggagctaaatccggtacatggggtcgctcaccacgccgccctgcacggagaaggtgatgtggaacattctgggcaagggcagggagctgagccaggagcagttacaactcatcaccgcgccgctgcctcaccaggacaacaggccgccgcagccgctcaatggccgccaagtcgccttctacaacccgccaaacaccatcatctccatccaatccctagtactccctccctaaacgattatgaaagcttacatttgtttacagagggagtacaataagcaggacatagtacatactccctcctcggttccacaatataagaacgtttttgacactatacatgtcaaaatgagtaaacatctaccagaaaaaaaatcaggagg

SEQ ID NO: 437374 - DNA, 613 bp, Triticum aestivum
agcttgtggaggtgcggatgccgatgaagccgtagtcttctttggctggtgcggccttggaggaggagctggcgctgcatcagaatcagcatcattgtcagaatgatccactttggcaccttgtactaagacgtatgagatgaggccatcaaggtttgcaaaggggccaattctattttcttcaacttcacgtgtgccatcatcacgaggagcagagggaccaggattgaagtctaatccccatgacttcttgttttcctttgccgaagccttagcatactggaagttgcgcttgaagagattgtcgtcacgacaccagagcaatgatgatgggtcggcatcttcaggctgtggtccatggaccatgcaaggatagaattcttgcgcaatggcttcatctttgttcttggggggaaggcctcgatagagaatatcaccccaagggctcttgataggatttttctctgcgtacgcctgggtcacacacttgtacttgtatcactgttcagcccaatagcgtcgaatccattggattcgagtcttgcgctaattgtaatcctcttcaggatctgttttgtacatttctgcaagatcatcatgtagatcctttgaa

SEQ ID NO: 437375 - DNA, 424 bp, Triticum aestivum
  unsure (1)..(424): unsure at all n locations
ttcgcgggtcgacgggatgatccgcgaggccgatgtcgatggcgacggccagatcaactacgaggagttcgtcaaggtgatgatggccaagtgatccagccgatgttcatgtccggtggtattattatttttaccggggaggaggaaattgtgcattgcatattagtagtaaggaatgcggctctcgtttccttgtctttgccccgaaccagaagaagcgtactagtagacgtagttgctgaagagcactcatggaatcctcctcccctgctgctaccctgtctctctcccgtgtgtcattgaaacatctttctttctgtgtgaaaaaacaagaaaaggcaaaagaatcaaaccaagctcttcaaaagcattaaggcaaagnnnnnnnnnnnnnnnnnnnnnnnnnnnnnnnnnnnnnnnnnnn

SEQ ID NO: 437376 - DNA, 459 bp, Triticum aestivum
ctcgtcggtcgatgggatatgagtatcagagtagcatgtctggagaaaccacaccacctacagagttctgttgcccaatatcaacaaagctaatgcatgatcctgtgataataacatctggacagacttacgaaagagaatatattgagaaatggttcagtgagggatacaacacttgtcccaagacacaaaaaaagctagaaaactttgcgatgattccaaatacttgcatgagggatctcatttgcaactggtgcagagagcatggtttcacaatctcagattttcttccaagcaaagattcctacagttatttgccagagcaattgcatggtcactctatgtcaagtttgcacaatgtttcagtacctctaattgctgggaatgccaggaattttgtgattgatcacagcagttcatctgtcgcgttttctgatgccagttatgtctcagattcct

SEQ ID NO: 437377 - DNA, 705 bp, Triticum aestivum
  unsure (1)..(705): unsure at all n locations
ttcccgagtccacggggcatgggcaccttattcggaacctatgcgggtggtttccatggcgaggagaggctgggaaagcttggctatctcgttggaagccagctaggcagctgggttgggggaagaatcggactgatggtctatgatgtcatcaacgggttgaactacatgcttgagtttgtccgtccagaggagtatcgatcatcatcttacgcagcagaagagggctcagagtatgcagataactacagaagttcgtcttacgtatcagaagagggctcagagtatgcagataactacagaagtcgcgaaggatatgagacaacatacagtgagacgccagaagaggcgcaggcggaggaggattcggggggtttcagcttgttctgaaactgcaagcttggatatcagccgacttacaccgggatggtagcaggccagcaagcagcacttgtactgaacttgtttttgcatgtctagatggggaagtgattcttctctgtgattcttgtatggccattgtgtataatagaaacgtttgcatgcaaccacggctctggctgcatggtctaaagagctaaacatgaacagagaacacatctggagtatcctgtagcacacttggggaacacacgtctctacagtgaatttgctgtatacgtgtctgtcagttcgtntataatttaatttaacatacttgggcag

SEQ ID NO: 437378 - DNA, 435 bp, Triticum aestivum
attcgcgggtcgacttcatggaggagaagttaaagcattacccagccgccgtcaacgatgaagggatgtatgcccattccaaggaagtggccgaggccatgctcggggaagctaatgtgaaggtggctccccggagcatgggtggcgaggacttcgctttctacgcgcagagagcggcgggtgcattcttcttcatcggcgtaggtaacgagaccgccatggacagggtgcatccggtgcactccccgcatttcgtcctcgatgagggtgttcttcctattggagccgcgtttcacaccgcggttgccattgagtacctgaaccgctcctggaaactacaggagcatgagtgaaggtccgttcttggattatggagtgaaaatcctccgatgtccgtatagtgttagatatccaaaatcgtcttcatttgcttga

SEQ ID NO: 437379 - DNA, 464 bp, Triticum aestivum
taccggatcgaaattcgcgcgggccacggggacacgccaagtgggcaaagtcaccagacaacgcaggccactataattctgaaccaaacaacactggatttttctgtgacggaggagattatgatacctattagggccggttcttcctcaactggtacgcccaggtgctgctggatcatgcggaccgcgtgctgatgctagccaggttggcctttgaaggctcagctattgctgtcaaggtgtcaggcatacactggtggtacaaaactgccagccatgctgctgagctgactgctgggttctacaacccatgtaaccgcgacggctacgctccaattgcccaagtactgaaaaaccatggtgcggctttgaacttcacctgcgtcgaactgcgcaccatggattagcatgaggtgtaccccgaggccttggcagatccagagggcttggtatggcaagtgctg

SEQ ID NO: 437380 - DNA, 444 bp, Triticum aestivum
  unsure (1)..(444): unsure at all n locations
attcgcgggtcgacgggcagagagagcggtccgtggcgctcaacagcgaaggccttgagggtctagtaccacgggcaaagctgttattatcacttggtggtacttttttcctggcatttggtcctctgattattgtcacggtttctctatttgctggtctttatctgtattttgggcaaagctttgtacacgacgggagcaagaaaccagtcgcgccaccaccatacattgacccatatgagctactggaagatgataggatctcccggccctcccttgatgtgttctgaatctccacgacaaaaggatagtatttgtagatagctcaataattttcttgttttactagatatgtacctgtaaatgcaatagctgtagactgttattatccggaaattggcaatggctcgtaggtgcatatgcaaccattgtctanatacacat

SEQ ID NO: 437381 - DNA, 433 bp, Triticum aestivum
cgggaatagctagcggatcttgttactcttgggtgtttgagcatcctagacggttgaggtcaccgcgaagccatagtccattgtggtgaagcgtcatggtgtcgttgggagcctccaattgagttgtggagattgccccaacctcgtttgtaaaggttcggtcgccgcctccaagggcaccaatagtggaatcacggcatctcgcattgtgtgagggcgtgaggagattacggtggccgtagtggcttcttggggagcattgtgcctccacaccgctccaacggagacgtacttcctctcagagggaaggaacttcggcaacacatcctcatctccaacgcctccactcttggttgtctcgtgcctttacttgtggaagcttatttgtttcatatatcttgcttgcttgtgttcctatccgtgttgcatcata

SEQ ID NO: 437382 - DNA, 460 bp, Triticum aestivum
gtcctatggttaacaagttcgatgtcagcgtctgccgcatccaactgccgttttaaatgggcaaactcgctagtccggctagccaccggagcttccatcacctgcacatagaggcagtatggttattacctgggaatatgatcctctgttcgtcgtcgtttccgacgacaaccagagtctcaggggctactatctacacagggcacacctagcatgtgcaggactatcatacattattttacgtacctcaaagcctgtcagtagactcataaaagcttcatgcaatctgctttcggcggacgagattctctccatcaccgtattcatcagcacacggtgttcatctgagatggccgctcgccccaccaactccctcagaacatccgatcgcacaccagacggtgccggactcttttgtccgctctcttcggcagccggacactgggagcttcgggggtca

SEQ ID NO: 437383 - DNA, 389 bp, Triticum aestivum
gggacatgctagatgacgtcattgttgcagaaacggcatatgcgacaccttcagagaatgatccagaggagccggaggcaaccgcataggcctttttggaggtcttggcctcgtcgatgaaacctctttatgcgggtgcgacaatatctcagctggatgccatctcgcaactgattgcagtcaaggctgagtacggctgtagccacatatgcttcgaagcattcctgggagtatgggctaacagcctccctgagggtcatgaactgccgataagcatgtacgatacaacgatcatcatgaaggcactctctatggattatgacaacatagatgtttgcccgaagaattgccttttgtttaggcacgagtatgcggatgacatgtactgt

SEQ ID NO: 437384 - DNA, 464 bp, Triticum aestivum
agacgacagaaggggagaggaacatcaggttttagcatcgcgatttccctagaagcgttgcgcggagaaatctcgtcggatttgttccccggattccagcgcaaagatgccgcgcattcccatgatcagattccccaagaggcatctcaaagtcccatccccaccagcggcgcagcctgcagaccagcacgcgaccctcatgtcccgattgggagctaaagtagaggcaccatcttctggagagaaaaagaattaccgcttcagatcagatgtgccttccgcaccttctcataatgctgttggagggccagcttcacagcttcccaagcgcaaaccactatctgaggaagagattgaagctatcatgcaaggcggtgtcttctgatattgcttccggccagtggcaccttttgtggagcaccaataagccctacgccgcgctgcattcgtaaccgttttgcaca

SEQ ID NO: 437385 - DNA, 446 bp, Triticum aestivum
cgggcatcactagagtgagtcgtatatgagaaaaagattccacggatgagatattttatgatcacagatattttttaccacaaccataacattaaagttgtctaacatgtaatcaagacttcaagatatagctccctttgcaccaagagttcaacaaaacagtttgcaggcaggaaaagttaaagctctagaaaaaatcctttatgaagttcccatgactaaaaagattcctcaatgaagttccattagcaccaagttataacttttcactggctaattaaggcatgaatgatacccacgactacaaaaattacgacctctcaaacaacaacagaacagaaactttatatgtccattggcctagagcaaggaagaacctctatgaagttggtggaaaaggtaatgtaagttgggtggaacatagatcacatacctgaatctaatac

SEQ ID NO: 437386 - DNA, 423 bp, Triticum aestivum
cggcattcttacagagaaaggagtggtcgtgttgcctgatatctatgctaatgctggtggtgtgatcgttagctattttgagtgggttcagaacattcaaggattcatgtgggaagaagaaaaggtgaacatggagctccataagtacatgaacagcgcgttccagaacatcaaggccatgtgcaagtctcaagattgcaaccttaggatgggagcattcaccttgggagtgaaccgggttgctcgcgccaccatcttgaggggctgggaggcatgaggaattccagattccttatcgaataatccatgcccgacaccgtggtggatgacagttcttatatccaccatcattgatttggtaaattcatcataagttgccggcatgccaggagtccaattgagataattttcggtgtacatgac

SEQ ID NO: 437387 - DNA, 426 bp, Triticum aestivum
gggggagaagaggccggacaaggtgaccggattgatcagcgcggagcaggccaaggaggccgagcgcagggaggccgaggagcgcaaggcggaggaggaggagggcggggccgcctgggccaagaacaagcacgtgtatcagttctgatcgatcgccgccgggcgccgcgcccggccgtgcatctcgcggcagatggtgttctgaacggaaaaagttcgcgagagatgatggtgtgcatgtatccaccgctcaccgtcacttggagattcgtgctacgttttcttgttttgtcaaaagcttgtcttgtttcagagtgttgcatgatgtttctctttttaaaaattatcgtgatgtttcgatgtgtatatcagtaaaataagagagtactcagttcaaataaaaattaaaattagagagtactcgac

SEQ ID NO: 437388 - DNA, 416 bp, Triticum aestivum
gggtagctccatgccatgctttactttgccatgttcaggtcctgtagcatatagttttcatgctccgaagagggctacctgatctgaaattccagacaagtgttaatttcactaagtctgaaacctgtttgccaaatgcacttttgccatgcttgtttgaacctgttaatggatgaattggccgtagctcagtgctagacttttgttaagcatcatgaatggattcttgccatgtattttgttgccatgtttgggtgttgtagcatgttcatcttgttgcatttagatggctacttgctgtaaatcgcagaacgtggtcatattggaatcgcttgccatttcgaaaccgtaactccgattccggcattctttatatcgttttcaagcgatttcatctcatatttccagtggtacac

SEQ ID NO: 437389 - DNA, 423 bp, Triticum aestivum
cgcgggccgcaccacgccgatgactgcggcatctgcagagttgggggcaaggacaacttctttcactgccgcaagtgcggatcgtgctactcggtgaccctccgggataagcatgtctgcatcgaggactcgatgaagaacaactgcccgatctgctacgagtacctgttcgactccctgagggaggcgtcggtgctgcgatgcggccacaccatgcacttgcagtgcttccacgagatgctcaagcacgacaagttcacttgccccatgtgctccgtgtccatctttgacatggagaaattcctgagggccttagatgccgagattgaggcgaagttcttacacatgggaaagggatggatcgtgtgcaaccactgctgggacacgacccgggtgtatccgggcatgacgggacagagaaag

SEQ ID NO: 437390 - DNA, 439 bp, Triticum aestivum
cgtcatggcggatccgccgcactgtctttagaccccatcattgacggatttcacctcactcgagtccttatggacggcggcagcagcctgaacctgctctatcagcatacagtgcgaaaaatgggtatcgatccctcgaggatcaaacccagcaaaaccacctttaaaggcgtcatcccaggtgtagaggcccattgcacaggctcaatcacactggaagtggtcttcggatcaccggacaacttccgaagcgaagagttaatcttcgacatcgtcccgtttcgtagtggctatcatgcactgctcggacggacaacatttgcaaaattcaatgcagtgccgcattacgcgtacctcaagctcaagatgccaggacctcgcggggtcataacagtaaatggaaacacagaatgctcgctcccgtccccggcgcccccgg

SEQ ID NO: 437391 - DNA, 451 bp, Triticum aestivum
gggtcgacgggaacttcctacattcatggaagggtgcatgaactctcccaaaagacaactccttttgtttcggcgccggtcttgggatattgccatatttcctttcaactttcgcaaatcaacttgtcctcatctttggtgtatgatcccgtctgaatgctttcctcctcttttgtgcattggcctttaaggtgaggtcatcaatgaacaacggctcctccttaatgtctacgccatcttcttcatcttcacaataaatgtcttcatgccatggctcgccttggccgtcagtcgcttcttgattgttgtggctgccaatgtgctcgacaccatgatcttggctgtgaccgtcttgactttgggtctcgtcgcgatcgaaggcttggccatggccctcggggtggaaggctttggcactaccctcatagatgatgttctccatgaaatcgtt

SEQ ID NO: 437392 - DNA, 379 bp, Triticum aestivum
  unsure (1)..(379): unsure at all n locations
cggggccaaaggaaaatagaagcaaacgttggtgccggtaggtccggatgcgccatccacggcgggatttgtgctgcgtacctcacacctcatagtcctggttgttgcttggatgtggatgttttgtgggatgtgtgacccctgaccgccgatcgccgctgctctgcttgctaacgacaagttcatgtagctgacctgtccaacatcactgttggccggcgtacaaaatccttgcgtctgtgtggtgcccctgggactgtcctgcatcagttcactagtgtacatttgcagaatctctctgttttcttgccaactctgaataatttccttctttgaacaaaananaannnnnnaannaaaaaaaaaaagcggccgctct

SEQ ID NO: 437393 - DNA, 428 bp, Triticum aestivum
  unsure (1)..(428): unsure at all n locations
taccggccctacattcncgtagtcacggggagcgaccatgacgagctgttcttggttgtatcggaaccaatttttgtaatggggttagtagggtgagagaggagacatggataattggtaccgctgctgcttactttgggtctgcggttgttggaggtggttgagactgctgttattagtctgttgtccgagctgtagagaactctttgctgctgctgttacttccttctgatgttttttcgttttgttattatatagccggatggattcgcatcggaatttaacgcgaagaaaagatatgcagttttatctnnnnnnnnnnnnnnnnnnnnnnnnnnnnnnnnnnnnnnnnnnnnnnnnnnnnnnnnnnnnnnnnnnnnnnnnnnnnnnnnnnnnnnnnnnnnnnnnnnnnnnnnnnnnnnnnnnnn

SEQ ID NO: 437394 - DNA, 840 bp, Triticum aestivum
  unsure (1)..(840): unsure at all n locations
ttccgggtccacggggatgccgaatttgtgtgtcgtggctgggcatacggtgaatggagtggccgagttgcacagcaacatcttganacacgagctgtttgcagattatgtctctatttggcctaacanattccagaacanaactaatggaattacaccccgcagatggctccgtttttgcaaccctgagctgagtgaaatagtcacaaaatggctaaaaacagatcagtggacaagcaaccttgatcttctcaacggtcttcggaaattcgcagatgatgaaaaactacatgctgagtgggcagcagccaagctggccagcaaaaagcgcctagccaagcatgtattggatgtgactggtgttacaattgacccagatagcctttttgatatacaaattaaacgcatccacgaatacaagagacagctgatgaacattttgggagctgtgtacagatacaagaagttaaaggaaatgagcgcagcagacaggcagaaggttacaccgcgcactgtcatggtaggagggaaagcatttgcaacatacaccaacgccaaaagaatagtgaaattggtaaatgatgttggtgctgtggtgaacaacgatgctgacgtcaaccaatatctgaaggtggtgttcattccaaactacaacgtatcagtggctgaagtgctcattcctggcagtgaactgtcacagcacatcagtactgcatgcatggaagcaagtggaacaagtaacatgaagttctctctgaatggctgtgttatcattggaactctcgatggagccaatgttgaaatcagagaagaattanggcaagacaacttcttcctttt

SEQ ID NO: 437395 - DNA, 431 bp, Triticum aestivum
gggaatggaccatctgatgaagcttctcacggcaatcaaactttacattccatagtgccactgggcgctgccaagcaagaggagctgtctgctaggacccccttggttcttctaccgatgcagttacggcataacctagagaagaattcatttaggagagtactgccccgctttttcccgctgttgattgatctgattcgctgcgagcatagctctggagatgttcaacacgcgctgtacaaaatcttcaaatcatcaataggccccatgatagaagtataatggcacattcccgtcctgctaggcgcacgattttgtgtcaacattctgacatcctgaatgagcccttccttcaggatcctggagttcaagtgcatattactagtccagatatcaggcataaagaggaaaatacatttttgcttacatcc

SEQ ID NO: 437396 - DNA, 243 bp, Triticum aestivum
gaggagttcatgagcctcttcatcgacgggcaggcagagctgttcgtcgcataagtcaactcgcctgtatgtttttcggtgattacacgagggtccaacttgtaggaaccacattgatctagtaaaaatgttcttttcgcaaacatgtttgtatagtttccttgtaaaaaaaatgcctgtactgacactgagcgcgtcgattaatacgaaaatcgttgctagttaaaaaacagtcacacaatt

SEQ ID NO: 437397 - DNA, 413 bp, Triticum aestivum
gggccggctgaagcgagcgagccgtccggtggctatttcggctggctgcactgctgcatcccggtctgggaagtgatagtcatggccgtggcgagcatcgcgggcttcctggccgggtttcttcttcatgatgcagtcgacaagatgagcaacaaggccaatttatctggttaagtttatctggttacactagtagtgaatagtgctctagaattatggttgtggtgtttagctcagcatatatatatatatattgctgaaagcatgtcgatcgatcgcctgtcgtggcatggcacgtactcttctgccggagttaagtacgtgtgagttcctgtgtttggttcatgtgctacagcttaatttgcgtagcatgatttagtgtggcatttacgtcgtctttgacgttttctccc

SEQ ID NO: 437398 - DNA, 432 bp, Triticum aestivum
acggggccaccacgggtccatgagggtttacgatggaagctcaccatattcgactccgaagcaaacgaggcctaggaaatcaagccactccggggagcagcgacaacctttcagtggcaatgggttttgacattgcctttcacgatcatcccccggattagtagtgatttgagccagcggatgtgctggtagcaacacatcattccgcctttgggtttgtcagttcggtacccattagatatatgtttttttctctagccattgctattctttttagtgtgttgcgcccaacgaaagcattggcgtggtgccaaatttttgccatgtgccctcttgtacagtatatcactgcccaatcatttcgacttaaaatgaaaccggtgatgggtatagatttgtgttctagacccatggaagatgctatgggaacct

SEQ ID NO: 437399 - DNA, 390 bp, Triticum aestivum
gggtcgaccgggagcatgctgtagccactgacaccacggtgctggagctctcaagggcctgcagtttcatcatgctcctcgcctacgtcgcctacctcttcttccagctcaagacgcatcgccagctcttcgagccgcaggagattgagggcggcgatgatgatgaggaagaggcggtcctcggctttgggagcgcgctcttctggctcatcctcatgaccatcataatcgccgtgctctccgagtacgttgtcggcaccatcgagccgacctcgcagtcgtggggtctctcggtgagcttcatcagcatcatcctgctccccatcgttggtaacgcggcggagcacgccggagccgtgatcttcgccctgaagaacaagctgggcatca

SEQ ID NO: 437400 - DNA, 402 bp, Triticum aestivum
gggtcgagggccgggcggcggcgaaaagttccactggtggtgcaggggccggatctggccgaaatcgggctgaaggcgggggagttcccttcgtctccgtgtgaagagaggaggagctacatcggcgtcgtgcggcggtattccccttcatcgccgtgcacgaggagtacccttaggctccggcggcgatcaaagagacggaatccatggcggggttgcagccgctcgcgccgcctgctcgcgacgtccggaccaactggctgctggcgcgctccgtgatgcaggtgctcttctcgaagcacggcgagctcagacgcctcgacaacctgggtgcctccctctgcggcgccaggattccctgcagcccgacggcgctggacctccactccggcagccatagga

SEQ ID NO: 437401 - DNA, 415 bp, Triticum aestivum
ggggctgcgtctacaacaactcatcggcaacaactccagtcaacagcgtccgcctcgtcatttgcgtccacgacactcccgctgtggctgcgggagggaatagaggagaaggcaggaaggcaccagaaggggacgcagtcaccgccctaggtgccgacccatcagagacgcagttgatgatggtgcggcggagaagacgacgaaagcacaagagttcaaattcagtcgtcatcgtccgcttcactcccgctacgactgagggggaatgttagaagtataattatgtttaagttagagataggattggtttaaaccacatgtaacttgtcttgtactccaagtctctatccctcatgatgtactctatattatacccctatgagggtcagattcaatagaccattattatccaccc

SEQ ID NO: 437402 - DNA, 357 bp, Triticum aestivum
cgggacggctaaaaccccagctcaagtgcctacaaggtcatcatcgacttggtcgtcgaaaaatacttcagatagaatgaactaccagctaactatgagtggtagaggaccaaaggggaaaggaggaaaaatagaaggaagaacgcaggattttgaccaacaatcagtaaggggttgacacgtgtcgcacaaatataaggaggaaaaatctgggactgaccaacaatcagtccacagattttgttttcagtttaggtcgaattttttgcccaataacgggttgacacgtgtcgctgatatttgagctgctgtatgcaacaaattcgacggattcgttcgaaagttgcctggacggcc

SEQ ID NO: 437403 - DNA, 462 bp, Triticum aestivum
ggtccagaataacgggtcgacggcgcaggattgacaaaatgggctattgagctcttaccattcgatataacttacaaacctcggcgagctataaagtcacaagttttggctgactttgtcgctgaatggaccgaagccgaactccctaaagagtacggcgcatactccaattggattatgcacttcgacggctctaacatgttggccggactgggggctggcgtcgtattgacgtccccgaccggggacacagtccagtacgtacttcagataatgtacacggactccaacaacgcagccgaatacgaggcccttttacatggtctccggatggcaatctccatgggcattcaacgcctagaggtgcgcggggattcaaacctcgcaatatcccaaataaacggagactttgacgccaaagattcgaaaatggcagcatatcgcaacgctgtcctaaacatg

SEQ ID NO: 437404 - DNA, 411 bp, Triticum aestivum
  unsure (1)..(411): unsure at all n locations
acggggaggataatgccggtggccctgcgtggaggcgcagttggcttcctgctttcacgtcatcgttcctgaaggtcgatgattctccttgtatgttcttgtatggatgcctgctttccttctgtcttctgtttgcaatgctttgctcgtcgtgaagacgaacagtacaaataacgtgttaaaacgtgaagatgaaatcgaatagagggcaccggcgggaattgatccaccgccggtggttgaagnnnnnnnnnnnnnnnnnnnnnnnnnnnnnnnnnnnnnnnnnnnnnnnnnnnnnnnnnnnnnnnnnnnnnnnnnnnnnnnnnnnnnnnnnnnnnnnnnnnnnnnnnnnnnnnnnnnnnnnnnnnnnnnnnnnnnnnnnnnnnnnnnnnnnnnnnnnnnnnnnnnnnn

SEQ ID NO: 437405 - DNA, 463 bp, Triticum aestivum
tccacgggggaagaagaaggaggcggagggatggggcgcgggaagatcgagatcaagaggatcgagaaccagagcaaccgccaggtgaccttctccaagcgcaagaacgggatcctcaagaaggccaaggagatcagcgtgctctgcgacgccgaggtcggcgtcgtcgtcttctccagcgccggcaagctctacgacttctgctcccccaggacctcgctatcaagaatcttggagaagtaccagaccaactccgggaagatactgtgggatgagaaacacaagagcctcagtgcggagattgatcgaatcaagaaagagaatgataacatgcagatcgagctcagacacttgaaaggcgaagatatgaactcgctgcagcccaaagagctgatcatgattgaggaagcacttgataatgggctgacaagtctgcatgaaaaacagatggagcactatgaca

SEQ ID NO: 437406 - DNA, 366 bp, Triticum aestivum
gtcaaaaattaccgggtcgacggcgttcagatcagaggaccctgtaggttgttcttgtacatgcattcgccgtgtcagcagccaggcgacgcggaggggatgaagggcagagagagaacatgtttctgtctaggtcatcctgcttacttaggggaggtggagggcccgacagaacgcatgcaaatattgaagagggccgagactaatttgttaacggttatttttaaggtttattgtctgtttatttctactttgatttcaactttctatacatacatacatgcaaaatgcgcaaagtacacttcttacacacgcctcttccgtggccacctctcacaacccacatacgcagctcttttccgatag

SEQ ID NO: 437407 - DNA, 341 bp, Triticum aestivum
gtcaaaaatatcgggtcgacgcggttcagataagaaggccctgtaggttgttcttgtacgtgcattcgccgtgtcagcggccaggcgacgcggaggggatgaagggcagagagagaacatgtttctgtctaggtcatcctgcttacttaggggaggtggagggcccgacagaaggcatgcaaatattgaagagggccgagactaatttgttaactgtgattttaaggtttatcgtctgtttatttctacaattttatttcaactttctatacatgcatacatgcaaaatacgcaagtgaacatgtgtgcaattttccccgcgccgatgaaaacatttttag

SEQ ID NO: 437408 - DNA, 326 bp, Triticum aestivum
  unsure (1)..(326): unsure at all n locations
ccggtcgaccgggagaagtctgtccttgttagagagctttcaagggcacttggttctaagacgcgtcctccgaattgatcaatactactggcgagtggctgttgtcgttgttgttgtaacctgtaagtccaccattatgaagctttcgcttgttttacgtgtctgccttgtctatatgtgtaaggctacaaggaacgaaatcaatgtacatatgttacccctatgttaaataaagcagggtttgccactctaaaagaaacatacaaaaaatgaagaaatacctgcacagtatactagnnnnnnnnnnnnnnnnnnnnnnnnnnnnn

SEQ ID NO: 437409 - DNA, 415 bp, Triticum aestivum
gggaaggtcaacatggtgtagcacgggcaccacaaaacaaccgtctgctgcgccctccatgacggggctgaatcggcaccctcagaagcagcaccgccgcgacgcggcatggttctgtacatatctctgtcgattcgaacaacgcaccagggtgctctgctagattttcagcgccgtggcggctcgaggacaggcggttttaagatttgatttgctgtagtgctacgaccatgtgtaacaatgtacttatatgcactgcagcctttgggggctgcgcacaggtgatttgtatggttgcttacattgttggatatttatttgtgcacaaccgaaatattatgcacccaccgccattggttccgcttggtaaatgcgacccataaatgtgttccaaaaaacaaactccttactggga

SEQ ID NO: 437410 - DNA, 263 bp, Triticum aestivum
gaacaaaagaaagcattgacgttgcctatggctgtggagggacgggcctgagttgcatttatttaactaatcatgcccgttgcgttgggggagaaaaaggaaatacacgctagcccaattaagtaggactcaataccctgacgtaggagcgtcctttatttgaacacagtgactcgccatgttatgaacatgttttataatttgtgaacagttttgtaaaataattaatattttttgaaactgtgaaaattttatgatttccg

SEQ ID NO: 437411 - DNA, 430 bp, Triticum aestivum
cccgggtcgacggggaatttgaatttaattcaaaatttactgacaagatgaggagaatgaggcttcctctgcctccagttgatgagaaaaagaaggtagttgaagatgttgacaaggatcgaagatacgcaattgatgcatccattgttcgtattatgaagagccggaaagtcttgggtcaccagacactagtaatggagtgtgtggagcaacttggtcgcatgttcaagcccgacttcaaagcaattaagaagcgcattgaggatcttataaccagggattacctggagagggacaaggagaacccgaacgtctaccgatacttggcttgatcatcggttctccatgctgggttcggtaacatctggcgtgtatgcctaccaagctactgctatttaaggatgctatattttgtgccatggcacaccgc

SEQ ID NO: 437412 - DNA, 410 bp, Triticum aestivum
gggtccacgggttcatcataccgccggtcgtgtcggcaaaatacgcatcaccaccaccaccccagttccaaggatattaagcatggcatcatcgaaacatcgacgaggagcgaccaattaaggtttaacacaacatcgcgtgcacatgcacagatgtacctcattaatttggaacgtgcatgcatgcatgcatgcgtcgagacttattattaattatgtgtatgtctgtgcgtatgtgcgactgcaaagtgtatgaagggaaatagatgttatctatgatgccttttttttttgtttttggaagtgggcaattttattaaagcatcaagcaacttttttttttttggaaatgtgatccataatgccgtatgttgtgcttttccctttaggacaaatgtaattctttcctt

SEQ ID NO: 437413 - DNA, 419 bp, Triticum aestivum
ttcccgagtcgacaggctcaaggagataatcaaatacaagggattccaagtacctcctgcggaactcgaagcccttctcatcacacacgccgaaatcaaagatgctgctgtcgtatcgatgcaagatgaacttactggtgaagttccagttgcattcattgtgcggattgaaggctctgagatcagcgagagcgagatcaagcagttcgttgcaaaagaggtcgttttctacaagaggatccacaaagttttcttcgctgactcggttccgaagagtcctgctggcaagatcctcaggaaggacctgagagcaaagcttgctgcaggcatcccaagcagtgaaagcacacagtccaaaagctgagtcgcatcttacacacacacacacacacacacacacacctctgtccaaaatcatg

SEQ ID NO: 437414 - DNA, 452 bp, Triticum aestivum
ttcgccgggccacgggctacagccaacgttgaaacgaggcgagcatcgagggaaccatggagaacgtcggggaagcgatgtcgcgccatctggcctcctcttgcggtgggagaacgaatactcctgtggctctggctggctctgcaccctcatgaacggcacaccatactcgatcgattcgttatcctctgggtgcttgaccttcgacctgtacgccccccacctccgcctgactatcgcctcgggtgaatctgtctgctccatcgcccataggagatactcgatgaactcggaggactgcaacgtgactgccgccgaggagtacatgtacatcacccgtcctcatcgccgccatctcgctctttcgcatacattgccacatggcccgcaccgtcctcgaaatctcccactcattgtcaaaccaactaaggatctccttcaacctagctaac

SEQ ID NO: 437415 - DNA, 328 bp, Triticum aestivum
attcgcgggtcgacggggaaaatcaggaagcacgagctgagggccaaggccaaggagcttggccctgtgaagaagagcaggatgtgagctccgttgctgagatacatataggaatagtggaccgtggacgctagcgccatcgtgaataaaggttatgctctcgggaaattccttagtgaagacttgtctgtataagaaattcaagcactcgatagggcacgaacacgaacaagagggagatataacacgaactctgcttatgtgctccgctgtgtttcgttgttcagataaagacctcatggcttacgctgtgtagcctcttctaaaa

SEQ ID NO: 437416 - DNA, 420 bp, Triticum aestivum
gggtcggccgggaagttgaccctagtcccggctgaagaatgtatttagtcatttagtgtcgatgcaaggcagtaaccatttcttgtcttcatcctcgtattgtatagcatatagaggtacaagggagagagagagagagagagagagagagttacactgtaacaacatacatttgggatcctatctatcagggcgcgggcacgtagtcatactgcatggatagggacgtgcgtttagcatccaggagaagttgttttcagcataaaaatattcagtctaacaccgatgaccacgacaacaatgtccttctcttcttcccctacttctcttgggcgtcatcatcggcggctggcgagcacggctgagtgatatatggtcacgggctcacggcctagttgttgaacttgaggcatgggcggg

SEQ ID NO: 437417 - DNA, 498 bp, Triticum aestivum
  unsure (1)..(498): unsure at all n locations
attcgcgggtcgacagcgagagcaaatgtttgacggaaacgatgtgtcagatggcatgggcttcggaatgctaaccgagggtgagagatccttggtcgagcgcgtgaggcaagagctgaagcatgagcttaaacaggggtacagagaaaagcttgtggacatcagggaggagatactgcggaagcggagagccggtgagctcccaggagacacggcgtccactctgaaggcgtggtggcaagcccacgccaaatggccgtacccaactgaggaggacaaggcgcggctggtgcaggagacggggctgcagctgaagcagataaacaactggttcatcaaccagcgcaagcggaactggcacagcaaccctacctcgtcctcgtcggacaagagcaagagaaaaaggaacaatgcaggtgacggcaacgccgagcagtcctggtanggcgggcgcggctggagagcgaagaacgaatgccccatatatgtacatagcgc

SEQ ID NO: 437418 - DNA, 412 bp, Triticum aestivum
ggggcgtggtgattgagatgtgctgccatacattgtattagcgcggagagagcaaatggatcggatgtacctttgtgtgatgagtgtaattaagctgtgaccaatatgtacacggccgcatgttgcgttgcgtgggtgctgtcgccgttcttgtgtactccattgttgtgctgtgatcactcctttgaataaatcggctcgatcttcaaaaaaaaaaaaaaaaaaaaaaaaaaaaaaaaaaaaaaaaaaaaaaaaaaaaaaaaaaaaaaaaaaaaaagacacaccaaaggatcaaaaaaaaaaataacaataaaaacaaaatcaaaaaacaatcaaacacaaacacataaattcaaaaaaacaggcggtcgctaaaaaaaggggggccccccaaaaaatcccccccttctcg

SEQ ID NO: 437419 - DNA, 439 bp, Triticum aestivum
ccacgggaggtgtttcatcttctaatggaggttccagaaacttctagagccttccacaaccctccagaggttttctagggttgtcctaaactttttggatctccgctttttctcggtttccttcataacattttcttttcttccaaaacttttctggtgcaattcacataagctcttgcacttctagtactcaacaaatcgatgatccttaagcgtgtgtcctggcaggttcggtaaatgtagacaagacccggaacaccttccggtcaatggccaatagcagaactgtggacatccatattgtcccccctacacttacacgaattattatcgagtgaacctattgttctgacacacaattccctttatttcacaatataacataatcaaaggtgatacttattggtatccatgtgaagcaactcatgatcacccatac

SEQ ID NO: 437420 - DNA, 441 bp, Triticum aestivum
ggtccacgggatccaccttttgccggattattaccaatataatcataaaaggctaatttttcgggaattttagaccaagcttctgataaactaagattttcggctaaaccattgctaactcttcgatatatttcttgctgaaagtatccctgatcccactgataacgagtaggcccaaataattcgattggggtcgttgctgacccataccacatagttccagcaactacgaaagctgcaaaaaaaacagcagcgatactactggaaagtacagtttcaatattgcccatacgtaatcctttatatagacgttgaggcggacggacactaagatggaataagcccgctaatatacccaatgtacccgcagcaatatgatgagaagctattccccccggaacaaaaggatcaaaaccttctgcaccccacgcttgatttaca

SEQ ID NO: 437421 - DNA, 753 bp, Triticum aestivum
  unsure (1)..(753): unsure at all n locations
cgggtcgaccgattctacgacccaatgctgtcgttcatcgacgtggccgtcaacgaaggcttcatcacccaggaggcgaggcagatcatcatctcggccccaacagccaaggagctagtgatgaagctggaggagtacgtccccgagtatgaggtcggcctggtctgggatgaccagaaccagatgccaagcaacagcctggtcccagagccgctggagacacccgcgatcacttcatcctaatcgatgtgcctcgcctacatctcagttagggttctaacaacagtgtcgagatagcggcgccacatatatttattctctcctagataagtcctagccaactgaagggcgacgagggggcacattatagcatgtgtgcttgttttgctagcgtcggtcgaccgatctcttgtgtcaccgctgatgattgttttgggtggcatgattatattaagttaactagtgagtagtagcttccaacttgtatggattgttgaatggttcatggctggatgggcatagcatgcagctaagcctctgaatcgatcctgctgtgatcctgaacaagggttgactacatataaatagcagcacatatagtttatcgacnnnnnnnnnnnnnnnnnnnnnnnnnnnnnnnnnnnnnnnnnnnnnnnnnnnnnnnnnnnnnnnnnnnnnnnnnnnnnnnnnnnnnnnnnnnnnnnnnnnnnnnnnnnnnnnnnnnnnnnnnnnnnnnnnnnnnnnnnnnnnnnn

SEQ ID NO: 437422 - DNA, 329 bp, Triticum aestivum
ggggacgaccacacccgccgcctcgccgagctcaaggcccgcggctgaacgacggctttttcacttcacttcacttcaggtacggctcatgcaatgttcactcgcttcgccgtcagttgtcaagggctgctcatatctgacagccccgtaaatattgttaacgcccatgtgggtgctctcttgcctgggatctctatgtggaactgatttaaacactgctgtgtgatatgacgtgttattccgaaacggagtgtgatattgatattatgagtcagtaataatacatgagcttgagaactaaatatctttgttaacatcaaacatgtaaa

SEQ ID NO: 437423 - DNA, 287 bp, Triticum aestivum
ggggacgacctcacccgccgcctcgcagagctcaaggcccgcggcctaactgaacggccttcgcttcacttcaggtaccgctcatgcaatgtgcactcgcctcgccgtacgtcagttgtcaagggctgctcatatctgacagccccgtaaatactgttaacgcccatgtgggcgctctctctgtccgggatctctatgtggatctgtgatatgacgtgttagtccgaatcggagtgtgacactgatatcatgagtcagtaataatacatgtgcttgagaactgccaa

SEQ ID NO: 437424 - DNA, 447 bp, Triticum aestivum
attcgcgggtcgacttgggtaggaagcttccttagacaggtcagtctgccgcgggacgagggaggccggctgcccgccggcgacatcactctagccaccggttggtcagccgtggcgccgaccatgcgtggcgggcacgaggtcctccatcgctgagggcgatcggcgagaggacgagtcagagacagaggacatcagaacatgctgagtaaggaagatatcggtgttgacattttatgccacgtcagctccaacgactgggccatccttgtcataatcacgatcgattttaaagcactcggtcatttgggggttttgaacagccgtccctaaagttggtagttatcagcaccagaataaacttagtagttttttgaaaccctaccccgaactgtagtaattttatgtcatttactcgagttcaccggaataatacgttgggtttcc

SEQ ID NO: 437425 - DNA, 457 bp, Triticum aestivum
attcgcgggtcgacgggtgattgaaatgtacattagggactgactcctgtctgcaaatgttcagtggtggtacatatggtaaatgtgaagttatgaaagacaccactgttggcataaaatcctatgcaggtattgctgcggagggtatcggaaacggagcgctcttgatggcaatgaattaccatgtcaatacatccaatagcgctttgtgggattacatgccaatggttttccacatctgaccttctccgaaatttttgcaccgtacttccgccatgttaggccgcgtttcatcttttgcttgttatgatagtatttcaaccctttttgtgggaaaagctgatattggttagatgttgggtatagaagagccatagagggaacctaacaacgacattttcggcagcacggtccattctttgcatattgccctgccgtttggtgcactgtgttatta

SEQ ID NO: 437426 - DNA, 433 bp, Triticum aestivum
cgggcccagctacggccgcaagaagaatgatgacgacgatgacgaggataggcagcggcgatacaagaagcgcgacgacgacgacgatgatgagaggaagccacggcacaagaagcacgacgatgatgacgacgacgatggcgagaggaagccgcggtacaagaaacgtgacgacgacgatgatgatgaggatgacaggaagccgcgttacaagaagcgtgacgacgacgacgacgatgatagaaagccacgttacaagaagcacgacgacgatgacgacgacgacgatgagaggaagcagcgtcgcgggaacaaccgccgccgccatgattacgatgactgatcaaggcatcctgacatgagtttagctgacgctaaataagtatagtcgcggcggctttgcttcgatgaatcaccagttcgtatttttttt

SEQ ID NO: 437427 - DNA, 440 bp, Triticum aestivum
gggtcgacgggcagggcaaaggcgactgtggccatcgtggtgttttcaagggagagcgaggcaactgcaatcacgcaactgaagaagtcgaaacccggggcgaagttggccaacatgaaagctgacaaacctaaatgccggtgataggttgttcgccgctgtcgcgccgtctttgaacttggtggagacgcagaagcagtggcggagctaggatcaagccacgacccgggcaagccccaggccaatcacttggtacagtgctaaacagtgtaaaatccactacagtaaacgaaggagccaagcctcaggacccaggccgccgcccgggcagcctggggcttgtctccgccactgcgcagaaggagaacggtggcgccgtgaagaccttgacgactgctgccatgaccacaaccatgatgattgtgttggtaataaagata

SEQ ID NO: 437428 - DNA, 415 bp, Triticum aestivum
attcccgggacgacggggtgccgttcgggttcccgaccgggtacggcgccatggccgcgcagatgaaggcattctttgactccacaggctccctctgggagaagcagaggctcgccgggaagcccgccggattcttcgtcagcaccggcacccagggcggcggccaggagaccactgcttggacggcaatcacccagctggtgcaccacgggatgctgtttgttcccatcggctacacctttggctcgggcatgtttaacatggacgacatcagagggggcagcccctatggagctggagttcttgctggtgacggtagcaggcagcccagcgaggcggaacttgccctcgccgagcaccagggcaagtacatggccgccttcgtcaagaagctcggccaggcctgattctgagc

SEQ ID NO: 437429 - DNA, 433 bp, Triticum aestivum
ttcccgggccgacgggggccaccaaaaggggacctggctaccattactactgcagttcccgcgtggttggaagatgtccaaggcggttaccaagaagatgcagaagctcaacgcctactgaccaaactcaccacttcgccggagggttttgatgggtttgtgctccaggacggcatcatccgccacaggggacgagtgtggctgggagcaaatgtggctttgcaaagacaggtccttgaagcgttgcacacaggcgctatcggtgggcactctggtttcaatgccacgtaccggcgtgtgcgacatctcttcacttggccgagcctgaaacatcacgtgaagttattcctcgaagcgtgccagacttgcaagcaagccaagccagaaaggattcgttacccgggattgatcgagcctcttcctgtaccttgtc

SEQ ID NO: 437430 - DNA, 510 bp, Triticum aestivum
  unsure (1)..(510): unsure at all n locations
gacggggaaacctaagtacaacatcaatatggctagcctagacgactaggttccccatccaggttcaagtcctaaacttgacatgggtgctctcgtagaaggtgtgtgcgcgtgttgtgagcgtctgcgtctgcattgtgtttctaaagaaaaaaaaaatctggctgccgatcgacgggtgaagaaatgccaagacatcatcttgttgcaaataccccaccccactctctgcgagattcgctaagttcgttgtgcattacatactggaatgcgttagttacctagttacgatcgcactagaacaacatttgtgtactgagtattcggacaaagtttgtttttaaagtgggcaacttttttgttatgatccnnnnnnnnnnnnnnnnnnnnnnnnnnnnnnnnnnnnnnnnnnnnnnnnnnnnnnnnnnnnnnnnnnnnnnnnnnnnnnnnnnnnnnnnnnnnnnnnnnnnnnnnnnnnnnnnnnnnnnnnnnnnnnnnnnnnnnnnnnnn

SEQ ID NO: 437431 - DNA, 699 bp, Triticum aestivum
ccgggtcgaccggaggtgcgccattattcatcgacgagctcatccaaagagcggaggcacaaaagaagaggaagagcattcacacgggttcatatacacaagatgaggacaagtttatttgccaagcttgatggagattagccaagatccgaggaccggcgcgcaacaaaagggcattgttttttggacgagagtccacagaacattccatgaaaggaagatgtttaagccctaccaaattacaagcaaccgtggcatcggctctattcaaaaaagatggttgttcatccaacaagagtgcaacaagtatcgcgccgcatttgagagcgttgaagcacggcccgtgagtggtctcggcgttggggacacggtatgctctcctcttcccagccctttccttgctacggccatgagacttcggccgtgtatatgtttgcatgttcacttgttgttgatcatctggtgtaggcatttcaatctttggtggcattcaaggcccggcacatgacaagccattcactcttacgcattgttggacgctcatcgacaattgccctaagttcaaggaccaataccgtgaactacaaaggaagagatgactgaagacagccaagttcgccggaggtggagatggcgaggcgttgaagaggccgaggggcaagaccaactccaaggttgatgacatacgtgatgcctcat

SEQ ID NO: 437432 - DNA, 345 bp, Triticum aestivum
actgaagaaggagggctggctgtcaaccccaacttctttgttgatttcgggaccgagcctgaaggtccctccttggcccatgagatgagatatcctggtggagactgcacctctgacatatggatctaggaggaagggtgtaggacacaggcagctggagatccatggtgttgagctcactgtgattaaaatggtctcttccccgcctgcggtgttgtatgtgatgtggtatcaattggaataagttcctgatagaacctctgacattggcttcatgggagctttgggccctaataagagttgcctctgattctgagaaacatcaaaactcttctaaaatataaa

SEQ ID NO: 437433 - DNA, 173 bp, Triticum aestivum
gggagtggcttggacctgattgcgttcctcttcagatctttggggtcctttctgcatatttcagggactgctttgtaattttcagtttgttgtgtgtcctgttgttctggcttgtactacggtattgtaatatcaaataaagtctggggtccttttggaccctgcccttgttc

SEQ ID NO: 437434 - DNA, 428 bp, Triticum aestivum
tccggggcaccccgactacacagtgctggccttcgccgccatgatgaggaagaaggtcacgatgcccgcccacttgatgtacgacgggcaggacgacaacctgtttgagcacttcagcgcggtggctcaacggctgggcgtctacaccgccatggactacgccgacatcctcgacttcctggtccagaggtggaacgtcgccaacctcactgggctgtccggggaagggaggcgggctcaggatttcctctgctcactgggaccaaggttcaggaagctggaggagcgagctcagggcagggcgaagcagttaccggttgttcctttcagctggatccatggccggcaagtgcaactttgagtggcattgctaaacaattataagacgatttgttcttcttattttcaaaatatgaagcaactgttga

SEQ ID NO: 437435 - DNA, 247 bp, Triticum aestivum
gggtcgacgggtgagttgacgttgcttggttaccttccggcgttgagagttttgtttcttaggctggcaacgtgaacatcaagcgttgctgaatatgtgcctgcggctgctgttgtatgtagtagccacacattataattatatgggatgttccattgtcaagatgttgctgtttgggaccttcaaagttaatcgtttgtcgcaatgattcacgcttacgttcccctaattgtgacatcatagatct

SEQ ID NO: 437436 - DNA, 315 bp, Triticum aestivum
cgggtgagttggcgttgcttggttaccttccggcgttgagagttttgtttcttaggctggcaacgtgaacatcaagcgttgctgaatatgtgcctgcggctgctgttgtatgtagtagccacacattataattatatgggatgttccattgtcttgttcaccaggttatgaggctttggccatggttttaactgcagtttcgattttcattgacatgtgacacctctacttgaaatactatttccatagctatacctatgggaagtatctaccatcgaatacctgacgttacccaacttaaacaccttaaagcga

SEQ ID NO: 437437 - DNA, 437 bp, Triticum aestivum
gggatgtcaaaatgggaatgcaggctgtgccgcggcccgctgccgcactaactgcggaggtgaatgcactaaagcagagcctcgaacggtccgagaatgagctcggccttgccaagaagtagctcgaggataaggaaggtaagtaataccttatgaaagtagtaccttatagaaaaggatttggttgcaaaaaatgacaagaataacgtgggtattgcaggggccacgaatgaggtggcgaccctgaaggaggcggtgtccaaggtcgaaagcagtgcggccttggagcgcaccgagcgagagaagcaggaggcgcgggtggccgaggtgcggcaagagctccaggctctcgtggaaaaacatgagagtttggagggtgactccaggggcccgagagtccgagcttgcctcggctcttgagagtggcaaagccgcta

SEQ ID NO: 437438 - DNA, 408 bp, Triticum aestivum
acgggtaacagaacaattggctttgaagaagcaataaccgttcgtactaatgaatacagcacgaattacaagacatggaaagataagacaacgaaaacattgttacaaagcagacatatagtttcaaatcaattaactattgaagctaatgtgcccaaaagaatctaggagtataactacctacttcaaaggcatatttatacagttcttctacattttatactatcccgtgcgaatgcatgggttgacgactagtgagagtaactcttcagctcatacattggtcacttccccttcatgcttatcgaaggatgaatggtatgatgattgttatgatcctgttgattcttttgaaatatcgctttttgatgatgcttgttatgcttgtggccaagatgccaatatgaa

SEQ ID NO: 437439 - DNA, 424 bp, Triticum aestivum
ggggcgaggcgcctggaaagatggcctcggtgtgaacctgggtggcagggcggtgttgggtacccacacgcggcgcttctgaggaccagcaccggacgaggaacccatgtcacgtccatgcttgcgtgttgcgtcatagtcagtctgaccagtttcagcactgatggctttgttaacaagtttcgaaaaagatgtgcactcatgcagacggaggtcgcggcgaagctcaggactaaggcccttacggaaccttgcttgcttcttggcgtcagtagaaacttcctcagtggcatatcgggcgaggttaccaaactccctgctgtaggcatccacacagagtcggccctgggtgagactgcaaaattcctcacgtttacggtccatgagaccctccggaatgtgatgttcacggaaagcctcgctg

SEQ ID NO: 437440 - DNA, 470 bp, Triticum aestivum
ttcgcgggtccacggggtctgttcgatcttctacagaatatagtcctcatcagagatcccgaggactccacaaagtactatccccgctttaacctggaagatacttcaagttttagggacttggatgaacatagcaaaaatgtccttagaagattataccatgactattatttcgttcgccaagaaaatctttggcgacaaaatgcactgaagactctacctgttctattgaactgttcggatatgttggcatgcggggaagatcttggccttatccctgcttgtgttcaccctgttatgctagaactcgggttgattggattgcgtatccagagaatgcctagtgaaccaggcttggaatttgatattccgtccaagtacagctatatgacggtttgtgctccctcatgtcatgattgctcgacattacgtgcttggtgggaaggagatgaagggacaagatgtcgttt

SEQ ID NO: 437441 - DNA, 401 bp, Triticum aestivum
cggtctagagattcccgggccgacggggagctaattccggtacatgggctccctcacggcgccaccgtgcgccgagaacgtctactggaacgtcctgggcaaggtgaggcagatgaccaaggagcagatcgacctcgtcaccgcgccgctgccggccgccgccaagcagaacgcccggccggtgcagccgctcaccggcagggtcctcaccttctacaacccgcccaacagcaccatccccttcgacatgtgatcttacccccattagatggggtccgcattaacctagaaattaaccgtggtactgtattcgtgtatcaccatcagcgtactgaccagctaatctcgtttttgccttgtcattatctcttcgctgctttactcagatgaaacattgtgac

SEQ ID NO: 437442 - DNA, 437 bp, Triticum aestivum
ttcgcggggccacggggagagcaaacaggagtgtggtctacagtcacatgtgagagcaccaaggaagaggggaggctttgcagcacgcatgatcttgccagttctatcggtggctcttctcgtccttgtcagcgttgggatctatggatgggcataatagctctctttatggtgggatttaatgtgtcacattttccccacatcggctgtgatcattgtacatactgtgtcttgctgcctgcgtttaagacggttgtaagacagcgaagtgtttgttccccttcgggcgggggactgtgaaatgaagaagtgaggtaacaaatgagaagcgggatgaagcaaggagcaactgttgctgtagatgcctgtgacttagtacatgctagtttttgttttcctgtcatcacagatgttggcaaccaggttgtagccatcca

SEQ ID NO: 437443 - DNA, 429 bp, Triticum aestivum
cggcggtgcggcaggcgcaggccgggtacgccgtgtacggggtggactacgagggccacggcaagtcggaggggctccagggctacatcccctccttcgacctcctcgtcagcgacaccgacgccttcttcaccgccgtcgtcgcctccaccgccaacacggacctcccccgcttcatcctcggcgagtccatgggcggcgccgtggcgctgctcctccaccggatgcgcccggcgtactggaccggcgccgtcctcgtcgcccccatgtgcaagatcgctgacgagatgcggccgcatccggtggtggtgagcgtcctcaagctgatgaccaacatcatccccacgtggaagatcgtgccgaccaccgacgtcatcgacgccgcctacaggatgcaagagaagcgcgacgagattatggaacaacccc

SEQ ID NO: 437444 - DNA, 377 bp, Triticum aestivum
aaagctccatagtcccactcagtcttcaccgtgccacccaactcgacatcgaggcctcattccgtattgacccgctcgacttcgccgctgcgaaggaggcggatatcggctacaactgcagcaccagcggtggcacgactggacggggcacgcttggtcccttcggcctccttgtgctcgctgatgccaggcgccacggtggtgatatggagcggaccggcgtctacttctacgtcgcgagaggcctcgacggcggcctgcgccacacacttctgtcatgacgagacacgctcatctcatgccaacgatattgtcaagagggtcgtaggcaatattgtccccgtgctcaatggcgaggagttttcgctgagggtgct

SEQ ID NO: 437445 - DNA, 928 bp, Triticum aestivum
  unsure (1)..(928): unsure at all n locations
gtaccggtcaaccattcacgggccgacgggctaccagagagttagttacccatgggccgcaacatggcgcttcccctgctcctggcgctggcggccctagtggcgtcgctgccgtcgggttccgtcgcgacggcggggacggctggtgcgttcgacagctggttgtcggcgaaccagaaagacttcgcgatcaaccaggcgttgtacgcgaagaaggcggtgggtgacaccggcagcaccatcgacgagtccctgtccaaggcggaggataacaagaccacctacgtggtggaccccaagggcggtggtgactacaagaccatcacggccgcgatcgacgccatcccggagggcaacaccggtcgcgtaatcctggacctgaaacccggcgagtaccgtgagaagatcttcctcaatctcagcaagccctacgtcactttcaagtccgatcccaagaacccggccatcatcgcctggagcgacaccgctgcgacgctagggaaagacgggaagcccgtgggcacggtggggagcaccacctgcgccatcgagtccgactacttcgtggcgtacggcgtcgtgttcaagaacgacgcgccactggccaagccgggggccaagggcgggcaggcggtggcgctgcgtacgttcggcaccaagcaggccttctacaactgcaccatcgacggcgggcaggacacgctgtacgaccacaaggggctgcactacttcaaggactgcgtgatcaaagggagcgtggacttcatcttcgggtttgggaggtccttgtacgagaactgccgcatcgtgtccatcgtgaaggagatcgccgttctcacggcgcagcagcggaccaagaccatcgagggcgctatcgagagcgggttctcattcaagaactgcagcatcatgagccaaggcngggggg

SEQ ID NO: 437446 - DNA, 424 bp, Triticum aestivum
ggtgatcgtggagaaaatcaaggacagcgagtgggagtttggctacaacgcgatgaccgacaagcacgagaacctggttgaggctggcgtcatcgaccccgcgaaggtgacgaggtgcgccctgcagaacgcggcgtcggtggccggaatggtcctgaccacccaggcgatcgtcgtggagaagccgagcaagaaggcccccgcgcccgccgggatgccccagggcatgatgtagaagcgcaatgatacgtagcaacctgggggcatgcaattttaggggcagtgggagtgatcgtttcgccaggggagagaaccgtggctacctcaaggaggaaatcattggtgtgtaatggatagtgatggcctgttctattgtctgtttggcacccttcgttgcgattgccatgttgaaaactaatttggg

SEQ ID NO: 437447 - DNA, 508 bp, Triticum aestivum
  unsure (1)..(508): unsure at all n locations
tacgcctccgtagattccgggtccacggggacaatcacagtttttcctctcgctcctcctgtgggcggcgccgccgctgcgcacagaacacatcctcgccagcgtagcttctccggcgtccggccaacgcgctcactagcctcccgccttcctccacatctcctcgcctccaccccatccagttcgtgccattcgctgctccaagacaagggcatggcgctcggcggctgcggcaacgaagctgatggtgcacgagccaaccatgaaggcagtagcacggggcagcgacagcagcatggagggcgtcctcttgtttgggaaggtaatggaactgcaaataggagtggcagcggcgaccaggatgcaaatggaagtggttcccaaagaccttggaaagaaatggcacgtgagcaaaggatatcaagaagcttttggatgttgggaagcttggagctgatgcttcanataagctgatggttgtcttttggctgtactggactatttaaac

SEQ ID NO: 437448 - DNA, 605 bp, Triticum aestivum
  unsure (1)..(605): unsure at all n locations
caaaaaaggtggcaagttccccaaaaaaggccgaaaaaaaggcttaaccaaaaacccgaaccattgaataaccttgtcttgcccggtaaaacaaatggggtaaacgtagatttgtgcttccaaaaaaaacaaattcggaaatctcccttcaattggcttaaccgctgtagtgctctgtagtaacagtgattgctgtgtcgatgtacatctgtgctgcgaagacgataatgtcagaaatctctctgatttgagcaggcgtcctcttgtttgggaacgtaatgggactgcaaatatgactggcagcggcgaccaggatgcaaatggaagtggttcccaaagaccttggaaaggacttaaagacaataactttgcaatgctaaatggcacgtgagcaaaggatatcaagaagcttttggatgttgggaagcttggagctgatgcttcaaataagctgatggttgtcttttggagatgtttctatgtttaatgctttaaagtcttttggctgtactggactatttaaactttgaactatgctgtgatggttgaactgatgctggacagttaacggttatgtcagangcaactttataactaatgtgtgt

SEQ ID NO: 437449 - DNA, 406 bp, Triticum aestivum
attcacgggccgacgggctggattaccacgggattgttggccttcagaggcaaatcatgacagaccaagatgagggccttgagaagctggaacagaccgtgctgagcacaacacacattgcgctagcagtcactgaggagcttgacctgcacgcaagactgactgatgacctacacgaccatgtggatggtacgaactcgcgcctccagcgtgtgcaacagaggcttgcggttctgaacaagcgcgccaagggcggctgctcctgcatgtccctgctgctgtccaccgtcggtatagtgatgcttgtggttagtgtctggctcctcatcaagtatctgtaacctctgcccaactcaaatcagtttcaagtgtgcagctctttcaaagatagtatggttacttccgc

SEQ ID NO: 437450 - DNA, 378 bp, Triticum aestivum
gggcaacagagttccaagcaacagtcggtattgcagatggcttggcaccaacactgttcaattcagctccccaggttgcgttgttctcttcccgggggcctgatgtaaaagattttagcttccaagatgctgatgttctcaaacctgatatactcgctcctggcaatctcatatggtccgcatgggcacctaatggaacagatgtagcaaactacgctggggaaggatttgcaatgatgtctggaactagcatggctgcaccacatattgctggcattgcagcactaataaaacagaagtatcccaagtggagcccgtcagcaataaagtccgccttgatgactactgccaatacgatcgacaaagggagccatcctc

SEQ ID NO: 437451 - DNA, 368 bp, Triticum aestivum
cgggtcgaccgggggagagttgtacagccaaatcccaactgcaggccttcgtacactattaatcttcaaccagaggttatctcgtacgatcaatggaaagatcctaaggcagatacgacacgtggactttcgacatggatgaaaggtgcatttcatggaaacaaaagcgacatccaagattcattactccaaaatctgtattctattctcagcacgtcgcctatgtgcgacaggctgcaactcacaggggacaaaaatgtccttggtgaattcatggaatttaaaagcaagaatgaagacattccaatcctgaaaaaagttaagaaattaaaagttaacccaattgtcaaccaaaaatcaactccttt

SEQ ID NO: 437452 - DNA, 450 bp, Triticum aestivum
gggagcacaaacagaactacaccggacagggtgacgacttgatctaccactccaaggggcacgctctgaacccagggcaaagggactggacaaggtaccagccttgggaaccaaagaaagaagaggccacctgatctgtatgaatggtacctgataatcctcttctatgtttcgcatttggtttggtgtcgcggatctaaaaccgccagtcaccttggtttcatggactggacctgaataatgtactctatctgatactgaatacctgccactgaacaattttaatctctgtggatgtggcaattgagaaactggcgattcggtcgtcggtgtttgcattgaagagtttcttttttctactgatgtcaatggtgcgtggatgttgagatgctgaaaggagataatattgtttggtaaattccgtggtgttgcaacatgcccgtgttcttt

SEQ ID NO: 437453 - DNA, 446 bp, Triticum aestivum
ggagcaaaggcgccgacgacaagaagctggcggggatggcggcactcaccaccgccaccctccttcttcaagcgtccggggacgcgagcccgggcgttcagaagcagcgctacccagacctgaccaaggccgacgaggaatgctttgaaacctgctacaaggagctgaccaatggcggccaaaaactcgacaatttgtgcaccagcaaagagggctcggacgacatcggcatggcccagctccccgaaatccgcagcttcatcaaggagaacaacggggcgcatgcccagtggaattgcgataggtgtcgccctgcgaatgacaagaagacacccgacgatgtctccaagaagaacgatgccgagaaggccatggctgtcctcgaggtgctcgtcaacaaagtgaccaaataaagaaaaacaaaccctcattgcatactactagct

SEQ ID NO: 437454 - DNA, 393 bp, Triticum aestivum
tcgacggggaaatcgtcagcttaggcttggacactgtaaaagggaacatcatgctgcgcaaaatctattttaggggaagcccgatgtgttgacatatatcatagagctcactatctttgtgtgttttccccatcattcagttgcctcgtggcgactgacgacgtagctgcataaatatctaaaagccgacgtagcagtgggtctctctcactgatcaaatttgaggcgttgagcatggaactgcatctgtgttatgttcttcctcgggttatttatcgtgtttttcgtccggtgaacatgtatgctttgcagagaatgttataacttccgttctgtacgtgaatattgtcaacgtgatacttcataaattcgatcagttactaccaagaaaaa

SEQ ID NO: 437455 - DNA, 563 bp, Triticum aestivum
  unsure (1)..(563): unsure at all n locations
tacggctgagagaagatggcctgcatcaggggtcatctttgaccccttatctttttgcattgattacggttgaggtcacataggttatacaagaatatatcacatggtgtatgctctttgcggatgatttggtgctacttgacgatagtcggacggggtaaataggaagttagagttatggagacaaaccttggagtcgaaagggtttaggcttagtagaactaaaaccgagtacatgatgtgcggtttcagtactactacgtgtgaggaggaggttagccttgatgcccaggtggtgcctcagaaggaggacacctttcggtatttggggtcaatgctgcacgaggatgggggtattgatgaagatgtgaaccatcgaatcaaagccggatggatgaagtggcgccaagcttctggcattctctatgacaagagagtgccacaaaagcttaaaggcaagttctacaggacgacggttcgacctgcaatgttgtatggcgttgagtgttggccgactaaaaggcgacaggttcaacagttangtgtggcggagatgcgtatgt

SEQ ID NO: 437456 - DNA, 419 bp, Triticum aestivum
cgcgtatgacgacgggacagacaagggggcgtcgagcgaggagagcaggaaaggctacaatctcgtggatgcagtcacgaggtgcacggtgcaggtgtatccgagagggtggacggcgatcttcatcgcgctggacaacgtggggatgtggaacgtgaggtcggaggattgggtgcgcaggtacctgggccagcagttctacctccgggtgtacacgccggcgcactccgtccgcgacgagctcaccgtgccgaccaacgcgatcctctgcggccgcgctgccaacaagagccgcctgccattctctcagtagtgagcactgagcagccgctggcagggaatgatccaattgtatcggagtattagtagtggtatatggtgtgcaagtcgaactgtcgaagacttagtttggctggtta

SEQ ID NO: 437457 - DNA, 326 bp, Triticum aestivum
gggccgacgggtccataaagccttcggcaacataaaagtgcgtacgtggtgggcagtctcacgaatgtctcgatgatgtgaagaacatcctgttgtttggttcagatcgaagctgtagcacctggatgatgcatgttcctttatctgtaaaatgtgatgttgtgaagttggtggggtttgagaattcttcagttgagtttccttatgcgattcaataagaacatcattgtttagtgcatccaagacctcgctgtgatccttctctgtttgtgctttttttctccttaaaaaaaaaaaaaaataaaagaaaaaaaagcggccgctct

SEQ ID NO: 437458 - DNA, 414 bp, Triticum aestivum
  unsure (1)..(414): unsure at all n locations
nnnnnnnnnnnnnnnnnnnnnnnnnnnnnnnnnnnnnnnnnnnnnnnnnnnnnnnnnnnnnnnnnnnnnnnnnnnnnnnnnnnnnnnnnnnnnnnnnnnnnnnnnnnnnnnnnnnnnnnnnnnnnncgggccccccaaaaggttcaaacctaacttacccttgaatgcaacttcaaacccctccaaaagtgccaccaaatttcaattcacgggccttcgtttaaaaacttcttaacgggaaaaaccctggcttaacccaattaaacccccttgcagaaaacccccctttcccaaccgggcttaaaaccaaaaaggcccccaccattcccccttccaaaaatttccccaccctaaagggcaaatggaaccccccctttaccggcccattaaccccggcggttttggtggttaccc

SEQ ID NO: 437459 - DNA, 417 bp, Triticum aestivum
ccgggtcgacggggtcggctacatgagcggcggctgcaagagtgatgatggaagtttgagttgtggatattcaagttttagaggaaaaagggcaaccatggaagacttctttgacataaaatcatctaaaattgatgataaacaaataaatctctttggaatatttgatggtcatgggggttcacgtgctgctgagtatttgaaggagcacttgtttgagaacctcatgaaacacccacaattcatgtcagatacaaaattagcaataagtgaaacatataaaaaaactgattcagatttcttggattctgaaatcaacactcacagagatgatgggtcaactgcatcgacagcagttctgcttggaaatcatctttacgtggctaacgtaggtgactctcgggctgtaatatcaaa

SEQ ID NO: 437460 - DNA, 470 bp, Triticum aestivum
ggggcgctctgctacggctgccagtcgtgcaaggccggcgtggtggccaccctcaagcgcaactggaagcgctccgccatcatcaacatcgtcttcctcgtcttcatcgtcatcgtctactccgtcggctgctgcgccttcaggaacaaccgccgcgaccaccgcaacggcggcgggtacaagcagcagggcgcgtacgcctgatcgcgcgcttggctcggttatttattgcttggattggatggatgcgatcgtcgcgtcgtgtcatgcatcttcgtcgtcgtgcttctcttaggatggcctgatctagctttgtacaggcgagattattctgtgctctgatcacctactagttaggttctatactccgtggtcatgaggagggttgtgtatatatcttttctgttctttgatatgtatggcagaccattatatatgtaacggattattctggagttatttatttcata

SEQ ID NO: 437461 - DNA, 480 bp, Triticum aestivum
cggtcaggccagtccgggtcgaccgggtggccttcaaggagatgccgaaggaagggtgctcgaccgtgagaagggggtccgtggcgtggatcgggtcagggccggagttcctgatcagcctggcggaccacgcggagtggagagacgcctacacggtgttcgggtccgtggtgccggaggacatggccatcgccgaggagatggcgatgctccccgccagcacagacgtctggagcggtgtgaccgtcaggctgctgaaggacccggtgtatatcaaggtgaagaggagaagcaacgcgaccgcctactgagctcgccggcgattttgttcttcttcttcttcttctttcacatgatgtagcagtagtgccaaaagataagaacacaaaattacatgtccaaacgaagaaagaaagaaaatagaggaggtttggaagagaactgttacacctgtggtttctgtgcccgtcagcaagccat

SEQ ID NO: 437462 - DNA, 433 bp, Triticum aestivum
gtcgacggggacgaatctgaaaagccaggcaattcaaggcctcccaaaacaatgttgggcgccatgcatgcaatgtggaacaaggaaggcatcccagggttcttcaaagggttacatgctcagatactaaagacagttctgagctccgcattactgctgatgataaaagagaagatttcaaagttcacttggatctcgctgcttgccctgcggcgatatctctttgtttctcggaagagaatcaagagtgcatagttgtatcatgcatatgtcagacctgagaaaaccagtctaatcgtccactggtatttcaagatcgtattataccaaataacagaagtacagaagcagaacagcacgatcatcttgagagcgccatggaatgttctgaataaatttgtttgtttttccatgtagtagctctgaacatctg

SEQ ID NO: 437463 - DNA, 285 bp, Triticum aestivum
gggagaaggagttcaaggtgaaggtggcgtcggaaaaggacaaactcgggaggggctacgtcgttgggaagctcctctggtccgatgggacccactatgtgaggagccccatcgtggtaaatgccctggattgagattttctatttttgtggtgtgtagcccaagggaaggaagtgtcctcagtttaggaattttctttttcagtttattactgagaatgagatgagtttaggttttagctctcctggttgctaataaacgctatttggctctaaaaaaaaacaa

SEQ ID NO: 437464 - DNA, 250 bp, Triticum aestivum
  unsure (1)..(250): unsure at all n locations
ggtacctatctggaattgncgggccgacgggctaagaaacagtgaaagatgacaacaagcaatcttggtaaacctccaagtatgtagtccttgtttgttaacgttgtccctatttatgacccgtcaaccaaagatttgtgtagtgtattaatgtgtgtattatatcaccacaacagtgtgctcgctattagcattaatgagttccgtatatcttgagacgcataaaaaaagataaaaaaaccaaagtaaa

SEQ ID NO: 437465 - DNA, 467 bp, Triticum aestivum
gggctattttcaaaattagaaaggaagggcaagattgaagatgcaaacaaaaatatagttggacacttccattctcagctcactcaagacatggatatcttgcatagaaacatctcaacttcggtctctcaacaggagagccaactgaaagtacttgaagaggagatgcaatcttttatcacctcgaagggcaaggttgctggaggacttcaaaatcaagtaagagaaatgaaagagagcttcagttcaaggattgcagaattgcatggctttgctagtgagctcaacctcaaatcccaactaagctctgagaagctgaatgcccaagttagcgcacacacatctgatctggaggattgtctgaagggcctcttagctgatgctgaccaattactcattgggctacaaaatgggctctctcagcaagaagagagcttaactacattagttgagcagcaacatgaagg

SEQ ID NO: 437466 - DNA, 416 bp, Triticum aestivum
aattcccgggccgacggggatgcggtggaagacgatgatggcgaaccacgaggacagcccgcacatccgagagaaggtgctctacgccgtcaagcgctactggaccgccgacagcgacaagagctcccaagagaagaaggcaacttcttctgaggtgtgaaatataatggtgagtgagatgagctgagctgatgcactgcaactcaggagatcagcgtgtgtttatttcaacttcttgtgagtttctctcgagtgtagcagtgagatcagcacgtgtattcctttttgattacgtcgtgtaggatgaacacttcttttccattttttcgagatgagatggtaggaaatattcgacacaaagatctacgtaccattttctgcccgtcacagattcaagaatgttgttatggcactcg

SEQ ID NO: 437467 - DNA, 379 bp, Triticum aestivum
gggcctccggaagtaccacaagaactaccagcgcgagacgtggggccgcgtgctgaacgtgctccgcgacgacggcgggatcacggtgaaggggcacgtgcagaagccggtgctcaaggagcggttcaagcagttcaacgcggccatgcacgagatccagcggacgcagggcgcgtgggtggtgagcgacgagcagctgcagtcggagctccgggtatccatcgccgccgtcgtggtgccggcgtaccggtccttcctcggccgcttcgcgcagcacttcaccgcggggaggcagacggagaagtacatcaagttgagcgcggacgacctcgagggcatcatcgaggagctcttcgagggcagcgccgggtccaagtca

SEQ ID NO: 437468 - DNA, 578 bp, Triticum aestivum
  unsure (1)..(578): unsure at all n locations
agctgatcacgggatgatgtgttatggaacgagcaaagagacttaccgtaancgagattgaacaaggtatcgggataccgacgatcgaatctcgggcaagtgtcgtaccgatagacaaagggaattgtatacggggttgattgagtcctcgacatcgtggttcatccgatgagatcatcgtggagcatgtgggagccaacatgggtatccagatcccgctgttggttattgaccggagagtcgtctcggtcatgtctgcgtgtctcccgaacccgtagggtctacacacttaaggttcggtgacgctagggttgtagagatattagtatgcggtaacccgaaagttgttcggagtcccggatgagatcccggacgtcacgaggagttccggaatggtccggaggtaaagaattatatataggaagtccggtttcggccaccgggaaagtttcgggggtcaccggtattgtaccgggaccaccggaagggttccggggctccaccgggtggggccacctatcccggagggccccatgggctgaagtgggaaggggaacagcccctggtgggctggtgcg

SEQ ID NO: 437469 - DNA, 400 bp, Triticum aestivum
cgggtcgacgggatatccgaaagagaaggaagtgcagaatagatgtgtgaatctgaacataaaagaagagttagtatgtagttcgagcacatcaaatacaacaggtttctcaagctctacatttagtgctttacgaaagattgacaaggacaagatggccatggcgttggggtccctgcagacaagtaatccaactatttcaagtttccagtgcacacagtccttgagtcattcatctgaattatcatgcccttctcgaatatcaacaggatctaccctaccttccaaaactactagggaactgtttggcattgagactgaatactgtgtggccaaggcttcatgtgcccaggttagtcaactggggaaaccttcttcaagtcaatccaatgaagtctcc

SEQ ID NO: 437470 - DNA, 391 bp, Triticum aestivum
cgacggcaaaatacagtacaggatacagttccagaggccaaaccccgtcggcaccaacaatgcgcctccatcaccaaccaccgcggcagcagcggcgccgcggccaacaacgccgtcgtgcctgtccctgccgtcgcggagcatcagaacgctgaaccggcacgagatcgagatcgaggggaagaagatcaacgacaccgacaagaggaacaacggaggagtcggagccgcgcaggtaccgacaagcaacgggcagacaacgccgccgacggccacgttcgacctgcgtgtaaaaaaagccagaagacgctgtgagggacctgaacgagcagccgcaccgggagttcacgacgggcgagaccgacagcgacgacatgggcgatgactacac

SEQ ID NO: 437471 - DNA, 465 bp, Triticum aestivum
aaatcttaaaactaatccgtttttgaaaacaacacacacacttgcctcggtacaccacttcgtcatcaagtggttacccatctcattatctccctcgggcataagtggcacccgacggggttttcgaaaagtcctttgaaaatactttgtctccatcaccatgcatattcccgtccctttttgcatagcatctactttagcatcctatctactcccaccggcataaccctcataagaaggtagggtcatgcacaatgcaagtatcaacaaggaagtaacggaggcaacccaccaaagtggttaccatctcatcatgattccgatgcaacaataataaagtgctatatgacatgcataaaaagggtttcatagacatggtcaaatggccgcttgcctgttgtaacaaagtcttcgaggtcttcaaatatctctggcccaacttcatgcatcccgtcgacccgcgaa

SEQ ID NO: 437472 - DNA, 474 bp, Triticum aestivum
ggggcgtcggggctatatcaacacacaacgaaggcaagaactgtagtaagtacgtacgtaggtgtagcacctcatcttgtactgcacaccatggcgataatgaagaagaacacgagctccctgagcttcgtcgtggccgccctcatcgtggtcatggctgccacccttctcctctcctcgtgcgacgcccgcaaagagaaggataagcccaccgcttcccccgtgtcggggaagtgcttctcgaggtttttcccaaactgcaccgagcagcgatgcaagaagttctgcgtccagccactccccggagccgtctgcatcgacaaaacccactgttgctgccctattgcttagttataagcgtcgttgaagcgatcgggctaagaaatagtactggttaaagatggcaacaagcaatatttgtacacttcgaaatatatactacccctgtttctaaatataaggcttttttgcagt

SEQ ID NO: 437473 - DNA, 585 bp, Triticum aestivum
ggggcgtcttgtattcatcaagcatagtgtgagccatctcaacaggagttctgttcttgcgctccacgacgccattctgctgaggagtacaaggaccagataactcatgagtaatatcaagttcattaagatagtcatcaagaccagaattcttgaactcggtcccattgtcacttctgatgtgcttgatcttcacaccaaagttggttgaagccctcgaggaaaatcgtttgaagacttcctgcacctcatgtttgtaagtgacaatgtgcacccatgtgtatcgagagagaatcatcaacaatgacaaagccatatagagacgcatcatttgtaactgtggaataatgattaggtccgaagaggtccatgtgaagcaattcgaatggtcgagtggtggtcatgatagtcttcgctggatgcttggccttggtcatttttccagcttcacaggctccgcataagtgatccttgaggaatttgacattctcaatgccaatgacatgcttcttcttcgcaagcgtgtgcaaattcctcatgcctgcgagaccaagtcgtcgatgccatagccagccttctgaagct

SEQ ID NO: 437474 - DNA, 472 bp, Triticum aestivum
  unsure (1)..(472): unsure at all n locations
ggtccgaanattccgggtccacggggcgaggaggcagcagatcgccagcgtggcctacaacggcagccttggacaagccaacaatcccttcgaaacgaacgaccctttcgccatgtccaacagctttgcgcccccttccaacatccggctggcaatggtgacccagcagcagcaatacttccaggctcaacaacatcagcagcaatactactaccagcctcagctccaatactaccagccccagctgcagcagcagcatcagcagcagtatttccaggctcagcagcatcagcaccagtatttccagcagcagccccagtattgtgtgcatccggccggaacttacaatccgtttggtgaccctttcactgaccttgtaactctggctgctccttcaaaacaaggcgatttaagtttgctctgaattgcccggccctgtttctgatctcagtcaatatagatgggtactccc

SEQ ID NO: 437475 - DNA, 769 bp, Triticum aestivum
acagagtacttgctctaaatgatgtgctgctgcaagagccgcctatatttattaaccatgctctaaaaaggtggaccggctttggctatagtagtactgtactaggttagtaggtgaccttgcgcttggctcttctcctcttccggaagtcgaacaataatgatggtactacagtagtacttctggcaatctgacaccaaatgaactgctgcacgtccaccgcttgtaagcaaaagtttctcctcgtgctgcgagccaccgcgcacgcgttggcgagggagaaggcgtagtaagcaagcttctcgtcgttctgcgagttgacgtgacacatcaaagttacgtatttattagtactctcttcaaaaagggccgaccatgtccatggctaccatcccgtgctctgtcattgagtacatgcactattcacgtgccatcgtggagaaaaaatattgcgtagtactactaggtgccatcgaagtgcacgactcacttacgcactgcatatccccattttcttggcatgacacgccaccttgatgctagatgtcccgcgtgtcatggtggcatatagtatgattttgtaaaatcgaggcatatagatgtcccgcgtgtcggcaacaggatgaacaaagctcatgtcttaaacgaaagagtggaagaacatagattcccgacggccgagaaagagcaagaaacctcggggtggagcctctgcactcataatattttatattattcagcgatataaaatcaaccaaatctctccacg

SEQ ID NO: 437476 - DNA, 432 bp, Triticum aestivum
tggaaaatcaaagcagaagtcaaaaaggatggtagagagtgacagtgaaactggaaatgcgagtgatggcagctctgaggatgccagaagaaagcggcaacgccatggaaggaaatctaaggccacatctcaaatttctgctgaagatcacacagcagtagctgctctgaaggatgccacttcaactcaggaaaagattggaacaccaaggagtctggcacaagaagacaaatctccactggagaatggcgagatgcgcacaaatggtgttaccgactccaaatctgaaaggaaggccggtatcgtgcctgttctaactggcaaccgaagcaaatctaggagccagagcacgagtgctaatcactccatgagcaagagcatgagtgtaagtcccagaagcccaatcaaaaggtcaaacgttaaccttgaaaa

SEQ ID NO: 437477 - DNA, 445 bp, Triticum aestivum
gggtccaggcgaaagcagcacttgaggttattcttcgcaggctcctatctttcctcaagccagataccttccagggtgctgtcaaggcaatgaacgaaagaattctctcggtccttgatgcgtctggctctggccgcgttgatcttgggatgttctttgctagcattgctccaatctgttctgggcctgtggataggcgcaagcgtgtcgtcttcgatgcactcctttggcgtcctgcaagcgaaggtggcaggggccagatcaggaggagtgacgcgctaagttacattaaacttctccgtgccgtttacataccaacccatggggctagcgacatgcttgaaatgcatggggagtctgaccctaccatggtatcgtacacacaggttccttgagatgttcaatgatcctgattggggttttggaattctaaccacactggtga

SEQ ID NO: 437478 - DNA, 413 bp, Triticum aestivum
gggttccttgattgaaaagtatgatattactctttacgaatctgaaaattttgacatacttgaatattgctatgaaaactatgctcataatgtctatgtcaaagaatttattgaaagaatgaccgttgcttctaaagaaaataatgatacgcatgaatctttagataattgtgatcccgatgatttgattgaaatatcccttgatgaacatgatgctttctattcttgtggccatgatgccaatatttttgaagacgaatttgctataattccttatgttaaacatgagatcattgctattgcacccatacttgatagttccttcgacgaaaagcatgactgcaatgattttactataaattcccttgatgtcaattgtgcctataatatgcaaaaccttaaccttggggatg

SEQ ID NO: 437479 - DNA, 425 bp, Triticum aestivum
gggaaggtgaaggctgtgctgatcgcgtcgctctactcgggctactacgacaagatccggggcatgtactacgagagcccggccaagacgggggagatcgtggcggtgtaccagccgagccacgaggagaagcaggagtacgcgtccaacgagcacaaccagaaggcgctggccgagatctacctcctcagctactgcgacaagatcgccatgagcgcctggtccaccttcggctacgtcgcctacggcttcgccggcgtcaagccctggatcctgctccggccggactggaacaaggaagtgtccgacgtcgcctgcgtccggtccacgtccgtcgagccgtgcctgcactcgccgccgatactcgggtgccgggccaagaaggaggtggacgtggcccgcgtcaagccctacgtccgacactg

SEQ ID NO: 437480 - DNA, 549 bp, Triticum aestivum
aggtggcattagggttttgattgatttgtgtcttaaggtgttattctagtatgaactctatgatagatcgagtggaaagaatagctctatgttattttactacgaactcttgaatagatagatcaaaaagagcaactttgaggtggtttcgtaccctaccatgatctcttcatttgttctccgctattagtggctttggagtgactctttgttgcatgttgagggattgttatatgatctatctatgttattattgttgacagaacttgcactagtgaaagtatgaaccctacgccttgtttcctaccattgcaataccgtttacgctcacttttatctttagttaccttgctggttttatattttcagtttacaaatacctttatctaccttccatattgcacttgtatcactatctcttcgccgaactattgcacctatacaaattactattgtattgggtgtgttggggacacaatagactctttgttatttggttgcatggttgtttgacagagaccatcttcatcctacacctcccacggattg

SEQ ID NO: 437481 - DNA, 383 bp, Triticum aestivum
atctactcctcatccagctccatccagtcggtgcagccacgtcaggcttaccgtgactccggttaatagaccagataagacgggactccggttagtagaccagataagacgggcagcagaagctcagaccatatatatgatcagggtggtagaaaacggtggtagggttgcagatcagcaacgcaggctgcaacccgcaagctgcagtggcagcgtccgaaagagatgcgcggaatgtacataagtagtgcgggcgcgtggaacttttgtctgaagagatgattttttcgtatgtaattgcaggatttgactctcttttttcgtttatctctgcttagccagcagttgatccgtgatctataacggtggcagtatatttatga

SEQ ID NO: 437482 - DNA, 489 bp, Triticum aestivum
  unsure (1)..(489): unsure at all n locations
ggngnnnaactgttaccctgccggtttcggtcccaaattcccgggtcgacgggaacatctcctcccactgaaagcgcatcgccggaaatcctgaaataaatccaggaataatgcgagcaccaggatttgaaccctggtgggttggggataccactgtccacctaaccaactcaaccacaggttgattcgcaatgactacatgtattaacgaattactacatgctcattataattgctcttttacgatgctaagatggttagttatgatcaattagtggtttgagggctaggcgtcgaggtaacttgttactattggctttttttttgaaggaatgtgggcctgtcgaagcggtgggactctggtgttacgttagaattttcacagatgagcgcaatgcacaaaaaaaggaaaccaaagacttcccaaatctgggcacgattcccccccatctccttcctctagaccattctgtctccccgcaactangg

SEQ ID NO: 437483 - DNA, 481 bp, Triticum aestivum
  unsure (1)..(481): unsure at all n locations
ttacgcctgccgttccggtgccnaaattcccgggaaaaacggggtcgccaaatgaaaaagggatttactttatgttgtcaaataataaattccttggaaagtgttgggatggaaggcacccgtggatacgattagccatggaaagtgaaagtatatggtggaaaaaggaataaactttattttctgcttgggaacctcctatgatatatctagcatggaaggtgttgggaactctaagtcgttttcgttggtgggaaggacacacctcccaaaatgtttttatctctaagttttttgctttgagctctggaacctctacaaatccgtacttccctctacgaagggccctttcctattactttgtgaaatttttatttttaaatttgaagtctccatcttctcttataaaagcaccaactttggagggcactatgatcgtacttgagcaatggtgtgtangttaantacgtgcngtgtgtcg

SEQ ID NO: 437484 - DNA, 519 bp, Triticum aestivum
  unsure (1)..(519): unsure at all n locations
ttnnncggacctgtttacgccnccccgtaccggtccaaaaattcccgggtcnacgggatcaaagcgtgaagatagggatgtttcatcaagcagggtagatgacatggatagggacaaaggtaatactatgaaggaagatagtgaccctaatagtgcatccaaacggcgaaaaattaggagagatcagtctgctttagaagctggggaatatgcaccttctgctccacagcctccgagccttggagcttggtaactcgcaatttgaaattccacacgagagacgagaaagaaagggtgttatttcacagcatcgcgccgtcacatgctgatgacctccctaatggttccatgcccaagggttcaataacgcaagaccaagtcctttgagagactgcccaaacccatgatagagcaaacgggaagtcaggaaaaaggaggcccaaagaacctgacagcaatgaagaaagcctccggaaataggttccttgcncggacntttngctnacctgccacattgng

SEQ ID NO: 437485 - DNA, 543 bp, Triticum aestivum
  unsure (1)..(543): unsure at all n locations
gnnnnnnntgggaacggttatttttccggcgcccggtaccgatcaagaattcccgggccgacgggaccttgaaagcagctttttcaagtgtcagtagcgggacgttctgtcaatcggggaaggtttttggtgacaagacctggagatatcagaagtgagaatgctgacatgagtaacgagaaatcctgtgaaaaacacgatcgcctgccagtggaaggctttctgcgttcagtcaatctacgcagagtgaatcggtccctaaggaacccccgaaagggctgccgtccgatgggtacacgaaagtgacgaagttgctttgactactgaaccatgcctggatcgtcggagcgaattggatgatcgggccgagggctgccccctcttcccctcgctctcctttccttaatattcaccgtcgagtcatcaaagccgtcaactaattcagaggggctcggctggcccggtcgccctacgctactggcgcctccaaaggcgaaactctcgtctttggcgaacaacaaaacngagggctaaaanctgttt

SEQ ID NO: 437486 - DNA, 510 bp, Triticum aestivum
  unsure (1)..(510): unsure at all n locations
gnnnnngnaactgttacgcctgctgtaccgccccggcacggtccaaaaactcccgggtcgacgggttctgaaaactgggatgcgcaaggaagctgacgagcgggaggccctcacgggccgcaccgctggccgaccctgatcttctgtgaagggttcgagttggagcacgcctgtcgggacccgaaagatggtgaactatgcctgagcggggcgaagccagaggaaactctggtggaggctcgaagcgatactgacgtgcaaatcgttcgtctgacttgggtataggggcgaaagactaatcgaaccatctagtagctggttccctccgaagtttccctcaggatagctggagcccattacgagttctatcaggtaaagccaatgattagaggcattggggacgcaacgtcctcgacctattctcaaactttaaataggtaggatggcccggctgcttcggtgaaccgtgccatggaatcgggtgctccaaagtgggccaattttggtaag

SEQ ID NO: 437487 - DNA, 300 bp, Triticum aestivum
  unsure (1)..(300): unsure at all n locations
cacgcntctaaaattntcacnaacaaatacatttacattatttacatttagtaatgatgataatattagtattaanaaattgtatatttagtaaaactatataggtttaataaaggaattcggcaacatttttttcacctgtttatgaaaaacatgtctttttgtattacatataaagtctcgcctgcccactgattaatttgaatggccgcggtattttgaccgtgctaaggtagcataatcattagtttttttactgaaagctggaatgaagggttggngtgaaaaaaaaaantgtcc

SEQ ID NO: 437488 - DNA, 475 bp, Triticum aestivum
  unsure (1)..(475): unsure at all n locations
ttnaacntncagtngccgtcaagaattcacgggccgacggggaaaaaaaaaggaaacaagtaaaaaagcgtggtccccggggatacgtacttcgtccggcgcggtatcattgctgagcgatcgctcgctatctggaaatggagtgttagtttcagagagagattgtgtgggtgtgaagtgtactgaagatcgaggttcttcctctgactaactttgtcacagaggctaacccaacagtaaatgaccaacgaaccttcgagtgagtaggataaggaggagtagtcggaggatcctagaacggaattagagaaaacagagcagcagctcagtaataacacctaggcttttgaatcaactctgcgatttggaagacggaggatatgacagtacacgaagttatcgaaactcggaaccacatgttcaatccttttttaaccggtttnccaaaagatttttaaccaattaaccncaaccc

SEQ ID NO: 437489 - DNA, 524 bp, Triticum aestivum
acagagctcagctatcccaaactcggtcatccgttctaatgttagagttcgttcgtatgaaactatgaaaaagagtggtacttgttctcccgcagctatacaacatccattggtgaaaggagctttagtcgtcacgggcaagctccgtaaggaaataatggaccttaagcagcaagtcaataactcgaggaagagaattgtatcctgaggggcatcatcgccacgaatatcacatcaccacctccgaagaaagagacataaacacatgggtatgggcactccccttggcaactgccaagcttgggggaggtgccccggtatcgtatcaccatcacactcctatctttactgtttttcttagttcgatccttttggtaaaatcttgatctagtagaataaagctttagtatgatctagttttgagctttgctttatgatccttctatgtaacccgtggaccgagctatatataatagacattattgttgagtcaagggctttgctatcttactatgatcttgagg

SEQ ID NO: 437490 - DNA, 505 bp, Triticum aestivum
  unsure (1)..(505): unsure at all n locations
gaattttcctgccnggtctaccggtaaanatcccgggtcgacttttccactaacaaacccaaaaaacccaactctgccttacgtaaagttgccagagtacgattaacctctggatttgaaatcactgcttatatacctggtattggccataatttacaagaacattctgtagtattagtaagaggaggaagggttaaggatttacccggtgtgagatatcgcattattcgaggaaccctagatgctgtcgcagtaaagaatcgtcaacaagggcgttctaaatatggggtcaaaaagccaaaaaaataagtgattttagcccttataaaaagaaaacggattcttgaacctctttcacgctcatgtcacgtcgaggtactgcagaaaaaagaactgcaaaatccgatccaatttttcgtaatcgattaagttaacatggtggttaaccgtattatgaaagacggaaaaaaatcattggcttatcaaattctctaaccgagccgtt

SEQ ID NO: 437491 - DNA, 519 bp, Triticum aestivum
  unsure (1)..(519): unsure at all n locations
ctgttctctggccgnccggtccggaatacccgggtcgacttttccactatcaaccccaaaaaacccaactctgccttacgtaaagttgccagagtacgattaacctctggatttgaaatcactgcttatatacctggtattggccataatttacaagaacattctgtagtattagtaagaggaggaagggttaaggatttacccggtgtgagatatcgcattattcgaggaaccctagatgctgtcgcagtaaagaatcgtcaacaagggcgttctagtgcgttgtagattcttatccaagacttgtatcatttgatgatgccatgtgaatcgctagaaacatgtgaagtgtatggctaacccaataacgaaagtttccgttaagggggactggagcaaggctaacatgagacaaaaagattcctccttcctaaaggagattccgattccggaactccctaaaatgtccaaagggttaatatggggaaattcccttcaaaagggtttccccttaacttg

SEQ ID NO: 437492 - DNA, 557 bp, Triticum aestivum
  unsure (1)..(557): unsure at all n locations
ggaactntacccncccgtntccggtgcacaaattcccgggaacgacggggtngctcaagctgttaganttgcgaagccagcaacctatgatcagattaaggctgctatcaaggaggagctgagggaaacctcaagggcattttgggttacgtggatgaggaccttgtttccactgactccagggtgacaacaggtccagcatctttgatgccaaggccgggattgctctgaacgacactttgtcaagcttgtctcctggtacgacaacgagtggggatacagcacccgtgtggtcacctcatccgtcacatgcacagctccaagtaaatgagaggcatgaagttactggggagagtggtttgccccagaggagtgttcaaagcctcttcttctgagaataaatttttgtatggaattatgtcagctaaaaaccttttattggatgtaccccgataggttggtctggccttaacattttggtggtattatgtacttgcttgaactaaatcatgagtcattttcacccacaaaaaataagatcaaaacggaaaaacaaa

SEQ ID NO: 437493 - DNA, 350 bp, Triticum aestivum
ggacccttgttacattgtcctcctctctcattctgttccttctggttagcatcagatcagatgtgaatatacttgacgagttgattaatttagaggcagctggtggccctgtactaaggtgtccgtttatatgttggtctgcttagctaggcacaatacgatgggaatgaccgggggttcccttcatagttttggatgaaaaatgttggctttgggatttctggcgtacagctgggcacaggatgagttccagaatgttatgtttatgtattggtgccagttttgttgacgttctgttaattccgttgcgttgatcgacggagcattaagcgcggcgggtgtgataatca

SEQ ID NO: 437494 - DNA, 433 bp, Triticum aestivum
cccttaggtttgcaggagcgcctagtgggtcatctgaaggaaaggacaaagacacctccaagccggacacggctactgtagctggcacggcataatggaaaacagtccctgcccttttgagggtcgtctcaaacatgcccctcgagacgtcggtgaagccgtagtttgtacaagactaacaacgccaatggcgtcgatgttatcggagccattcgtgtgctgtttactgtgtagcgcttgatgacttccttgctgtactccgcttggagccatttgagtgctgtttaccgtgcagcactcgaagacttccttgctgtactcgctggcagcatagtctgtttgctgcctggtctggggacacctgtgtactacagtacttcgtttccctttgtagtggtactacttcttagccatgtactcgtgtctgttcgag

SEQ ID NO: 437495 - DNA, 420 bp, Triticum aestivum
cgggtccacagggcgtcacacaatatcaatcaacaataattcttgccgaatgaaaagttccagtagttcactctataatcctagtattggttacatgcacacacatctcagtgtaatccaacaatatctacacagggtcttgtttttgtgctagtgacaagttgagttagttgcaatggtctagctgctaaacaagcagacctgagttcgacgatgtaccgatcaatcctttgatcccgagaatagtttttttagtggttgatcccgatcacgagaaaagtgaatcgagaaaactgatcgcaattgatgatgagaaaatcgaaaaccggtagggcctaaaaaccaaggattgacatacaagaaaggaaaatgcttgtggctggcaggccagccgaactttaagctggtcatgcacgaggt

SEQ ID NO: 437496 - DNA, 458 bp, Triticum aestivum
cccgggtcgacaagactagagtatatgcgcatccattcatccatccatccccactgccgtttcccccactatataaaccccctcccatccccaccactgctcacccctctcctctcctctcctctcctctcctccggcgtcttcctccccccaccccctctcctgatcaaagcgcacgccgagcaagctagctagcaggtggtggtgggcgcatacacatacgcttactgtacgcgacgcggctttgcttgtggccaccaccatgatgtcgtcgcccgcggagtccgagaccagcttcttcccggaccacctcgcggagcagcagcagcagcagccccccttcgccgagcaggagcagctgtgctacgtccactgcaacttctgcgacaccatcctcgcggtgggcgtgccgtgcagcagcctcttcaagacggtcgccgtgcgatgcggccactgcg

SEQ ID NO: 437497 - DNA, 434 bp, Triticum aestivum
atgagagggactcaaaatgagaaggtgtcctacccaagctcagtttaatgaggaaattcaggatgatcaagcagaagctgctctagtaaaaaaattgctcgaagagagtggcaatgacacgaagaggaagaaacaacctgtggatacgacgaatcagggtgccaataaaacaaagcagtttaaggcattgacgccaaaggagagcacgccaagaggagcgaaagaggttgacagttcttttactgaaggtggcttatcctccaaactgaaaaccaagctgacggttgatgcaaatgatatcattctggttaaaaagaaaaatgttcaaggaaaggatggtttacaggagaagaggcagggagcaaggggggacagtcctgtgtgtggagcttgtggtcagcttggacatatgcggaccaacaaactgtgcccca

SEQ ID NO: 437498 - DNA, 446 bp, Triticum aestivum
attcccgggatcacgggatggaggcaattatttgagatggttttaaatctgtgagggctttttagcaaaattacaaatgaactgagtctgcgacatgttttttgggacggagggagtatttcggtacggatggagtagatggtatgctagctcagaaaagaaaaagagtagatggtatgcaaacagccaaactaagtgcaaccaggctcgctgggaaaggctaccaaacacggccctaggggccacgtgcagccactcaatccacttgcttgttttcactcttgtgttttggtgggcactcgtgcggacgaagcatggaagctcccgacatgacctgggctcgcacccaacatcagacctctcgcgcccgcacgcacgccccaagacatggctggaggtggtgcccgcaccgcacgccccgacagcttcatccgacacgcgggaac

SEQ ID NO: 437499 - DNA, 395 bp, Triticum aestivum
agggaggaggaaaaggagggcgtgacatcagacggagattcgggcgatggagaagacgacgaggggggcggcggcgccgaagacatggacgacgacgacgattgatcgtagcggcctcatagcaccccttaccagttacctcaaacaagggtgggcgtccttttgaccccacagcattagctttcttgtacataggcactctccagtccaggatagttgagtggtggtgatagtggtgttggtgtaaatgtttgctgggggtaaaatgcattcatctgatactatggtttatatccctgtttttggccaaagaaagaaagaagacgacgatgagatcgagcggtttcgcgcgcttttcgaaacgcgcccgcccggtctcgttcgattcgcatgac

SEQ ID NO: 437500 - DNA, 424 bp, Triticum aestivum
aggctcaccggcctcggactgtcgccttccgagatcgcgcgactcgtcccgctcaccgccaacaacaaccactcccgcaacaaatccgtcgtctccaaggtggactactacctgcgcctcttcggctccttggaggaattcctccgggcattcaagcataaccacaatctcctctcacacaacctcgagacggtggtcaagcggaatgtcgggttgctgcaggagtgcacgctaggtgcttgcgacattgccaagcttgccatctctatgccaaggatgctcaccgccaacgtggaacaaatccgggggatggtggccggtgctgagcgtctaggtgtgcctcgcggctctgggatgttccggcaagccatgcggagtgttgcgttcgacagcgaggacaagatcgccgccaaaatggaataca

SEQ ID NO: 437501 - DNA, 429 bp, Triticum aestivum
  unsure (1)..(429): unsure at all n locations
aacacaggagaagcaaagagatcactggcccgctttcatgaaattcaaggaatcggaattagctcaggaacggtcgagaataaacaagatcaatgccgcgaaaaaggggcattaccataagctggggctaggtgtctacgtggtggcccggcctaagtgggataaggctgagcaacagatggtgtatgcaggggtcattccagttacattgagctggccccccgggtccaagacttgggtccatatgcatgggaggatattgggcccaaagacaggccaggttttggagaaaggcaagtcctaaaggagcccacctcaaaatacttgttgcaatagaagaggctcgaacggggggtgttcacgcccaacagagagaacgacgagcttatgggcgccctgngaaatcatgaacacccggggaagaacacg

SEQ ID NO: 437502 - DNA, 418 bp, Triticum aestivum
gggtccacggaaagtcgtcgaactgacgccggatcacagcgtcggcgtgctacatcacaacagcaagagcaccaagtcgtcgaagttgcatcgtagcaccaggtggctccctgcagcgatgtcggctcgtagcatccggcgtgatgcatcacaacagcaggagcaccaagtcatcgaagttgcatcgtaacaccaggtggctccctgcagcatcgcgcctcgacctccctattctgccgtgttgcagcacccaccatgagcggccgcggccaccggcaaccacgccttcgtgctgtgttgcagcactgatgggttgtggctccacctatggcctccctcttcttgctccgttgcactgttgacgttgagcggcggtcttctcgggcctcctcttcttgctgcgttgccgtgctgacgt

SEQ ID NO: 437503 - DNA, 436 bp, Triticum aestivum
  unsure (1)..(436): unsure at all n locations
gaatggggacgagagtgagaaggtggggcttggcgacgtgtgtggcgtccctagccagctccaggcggtcggcgacaagcaggaggtggcgtgcggtggctgcccacgcgtcagtcacgcccccaacatcccttctgtccagaaggaaggggatgactgccactgggccaccacagtgttgggcctgccagtggcctgctaggtaagtcaggtgggtttcccccccggccctattccggttttccgttttattttcctatttggtttcctaggtccctatttagtttaggcactaacccatttttataaatgttgaaaattattgtggatgctacctgagttattccggagacccacaattattttcaaaacatttcgagctataaaattatttatagattttatttgctccatttcanatataatatggattaag

SEQ ID NO: 437504 - DNA, 434 bp, Triticum aestivum
cgggtcgacaggctgaacagtcctattcctcttgatatacaatctggaatgctgggaggggggctgcatttgcacccatcatggagtgatgtctgcatgaaattttattgccacccaaggctcgtctctttttatctacatgttcattaccattgtgtacaataactacatgcataggaatagaacatagtgagattatgtaaggagtgcatgccgaaatctagagtgatggtagcaacctgtggacagacccaaaaccaatgatagcaggcagataatagccgccattaaaaatacagataatggctcctttactgtttgtttcccacccaacatgatagtcatagtatacacctagagattaactaggtagtaaacatataatattggttgttgcgccgatatctaccccacaaccaattaaaaacttaact

SEQ ID NO: 437505 - DNA, 395 bp, Triticum aestivum
  unsure (1)..(395): unsure at all n locations
gggaactcaagtatcataaaagcaaaggatagtcgattgtttacaccttcgttgtgtcaatgcaacccttctttgtattgtttagtaaacattttgatgtgcccagtgttgctcgcaaacataggatagttgattgaacaagctcattctaggtttctagtgcattgtttcttgataatagttgcttttgcttcaatgtatttgacagcatttcagtacacacccctttggttattgtcgcaactttctgttaataagaagatagagccaagagaatacagggtgctttgttcttagaggaaactttaatcctatattgttcactnnnnnnnnnnnnnnnnnnnnnnnnnnnnnnnnnnnnnnnnnnnnnnnnnnnnnnnnnnnnnnnnnnnnnn

SEQ ID NO: 437506 - DNA, 460 bp, Triticum aestivum
gtacagtccgggtccacagacccttgaaactctgcacttaaatggagccactagtgcccctcggttagctgaagacgatgaaaattccgttgctagcgacttgcattgctttgagttgaacatgcatggagatgctgtgcagactcatgaccttgcaggaactcgacgaacagtcgccgactgcatgtattcaccaatgagaagactggagttttccgatggtgtgtctgttgaaggctcgaggatctcaaccgcaaggcctcgttcagaaaaaggcaaggtgaagccaggcagcagcaaagcacagctgcatacttcggcaccagaaatcagctcccgcaactgtgacaggatcgatcctatagatgtgcagaatgaaacagtcatgacccaagtatctcgacggttgcatgatgacctgctgaagatcaaatcagaggctcctcagcatgcatttcta

SEQ ID NO: 437507 - DNA, 434 bp, Triticum aestivum
  unsure (1)..(434): unsure at all n locations
agggatctaagatttggtgcggaagagtgagagagagagagtgaaatgtgttctagggtttgttcaaagtgaatggtcaaccctctcccgtgggggaggagggctatatatagtgtgagcccaaatgtggccgttgtaatgcaagtacgggcaggccggacatccgggcaaggggccggacatccggcgtggcaaggcactaaaataccagacctaaaccagaggaaaaaacagaggggccggacatccggggccaagcccagacatccggcatatcaggaaagcccagacatccggcacatggccggacatccggcaagttcaccaaatcgaatagccctctagatagcacaagccggacgtccgacaagggagcccagaaatccggggcccatggagagacaggacatccggcatanagggccgaacatccg

SEQ ID NO: 437508 - DNA, 420 bp, Triticum aestivum
ggtacccgtggatccactatgcaatagaccactcgggcagtgttgccataggcgacacgcagagcccgcactgtcagatgggagagcgccaacggcctttggacgatgtcaggaacgggggacttgaaggatcaggaacacaaacatctgagccaccgtcagactcatcaccgtcggagccagcgttgtcaggcgcctgaatagcatgggatcagtccatcatcgcccgcagcttcacttcacttcagttcagctcagcatactagggagaccacggggaatgtgagagtactgacatatgacccaatcgcgacaaagccttgtgctgcaacaactgtggctagggataagagttcctcggctgcaacttccaataactaagctcgcgtaaaagtattagttagcgggtcttggttgaat

SEQ ID NO: 437509 - DNA, 445 bp, Triticum aestivum
agagcagctcccatgtctttaatgggccagttcttactcaagaggtcaacaatcccaactatacatatagtccaactcaaaaggttgtagaacctaattttgtagttggggccccgtcgtccactaggttatctgaagctggtggtcagttaaattgtgttgttttaccagattctcaggctaagaatgggcgttttgtaaagatgctggattcaatctcggctccccctgcttttgcagcagagttcccaggcaaatccttgtctggtgtgcaccctaacaccatcagcgtgtctaccgaagtaatcagcataggaagcttaactgttgcttctcgacaaggcaagtggtcgttccagaaggatgaagacatggagcttctcttctccacaggtttccagcctgataaccgcatacactgtggtggctgcaacacagtgactgc

SEQ ID NO: 437510 - DNA, 449 bp, Triticum aestivum
gggtccacggaggactcccaaccaacgtatagactaggcgacccccgcttcccgtcccctctctcctccacacgcctcgctccctctcccctcgtccgccgccgccgccgccaccatgggcaggggcaagttcaagggcaagccaaccggccgccgcaacttctccaccccggaggagatcgcttctggaacttcagggcgtccacgctcatttaagaagaatgtagctgaagcagaagaggaagaggaagaggtagaagaatctgaagaggaagaatccgaagacgacggtgaagagaagaaacataaaggaaccgaaggtgttattcaaattgaaaatccaaacctggtgaaagcaaagaatataaaagccaaagaagctgatcttggaaagacaactgaactctcgaggcgtgagagagacgagattgagaaacaaagatctcaag

SEQ ID NO: 437511 - DNA, 431 bp, Triticum aestivum
attgaggcgagaggatttatatttggccccgcgattgcactagccatcggtgccaagttcattccgttgcgcaagcctaagaaactcccaggtgaggtgatttctgagacctatgttctcgaatacggaactgattgtctggagatgcatgttggtgctatcgaaccccgtgagcgtgttttgatagttgatgatctggttgcaactggtgggacactttgtgctgctataaatcttctggaacgtgctggagctgatgtcgttgagtgtgcttgtctcattgggctccctaaatttaaggatttttacaagctcaacgggaagcctgtctatgtactggtggagtctctggaatatgaaaaataagaaaccggtgaccagggacgcaccatggcttcatcctgctgccgtagtattagggagtgggggag

SEQ ID NO: 437512 - DNA, 433 bp, Triticum aestivum
gtcggcgattggggaaggctcgccggctgggcgacagcgagctccgatgagtgcaacgaatggaagccaggcgtcggcttacaacaatgattcgggtgcctgtggcatgatggagagccgccgctgaaagctcagtgatggggcgagttggttgaggcgtcaatggcacctttgctcgtgaccgaggatggcacttgcacagctgaagtaagatgcaggccaacttcagcctccaaggcttccctggcaccctcctctgccactacgtgctcaacaacaaggtcttcgaagggttagggcttagggcaactcgatggtagccagtcggagtttgctaggttacatatgcaagtccttttgaaatctcaaacttctttgtggtgatgagcttctgctcatcttgattgattcctctacagttgaagggtgtgtc

SEQ ID NO: 437513 - DNA, 436 bp, Triticum aestivum
  unsure (1)..(436): unsure at all n locations
tgcctcgccaaaacctcagtgaagatcattggtgcagacaagtggtctttacagcataaatcaattcctgacaagttgcaaagcctgtacaatgatggctacaagttggtcatattcaccaatgagtcaaacattgagcgctggaagaataagcggcagcaagctgttgactcaaaagttggacgccttgacaactttattgagtgtgttaaagtccctattcaggttttcattgcgtgtggtactgggaaaggaaaaggcacaccggatgatctgtttcgcaaaccaaattcaggaatgtggtggttgatggcagagcatttcaattctggaattgccatcgacatgggaccaatctttctatgttggcgatgctgctgggagacagaatgatcatagtgacgcagatatagaattcgctaanggccacggtctg

SEQ ID NO: 437514 - DNA, 475 bp, Triticum aestivum
gcctgcagtacgtgtcgaagactccgggtcgaagggcgagagtgagactgtgagtgagagagaggtcatgcgcgtggggataaggtagggatagttgtagcgcgtttgccaaaacgcgctatagataatctgaatagcagtagcgctttgcatataaaccgctactgctaagtgtaactatacaaaaatatgtcaatgcaaaaatacattggccatcaatgatctttttgtgtacaatctaaattgtcaatatgagtcctcttcggtaggaaccggagaggactcatattgcagccacaaattttacacatagagttcagtgaagaccaactggttgtgatagtttcagaaataacatatttaaggtggtaaacaccctgttcacggagcgaggtgggactaaacttgtgggctgatcttagcagtagcagttttctactaagcgcgctgctgctaacttccatagcagtagcgc

SEQ ID NO: 437515 - DNA, 416 bp, Triticum aestivum
cgggtccacaggctggaggggaacgtgatgcgtgcgacagcgaccatgccggcaggcagggcagggttgaccgtggccatcatgatgtttccaagggagagcgaggcatccgccatcgcgtagctaaagaagtcgatgccccgggagaggttggccaccgttgccggtgtgaaagggccagatgagttcacttgtgtgttttacagtcttcagaattggagggtgagatgctacagcagtacagctgcaagttcccttgcttatccgtgaggctatatttcagaggtttgactgtgaccgaatttattcacaaagaagctaggcggtacttgtcagtatgcttgactaacaaatagcattatgatctggttttgttctctataccttattagttcatggatgtaacggctccatat

SEQ ID NO: 437516 - DNA, 449 bp, Triticum aestivum
ccgggtcgacgtacgtcaaggccacgatctaccgcctcttcggccgcgagaagcccgtccacgccgtcctcggcggcggcaagcctgctgatcttgttctatggaggaacatgaagatctcaggaggggtgcttgctggcgctacggccatctggctgctgttcgagatcatggagtaccatctgcacaccttggtgggccactgcctcatcctctccctggcaaccctcttcctctattccaatgtctgcattttcatccacaagtctcccccgaacatccctgaggtgaaaattccagaggacatgactgtaaacattgcactatcactgcggcatgagatctaccggggcttcttcaccttgagacagattggtcatggtcgtgatctgaagaaattcctcattgtgatcggagggctctgggttctttctgttcctgggagctgc

SEQ ID NO: 437517 - DNA, 440 bp, Triticum aestivum
cactgaataattaagtcggcctcgccagtattggcaaacactgagcatcggctataggagatccaccatggtgaacaccgttagacagatgccgggttttgccaacacaatgaattatgagggcgatatgcaaatatcgaccatgcgttcttatctcaaaagtgctcgggagtccgttcaccaaagtgtgaatagccgaaataagtcagatgtttcggctgaggataaattccatagcgttgattttgatggtacgatcgaagaatatggatgagacgcctcttggagtctcctatatgaaaattgtcgtccttgcctacgggctttacacttgtactcccttatttccactagcttcgcaataggagatgtgatgccgctcaatgactcgaggatttcccttaggaacccaggccatgttcctcttctccagctctttg

SEQ ID NO: 437518 - DNA, 419 bp, Triticum aestivum
cgggtcgacgggcggctctttggattaagcaggacaccagaagaccaaagtgcacaaaaaccagcgtataatcaatcacagatcaattccacgccaagcaactctcagatccctcgtggatcaccaagcaaatatttttggcgcaaccataacgctgccttttctgtatattgttcaactctgaacaaactcccgtagaaaagttgaaacctgcccattatatacgcgacacccacgctgaccagatacgtctcctaattggactcgtacagatccaaacagaccagacaaaatctagcaaccgacctatactccttttccgatttaaaagctcacgtacagactccaaagactacgtactaggactctccaattgcaaggaaactaaataaatattccggccatgttgataacatagt

SEQ ID NO: 437519 - DNA, 336 bp, Triticum aestivum
tgctgcaacaagcacggggtctccctcctgttcaccggcgtccgccacttcaggcactgagcctaacctgagtccgtatggtcatatcaccggtctactgtcagtcagtccgccgtgggaacttgcggatgtttgtcgcaataagacagacgcaggtgattctgagtccaactaggattagttgtatgacggtggcgaaagcattttgccacgtacgcaagtgaggacgcctaggtgttcgtcacattgctgagccagcagcggctgcgtaataacaaggtcggaaaaccaggggccatgtactagctaaagtaagcaaaaagtgtgtttgtattc

SEQ ID NO: 437520 - DNA, 446 bp, Triticum aestivum
accagtgccaagggcaagaccgacgtgcagtacatcatcctcgacagggtgatgcagcagccatcagcagcatcgtcaggaggggcatgctggatgagctcaagaagaccctggtcaggaggagcattcaggtaagaacagagcaacacaaattgtcatgtttctaagggaaatagagcatgctttgtgatatgaacaatggctgatttatcgttttgtaaacctaaactttccaacaaacttgcgagaaatttatattcagatggcacatggaaatttatattcagatgatatggctacttcatattagggagatattttcgagtggagagcatattaagttaccatcagttttcttgacataccaaattgatgttggaaccgtatgcattggtaatgttaattaattgccatggcaaaaatactttttaataaagtcgccatca

SEQ ID NO: 437521 - DNA, 471 bp, Triticum aestivum
acgcctgcccgtaccggttcgagagcccgggtccacgagttggttgagacacacaatgctagttgcacgtcacgtaaatcttttgagtacgggttgatgcaatgcttcatgtgcgtcacttatgtcatttgacgtttggattgcctgtttctcttcactgtattccagccgccatgttgtagtaatactctttttcgtcactgaaacgtgtgatatagtgggcacatcatttgtagtttgacttaacctcacatgcatgacatgtatcgatttagacagatgacacgaagcggtcactcacatggctagtcattagctccaacacattactggtaatcgctcatgatcagatgtccgactcaatgcaataattttgcgatatgtaagcggtgaaattatcctcatgcaagacgagtaattgtgacatgtttacctacctgtgttgacgtttgtgattcccgtaacatgcac

SEQ ID NO: 437522 - DNA, 438 bp, Triticum aestivum
  unsure (1)..(438): unsure at all n locations
cctgcccgtaccgtgtcttatactctcgggtccacgggtcaagcataagtcgtatagaagatacgatcaacatgaagatgttcatcgatgttgactagtccgtctcacgtgatgatcagacacggcctagttgactcggatcatgtttcacttagatgactggagggatgcctatctaagtgggagttcattatataatttgattagatgaacttaattatcatgaacttagtctaaaatctttacaatatgtcttgtagatcaaatggccaacgttgtcctcaacttcaacgcgttcctagagaaaaccaagctgaaagacgatggcagcaattatacgtactgggtccgaaactcgaggatcatcctcatagctgcaaagaaagattatgtcctaaaagcatcactangtgacacacctatcccacaggaccaagg

SEQ ID NO: 437523 - DNA, 447 bp, Triticum aestivum
cgggtccacgacagcatgcctaatgcacctacacccctgccctgggcgaggtggtccggccggatttgtgaccagccatgagcagagagagagagtgtgtggccgcctatgtcctgctgacatccagagagcatcacacactgaaggacacgcaccctactaaagcaagcgctgaggctcctgcttacatatatgctggagtgattttgttgtaccagcttcaacatcatgcgctcctacgtgtacccgcgagtgggtgtgagagaactagtgcgtgcgtgcaccgcttcgcttcgtgagagtacaatatacgagtgcccagtgaatgttcaccacaatactagtactataagtgtgtgacgtgtgagctaaaataaaacgtgcgcgacgtcgtttgttttttagaagttctgagggtacggtgtgaagacacatatgtgtgtgacg

SEQ ID NO: 437524 - DNA, 435 bp, Triticum aestivum
agatccctttgcttcaacgaagcgcaacgctgggcctcagcgaagtattgtagtaggtgggccgacgacccagtttaccacaggccttcatttcggccattttggccactggagcggcatcccatagaacaacacatgttcatcaatatgggcgtccgagtgggtttgtcggcaccgcacatgtttactgtccgagtaggcgggcacccggtttaaatgcatttacatagtggtccgtcccacctagtcacatcgttccggcattgaacaagtgcgtagaccaaggcgcagggcgataacgctcttggcatgtgtgcctgttcaatcttgggtagttgaccagtagattggttttttttcatttttgattaaaaagttagaattaccgatccaaagaaggagcaatgtttttggccatgacacccgccctgtttg

SEQ ID NO: 437525 - DNA, 418 bp, Triticum aestivum
acccttttcggcatcaggcctacattacaagaacattggtgtaaggaatgcttgaactatataccttgtgagtcgtcaagacgcctgttgatcaatgcagtatcatcctctgcaatatccagctttcgctgcagttcggccacttcgtatttcgggtagccgcaggaggagaggcagcctgtgttccaagttaagtcaaggttagtaactgagcatatctttttgatcctccgattgcttccttcggaaggcaatccgagtctcaggggctactgcatatacaacaggtgcattctatcaatatcattcaattggcaaaactacatcacaaacctcaaaacctcttagaaggctcgagaaggcctcgttcaatccgcttttcacggatagaacctttttgaccaccgtagccatcaag

SEQ ID NO: 437526 - DNA, 453 bp, Triticum aestivum
cgcctgccggtagtggtcctagcagcacgggtcgacgggaagcatcttagtggggcatataaggttgagaaggacaggctcctctctcttatacagaatctggacgtcagggccgaatccacgattttgatgcctgctgagctccaggttaaaactgaagcagagaagaggttgaaagaacttctccgtgaagaagaattgaagtgggctttgcgggctaaggttcgcaaagtagtccaaggggacgcaaatactcaattctttcatctgattgctaatggtaagcacagaaagaagagaatattccaacttgaacaagatgagggcactattttaggacaggataacctaaaaacatatataaccgaatattataggcagttatttggacctccgaaggacagttgtgtgtctctcgatgagtccagaattgacgatgtgcctcaactttcg

SEQ ID NO: 437527 - DNA, 377 bp, Triticum aestivum
ggcgaagaagaacatcttcaagcagaaggcgccggaggctgatgctgcggcgagcggctgctgttgatttcattcacgcacgctaatcccggacatctatctatgatctatctttatctttgtggaggatggatgaaaacgtttgttgtttgacgaagtgacatctaagcagctcgtttgtgtcgttttcttttgcttgtgttgctgtatatgatatgaatcagtgggtcagttgatgctcctcatgttgaatcatcacaaaacaaaacagagtaccttggcagctatataatgtacgtattattaagctctataaatttactcacgaggaatcaatctatttgtgctgaaaaaaaagaagaagagaaagaaaaagg

SEQ ID NO: 437528 - DNA, 346 bp, Triticum aestivum
aacgaaactcataagtaagctgcgaccgccctaaataattaacgtctttgtaatctttaacatcattttaatataaaaatctcacactttgttacatacttttcaggctgaacaatagtggcaggggttgttacgactggagtgcgcacaacattcaatggatagaccagtgaaacaatgaagcgctaataaatacagtacatcaacataggtaattttgaatttatgttactttatgtacatatacatgctgatgaaattatttcattatgtagaccgtacgatgaaactagaaatgatgcgtacaaccagtggtaccacaacaacacgtgtactcgctgtaggc

SEQ ID NO: 437529 - DNA, 412 bp, Triticum aestivum
  unsure (1)..(412): unsure at all n locations
tttaacacaccaagaaacctgtcaatcatcctttcttcagtggccacgtcatattgagagtatgtgacagatgattgaatttttgcaaatattctcccacagactgacttccttggaggagcgcgagaaattcatgctacttagtcgtcataattcccgcagggatgtgatatttctggaatcgttccttgaatcttgaccaggtaatttcttcatcagcaaaccacatggctttttcatattcccaccatatggcagcagcaccttcaagataatgtgttacatatggaaccttatccccttcatcagtttgagcaacctcaagcttctttcccatagttctcaaccaatcatctgcatccaagggatccaaannnaaannnnnnnnnnnaaaaaaaaaagcggccgctct

SEQ ID NO: 437530 - DNA, 418 bp, Triticum aestivum
agagacgaggaattccagtccttcgatttcaacacggacgtcattgcaaatcatggaggtccgacattggcccgcgggagtgtttactaatagcgaagtgttcatgtactcgcttttaaggccttgcatgaatgcaaaatcctctgacatgaatgaatgtgatgcacctgtatcaaataaaacagatgcaggtactgaatttacgaggagtgtacccatcacagtagcaggctggtcctgagcttcattgagatcaacgtggttggcatgaaaatgaccataagacatgtcattgttgtagcgaggctgggtgcttccacgaccagctgcgggaagggccagttgattcgggttcggattctgatagcagttcctggcaaggtgacctggttggccacacttgtagcacagaccatta

SEQ ID NO: 437531 - DNA, 517 bp, Triticum aestivum
atgactcatgacgacatagcgcatggtttcatgtcacggactatgtctcgcattgttccgaagttcacgcgacctatatcagacacaatccatgggatgtgagcatccggtgatagattgctcatgagacaaccaaccttgagacttggtgtcttgatatactggatagcattgcatgcattgcttgtgagttttatttgaaggttatatttaaagctgtagtgatggatctccttggtgagccacctactgtacagtgccatgtctatgacaagctatgcaacacaagcaatctagtcaaaatgctgtcgattctttttgaagtttgttactgaatgaatacctgaaccaaacggtcatctgcgtatcatttttgttgtgaatcttccccttctgctggaattggtcctgcttcagctgggtccaaccgaagggaactgcaccaacagtaccgacgaaagagaactgaagaaagcagcagcagcagcaaagatcccctgtacatactctcaatttt

SEQ ID NO: 437532 - DNA, 441 bp, Triticum aestivum
taggggaagatgaaatgaatgttgatactacctctgatgaggatgcggacatagatgatgaaatgactagataccaaagttctgattcacatgttgtggagaagaaatatacattgacaaaatgcagcgctgaacctgagaccaataaaacaaagcattctagtttgagttatgaggagcaacctgtttcttcggcaccaataagagcaagcaaaactgttgctgttccagttaaccccatttccgtggaacctccaaattttggaacaccaaaagatgttcatgttgtggagaagccggacatcacacccatgaatgctaatgttgcctctccagctattaatgtcaaagaattaggtcatggagaagtccaaaaggattcacagcggtctgcaacatctgtttctagttcatatagcactgcccatcccacagaagatg

SEQ ID NO: 437533 - DNA, 353 bp, Triticum aestivum
ggtccagaaatccgggtcgacagcgaggccaagaaggactcggggatccctcgcgtcggtagtgctgctgattggtctaaccacttctagctcgatgacccttgttgtaaactgccaatcttgacactgaatcgctgagacaccgcactgcatctgcattttatttttgagcagtttacaacgctctagacaatgctgtttcaataaatgtactgtctgatgggtaatgatactgctgtaagtttaccgatactcgaagaaactctgatgccaccacctggtggtagaggtttatcagcccccctatatatgtctcaataaataaagttcagtgaaggcttagtttgtttgtc

SEQ ID NO: 437534 - DNA, 403 bp, Triticum aestivum
tcgttgattacctccgtgggcagatcggcacttattttgcggaaaagcttctcacaattgtgagcgatatacttctccatttcaaaggaaaaggcaagtctgaatcagttggaccttcaaatagtgaacttgatcctcacttacataaaggcgatgctgcattggagttcattaaacatatatgtgctgttcttgctctcgatcagaatgttcagcatgatattctgagaatgcgaaagaacttgttaaagttggtccgtgtaaaggaatttgctccagaagcacagttccaagacccctgtgcctcattcattctcccgaacgtgatttgcagctattgcaacgattgccgggaccttgacctctgccgcgactcgacgctgcaaggccacgagtggaggtg

SEQ ID NO: 437535 - DNA, 237 bp, Triticum aestivum
atcacgcggtggtcgaggttctccgatgcgcgtacagggttcatcgagaatggcaagtccagcctgtgaactgatattgctaactgcgtcgctcaggggcacgtccgatcaacatgccgatcgtgcgaatactgcgtgtcaaattgtatcttatccacacacacaataatatggcacacttgtacgacatcatttgagatcgcttttcaagttgctcgagtgagaatttccagtcgg

SEQ ID NO: 437536 - DNA, 214 bp, Triticum aestivum
aggttggcggggtcactgttgttggcgggatatcggactgagtcaccggcgaggtgttgtgcgttgttgggcatcggggaggagagagagacggtttagggaaacttgcccacaggtactcaaatttgagcaggttcgaatggtttgaagagtttcctctcaaatttttgaggtctaaagggaaaaacataaattcaatcataaaaagtaaaaa

SEQ ID NO: 437537 - DNA, 437 bp, Triticum aestivum
caagggcagcagctgggcctccgcatccgcgccaagcagaagctgcccctcgcctacaacgcgctcctccaggctcacgcggagatcgacaccgccacccggaagcccagcctcctcgccgtcctcgcaaggcacttcttcccacagctgtcggccaacgtcggggccggggtccagctggagaggggcaacatcttcaggtacaccctccgggccaagaaggccgtctccttcaccgacgacggcctcctcggcctcaacatcaagggccgcctcctcgccgacaagaacttcaagccgaggaggaagagcggcgccgtcgagctcgcctggaccatactcgacttcagaaggggccaggacgtcaggatcaaggccggctacgagctataccgcaagatgccttatttccagctgatggagaacaactggacgct

SEQ ID NO: 437538 - DNA, 399 bp, Triticum aestivum
tcgaggggatgatgatccaggtctccaagaagagcaaggaggagtttctcagttaggcctgacagcggtagctgttggttgccgtgacctggagtacatagctgcctatgtatctgatatcaccaacggcgctctcgaatccatcgggaccttccgcaaaaatctctacgacttccggcttgtcctgctcgacagacaaaagctggtaaccgatctgccgctcgacaacggtgttcgagctctgttaaggagctgcaccaagctccggagatttgctctctacctgagacctggagggctctcagacacaggcctcgactacatcgggcattacagcggcaacatccagtacatgctactgggcaatgtcggcgattcggaccacgggttgatccgctt

SEQ ID NO: 437539 - DNA, 481 bp, Triticum aestivum
ggcgtcgacctgagcctctcacatcctttcgttgcgccgcgcgctgtccaactttcttcatcctcctcctcgcgaagctcccgtaccaacccgacctctggactcgacccccgcgggagcaacagctgtccaagaatccattccacccactgcgaaaagcgaccgagagagagaggaaccggaagcaagaagatggggcaggcgctgcgcaggctcttcgactccttcttctccaccaaggagatgagggttgtgatgcttggtttggattcagctggcaaaacaacaatcttgtataggctgcacctgggggaggttcttcaaactgtgcctacagtaggttttaatgtcgagaaggttcagtacaagaatgtggcatttactgtgtgggatgttggtggacaagaaaagctcagacaattatggacgatgtacctcagcaattctgatgcactgatctatgttgttgattctttggaca

SEQ ID NO: 437540 - DNA, 489 bp, Triticum aestivum
tataaaatatcttatggaaaataaagatgctaaacctagactcattaggtgggttcttttgctacaagaatttgacttacatatcattgatagaaaaggagctgagaaccccgtggctgataacttgtctaggcttgaaaatgtgcctgatgacccactacctattgatgatagttttcctgatgagcagttagctgcaataaatgttgctcatagcactccttggtttgctgactatgctaattatattgttgctaaatatataccacctagcttcacataccaacaaaagaaaaaattcttctatgatttaagacattacttttgggatgacccacatctttataaacaaggagtagatggtattattagacgttgtgtacctgagcatgaacagggacaaatcctatggaaatttcactccgaagcttatggagggcatcatgctggagatagaactgttcacaaggtattgcaatctggatttta

SEQ ID NO: 437541 - DNA, 395 bp, Triticum aestivum
gggccgacgggggccgccacgtctccggggaacggagccgccgccgcagctgccaaggaaagacgcatcctcccacatttccgggcaccgatatggctccgaccacgccgtgatcctgacctaatagggtgtattagaaagataagaagaggacatttgcggatgtgttttccactgttttgtgcgaatataatgtgctgtgtttgtagcgaggagacggagtacatgtgacgtccatcgacccctccgtagtccggctacctggccagggtttgtttgctcctgatgtaaagtggtgttccacgtttgattagtttcaccgaggcgtactattttctactacctgtgatcagacgttgtagtatagactttgctggtctgtgttgttagtcgtc

SEQ ID NO: 437542 - DNA, 450 bp, Triticum aestivum
acggtctactattccgggtcgacggggaaaacgaccaacccatggacgaggagtatgaggaggagcaggttccagattactcgagagcctattctggtggattgagaccccttgcccatgtcatgatggatgatgagaccgaggatgatgatgaagatgctgaaggggacggagagggtgacgaggaagaatatgacgtgaaccatgcttccgccgatgttgatgatgagatggacgaggatgatgatataggtgatgatggggatgatggtggtgatggagttgaggtgaatgcagatgaagatgaaggcgcgacctcatactcgtcagagtacagtgaataagagcttctgtctccggtgaccatttatgcaggtagtgatactggtggacaataataagccttttgcccctttttgggggcatagtgggctagacgtggaacgggga

SEQ ID NO: 437543 - DNA, 407 bp, Triticum aestivum
ctcgtcggtcgatacacgcctctagaatatctcgaaccatgtttcagcccttgtggctcttgcagtagctacccctttagaacaaagtccagaaattaaattcattgagaaaggcattagtggagagggaacaactacccgttattgggattgttgcagaccttcctgctcatggaggggaaacgtccatacacctagcggagtaccagttgcctcatgcgatagatctggagtgaacagggttgatgctaatgcaaaatcaggttgtgagggtggcggcagtgcttacatgtgcaacagtcaacaaccatgggcagtaaatagcactttggcatatggttttggtgccgcgtctttcagtaacggagttgatgtatccctatgttgcgcctgtttcttacttagct

SEQ ID NO: 437544 - DNA, 440 bp, Triticum aestivum
acccacgcgtccgcccacgcgtccgctcgtcaggagtcctcttaccccttcgtatcttttggacgattatccgtataatagtaggatttcgagagaggaaatacacgggcatatgcttcgcaactactcataacaggtgacatactactgacagatcacgttacacagccactttgtcgatgattttaatccggattttgtgccaagtgatatctcgtttgagaggtgttgaggatacctatgcaattataccaattttgtttgggtgtgagttgagtttcatgactcaatgacatacatactagaattttagtttcgcactttgaacctttattaatcggatgcgaaactgtaattttaatatttatttaattaattcatcgaatcaacataaacccatacaaaactacactcaccgggagaaaattcctccaccaaaa

SEQ ID NO: 437545 - DNA, 402 bp, Triticum aestivum
cgggtcgacggattcaagcaataccgctgccacaccatcaagaactgcacgcatgcctgccccaaggggctcaacccggcgaagcagatcgacacaataaagaagctgcagctcggagcctgagtgaggtctactaccccgtggagatgtcgaaagttgtaatcagcctggcatttggtttgttttggctccgtggtgacgaataatgggtggaaacgcaggatattccccgcttgacgattccgtgtagggcgtgaataattgctaccagattttattcttttcgtgctgtatctagtttggtggttctccgttgatcatcttttgatgtccatgcatcaattaattcataaacttttggaaaaaaaaaaaagaaaactcaaaaaaaaaagcggccgctct

SEQ ID NO: 437546 - DNA, 387 bp, Triticum aestivum
cggtcgaccatccgggtcgaccggcacaggacattcctgcaggctgtatgttcttgttctgtttctcactgtcttctattcctaattcaattgctcctcaaatagtttgtgtagactgtatggtttgatcattcacctgaagtgactttgttgcacttttgatgattttttctgtatctgaacttttgaattttgtacgaatgtgaaagtcttgcaaccaaaataaaagtacagggatcgtgtgcaattcaaaaaaaaaaataataaaaacaaaaaataaaaaaaaataaaaaaaaaaaaaagaacgggcgcacaaaaggataaaaaattaatataaacatacatatgaagtgataccacacacttagcgtcatcggaattcaattc

SEQ ID NO: 437547 - DNA, 405 bp, Triticum aestivum
cggtccatactaccgggactgtcgaagagctatatcttctccagcatcggcgaggagctcgcccacttcccgtcgcccccggctctccaatcgcagttctggctgtggttggtgacgtggcacctgggtctgttcatcgcgctcaccttcggccagatcgggttcaagggcacgaccgaggactacttccagaagtagcgagttaactagctttggttcgtgcatgtgcgtcgtccttgggctgctcaagggctgcttctgcgcatgcgtgttcaatgtaaaatctgccatgccttttggttttgtgcatgcgtgtggcttcgcaagccgtgtgattgctgtttgttaattacctcttccatggtaagcacaaaagagttcaacaaaaggacagcggcagctagg

SEQ ID NO: 437548 - DNA, 395 bp, Triticum aestivum
ccgggccgacgggaatcagacatgatgacatcgaggcgcacaacccagacggtctttcagtttagagcagcaatttctgtacatttttattgatatattcggttgattgatcacacttgctgatcaacgccaatctgatttgttctatgacctctgcatactttttacccctcagtaattcaggccattgtctcccatgtaagaacgagatgcttacagtaatgccctacagaaagtcagtgggcacataatcttggtgctcacgtgttggatatgttctgtggcgcggcaaagatagtgtgctgtcaagatttattgcaatcaacatgaatcagaatttaataaaaatctccaatgtgcttcacttaaatcatgagcactagacaattttgctc

SEQ ID NO: 437549 - DNA, 414 bp, Triticum aestivum
ggggatgatggcggagttgtcaatgttactccggaggaaatgagagccatcatcgaagttatagctgagacggggaagttctggcacgactggagttttctcaagagattgttgtctctccaattgatgcaggtcttgggtgaatattctgaggctcaaatggcgatccgagaggacgggcagcaacagaattccttgtttagagagacgcactcagagctgtttagccagctcaatgatgctctcttgaggtttgaagagggtcctccgtttacacttcaaaggctttgtgagattttgttggatccaaaaggaacatacacaaaattgtcgaagcttgctttggccttggagaagaacctcctagtcacgtctaccataactaagtgtactgaaccctaccctactgctcat

SEQ ID NO: 437550 - DNA, 527 bp, Triticum aestivum
acggtcgtagattccgggtcgacgggttggtggatcaaaaagaataacgtgaggatgaagatgatgatgaatatagtgaagcagtggctatggtatccgttgccatttccacaactccccgggtgtctctcttcgactcacccaacgagaacatcaccgccaagtgccgcatggccaaagccaccaacaaggtaacccccaacatcaaaaccaccatcattcctaatccttccttgacggttggctttgacgatggtgaggggtctaatgaggaggtaaatgaatttgagtccttcatgagtaagctcaagggcaaatccaagaagcacctcgttgctctcttggaacaacttggtgaagccaatgacatgatcgaggctcacgaagacaccatctctaagatggaaggtcatagtcgtgactgtgcgatgagatatcggatctctccaatgctcttggggaagagcgtgttcatcatttgactcttgaggagtcacacaatgatgaccatgccaaattaaagaaag

SEQ ID NO: 437551 - DNA, 493 bp, Triticum aestivum
cctggacatgaagcagatcaacaactggttcatcaaccagaggaagcgccactggaagccgtcggacgagatgcagttcgtgatgatggacgcgtaccacccacctaacgccgccttctacatggacggccacttcgtcaacgacagcgggctctacaggttcggctagctcggccaggcctcgtctcttaccgttaccggtgaccttggtcggcgccaatggcggcgaccgagtgccttatgctgaagcacttggggaccgacgaccgaagctagttaagttagcgtttgtgtgccgcatgcgagctggaaggaggccgcatgcttattttgtttatcatcactacttatacctacctacctatcatttatgcatggactcgatcgcctttgtgtgggtttgtagcgattgacgcgaccatgtggacaaccgcctgtttgctgcgacatgccttgctacgtgcatgcttgaataatttgccttctctctatc

SEQ ID NO: 437552 - DNA, 628 bp, Triticum aestivum
tcccgggtcgacggggatgacgacccctctctattgccagagcaaccaggcaagccccccctttgatcaccagatatcgcctactctcctctatactgcttgcattagagtagtgtagcatgttactgcttttcgatatcctattctgatgcatagcctatccttgctactactgttgatacctttacctgcaatcctaaatgcttagtataggatgctagatttccatcagtggccctacattcttgtccgtctgctgtgctatactatcgggccgtgatcacctgggcggtgatcacgggcatatacttatatactatatacatgacacatgtgatgactaaagtcgggtcggctcgtaggagtacccgcaagtggatctttgtggcggagcgacagggcaggttgagaccgcctacgtgagaggtgggcctggccctggtcagcgttcgcggatacttaacacgcttaacgagatcttggtatttgatctgagtctggccatttggtctatacgcactagccatctacgcgggagtagttatgggtatccggcgtcgtggtatcagccgaagccttcgtgacgtcagcgactgagtggcgcgcgccgttttggaccgctttgacg

SEQ ID NO: 437553 - DNA, 553 bp, Triticum aestivum
aggaggaaaagatgggggaggggctctccatgtcgcagaagctcaccctcgcctacgccgcgctcgtcggagctggtggcgtaatgggttacatgaagagcggaagccagatgtcattggctgcaggaggcatagcagccctggtgctgttcttcgttcacactcaacgtaccagtgagacccgtctttgcgtcagcgatcgggttaggtatatcggctgcactgctgtcagtcatggggtctcgcttcaagaagtccggaaagatattcccagccggcgtcgtgtccctcctttccttggtcatggtcggaggctacgcccatgggattatgcgtagctcgcatgcgtgacgcagtcagtgcggttaccatatgcacctccggacttagacttgcgagttctttttcttttttgtgtgtttcgaagcagttgtctgcatatcttctgtgttttcggacctttggtgactgactgactgtcgtgttacattgtcgttgaactcgaagttgatgttctagtgaactaagtgaagtatgtatgggcggatggtgg

SEQ ID NO: 437554 - DNA, 527 bp, Triticum aestivum
cgccaatatttgcccagagggatttcgggcgaggagagggtgtttggcgcccacagtgtatgaacgaggctgacaggtagggcgcttgtatcacgtgtgagtgaagttacaaacctgcccctattgaaaatatttgcgtacatcaatttctgccgaggcgagtgtgttttgccgcccaccgtgtatgaatggggactggagggagaaacagaggtctttcggacgagcttgaatcaaatgtgtttttccgcccatgtttgacgcccaccgtgtcggaatgggctcagaggcggtcgtgtcacgtctaattgaagttactaacctacccctatttagagcagtggaaatcgggccgatggattgtccgtctaatgggtagtcagtaatttccatctcccaaacacttggcttcaggcagccgatgtgggagtggacattttgccgtttctttcgaaatttgggacaataagcatccacgtttaccctggcaactaaattcgaatccattttatattcctatatgaatc

SEQ ID NO: 437555 - DNA, 390 bp, Triticum aestivum
tggtattgaggataaagaattgagaagaacactccagtcacttgcttgtggcaaagttagggttctccaaaagacaccaaaaggacgagatatagatgataaggacgaattcgtatttaatgaagattttagtgctcccctttatcgcataaaggtgaatgcaattcagatgaaggaaacagtagaagaaaacacaagcaccactgagagagtatttcaagatcgtcagtatcaggttgatgcagccatagttcgaattatgaagacgaggaaaactctcagccacacccttctaataactgagcttttccagcagctcaagttcccgattaagccagcggatatgaagaagagaatagagagcctaatcgacagggagtacctggagag

SEQ ID NO: 437556 - DNA, 441 bp, Triticum aestivum
cgggcttattagaagagcaagtgcaggggagggtctgggcaatgccttcttatcccatatacgtgctgttgatggaatctttcatgtcttgagagcatttgaagacacggaaatcacccatattgatgatacagttgatcctgttcgtgatttggaaactattactcaagaactgaggctcaaggatatagagtttgtgcaggctaaaattgatgaccttgagaaggcaatgaagaggagcaatgacaagcaacttaagatagaccatgaattatgtcagagggtcatgacacatctccaagacgggaaagacgtacgtttacgagaatggaaagctgctgaaattgagatcttgaatgcctttcagctgcttactgctaagccagttgtttatttggtgaacatgagtgaaaaggactacctgagaaaaaagaacaagtt

SEQ ID NO: 437557 - DNA, 456 bp, Triticum aestivum
gacgggggcatggataggcaactagtttgtgcgattgggtggtgatttgcctctcagctagcttgacgtccatcatctacccggtgaagacggatctgcgagtaacccaacatccatcagcgcttcattggagaagcagcaagcaaactgaagctgtagctagctctggaggccatgcatgcatcaatgtgcatttcattttactgcctgctgcttgttacccttttttgttgttattattattatttcggtgtagtaaaagggaatttttgctcctgctttagctcttgggtctggtcgtcggcgggtggttccattgcatcgcatgtagatgtcgtagtagtggtggtcaaagtaactcctctctctagtccctagtctagctgtagtggctctgaatgttttgtatcggaggaaggggccagttaaatgcactagcagtatttattttttctc

SEQ ID NO: 437558 - DNA, 544 bp, Triticum aestivum
tttcaattgacagcttattttcattcaagcaaacatgtccgacgcttggtagacatgaccgtgcattgtcccggggctgaactaaactgcgaggagattggtcattatgattcatggcttgaggatcttcatactgtcaagacaacttattttcctggacttaaaaatcttagtactcaaaacgtgcgaccgatagtgttcgtattgaactacggtcacatctatttaggaaagatggtaacatgtttactatttgtccgcggtgcatcttttgcatacattattttttaagctaaacttcattgctaagtatgttactatacgatgttcttcaacagggactcccgatgattgttgtgcctcagtggatcgagactaaaggtcgcatgtcaatggttagcttacgaccaagacatcctacattgcacatgagtgcatttaggatttctaaaaccgaggaatgcttaatagtgaaagactagagcagaattgtgaatgatcgcagagaagtactaaggggcaacaatcaaaagcccaacccaag

SEQ ID NO: 437559 - DNA, 397 bp, Triticum aestivum
gggtgctcaaagatgttgataagctcatcaggaggaaccgcaggaacgacctcttggtcgctggtgctggcttaagttttggagggattgtcatgtcatatttggctcgactcaccagtcgaagtgatgactggctcaccaagtgaaatgatgaatgtaaatctatcctgcactgcaagtttaactgtctatcctgcactgcatctttaactggccagttgtatgattcctggcttgtcttgtgtgagagcactctatatatgatgagggttctatgttcggtggaatctacttgtgatgagaatctaagttctgtgatggcatgtgagatgtaagagcactcatatatttatgtggatcctatatataaccgggtgatttatctattgtgttctgc

SEQ ID NO: 437560 - DNA, 730 bp, Triticum aestivum
aggtccaaagaattttgcagaccaaaactttattcaagaacctgtatagagttttcccctcagacccccggcatgtaaaatggcattggtgattatggtaccctctgtaagattacgtgttgatgtatcaatcaaattggattgaatacaattttttattcggtatcgcctttattcatagactatgttctgtcttttcagttgtctcatgcaaacacctcggcacaaattgctaggggctctatatggcaacataggtattgccaaacaaaagtccgaacaacttttcagcacaattcggcatcccgagcttggcactatatgcaccacctctgaatcatgtctttggtcaatagttgggttgcccggctcctgtgtttgctaccttacgttccgtttgttcggctagggtagtaaagggagaactactgcggttgtgtttatggttcatctagtcaagcacctcagtagagaaagccgaaaactgactgtcatgatgcggcgagagctggtcagccattcggtgacttactaaatctttaacgatttttccgttttaaacgaaggactatttttccagtcatatacataacgcatccgcattcgaatagccgcatacataccaggggctattttatagccccatcatcaaactcctatggataagtgagagccgtaaagccgtatagtccgattgcctggttcgacgcactaacacctccgtcacgga

SEQ ID NO: 437561 - DNA, 440 bp, Triticum aestivum
ttcggcgtcgacggggaccaaaaccaacgaccaaacgaaccctagactccgagcgcacgaggagagagagagggagatctccaaggtcgcggccatggcgatgcgtgcgctgtacaacgagatccgcgcgatgaaggtgcgcgaggtgccggcgtacctcaagccgcgcctcacctgggcgaacgtgaagaagagcaccgaccaggcggtggaccgctacatcgagaagtacatcgagaccagctcggctgacccgctcttccacatctgcttcggcggcatggccttctcgtacctcgtgggcctgccccaggagcgccgccacctcgagcacctcgagaagcacggcggccactagatccggatccgcctcgcgcaggagagcttatccacggttgattcaggatggtgttccccatttttcttccactgatgggcta

SEQ ID NO: 437562 - DNA, 470 bp, Triticum aestivum
ctgacgcacacagtactcgaggatttataccagaggtagatcacatgtaaaagtaacgtaaatactagtaccgcaaatccaaagtggcggaagcaccaaggttgtggattcccatcaacaccagcggcaaagttgagtgtacaaatcggaaccctaacgtatcacttactcgtcgtaagataatcctgcatcatgagacgttgcatccccatacgggtccgttcattgaatgtactggcaaattcacaccactagagaaaatgatgaacaaaggctatcactacatgcatatttggctggtggaaaagctctatggtcataaggtttttgcgaaaagccaatttttcccgactgcataggaataaattttatttaactatcatggtggttgttaaacattgagaatggttgacagcattcccaatcccaattaactaacatcattaaacccaacaacttaaattaaagta

SEQ ID NO: 437563 - DNA, 422 bp, Triticum aestivum
tttgatcgtgttggtgcagatatgtagatctagcattcaggattttaacatggattatcaactaaccatattcatgataccatttaggtctcacattcactcatatcaatggcataattaactagcgagcaataataatgaatctcagatgacaacatttttttcaaaagaatcatgatacagtatgatataatggtatctcgctagccctttctgagaccgcaaaacatacatacatagcacccgtgaagatcaaggactgactagacattataattcatggtatatgagatccagtcacactcatactcaatatcaattaatagcagtgcatacagatgatagtagtgctctctaaccggtgctttttataagagcatgatgacttagcaatacacgtaaatagatacgcccttcgcaga

SEQ ID NO: 437564 - DNA, 466 bp, Triticum aestivum
gacacatgggtgattgaatgcgtcttctcctcatcctcttctgccatgaagatctaatggtatcctgagtatgcatcaagaaatgaaagcaagtcacatccggccgtggagtcaacaatctggtcgatgcgcggcaagggaagtgggtctttgggacaagctttattgacatcggtaaagtcgatacaaagcctccatttcccgtttgccttgcgcacgactacagggttggccaaccacgtaggatggagcactcctctgacaaggcctgctgcttccaatttcttgatttcttctgcgatgaactcttggcgctccactgcctgcttcctgactttctgcttgacgggccgcgcatgaggacagacggcaacatggtgctcgattactttcctgggaacaccggggatgtccggccgttgccacgcaaatacatcgacgatcgcccgcatgaaagcaacgagcg

SEQ ID NO: 437565 - DNA, 437 bp, Triticum aestivum
  unsure (1)..(437): unsure at all n locations
ggtcaagatatcccgggtcgacggngattctaaggagctccaaggacgggatgcccaccatcatttctccagaccagtacaagaagaggttcaggaaggccatgtcaaagtacttcctgactgtccccgaccaatggtcaccttgaatcgtcgtcacttgatgcctactattatttgcctattcgagtgcaagatggggtgatggcgactgggaagcggcccattgttttctttctatttttttctttggttttgttagaatagtcgatcgatctgcgccttttgtatgttatttttgctcgcatcaggctggactgggatcgctggagagggcgtacggtaaaggttgcccccatccaggcagagcccatggatcgatatgtgtatattatatataacaatgctacactgtaacatgaaatgaaatgcagacgaat

SEQ ID NO: 437566 - DNA, 424 bp, Triticum aestivum
gcggcggacggcggcggcggggaggcgaacggcgtccagccgaacgtgaccatctacatcaataacctcaacgagaagatcaaactcgaagcacttaagaagtccctcaatgccgttttctcccagtttgggaaaatcattgaggtgcttgctttcaagactttgaagcataaagggcaggcatgggttgtgttcgaagatgttgcatcagcaactgaggctttgaagaggatgcaagattttcccttctatgacaaacccatgaaaattcaatatgccaagaccaagtcagatgttgtagcaaaagctgatggcactttcgtacctcgagaaaaaaggaagaggaatgatgagaaacctgagaagaagcagaagcgtgagcagcaccatgatgttaaccaggctggcgtgggcatgcatgcct

SEQ ID NO: 437567 - DNA, 428 bp, Triticum aestivum
gaccaaaaaaatacttaggatttcttattgtactgattgaactcgacaaattcttgccctgcataagcaaaggaaaagaactaggcctgtcgatactggattttaccatagttctagttctaaaaaagactgtcaatttcttcttaaaaatagggctctggcagggttctgggtagtggcccaaaccgataccaatagggatgagggatatatacttatgaatttcataattgattctattccgcaattcataactacgaaagtaagaggtcggaaatctttttatccaaaggtccctaaaggacattccttttttgctcctaagattgaagaagagattatacgaaagactatcaagacttcctaattatctgacactacctacactaaagtaaggtctactgactctgtctggaattagattggat

SEQ ID NO: 437568 - DNA, 417 bp, Triticum aestivum
cgggtcgaccgggatttattggaaagaattaaacgcaactctgaagattggggtcccggcgatggtaaggagtcaggtatgacaccttaagtttgattgtgttatatcttttatggataccgatgcttttcgtggttttagtgctaaatatggacttgactctgagatagtagcttctttctgcgaatctttcgctgctcatgttgatctccctaaggagaagtggtttaaatatcatcctcccactgaagttaaagtagttgcacctattacagttgaagaagagactattacttataacgttgatcctattgttcctactacttatgttgagaaaccacaccttatccctgttaggataaaggatcatgctagagcttcaactatggttcgtaagagtaatactagaacatatac

SEQ ID NO: 437569 - DNA, 414 bp, Triticum aestivum
ggtcgaccggccactagtttcgattgattatcctctatatgcctctgtgagagcaattgaaacaaaatctcaagtagatgatcagcagtggcttacttactgggtgctgtactcgtttatcactttgtttgagctcacttttgctccgatacttgaatggcttccattctggccctatggaaaactgttcttcaactgctggctagtcttcccctgcttcaatggtgctgcctatgtttacgagcattttgcgcggccaatgtttgtgaatcgccaaatagtcaacatctggtacgtcccaaggaaggagaagttgagtatacctgatgacgtactcccagcccgctgagaaatatattgaactaaatggaccagaagcatttgagaagctaattatcacgtctacaagtacaa

SEQ ID NO: 437570 - DNA, 433 bp, Triticum aestivum
cgggtcgaccggaccttcatactaagcaggcattcaaagaagatttccttctcttctttcgtaagagcgtagctggcaggaccttcatactgcttcggaggcatgccgtctttttcgtgcaaacgttgcaggtcctcccgtgcctcagctgtatcttttgtcttcccatacacgcccaagaagcctagcaggttcacgcaaaggttcttcgtcacgtgcatcacgtcgatcgaagagcggacctctaggtctttccagtagggtaggtcccaaaatatagatttcttcttccacatgggtgcgtgtcccccagcgtcactcggaacagctagtccgccgggaccctttccaaagattacgtgtaaatcattgaccatagcaagtacgtgatcaccggtacccatggcgggattcctccggtgatctgcctcgc

SEQ ID NO: 437571 - DNA, 421 bp, Triticum aestivum
cgggccgacgaaacacaataccagccgccgcaagttccagaaccaccagatccaatctagacaccatcacggagggcttcatcatcctcattggtgcctctccgatgatgcgtgagtagttcattgtagacctactggtccgtaggcagtagctagatggcttcctctatctcttttgattctcaatgcaatggtctcttggagatctatttgatgtaactctttttgtggtgtgtttgttgggatccaatgaactttgagtttatgatcagatctattttatccatgagagttatttgagctttgatcccttatatgcatggttacttctagcctcgtatttcttcttcgaatatttggtttagttaggccgactagatcaatttttcttgccatgggaagaggtgctttgtgatgggtt

SEQ ID NO: 437572 - DNA, 356 bp, Triticum aestivum
ccgggtcgacgggaaaagcgaaagaccatcatcgagcgacgacctgctctgggcgatggccacgctgggcttcgaggagtacatcgagcccctcaaggtttatctgcagaggcacagagagacggagggtgatcgtaagcgacctgggaagtctggtgatgtctctgttaaaaaggatgcactgggtcctcatggaggagcaagtggcacaagtgcgcaagggatgggccaacaagtagcatacaatccacgactggtttatttgcatcctcagtaccataatggggacatctcagactgaagatatggaccatctccgagactgctgctactctgctaagcgggttttcgtcatg

SEQ ID NO: 437573 - DNA, 436 bp, Triticum aestivum
tcctgcggcacggtcgagtattccgggtcgacggggcacggcgactccgccgaccagaagcctctccggcccttcttcgacgagtggccgcacgagaagaccgggagcaaggggtcgtggatggggctcgagggggagacgcagctctccatctccatcgccaacgaactccccatcaccaccacctcccgctaccaccatggtgaatgatcccaagtcccaacgagaagaccgagaacgaagctgcaacgagagaccatctccacgaagaacacgcacgtacggagcgaatccattggccctttcccggcgtgctactccagctgcatgccgccgagacctggaccagctagctatcttgactctcgaggcatgcatgcacagttcgagtgctgaagatcttgaaaggccggaacctactacgaccatcattttc

SEQ ID NO: 437574 - DNA, 378 bp, Triticum aestivum
cagatcgccgacatcttccgcgcattgcagaatgggttccacaagctcgacaagatcgaggatgccaaccgccggagcatgcagctcgaagagctcactgacaagatgcgggactgcggaaggcttatcaaggacttcgaccgagttgtcatggatgaggcgggcagtgttgatcccaacactgcgaaatttctgaacgagagaaagcagtcgctgatcaaggaattgaactcttgtgttgctctgaacaatgcaacatgcaagtgataataagcgagttgatctttttgatgccccaagtggtgaagatgcctttggtgaagaaaatgtcctgttagcatcagatatgtcaaaccagcagctaatgcagcatggata

SEQ ID NO: 437575 - DNA, 389 bp, Triticum aestivum
ggggagggccatgcgggccctacggatggtctgatacagcgcccgctgctcattcaggaagccaggatcatcggacacctatgagcaccttcgagagactgagacggcatgaaacggtaaggccgcgcttgggcgctctggtttgtttcacacctgtattaagatacaggtgtaatttactcgtcatcggaaacaacgcgtaaagtacaggcgtaatgaaaccgacggcccgaggtctgtaagtaagaccggcgggttacgcgtgtaatttgagagaccggtgtatattttactagtcgaaatcgaccaaccaagcgcttcgcccgagaccatctgcttttatttacaagcgtcagttttacatgcggttttggttgggaaacgacgat

SEQ ID NO: 437576 - DNA, 464 bp, Triticum aestivum
cgggtcgacactactcgccatcgtaactcgtatgaatctagggtagttctgcttcagtgaccgttcccctcattacagaagcacttactctcgggtttgggttctaccttgggtttcttcactagagcaccaactgatttgccgtttcatgaagtatcccttcttgcccttgcccttcttgaaactagtggtttcactaaccatcaacaattgatgctccttcttgatttctactttcgcgggatcaaacatcgcgaatagctcaaggatcatcatatctatccctgatatcttatagttcatcacgaagctctagtagcttggtggcagtgactctggagaaccatcactatctcatctggaagactaactcccactcgattcaattgattcttatacccagacaatctgagtacaagctcaacgattgagcttttctcccttagtttgtaggctaagaaaat

SEQ ID NO: 437577 - DNA, 405 bp, Triticum aestivum
gtccacgggtttaaatctggcatccccacacggctcacctcctggaaagagagcggccggacatggggtgattcggaggagctgcccggactccaagcctgcattcaaaagctagtggacaagaagctcaagcttgtcaacatagtccaggtcatgctcatccgccggattctcccgtgccaacaacagggcttgaacatgtgggagttcgatccggcgcagcaccagactttgagcaggctcttcgacactacgtatgaagatgtctggaaggtgttgtttaagggcgccaaggctcccgcatccgctaccgaagatcacggattcagctcgcagcgtccggctgttgaggtgagtgattttgtcctttacgggacgcttgttttccatagtttgactctatgc

SEQ ID NO: 437578 - DNA, 352 bp, Triticum aestivum
ccgggtcgacgggttcttgagagcctacagttgcatgctgtagcatagtacatgctgatccgagtgaaaagattttgcaacgagcctggcattctagctctgcttccatgattttttttgtgaaatcagactgagtttgcgtgcacaggggaataatttgctgtcatcgcttctgatttgatgataatcaagcctgcaagaggatgaccagttttaatggctgactattgttggttgggccatatgtatgttgctttcttgtatatctgatggtggcatttttctcgacgatatctgatggtggctgtatctagtgctgcaagtcaaatcatatattcatatgtaatgggca

SEQ ID NO: 437579 - DNA, 487 bp, Triticum aestivum
tatggtgggatgaagtagtcggaactgtgctgacgtgtccaaatatttgtatgcaggccttgatacatcctgcgcaggacagactgctcactgttcgtgaaagtgctcgattgcaacgttttcctgacagctacaggtttcgtggaacagtcacagacaggtatcgccagattggcaatgctgtggccgtacccgttggccgtgcacttgggtatgccttggccatggccaacctgaacaagactggaaatgatcccctcatggagctaccacccaagtttgcattctctcatatagaacgcactccttagtcacactggcaaaacctaacggttgacctttccacctgggtttaagtctcgtcatctccgttcattcgccgctagaaaagctgggtacctcatggtcgtgaatatcactaggacgcgtgaatatcgttacggcatgcgcattttaacataactcttgattcactttattgccatgt

SEQ ID NO: 437580 - DNA, 372 bp, Triticum aestivum
agaacaccaaaactgccacaacttttgcaaacggactccgaatttgatgaaaccaagtttgttggaaagctagcgacaagggctaacacaatcttgagagaaatatcaataagaagcaaaatataaaagtcccataagaaaatggtgagaacccttcctcggataagaccggtaaaacctccaacaccgaaaacatcatagaagacgcatgcgaactccgttttcgatgaactcaagcttgtcatcaagatgaccataagctctaagactcacaaagataaccaaacaagaaccaagaaacatgatgcaaggatgcaatggtttgagctctctactaccgacacgatcgagctaacaaacttagagcccccc

SEQ ID NO: 437581 - DNA, 474 bp, Triticum aestivum
tcgacgggtaccaccataacacaaagaaaaaagattataccttgctggtcaaattaacctcactgccggctgttcgtcaaagtgatggacaacgacctcgcgggcccacagaaagcgtcacacgcgagtaccgagtgtcgtgtaggacaaccaccgactgcatgtggccaaaacatgtatgtatgaaagggttgtgtaatgttctaaataacgatttcacgactctgatgtggcatcaaccggcctaacaaaacggccaacgcacacggtggctcacaactcgtagtgtactgcgagccacccgccaccccccagacgcacacgcccacacacacaccgcgaatccaccgcaactacgatgcatgttaatttaattatcccgtggtgaacatatgttaccaaaggagggacgttttaatttaaaaaaacagagatcgttaagaccgtttagtacatttgattgatttccaaggg

SEQ ID NO: 437582 - DNA, 510 bp, Triticum aestivum
ggggggacacagagttcttctcgcgccaggacccctacgtcatcgtcgagtacgccaacaccaagctccgcacccgcacctgcaccgatgggggaaggaacccgtccttcgacgagaagtttcatataccactcatcgaggggctccgcgagctgagtatcaacgtgtggaacagcaacacaatcaacaccgatgacttcattggcagctgcagggtgccgctgaacaaggtgctcacgagtggctacgatggttcctcgtggcccctccagacacgccatatgaagtctgctggggaagttaagcttatcatgcactttgatgtctcagcaatgaagaacacgatggcaggtaaaacttctggccagtacgctcctttcgccatacggcgcctcctcagcttcgtacccagcgcctttagcatatgctgcagcacccccaccgcacaaggcttatccagctcctagccacgcacaatatcgtgcctcctctgcgtactcaactccgcct

SEQ ID NO: 437583 - DNA, 413 bp, Triticum aestivum
  unsure (1)..(413): unsure at all n locations
cgggtcgaccggtaattccaacaatcgaacgtatattttgtgtatgttggatataaagatcgtttgggtaagaagtataacggaaagaaactatatgcttgtttgtttaggaagtgttgcatacttgtgtgagttgacgcgacacatcaaagtagtactgtactactactagtagtactccctccgatcctaatttctctgcgcataagtcgaggtgcagataccaaggaggtcttgcttgtgtctatacttggacaactcatccaactgcgcactangcagacgaagctcgtgtcgtgttggtgccgtgtgtctccatcttagcctccgtgttttagacttctcaatctcaaggccaaggagcaacatgaaacctatgatagagcaaatcggatggtttagaacactacaat

SEQ ID NO: 437584 - DNA, 415 bp, Triticum aestivum
gggctactactattgatcattttgttctgtacatatcaatgcgcattagaatgtgcagcttacaaatggtgaaatggccggagcgatgatgtggagatctttgtaaagaagacaagacaatggaatagtaagaaatacaaaatagggctactggtgaaatacatgagctgagaagccgcaaaatagcgctttgctggttaaccgggttaaaatatgttcccattgcctgtgggatggggctgaatgcggagactggttgtacttcatagggagtagtgtaagtttcactggtagcacctagctagctgagatttcacaattactaatattgagttttgaacatgttgactggattatattgatttcgtatcttgctaagagcctaagatgctaaggggcaaactttttgagggcc

SEQ ID NO: 437585 - DNA, 420 bp, Triticum aestivum
gggttacagtaagaattgtgcaagtgtttggcgaggagtatttgagatctcccactgctgaagacgccgcaaggccattggcgatgaacagcgcgcgcggctttcctggcatgcttggctcaatagattgcatgcattggagttggaagaactgtccaaaggcatggcatgggcaattccacggccaaaaagagggttccactataatccttgaagcggtggccgatcaggagacttggatttggcatgcattctttggaatgcctggatctttgactgacattaatgttgtcaaccggtcaccactgatgaataagattgcaaacggtgagttgccaccggtgcagtttgtagcaaatggccgtacgtacaactatggctagtatccagcggatggcatctatccaaaatggcaaacct

SEQ ID NO: 437586 - DNA, 227 bp, Triticum aestivum
ccaggcacccaagtaccccaagaaggccgccaagtcgcccaagaaggccgccaccccgaagaaagcttaagagagatgcgctctctgtcgtttaggatgtgtgctgtgtagtgtgcgtcggattagtgatgtgaaggtgttccgtctagttgttgatgtaccctgtgttgtgttcatgttcatggaagaaattcaggaaggagagcgagcggaggagagatagagaa

SEQ ID NO: 437587 - DNA, 379 bp, Triticum aestivum
attcacgggccgacggcggatccatctcctctgccgcctatctttaactacatgttgccgtgctgtcctgttttggaaacttgtgttgggttgttaagccgtcggtgctttctttgtcgctgttgaactgcatcattagtacttcgtggaacaagtatctcgcttaatttgttctgtcctgcccggtcctgtctttgctcttggtgatcggatcataaaaaaacaaaaaacatttctgaaaagacacaattaaaagatatatgccaaatgatactaacaactatcatggtactatgaactaaaaattaggaagagaacggatcaaatgtcaattaatacatgatcaaagggggccccctaaaggttcaaaccttattta

SEQ ID NO: 437588 - DNA, 343 bp, Triticum aestivum
gtccggacagcgttacctgccgctacacgaaacttcgcggtagatgggttcgtgccaaagccacactgaagacagccatcacttttgtaccttagcatcatcacgtaacttcgctactgtatcgtctctgagagcccccgtgccctcggacgtggatctgtcctcagcttatgatctccttggtcagttgcaagatcatcagtagtgtactacatctggcactgcgtgaactactgatcattcactacacgttccgtaccagtgcattgccctttcgcaccctgagagttggtgcaaccttcgctggtgcatcctgaccccacgatactattcgctcaatcag

SEQ ID NO: 437589 - DNA, 370 bp, Triticum aestivum
cgggtacggctgaggtggaggaggagcggcgccgaggctgatgcccaccattgaagaagaagctccgttttttggctggtccccgtattatatatatagtttatatattcgcaagactgttatatctgtcgtctcttgtccggagactggaagttgaactgggtttgctgctgctggcagtcgttttgggtcggaaccttgtagttaagttaatcccgtaccgtaccccctggatcttggatgttatcaggtaatagttatgatgattgtgcttggaactaaaaaaaaaaaaaaaaagaataaaaaaaaaaaagaaaaacagacgctcaataagatcaaaacttaagataatcgtgcaagctaaatcata

SEQ ID NO: 437590 - DNA, 402 bp, Triticum aestivum
ggacatgaggagcgcgaggaaggagaaggagggaggaaagaagagccaccatggttctttttgtccgatgttagactatgggctatctttttccataagccgtcttgcttattcattggggcttctaaactagttatgaaatagctaatttagaagtcctcaacaaatcctagagggcaacttatattttaagccggagagaggcatcttattttgtaagccactcaaaagaactagccctacaaataagatacacacatttacacacacacatatgctaaatgtcacttgtctgaagatgaatttggcactacttgattatgcgtagagcatcgacaacgcgacccgtcatggtgtcccatcggagatgtgcctggaacgagtcagagccaggcgagacat

SEQ ID NO: 437591 - DNA, 413 bp, Triticum aestivum
cgggtccaccggatggcgaaagggaggcctgagacggtgaagcacgagctgcacgagcacgagctcgtgctgatccgccgccccaggccatacggctgcgacgggtgcgaagagatgggcacctcctggtcctacaactgcgcggagtgcgacttcgatctgcacgccaagtgcgcgctgggtgaggagaagaagggagaggaggtgaatgggcaggagcatgccgctgccccagctgggtacgtgtgcgagggagacgtctgcaggaaggcctaggtagcgttagcgttgtgtgtgttccttgccagctgaagcgtgtctgaatcatgtcctgtgtggtgtgatgataaataaatcttgcatccgatgatttggcttgggaagtatttgtcgtggtgacatttatgtgcaag

SEQ ID NO: 437592 - DNA, 439 bp, Triticum aestivum
gggtccacggcgtagcttaaaggggttaaagcgaacaaaggacgcagagagtttttatactggttcggcccctcgcggtgaaggtaaaggcctaatccagtcgttgtggaattgctagggtttcgatgaccagggagcgaacccgctatgcctggctctcgagttgttgtttcttgtccctaaaccgccgtcgggtcgtccctttatatccacaggttgacgcccggcggtttacagaatcccgaggccggctcataaacgtgtccggctcggtttctacctttcctatcttacaacacaagttacatatgatgtggcggtttaggtctacaggccataacccgcctctgggccctgggccttcgtaaagcgccacactccttgtcctcatgggcttcaaatataaataactcattatggggataacccggactctcct

SEQ ID NO: 437593 - DNA, 461 bp, Triticum aestivum
ggtcttaggactcccgggtcgacggagtgtgaaaagttactttagaatcaacaatataagatctgaacttatcacaagcaaatacaactgctaaaagctctttttcagtagtggcataatttctctgtgcagtgtctacagtcttactagcatattgaataacatttaatttcttatcaactctctgccctagaacagcacctacagcataatcactagcatcacacataatttcaaaaggtaaattccaatcgggtggctgaacaataggtgcagagactaatgctttcttaagtatttcaaatgcttctacacaatcatcatcaaagacaaatggtatatatttttgcaataaattagtcaaaggccgagagatttttgagaagtccttaatgaacctcctgtaaaattcggcgcttgacaaaggaaaattcttatacctttgatgtccttgggacatg

SEQ ID NO: 437594 - DNA, 750 bp, Triticum aestivum
tacggctacgagagagagggagagaggaggaggacggagttcatgtgtgacaaagacacaaagagtgtgtgtgcgagaggtatcagcttaaaatgaggtgatagtgtgtgtgtgcacgatcgagagggcgtgtctcaagaagggacgaaaaatctacatagatacaaggagcgcgagagagacatgtacgcgatagtggaagcacgagtgtgcgggtgtgtaaacctatctggaggctagtcgatcaatgtttgtgagagaaatacgagtcgggggtgcgaaagcgagagttttgtgtgtgtgtgtgagagagagagagacggtagtcgggaaggggagtggaagcaggagttgtgtgtgtgtgtgagagaggggggagtttgtcctatcggtaaacaaatgaataatgtcagtttataactgggatggagacgaaaaggagcccgcaacaaatgttgtgtctgcaggagagagtaattttactggtatgagccatatctagagacatatagggtgtgtgagagaaccccatagagagaacgccacagtgaaacacgagtgcagactgtgtgtgtgccggtgaaaaagaaagctttacattgatgaatgtattcgaaacaccaggctagacaatcctggatagagcggcaatgaagaaacccacactggccgcgatgaatagtttgctgatcagtaccgaggccataagcttatagatactgtagacgtcagcctgaggggggccggtcc

SEQ ID NO: 437595 - DNA, 373 bp, Triticum aestivum
gagagcgaaatgccttcgtatcagatgatgaagaacacagacgattttgtttggagtgatgctgcgaactctacctttggggatctgaagaaacagcttgctgagccaccggttcttgctgctccaattgagaaagagccgctactgttgtatgtagccgctaactcacgggctgttagtgtggcaatcctggtggagcgcaaagaggttggcaatgaacagccagttcaatggccggtttattatgtgaatgaggtactgatcgaatctagacatacatatccacgttggcagaagctcgtgtacggggtgttcatggcaggccggaagctcaagcactattttcagggtcacccgatcacggtggttagct

SEQ ID NO: 437596 - DNA, 414 bp, Triticum aestivum
ggtcggaaataaagggtcgaccggaccctgatgcgcaacttgttcaccacccaacttaagggcccaactgcacattttaagccatccaagccccttccggcggaaggatttaaagaaccatgggaaccctacaagtcataacccaaagttggggttgaacaattttactacccgccttggccaccctgttgggaggatgatacaatctcttttccctcaagacccaaatttccgtggccgccgagttgtgaccttccacattcagcgagactatatatttttccgtcatcacaggtacacctttgaggagaaagaaaagaagatcgtttcaaaggacaagaaatcgaagggtgaaacgaaaactgagaagcaaataaactgccgccttcaagaatgccgccctcggttcaccct

SEQ ID NO: 437597 - DNA, 627 bp, Triticum aestivum
aaactcaccaaagtggctcactttctgcctatcaaagagtcaatcactgcagctcaattggcggaactctatacctctcgtattgtctctctacacggtattcctcaagtgatctcttcagaccgtggtagcatctttacatccaagttttgggattcttttcagaaggccatgggcactaacatccgcttcagcacagctttccatcctcaaactagtggtcaagtcgagcgtgtcaaccagattcttgaagatatgctcagggcttgtgtcatctccttcggcatgaaatgggaggattgtcttccttatgctgaattctcccacaacaacagttttcaagcaagttcgggcaaggccccattcgagattctgtatggcaggaagtgccgtacccctctcaactggtctgagaccggtgaacgccaacttcttggcaatgacttaatcacagaggctgaagaaatgtgtaaagtcatccgtgataatctcaaagccgcgcaatcgcgccagaagagctactatgatagtaagcaccgtgatttggctttcgagatcggagaccatgtctacctccgcgtctctccaatgaaaggcactcgtcgcttcggtatcaaagggaagcta

SEQ ID NO: 437598 - DNA, 388 bp, Triticum aestivum
ggaagttttggatgggggaccatgtggtggtgaatgtggacggtttggcgaacaccaaggatgatggctttgctgagaacccatctgaggctgtgtcggtggttgttgttgatatggcggaggatggtggcgaggatgacccactcatccaggctgcagagtgccgcatatgccaggaagaggacagcatcaagaatctcgagaagccatgtacgtgcaacggcagtctgaagtatgctcatagagcgtgtgtgcaacgctggtgcaatgagaaaggagacattacatgtgaaatttgccatgagcaatataagcctgggtacacagcaccaccacgtgttcaaccagatgagaccagcatagatataagtgggggattggacattac

SEQ ID NO: 437599 - DNA, 380 bp, Triticum aestivum
aagggtttattcaggtaaacagaatagcaattatttcttgacttaaatgaataaccatattgcaataaaaatgatccaatcagattatgctcaacgcatacaccgtataacatttattttaggtttaacactaatccagaaggtaaagggagtgtgcgttggtgatcttataaaccttggaattacttccaacacacatcatcatctcgccctcaactagtctttgtttattttgcaactcccgttttgagttactacttttagcaactgaaccagtatcacatactgaggggttttctataaacactagtaaagtacacatcagtaacatgtatatcagatatacctttgttcactttgccatctgtcatggttttgtc

SEQ ID NO: 437600 - DNA, 418 bp, Triticum aestivum
  unsure (1)..(418): unsure at all n locations
ggtccaanattaccgggtccacgggatggtccttataatgagcaaagacgcagcggacagaatcctcgaagagtcgagccctgcttaccgcatcggagaggtgatccagggcgagggggttcagtacgtctgagagcctacacaagcgtcgcaaaacttcgaatggttgacaactgcttagctgatgacgggcaacgctgcccacgttttttcgtaaccccgtgatctatcttacggggccaagtatcggagtagaagtagtttactccagtgagatttgacaaaaaaaaaacgggaataacgtttctcggttcgcgacaactcgctgcaaacagcttgtgttgctatcctgaacatcacttggcaattgatgtgaatgcctctagtgtgctgaattttcttgagaaatcatatctat

SEQ ID NO: 437601 - DNA, 403 bp, Triticum aestivum
atggcaaacatagcgacctcatccaagcatgcgggcgtgatttgcttctctgctgccaaatgctccttaagatcatggttatactgcgcaccatggcttagggcggcgcttaattggtggaggggtcggtgatttgggtggaaggtgttgcgccggcggtcggggcatgtgggatgtggaaggaggaggacgatgggggtcgggtgtggattacctgcctggatagacgaggccgagcagcatgagcgagggtcaccggcgaggaggcggcgctgcaggcggggagtgagggttgcaacttggggaggtacgcagaggtacgggaaatgtggcttttgataagggggggggcacggatgtagatatttctgcggaagccgaaacatttggaatcccttcagcg

SEQ ID NO: 437602 - DNA, 554 bp, Triticum aestivum
  unsure (1)..(554): unsure at all n locations
ggtttttgtgtttttnttttgaaaggaggggaggttgggggtgttggggggttaatttaattaggtgtntcatatattgtgttagctagctaattaatagagagaagtgtcctctcttatgtccgtgcttggacgctacgtactatatatacataagtgatcgagagaaccattcagtacagaagttcgtcatgcataccgagagaagtgatcgatcgacctctccttctccgagaggttggtcgaacaacaagttttcgtatcatgtatccgacgctactggctacatacatgtacaatatgtataagatctcttataattacaaacccctagctaggatttgaaatcaacttccacatggtattctccggctttactgatgacgtggtcaagaaagaatcccgccaattcctcttgaattgctttcatgcgatctcgttctaggagttcattccgcatctgccacgtctaatttgaagaaaggggctaattaatacatatatatgaatgaaactcaacaganatgatggtgtaataaaataaaaatgtgaat

SEQ ID NO: 437603 - DNA, 278 bp, Triticum aestivum
atcttgactcatcaaggcaagtgagagacgagaatcgttggctggaatatgcaagacgtctagtgtgcatcctacgtagccatggatgatagacccaccctctctgtttgggacgtggcgattttgtatagcagtgccgggtgccactgtgacttccatgttcggtttatttgaaaccatgcttgcgctcttgtgccacgcagcttgggatggggttgtcgtacatgacttgtcgctggtgacgcaccatttccacgttgatgaaagtgtgttacgac

SEQ ID NO: 437604 - DNA, 445 bp, Triticum aestivum
gggcacctatggattggctgcgaccactgtcagaggtggttccacggcaggtgtgtcggcgtgactgctgagatggcgagcggaatcgaggactacctgtgccctggttgcagctacaaagccacgacgaaagcttctgactcgatatagcggtgacgatgaaagcttccgactcgtgatggtggtgactggtgatgcttgaaccatgggaaatctctcatttcccaacgatgcatgctgtttgctccgctgttgcgttagcctggtgacatgttaagattttggctggtgatggggacatgaggtggatttgtacacctgcacgcaaacgaatatggtgctccatttttgaattacgacaccgtttcaaaacatttctcatctgagcggacatactgtaagtactacgtaatctatatgttggcagtattagcacgccatctgc

SEQ ID NO: 437605 - DNA, 465 bp, Triticum aestivum
cggggccagcctaaaaatgaaatccttcaactgaagactttggatattctgaagactttctgaagactttgaaagtgaagaaattggtgtgaccttgaagacttggtattcattcctggaacatgaagcgtgaagacttttgttttcgtagtttcattttctctttcttgagtcataggaaacaccgtactgttaaagggggtcgaggaaatactaaggaaaaatttccatgtgatgctcaactcaaaatcctacacctaccaatcccttcgagtgaagcctttggaaatctcatacagtccagtcactttcttcagtgacagagacgaagttcttctggtctctgaggaatttgttctgactgaggagttaggaattcgccagtgcggattgcctacaccgtgagggacgtgatacccctgaggaatttgagagtcaaatttccgaccattgctgtgctgcgcg

SEQ ID NO: 437606 - DNA, 482 bp, Triticum aestivum
ttccggcgtccacgggaaaataaagaacacatttatcttcaatacatttgtattttgccagatcttcaacgagttcaatgcgcgtaagcctgaggaaaggaatgtcttcgaaggagtaacaaagaaccacctcttcatgggaatagtttgtgtaactaccgtgtttcagatactaatagttgaattcctgggaaagttctttaaaattgtgagacttaactggagtctatggttagtttcagttgccattggcgtcgtaagctggcctttggcttatctagggaaattcattcctgttcctgtaagacctctccaggcctatttcaagccttgttggaaatcatcacgccgagacgaagacgaaggcaggcagggctaaaaaggctgcagatcacctagtgtaaatagacacgggtcagccgaagaacaggaacccgttacgcctctcccagtggaacagagctgccgattacctctactac

SEQ ID NO: 437607 - DNA, 471 bp, Triticum aestivum
cggggccgacgggagattacctgcccccgcggcgtttgtcagaccaaaggcccccgatggcacgcctgagatcaggcctcttgacatggcaaagcgccctcgtcgcaaccgcaggtcgccagctcttagggctgcattccaggagacaaccatctcgcccgctaatttggtgctcccattgttcatccacgaaggggaagaggatgctccaattggcgccatgcccgggtgctttaggcttggatggcagcatgggcttcttgatgaggtgtataaggcacgcgatgttggtgttaacagctttgtgctctttccaaaggttccggatgcattgaagtctccaacaggagttgaagcatacaatgacaatggtttggttccacgaacaattcgcctgctcaaggataagttccctgatattattgtttacacggatgttgcttctggaccgttatcatctgatggacatga

SEQ ID NO: 437608 - DNA, 393 bp, Triticum aestivum
aattcccgggccgacgggaagtgggggacgcctgctccagtggaaaatggggtggccaacggaagggcgccagcatcatccgctacaagcaatctagccacaggtcaaaaccaaagatagatgcatgttgagttaattgtaaaatcttgtcatccgcatgttggtgtcagcaaggttattgttgcgtttcttgggaatgtaagattagctgtgtgtttatgttgtagttgtgagatgattacccttgctcctatgagtgatgatcttgtgatagggataaagttcataagaaggttcgccttaggttttgggcagtttaaacggaatagccggaccctgtaggtatcttgatgcataatgatggtaatcagttcatgggtttgcatccaaaaa

SEQ ID NO: 437609 - DNA, 690 bp, Triticum aestivum
ccttccccaaaaatgattcaatccttggaaaaaaaattcttccctccggatcggaggcaaaaggtaaacccaaaatttcccttagggtaccctatgaaaacgcatttttctaacttgggttcaagcttttcaggttgaggtttcttgacataagcatcgcatccccaaactttcagaaacgacagcttaggtttctttccaaactataattcatacggtgtcgtctcaacggatttcgacggagccctatttaaagtgaatgcggcagtctctaaagcatagccccaaaatgatagcggtacatcggtaagagacatcatagatcgcaccatatccaacacagtgcgattacgacgttcggacacaccatttcgctgaggtgttccaggcggcgtgagttgtgaaacgattccacattttcttaagtgtgccccaaactcgtgactcaagtattctcctccacgatctgatcgtagaaacttgattttcctgtcacgttgattttcaacctcactctgaaattccttgaacttttcaaaggtttcagacttgtgtttcactaagtagatatacccatacctacttaaatcatcagtgagggtgagaacataacgatagccaccgcgagcctcagcactcatcggatcgcacacatcagtatgtatgatttccaagaagtccgttgcgcgc

SEQ ID NO: 437610 - DNA, 451 bp, Triticum aestivum
ggggcgccacgtggcacgacccaacagaggcccattcctgtgaaaaggccggcccgtttgacttggtcaaaagctggcgggccggcccatggaaagcctgttaacggcctgttcgcatatagcccatttacagcccgctaacccaaggcccgttacgccctatccgaattaggcccagtagcgtcatctgggccatccaatatgattccagcccattttcacttctggcccatgtatggcccatgacgtctttcggcccatatgaggccctatgtaactcttggcccattaccggcccgtgctgaaactggcccgtaatgaacagtgtatcactttacacccattaacggcccgtggtgaaactggcccgtaatgaaccgtgtatcactttatacccattaacggcccgtaatccaattggccgtttcaagcccatgttacctttcggcct

SEQ ID NO: 437611 - DNA, 562 bp, Triticum aestivum
  unsure (1)..(562): unsure at all n locations
tcgacgggaggtcatccccattgcggcgaagaagtgtgcaatctccgactgggaacccctctcctccaaggttgcgaatagggtctgcccgtggaggggccgctttatgtcttcaggggcaagactaatcctaaccaactccagcctctcttctctgcccatgtttaccatgggcctgttcttgctggcggacggggtgcactctaagttggacaccccgcggtcccgtttcttttgggaaggagcgggaccaaaacggaaataccatatggttaaatggcaggccgtgtgccgtcctaaagcccgagggggccttgggatcatcaactccaagctgatgaacatcgcactaatgtgcaagtggatctggaaaatgtctcaaggagagactggcctttggatcgacctcctccgtgcgaaatatttcccgcagggggatttctttgacacggcttctcgagggtcacctttttggaactccattcaatcncttaaacccttctttgccaggggtgcgaagtttggggttaacaatgggcgctccacgcgtttctggcttgat

SEQ ID NO: 437612 - DNA, 421 bp, Triticum aestivum
ttcccgagtccacgggcgcttgcacaggataccaagcgagtgtttaggatcccacacagggcatttcttgacatgctcctagcacaccttgggctaatcaccggctcagtatgatcgtgttgtacatgaggacggcaagatctgtgtgaccatctttttcaacacctgtacattggatcttggaggaccaatcagtatgaacgcgtcgtgtcatcattcctcctggtctacattatgcccagacatgcaaagttgtggatcgtctgtaagctaccatttgctttcgtatgtcctatgtctgtgatatttgctactaaacctattgtgctacgtgctttctatgttcgtacattgttaggtggctccttattgtgtgcatacaaccaaaccttacttctgaatgattcttcattagtttttt

SEQ ID NO: 437613 - DNA, 524 bp, Triticum aestivum
gacgataacaactatgtgccccctgaatacggtgatgctgcaacgggggaagctgctgaagatcaagaggaaccagacgatgtgcccaatgatgctgcaacgggggaagctgctgaagatcatgaggaaccagacgatgtgcccgatgatgatgatctccgccgggtcattgtcgatgcaagggcgcagtgcgagagtcaaaaggagaagctgaaggtcgatcgcatgttagaggatcacaaaaaaagggctgtaccccaattgcgaagatggcaacacaaagctcgggaccgtactggaattgctgcagtggaaggcagagaatgctgtgcctgacaaaggatttgagaagctactgaaaatattgaagaagaagcttccaaaggataacgaattgcccgacagtatgtatgcagcaaagaaggtcgtatgccctctaggattggagctgcagaagatacatgcatgccctaatgactgcatcctctaacgcgatacgtacgaggatttgaaccatgcccggt

SEQ ID NO: 437614 - DNA, 283 bp, Triticum aestivum
ggagagtgagaagctgtactgcttgctccctttcggcatttcctttttaccaccactactgcttaagtgtcttttgaagtttgtttgaagtgttcctcgtcgttgtggatcagtatttggagtttgagtcagttgagtgtgttgcgtctgatgtatttcaaagcacagtggatcagtatttggagtttgagtcagttgagtgtgttgcgtctgatgtatttcaaagcaccgtgtgatggtagactcgttatattatgaaatgatgtggttttttgtctgttat

SEQ ID NO: 437615 - DNA, 513 bp, Triticum aestivum
  unsure (1)..(513): unsure at all n locations
tatatacaatggagcctgcctacctggtttgtcgctcttcagagtatctcacacaaggctgcggtggcctctctctctctcaccgttgatcactgatccggccgcatcccgtccgccgagggaaagggagtgcggtgccctctctctctctcaccgttggtcactgatccggccgcatcccgtccgccgggggacagggaggaagtgcatcgtttctccgttcgacggtgccgaggcagcacgtcccgatctgcggtacacgccgttctctctgaccaagctccggcgcggcagggcctacgccacctgctcgcagattccgcccgccgccgctcacctagttacatcccgacgacctccaggtatcccctacggccttgctccactgcccgtcttcccacgtcgctgcatgtggatcttccatagttctttgcccaaaacgtagctcgtccggcgtactttccatattgcattctcgtcctcacaccattttagacanacacaaccgtgttg

SEQ ID NO: 437616 - DNA, 433 bp, Triticum aestivum
ggagagagagacagagagagagagagagtccactgcccgtcttcccctgagctccttcgccggcgaacgcccaaagccccgcatggagatcctccaacaaggcactatgttgatgttcccggggatggatcttacgaaaatggatcctccaactcttacccttcttggagcagcttgttgtgtaatgttgtcgatgcatttcacagtacagctggtatcacagcatcttttctattggaaaaatcccaaagagcagaaggctatactcattatagtgctgatgcctccgttatatgctataacttcctttgctggtcttctggatattaagggaagcaaaacgttttttacatgtttggagtctgttaaagaatgctatgaagcactggttattgctaagcttctggcattgatgtacagctacttaaatata

SEQ ID NO: 437617 - DNA, 280 bp, Triticum aestivum
tggaacgatgaactaatcatatttacaaaaacaacagaggtcgagttcatatcagcttttctcatctcagccagtccatcatatatcgttaaaattgcctttcacttgcatgaccgaacgatgcggataataataatagtgcacatgcattggactaagctggaatctgtaagcattcaataaacaggagaagacaaggcaatatgggttctttttgggttttctcctatcgacccctagtaaaaagagtcaaaaaaagaaaaaaaaaaaaagcggccgc

SEQ ID NO: 437618 - DNA, 416 bp, Triticum aestivum
aagtgcgactaggacgagtgggcgtggatcgttagttcatcggaagtagttctagttttcttcactggtacgttaaataaagagttttgtttcgtacttacacaatttaaaatgattgttatggagagaacgagaaaaccactccactatatattagtcgtatacacgagagtactatatggacgcagcttcattgacttagtgcacctgcctttgggtgtatgacaggtgggcccaaaatgtggctggcccacctgtcatacagccaaaggcaggtgcagtgaaggcaccggagctcagtccgtactacactatatatgcagtacactatataagcgggagcctcagcgcttgttcgctagggtttgcactctccacactctcaccgtactatacacgctggaggctcagtgttc

SEQ ID NO: 437619 - DNA, 422 bp, Triticum aestivum
ttcgggggtcgacgggataaggaagttgaagacaaaggctgacctgcttgaagttttgagatcggaggtgtcatgtaaaagcatgacagtagcacaattttttaacaaagaccaatgttcggattggcacaggaatcgtgatttagttcgcacgtcaagattttacgtaagttttttggcttttcgagcttatggcactttttagctatgtgtatgtttttgtttcaggaagcgggtcaccttcatgaccgaggtgcccagcattataattcagctcggaagatctcttccgacccacaactcgatatctttcccacctaactacacctcggcgttaacaatacacacgccacatcgggagttcgggactagttcctgagcagtgtaatgccagacgcatttaaagcattggcaacattaac

SEQ ID NO: 437620 - DNA, 452 bp, Triticum aestivum
  unsure (1)..(452): unsure at all n locations
gggtcgacgaccacaacgggaccagcaccactgctaactcaatgatggttgctatctctcacaatatatatattacttttatatgtgtcaactttaaggtttatatgtttgggctgtgcttttgtgatattttggactgtcagtgctttgactgatttttaccatctcaatgtttggcattcatgtaggttttagcattacttctgcgctcgtggtatgttaccttgccatgtcgcatcattagtttgtcttgtatgtggtgtttgtccatctgctgagttgtatacttattactcgttttgtctgcgccttttcttcattgagtttacctagtgatgctgttctgttgccctctatgctgttgtttgtttgctctgctggttcaatacacctgttgcccctaaatanatcaattatatatgcaatttgagtctgccacttttttgtttcct

SEQ ID NO: 437621 - DNA, 403 bp, Triticum aestivum
cgggtcgacgggggaagtaatgggccatacgggaaaggatagaggggcctcaaggagtggccacgcgcaccccaagggctggtccgaattggactaggagggggtggcgccccccaccttccttctcccctcttcctccttccctccttctcctactaggaataggaaagaggaggggaatcctacttggactggggagtcctagtaggattccccacacctggcgtgccccccttgggccggccacctcttccctcccctcctttatatacgtggccagggggcaccccatagacacacaagttaatccttacccgtgtgcggtgcccccttccatagttttccacctcggtcatatcatcctagtgcttacgcgaatccccgcgccggtaacttcatcatc

SEQ ID NO: 437622 - DNA, 434 bp, Triticum aestivum
ggagtttagtagcatctcctaaagtgatttccataaacgtgcctcccgcacccgaacctaaaagatttctagaaccataattcaatcccggcataaaatttttgtataatcatccacacattcaaaccatgagtagggcacctacgtagcattagtttcatcctctcccaagcttgtgcaacatgttcatgatcaggttgtttaaagttcataatatcgtttctaagagagatgatcttagcgggaggaaaatacttagagataaaagcatctttgcacttgttccatgaatcaatactatttttaggcaaagacgaaaaccaagttttagcacgatctctaagtgaaaaaggaaatagcttcaatttaacgatatcattatcgacatcttttttcttttgcatatcacataaatcaatgaagctattcagatg

SEQ ID NO: 437623 - DNA, 436 bp, Triticum aestivum
ggtccagaaatccgggtcgacggtgtgcggcagtgaagaaggggaacacgggaggaaggaggcggtcacaccgttaggcgtaccatgcgcaatcgtcgcgctgtagcacttccctttgataatccatgccaagcaaggttcatgcacctggtgagacatgttgtagtaccctgtaattctacaaccacacatcctgattttatgtacgactactaggtcaaacaaaaagaaatgggttgggtcatctcttaagaacatctttgcttgtttagtggatgaggggactcgattttccaagccaaacatcttgtcacgaattattataggcttatgaggacgacttgagaaatcagaatgtcaagctgaacagctgataacataggtcacttattagaggctacagccaaggaaaagggttgaagtggcaacatcaaca

SEQ ID NO: 437624 - DNA, 405 bp, Triticum aestivum
gatccataatatatgagactgtaaggttggttctcttccagtatgttatcatggttgagattaggactaatttttagtacaagagaagaatgctatgttggtggttgttctcaaaaaaaaaaaaaaaaaaaaaaaaaaaaaaaaaaaaaaaaaaaaaaaaaaaaaaaaaaaaaaaaaaaaaaaaaaaaaaaaaaaaaaaaaaaaaaaataaaaaaaaaaaaaaaaaaaaaaaaaaaaaaagggcccctcaaaaggttcaaaccttattttgccataaaggcaaattaaaaacccttcaaaagggaccccaaaattaatttaatgggccatcttttaaaaatgtcgtaatgggaaaaaccctgaggtacccaaagtaaacccccttgaaaaaaatcccctttttac

SEQ ID NO: 437625 - DNA, 629 bp, Triticum aestivum
taccggactaaaaattccgggtcgacggggcggactggtccgagtgaagagaaaaaaagccatacggaactcaaaatattttccggagatattcattttcctgaagaggcggataagatattaggtggctgtttgataccgccagaaagacaaaaaaaagattctaaggaatcaaaaaaaaggaaaaattgggtctatgttcaacggaaaaaaaattctcaagagcaaggaaaagtattttgtttccgttcgccctacagtggcatatgaaatggacgaaggaagaaatttagcaacacttttcccgcaggatctcttgcaagaagaaaataatctccaaattcgacttgtcaattttatttctcatgaaaatagcaagttaactcaaagaatttatcacacaaatagtcaatttgttagaacttgcttagtagtgaattgggaacaagaagaaaaagaaaaggctggtgcttcccttgttgaggtaagagcaaatgatcttattcgcgatttcctaagaattgagttagtcaagtccactatttcgtatacacgaaaaaggtatgataggacaagtgcaggaccgattccccataataggttagatcgcgccaatatcaattcttttt

SEQ ID NO: 437626 - DNA, 396 bp, Triticum aestivum
ggggggctgggggcatccaggaaccgcgtgctatcgcctgcatcttgggcggagcccaggccccagcctcgcagcgtatctaaaagcagtttgctcgtgaagtgaatgcagccctccccaagctcgaagccacacgcccgctcagatggtcccagtgccccatcacgttcaactcggcagatcagctcaagtgcgcagctaccgctggcgccctcccatgctttgctccccaatcatcagcagcgtgcaacttaccaagaccatcatcgacgtgcgaagcgagaacgacaaggccaaagccggcgtgccgcagctcccctccaacgcaaagaacaagatcatcgctctgccgctcgaagaacttccgaacaagataaagggaatggtgcgcaatgc
